United States Patent Application Publication US 2014/0199313 A1 - sequence listing, part 3

SEQ ID NO: 3463 - DNA, 1413 bp, Bacillus cereus
  CDS (1)..(1413)
atgacgaaagaagaatttataaaacaaaaaagagagagaaagacatttttagtaatcactgaagaagaaggagatagcattacgccaatttctttatatagacgtatgaaagggaagaagaaattcttattagaaagttcacagcttcatcaagataaaggacgctattcctacttagggtgtaatccgtatggggaagtgaaaagtatcggtacggaagtggaacgaacgatttacggccgggcagaaaagttgcaaggtaacgtactagaagtgttagaagaaatcgcgtcagctcaagtagacagtccatttccgttttgcggaggagcagttggttatattggctatgacgttattcggcaatatgaaaacattggagcaaatttacacgatccattgaatattccagaggtacaccttttactgtaccgtgagtttatcgtgtatgaccacttacgccaaaagttgtcgtttgtatatgtatgcagggaagatgatgcagcagattatgaagaagtatacgaaaggctgcgagtatacaaagaggaagtgctacagggagaagaagcggaagtaactgaaataagatcaacattatcattcacttcttctataacggaaaaagaattttgcgtaatggtagaaacggcgaaagaacacattcgagccggggacatattccaagtcgtattatcccagcgtttacaaagtgaatgtattggtgatccattcgcgttataccgaaaactacgaattgccaatccatcaccatatatgttttatatcgattttcaagattatgttgtaatcggttcttcgccagaaagtttgctatcggtaagagaggataaagtgatgacaaatccaattgctggtacgaggccgagagggaagacaaagcaggaagatacggaaattgaaaaagagctgttagaaaatgagaaagagcgagcagagcatatgatgcttgtagatcttgggcgaaatgatattggtagagtgagtgaaatcggctcagttacgatagataaatatatgaaagtagaaaaatattctcacgttatgcacattgtatctgaagtttacggaacattgcgaaaacaaatgagcggatttgatgcattagcgcattgcttaccggcggggacggtatcaggtgctccgaaaattagagcgatggaaattataaatgagctagagaatgaaaaaagaaatgtgtacgccggtgcagttggatacgttagtttttcagggaatcttgatatggcgcttgccattcgaacaatggtcgtgaaagatgagaaagcatacgttcaggcaggagcggggattgtctacgattcagacccagttgctgaatatgaagaaacattaaataaagcgagagcgctcttggaggtaatgaaatga

SEQ ID NO: 3464 - protein, 470 aa, Bacillus cereus
MTKEEFIKQKRERKTFLVITEEEGDSITPISLYRRMKGKKKFLLESSQLHQDKGRYSYLGCNPYGEVKSIGTEVERTIYGRAEKLQGNVLEVLEEIASAQVDSPFPFCGGAVGYIGYDVIRQYENIGANLHDPLNIPEVHLLLYREFIVYDHLRQKLSFVYVCREDDAADYEEVYERLRVYKEEVLQGEEAEVTEIRSTLSFTSSITEKEFCVMVETAKEHIRAGDIFQVVLSQRLQSECIGDPFALYRKLRIANPSPYMFYIDFQDYVVIGSSPESLLSVREDKVMTNPIAGTRPRGKTKQEDTEIEKELLENEKERAEHMMLVDLGRNDIGRVSEIGSVTIDKYMKVEKYSHVMHIVSEVYGTLRKQMSGFDALAHCLPAGTVSGAPKIRAMEIINELENEKRNVYAGAVGYVSFSGNLDMALAIRTMVVKDEKAYVQAGAGIVYDSDPVAEYEETLNKARALLEVMK

SEQ ID NO: 3465 - DNA, 1443 bp, Bacillus cereus
  CDS (1)..(1443)
atggttaatataagagggtgggataaaagaagacggggtgttgatatgcaacgaagaaaatctttagcgctttctattccatatcagttagatttctttaagcaatataaatttctttctaaggataaaccgcaacatattttgttagagagtgggcgtggcggtcgttataacattgtggggttaaacccggtagcggtaatccgagggaagggtaaaacattacatataagtgaaagtggtaaggaaacaataaagcaaggaaacccattagatttaatgcaggaatatatggagcgatggaaaacggattataatccggaatacccgccttttcaaggtggtgcaattggctactttagttatgattgcatccgttatattgaaaaacttccttctcttgccgaggatgatattaatatacctgacatattctttttattatttgatgatgtgtttgtgtatgatcaagaagaaaaagtattatggattattacacattatgcagataagcatgaagaggcaaaagaacgattaaatgaatggaaggttctttggacgacagaagcgccagaagtgactatgccgtttgcgtgccctgaaaagaaaagtgaagcagttgcttttactgaagaaggttttatgaaggcagttgaatgtattcaagaatatattggtgctggtgatgtgttccaagtgaacttgtcaacaagacaagaaagaacgttacaaacacatccactagaaatttatacaagtcttcgcgaaattaatccatctccatatatgggttacttggagcttggggattttcaaattgttagtggatcgccggagttgctaattaagaaacaaggagctgaagtaagtacaagaccaattgctggaacgagatctagaggggcgaatgagcaagaggatgaagagttggcaagagaattaattgagaatgaaaaggaacgagcagagcatgtcatgcttgtagatttagagcgaaatgatttagggcgtgtttgtaaatatggcactgtagaagtagatgaatttatggtaattgagaaatactcacacgttatgcatattgtttctaatgtgcgtggtgaggtggaagaagataaagatgcttttgatttagtgaaggctgtattccctggggggacaattactggtgccccgaaaatacgtacgatggaaattattgaagaactagaacctgttcgccgagggatttatacaggttcaattggttggattggttattctggagatacagaattgaatattgtgattaggacacttcttgctaaagatggaaaagcacatgtacaagcgggagcgggaattgtaattgattcaaatccggaaaatgaatataaagagtcgttaaaaaaggcgattgctttatggcgtgcaaaagaacgtagcgaagaaacggttaggtga

SEQ ID NO: 3466 - protein, 480 aa, Bacillus cereus
MVNIRGWDKRRRGVDMQRRKSLALSIPYQLDFFKQYKFLSKDKPQHILLESGRGGRYNIVGLNPVAVIRGKGKTLHISESGKETIKQGNPLDLMQEYMERWKTDYNPEYPPFQGGAIGYFSYDCIRYIEKLPSLAEDDINIPDIFFLLFDDVFVYDQEEKVLWIITHYADKHEEAKERLNEWKVLWTTEAPEVTMPFACPEKKSEAVAFTEEGFMKAVECIQEYIGAGDVFQVNLSTRQERTLQTHPLEIYTSLREINPSPYMGYLELGDFQIVSGSPELLIKKQGAEVSTRPIAGTRSRGANEQEDEELARELIENEKERAEHVMLVDLERNDLGRVCKYGTVEVDEFMVIEKYSHVMHIVSNVRGEVEEDKDAFDLVKAVFPGGTITGAPKIRTMEIIEELEPVRRGIYTGSIGWIGYSGDTELNIVIRTLLAKDGKAHVQAGAGIVIDSNPENEYKESLKKAIALWRAKERSEETVR

SEQ ID NO: 3467 - DNA, 1476 bp, Geobacter sulfurreducens
  CDS (1)..(1476)
atgtatttccccgatgtggatacctttcgcgccctgggcgcccggggtaacctgattcccgtctgccgcgagatcatggcggatatggacaccccggtcagtgccttccgcaagctcgacgacggccgctatgccttcctcctggagagtatcgaggggggcgaaaagtgggcccgctataccttcctcggcgccagcccctccacggtcatccggagccggggcaccaccgtcgagatcatcaccaacggcgagacccgttccgtgacgacggacgaccccctcggctttgtccgcgatttcctggcccggttccggcccgtggagatccccgggcttccccgcttcttcggcggcgccgtggggtacctcggctacgacatggtccgccaattcgagcggcttcccacggacaaacccgccgtgatcggcgcctgggactcctgtttcctcatcaccgacaccatcgtgattttcgacaatatgcgccagaagatcacggtggtctccaatgcccacctggacgagggcgtttccgtcgaagcggcctatgccgacgccgttgcccggatcgacgggatcattgcccggctcaaggcgccgctgccggcccagcccgccgcggccgcggcccggaaggtctccttttcttccaacatcacccgggaggcgttcgaggatgccgtggaacgggccaaggagtacgtccgggccggcgacatcatccaggtggtcctgtcccagcgtttttccggcgagctcaccgtggaccctctcgacatctaccgggtattgcggaccctgaacccgtcgccctacatgtttttcctccgcctggacgataccctggtggtgggcgcctctcccgaagtcatggtgcgtcgggaggggaaccgggtggagctccgccccatcgccggcacccgcccccggggcgccacgccggaacaggacgagcaactggcggaggaactcctggccgaccccaaggagcgggccgagcacgtgatgctcgtggacctggggcgcaacgacctggggcgggtctgccgcaccggcaccgtgaaggtgtcggagctcatggtgatcgagcgctactcccacgtgatgcacatcgtttccaacgtccagggcgaactggccgaggggagggacgccttcgacgtggtgcgggccaccttcccggccggcaccctctccggcgcccccaaggtgcgggccatggagatcatcgacgagctggagccggtgcgccgggaagtctacggcggcgccgtgggctacttctccttctccggcaccatggacctggccatcgccatccgcactctcgtcatccgcgacggcgtggtgcacctccaggccggggccggcatcgtggccgactctgatccggcctccgagtaccaggagacggtcaacaaggccatggccgtggtaaaggccatcgagaccgcggaaaaggggttggactga

SEQ ID NO: 3468 - protein, 491 aa, Geobacter sulfurreducens
MYFPDVDTFRALGARGNLIPVCREIMADMDTPVSAFRKLDDGRYAFLLESIEGGEKWARYTFLGASPSTVIRSRGTTVEIITNGETRSVTTDDPLGFVRDFLARFRPVEIPGLPRFFGGAVGYLGYDMVRQFERLPTDKPAVIGAWDSCFLITDTIVIFDNMRQKITVVSNAHLDEGVSVEAAYADAVARIDGIIARLKAPLPAQPAAAAARKVSFSSNITREAFEDAVERAKEYVRAGDIIQVVLSQRFSGELTVDPLDIYRVLRTLNPSPYMFFLRLDDTLVVGASPEVMVRREGNRVELRPIAGTRPRGATPEQDEQLAEELLADPKERAEHVMLVDLGRNDLGRVCRTGTVKVSELMVIERYSHVMHIVSNVQGELAEGRDAFDVVRATFPAGTLSGAPKVRAMEIIDELEPVRREVYGGAVGYFSFSGTMDLAIAIRTLVIRDGVVHLQAGAGIVADSDPASEYQETVNKAMAVVKAIETAEKGLD

SEQ ID NO: 3469 - DNA, 1506 bp, Ashbya gossypii
  CDS (1)..(1506)
atgactgtcacaatcgaaccagggctagaagcactcgagcggtgcatcgcagataacgggccggatgtcacactatacccgctctacacgtatgtgtccgccgaggagaccacgccgcatgcggcctacttaaagctggcacgtctcgatcagaacgatcacgtgccatcgtttctgctggagtccgcgaagactatggacgcgatggcgcggttctcctatatgggggtagcaccacgtcgggttctgcgcactaatgcaggtgccggggacccactgaagttgctggccgcggagttcgcgcggctgcgacccgcacgcaacacgccacagctaccagggctgagcggcggggcggtgggctacgtatcgtacgattgcgtgcgctactttgagccaaggacggctcgggagctagcggacccgctggagctgcctgaagcggctctcatgctgtttgacacggtagttgcgtacgaccacgtgtttcaccgcttccaggtggtacacaacatgcagctggagccgggaatagacctgaatgcggcatacgaggacgcaactagggccattcgcgatgtggtagataggctgacggcgagcacgcccgtgccgcagccgccgcagccgcctatccggcgggggcaggagttcagctccaatgtgggacaacagggctacgaagagtacgtgcggcgcctcaaggaacacatatacgcaggcgacatcattcaggctgtgccatcgcagcgggttgcgcggccgacgtcgctccacccgtttaacatttaccgccagctacgcatggttaacccgtcgccgtacatgttctacctggattatggagacttccaggtcgtgggtgcgtcgccagagctgctgtgcaaagtagacgaagagcggcaggtcgtcacgcatccgattgcgggcaccattcgccgtggcgtcacgcagcaggaggacgatgcacttgctgcagagcttcgcaactccgttaaggaccgagctgagcatgtcatgcttgtggacctggcgcggaacgacatcaaccgggtgtgtgacccactgacgactcgggtggacaaactaatgacggtgcagcgcttttcacacgtacagcacctggtctctgaggtaactggcaccctgcgcccagacaaggaccgttttgatgccttccgctctgtgttccctgctggcactgtctctggcgcccccaaagtccgcgctatggagctcatcggagagttggagggcgagcgtaggggcgtctacgccggagctgtaggccactggtcttacgatggtgtttcgatggatacctgtatcgcactgcgcactatggtctacaagggcggtgtggcctatctacaggctggcggcggaattgtccacgattccgatccatacgacgaatatgtcgagacgatgaacaaaatgctggcgaatcacaacacaattctgcaggcagaggaactgtgggctgaaaagataggcagtgaatag

SEQ ID NO: 3470 - protein, 501 aa, Ashbya gossypii
MTVTIEPGLEALERCIADNGPDVTLYPLYTYVSAEETTPHAAYLKLARLDQNDHVPSFLLESAKTMDAMARFSYMGVAPRRVLRTNAGAGDPLKLLAAEFARLRPARNTPQLPGLSGGAVGYVSYDCVRYFEPRTARELADPLELPEAALMLFDTVVAYDHVFHRFQVVHNMQLEPGIDLNAAYEDATRAIRDVVDRLTASTPVPQPPQPPIRRGQEFSSNVGQQGYEEYVRRLKEHIYAGDIIQAVPSQRVARPTSLHPFNIYRQLRMVNPSPYMFYLDYGDFQVVGASPELLCKVDEERQVVTHPIAGTIRRGVTQQEDDALAAELRNSVKDRAEHVMLVDLARNDINRVCDPLTTRVDKLMTVQRFSHVQHLVSEVTGTLRPDKDRFDAFRSVFPAGTVSGAPKVRAMELIGELEGERRGVYAGAVGHWSYDGVSMDTCIALRTMVYKGGVAYLQAGGGIVHDSDPYDEYVETMNKMLANHNTILQAEELWAEKIGSE

SEQ ID NO: 3471 - DNA, 1362 bp, Shigella flexneri
  CDS (1)..(1362)
atgaagacgttatctcccactgtgattactttaccctggcgtcaggacgccgctgaattttatttctcccgcttaagccacctgccgtgggcgatgcttttacactccggctatgccgatcatccgtatagccgctttgatattgtggtcgccgatccgatttgcactttaaccactttaggtaaagaaaccgttgttagtgaaagcgaaaaacgcacaacgaccactgatgacccgctacaggtgctccagcaggtgctggatcgcgcagacattcgcccaacgcataacgaagatttgccatttcagggcggcgcactggggttgtttggctacgatctgggccgccgttttgagtcactgccagaaattgcggaacaagatatcgttctgccggatatggcagtgggtatctacgattgggcgctcattgtcgaccaccagcgtcatacagtttctttgctgagtcataatgatgtcaatgcccgtcgggcctggctggaaagccagcaattctcgccgcaggaagatttcacgctcacttccgactggcaatccaatatgacccacgagcagtacggcgaaaaatttcgccaggtacaggaatatctgcacagcggtgattgctatcaggtgaatctcgcccagcgttttcatgcgacctattctggcgatgaatggcaggcattccttcagcttaatcaggccaaccgcgcgccatttagcgcttttttacgtcttgaacagggtgcaattttaagcctttcgccagagcggtttattctttgtgataatagtgaaatccagacccgcccgattaaaggcacgctaccacgcctgcccgatcctcaggaagatagcaaacaagcagaaaaactggcgaactcagcgaaagatcgtgccgaaaatctgatgattgtcgatttaatgcgtaatgatatcggtcgtgttgccgtagccggttcggtaaaagtaccagagctcttcgtggtggaacccttccctgccgtgcatcatctggtcagcactataacggcgcgactaccagaacagttacacgccagcgatctgctgcgcgcagcttttcctggtggctcaataaccggggctccgaaagtacgggctatggaaattatcgacgaactggaaccgcagcgacgtaatgcctggtgcggcagcattggctatttgagcttttgcggcaacatggataccagcattactatccgcacgctgactgccattaacggacaaatatactgctctgcgggcggtggaattgtcgccgatagccaggaagaagcggaatatcaggaaacttttgataaagttaataagatattacgccaactggagaagtaa

SEQ ID NO: 3472 - protein, 453 aa, Shigella flexneri
MKTLSPTVITLPWRQDAAEFYFSRLSHLPWAMLLHSGYADHPYSRFDIVVADPICTLTTLGKETVVSESEKRTTTTDDPLQVLQQVLDRADIRPTHNEDLPFQGGALGLFGYDLGRRFESLPEIAEQDIVLPDMAVGIYDWALIVDHQRHTVSLLSHNDVNARRAWLESQQFSPQEDFTLTSDWQSNMTHEQYGEKFRQVQEYLHSGDCYQVNLAQRFHATYSGDEWQAFLQLNQANRAPFSAFLRLEQGAILSLSPERFILCDNSEIQTRPIKGTLPRLPDPQEDSKQAEKLANSAKDRAENLMIVDLMRNDIGRVAVAGSVKVPELFVVEPFPAVHHLVSTITARLPEQLHASDLLRAAFPGGSITGAPKVRAMEIIDELEPQRRNAWCGSIGYLSFCGNMDTSITIRTLTAINGQIYCSAGGGIVADSQEEAEYQETFDKVNKILRQLEK

SEQ ID NO: 3473 - DNA, 1419 bp, Wolinella succinogenes
  CDS (1)..(1419)
atggagatttttcacgaaagactcttggtcgatcagctcactcccgtctctctttatgcaaaattgcgtgaattttttgcgggagagaccacttttttgttcgagagcgccgctagcagtagcgagagtgggactcacagctttatcatcatcggagccaaagaagaggtaatctctcaagggggcgagagtttttatatcgattctaaagggaatcgccaaaacatcggcgctaatcccttcccttttctcaaagagtactacgcgagattggaccagagtgcctatcgggcgtggggtgaagagaatggcgtgggatttgtggatggatttatcggctatatcggttatgatatcgtcaaattttttgagccctgcctcaaagaggcgatggatgcgctagaggatcagactaagattcccgatatgagattgattcgccctcgatggatcttctgctactcccacaaaaacgctcatctgagtatgctcacccaagatccccaagaggcaaaacgctttgaagcgctcaaaagcacacttcactccaaggagccctttagagagctgcttccgctcaaaaatgctaaatctggctctttctatcatgataaagagcgattctttgggatggtggatgagtcgttggagcgtattcgatcaggagatgtgtttcagattctcatctctaaccgttatatccaagaggcagagatcgatccttttagtttctatcgaatcttgcgcggcaaaaacccctctccctatctctttttactcgaatttccagattttgccatcgcgggaagctcgcctgaggtgatggtgcgtctgcaggagaattcgattcttttgcgccctattgcaggaacgagaaaacggggtaaaaatcgcctgcgcgatagagagctggagctggagctcaaaagtgacactaaagagtgtgctgaacacgtgatgctcattgacttagggcgaaatgatgtgggtcgagtcgccaaatcaggaagcgtgaaggtgggagaggtgatgagaatcgagcgctattcccatgtcatgcatatggtgagcgatgtggagggggaactaaaagagggcaaagatatgtttgacctctttgccgcaaccttcacggcgggcaccatgacgggagcccccaaaatcaaggcaatggagatcattgcagagctagagggactcaagagaggattttatagcggtgcggtggggtatttcggctttagcggagacatggatagcgcgattacgattcgcactgccctgatcaagcctgataagatattcctccaagcaggggctggaatcgtcgctgacagtcaaaaagagttggagcaccttgaggtgaccaacaagctaggcgccctcactagcaccctccaagagctcgctaagctctaa

SEQ ID NO: 3474 - protein, 472 aa, Wolinella succinogenes
MEIFHERLLVDQLTPVSLYAKLREFFAGETTFLFESAASSSESGTHSFIIIGAKEEVISQGGESFYIDSKGNRQNIGANPFPFLKEYYARLDQSAYRAWGEENGVGFVDGFIGYIGYDIVKFFEPCLKEAMDALEDQTKIPDMRLIRPRWIFCYSHKNAHLSMLTQDPQEAKRFEALKSTLHSKEPFRELLPLKNAKSGSFYHDKERFFGMVDESLERIRSGDVFQILISNRYIQEAEIDPFSFYRILRGKNPSPYLFLLEFPDFAIAGSSPEVMVRLQENSILLRPIAGTRKRGKNRLRDRELELELKSDTKECAEHVMLIDLGRNDVGRVAKSGSVKVGEVMRIERYSHVMHMVSDVEGELKEGKDMFDLFAATFTAGTMTGAPKIKAMEIIAELEGLKRGFYSGAVGYFGFSGDMDSAITIRTALIKPDKIFLQAGAGIVADSQKELEHLEVTNKLGALTSTLQELAKL

SEQ ID NO: 3475 - DNA, 1401 bp, Vibrio vulnificus
  CDS (1)..(1401)
atgcagcaatcgaactctttgtcacaaattaaacaaatgaataacagcataaatacggccatttcttcaaaaacactgccttatcaaacggaccttgcccaacagtggtttgacgccatccaacatcaaccttgggcaatgctgttgcgttcggcatcaccaacacatgttgacagccgttttgacattctcgtcgcaaagcccgttgcgacattagaaacacgtggtgcggtaactgagatcaataccaatgacgaagtcattgaaagtaaagatgatcctttcacgcttcttgcgcgttatcaacagcgttttacccctgctctatcctgtgatgaagagattccttttatgggtggtgctctgggttactttagctacgatttaggtcgtcgcgttgaaaaactgcctgagattgcaacacaagatattgctgcgcccgacatggcggtgggcatctacacatgggcattgattgtcgacaatcagacgcagacagcgcaactggttggccaagacgtagaacaagcttatcaatggctgagcacgcaaacaaaagcaaacgaagcgacgtttgcccttaccagtgattggcaatccaacatgaatcgtcgcgattaccaaggtaagtttgattgcgtacaggagtacttgctcagtggtgactgctaccaaattaacttagcgcagcgctttcatgccaattaccaaggcagcgaatggcaagcttaccagaagctagagcagagcaaccaagcaccattttctgctttcattcgtttggaggacgcggcgattttaagtgtgtcgccggagcgttttctcgagctcaaaaaacgtgtcattgaaaccaagccgatcaaaggaactcgtcctcgtcataatgatgaacaacaggacaaacaggcggcacttgagcttgccaatgccgaaaaagatcaagcggaaaatctgatgatcgtcgatctgctgcgcaacgatattggccgtgtcgccaaaccgggcagtgtgcatgttcctaaactgtttgacatcgaaagctttcccgccgtgcatcacttagtcagcacgattcgagcggagttggcagcgcagtatactgccgctgacttactgcgagcgtgtttcccgggaggctcgattaccggcgcgccgaaagtgcgcgcaatggaaatcattgaagagcttgagcctcatcgacgctcagcctattgcggtagtatcggttacatcagtcgccatggtcgcatggataccagcattacaattcgtaccttagtggcggagcaaggtaagttgttcgcttgggctgggggcggtgtagtggctgacagtcaatgcgatgcggaatatcaagagacgttagataaactgtcgaaaattctgcctacgttgcaataa

SEQ ID NO: 3476 - protein, 466 aa, Vibrio vulnificus
MQQSNSLSQIKQMNNSINTAISSKTLPYQTDLAQQWFDAIQHQPWAMLLRSASPTHVDSRFDILVAKPVATLETRGAVTEINTNDEVIESKDDPFTLLARYQQRFTPALSCDEEIPFMGGALGYFSYDLGRRVEKLPEIATQDIAAPDMAVGIYTWALIVDNQTQTAQLVGQDVEQAYQWLSTQTKANEATFALTSDWQSNMNRRDYQGKFDCVQEYLLSGDCYQINLAQRFHANYQGSEWQAYQKLEQSNQAPFSAFIRLEDAAILSVSPERFLELKKRVIETKPIKGTRPRHNDEQQDKQAALELANAEKDQAENLMIVDLLRNDIGRVAKPGSVHVPKLFDIESFPAVHHLVSTIRAELAAQYTAADLLRACFPGGSITGAPKVRAMEIIEELEPHRRSAYCGSIGYISRHGRMDTSITIRTLVAEQGKLFAWAGGGVVADSQCDAEYQETLDKLSKILPTLQ

SEQ ID NO: 3477 - DNA, 2076 bp, Photorhabdus luminescens
  CDS (1)..(2076)
atgaaaatactgctcattgataattatgattcctttacgcaaaacattgctcaatatctgtatgaagtgacgggcagtgtgccgtccgtagtcaccaattctttgacttatgaagagttaacgatagacgaatatgatgcggtagtcctttctccggggccaggacatccggctgaaagcagtgattttggggtctgtgctgaagttattgcacatgccaaagtgccactgttgggtatttgtctcggtcatcaggggattaacctggcatttggcggcgttgtagaacatgcccccaatccggtacatggctatcgcagtcgcatcaggaacactggagaaggattgttcctcggtttgcctgaacagtttgaagtggtcagatatcactcgttggtatgtacccggttgcccgacaatctgaaatgtactgcctggactgatgatggcttaatcatggcaattgagcacaccgaaaggccgatctggggggttcaatttcatcctgaatcgattgattctgaatatgggcgtgagctactcagtaatttcgtgcggatagcggagacgtataaagagaataatgaacaggaagttaccgctcagaatatatgtactgatatcaatgaggcttatcttgcagtaggtggaagacaagatctcaacctgaattatcgtgaatgtaaggagatagtcgatcctgaatccttgtttattcaacgttatggcaatgatacgcatgctttctggcttgatagtgaaaattctgatagacccaatgcccgcttctcaatgatgggcagcggtaatgaacaaggtgctgtcagacttgaatacagtgtacagactgagaatttgcgtttgatcggtcctgatggcgagaggattgttcagggagattttttctcgctgatgtctcagttgcttgatgtggtggcaatttcgacaccaaaatcgatgccattggtatttaaaggcgggtttgttggttatttaggatatgaattaaaggcgctgacaattggcagcaacaaatatcgttcagaacatcctgatgccagcttaatatttactccgcatttttttgtcttcgatcatcagcagagtaaactttatgaatgttttatcacaccaatagggcagccacatcattggtcaccggaacttttcgttaccaatacaaaaaataccggtgaagtgatacctgactttattcctggcgctgttgatcaaaataagatttgtctggaatatggcgctgagaaatatatggatggaatccataaatcactccaatacatcacagatggtgagtcctatgaaatctgtctgacgaatagggccaagatgacttattcaggacatccattggacgcttatcggcgtatgcgtcatgccagtcctgtaccttatggcgcttatctggcctgtggggatttttctgtactcagtgcatcaccagaaacgtttttacgtattgatgacgccagaaatattgagtccagaccgattaaggggacccggccacgcggaaaaacggcagccgatgatcagcatttgcagatggaattgagtcagtctactaaggatagggcagaaaatctgatgatagtggacttagtgcgccatgatcttaatcaggtatgtcgtccaggtagtgtgcatgtacctgaattatttaaagttgagagcttctcttctgtacatcaattggtttcgaccatacgcggtcaattatgtgaagaaacgtcatccatagaggctatccgggcatgttttccaggaggatcaatgaccggcgcaccgaagaagcgcacgatggagattattgatgctttagagtcatcggctcgtggtgtttactccggtgcgcttggatggttatctttcagtggtgaagtggaattgagcattgtgatacgcaccgcggtattacatcaagagtgtgctgaattcggcattgggggggcaattgttgctcattctgatccttatggcgaatttgaagagacattggtcaaagcgagtgtgccatatttcagttttagtcatatggcggaggaagtgtgtgagtaa

SEQ ID NO: 3478 - protein, 691 aa, Photorhabdus luminescens
MKILLIDNYDSFTQNIAQYLYEVTGSVPSVVTNSLTYEELTIDEYDAVVLSPGPGHPAESSDFGVCAEVIAHAKVPLLGICLGHQGINLAFGGVVEHAPNPVHGYRSRIRNTGEGLFLGLPEQFEVVRYHSLVCTRLPDNLKCTAWTDDGLIMAIEHTERPIWGVQFHPESIDSEYGRELLSNFVRIAETYKENNEQEVTAQNICTDINEAYLAVGGRQDLNLNYRECKEIVDPESLFIQRYGNDTHAFWLDSENSDRPNARFSMMGSGNEQGAVRLEYSVQTENLRLIGPDGERIVQGDFFSLMSQLLDVVAISTPKSMPLVFKGGFVGYLGYELKALTIGSNKYRSEHPDASLIFTPHFFVFDHQQSKLYECFITPIGQPHHWSPELFVTNTKNTGEVIPDFIPGAVDQNKICLEYGAEKYMDGIHKSLQYITDGESYEICLTNRAKMTYSGHPLDAYRRMRHASPVPYGAYLACGDFSVLSASPETFLRIDDARNIESRPIKGTRPRGKTAADDQHLQMELSQSTKDRAENLMIVDLVRHDLNQVCRPGSVHVPELFKVESFSSVHQLVSTIRGQLCEETSSIEAIRACFPGGSMTGAPKKRTMEIIDALESSARGVYSGALGWLSFSGEVELSIVIRTAVLHQECAEFGIGGAIVAHSDPYGEFEETLVKASVPYFSFSHMAEEVCE

SEQ ID NO: 3479 - DNA, 1371 bp, Photorhabdus luminescens
  CDS (1)..(1371)
atgagcatttcactacaaaaacggcaattaccctatcaaccagacgctgccatcaactattttgcgccgatttcaaatcagtcttgggcaatgctgctccattctggtgctgccaaccatcctcataatcggttcgatattctggttgcagaaccacggataacactgcttagtcataataaatcaactgaaataaatgaagatggcgatagctatattactgaggaagatcccttttacctgctaaaaagacaactagaaaaattaaatattacagcaaagcgtgatcctgatttgccatttcagggcggtgcgctaggtctatggggatatgatcttgggcgttaccttgaagagttaccattacaagccaaaaatgagttgtcatttccagatatggcaatcggtatttatgactgggcgctgattgttgatcatcacaaaaaagaggtgattttattcagctacagtgatgttgacacgcgcctgaactggcttacttctcaccaagtttcgccaaaaatggcttttacgttgaccagtgaatggcaatcaaatatgagtgccaaacaatatcatgagaaaattaactgcattcatcactatctgttaagtggtgattgttatcaagttaacctggcacaacgattttgcgctgattaccaaggagatgaatggcaagcattcataaaacttaatgagaacaaccgtgcacctttttccgcctttattcgtttaccggaaaacagcgttatcagcgtctctcctgaacgttttttactcctggagaataaacaaattcaaactcgcccgattaagggaacattaccgcgcttaagtgatacagaaaaggacgtactgcaagctgtaaaactggccgcctcgaaaaaagaccaggctgaaaatttgatgatcgtcgatttattgcgtaatgatattggccgggtagccacaccggggtcagttaaagttcctgaattgtttttagttgaacaattccctgccgttcatcatctggttagcacaatcaccgcaacactgccaaatgaacaacatgctacggatttattacgcgcctgctttcccggtggttctattaccggagcgcctaaaatcagagcaatggaaataatagaagagcttgaacctcaccgccgacatggatattgtggttcaattggctatattagtttctgtggcacaatggacagcaatatcaccatacgtaccctcttaactgagaaagaaaaaatatattgctgggccggtggcggaatcgttgccgacagcactgctgaaaaagagtatcaggaaacatttgataagttgaatcgtatcttaccgcaactagggaaaataaaagtaatatga

SEQ ID NO: 3480 - protein, 456 aa, Photorhabdus luminescens
MSISLQKRQLPYQPDAAINYFAPISNQSWAMLLHSGAANHPHNRFDILVAEPRITLLSHNKSTEINEDGDSYITEEDPFYLLKRQLEKLNITAKRDPDLPFQGGALGLWGYDLGRYLEELPLQAKNELSFPDMAIGIYDWALIVDHHKKEVILFSYSDVDTRLNWLTSHQVSPKMAFTLTSEWQSNMSAKQYHEKINCIHHYLLSGDCYQVNLAQRFCADYQGDEWQAFIKLNENNRAPFSAFIRLPENSVISVSPERFLLLENKQIQTRPIKGTLPRLSDTEKDVLQAVKLAASKKDQAENLMIVDLLRNDIGRVATPGSVKVPELFLVEQFPAVHHLVSTITATLPNEQHATDLLRACFPGGSITGAPKIRAMEIIEELEPHRRHGYCGSIGYISFCGTMDSNITIRTLLTEKEKIYCWAGGGIVADSTAEKEYQETFDKLNRILPQLGKIKVI

SEQ ID NO: 3481 - DNA, 1575 bp, Photorhabdus luminescens
  CDS (1)..(1575)
atgacggataaacaaccaaaaatcacagtaatcgagcaggaagctgcttaccaacccgatcctacgcagctattcaaccagctctgcggtgagcgaccagcaactttattgctagaatctgcggaaattaacagcaaaaaaaacttaaaaagtctgctaattatcgatagtgccttgcgcatcagtgccaacggcaatcaggttacttttgacgcgttaacagaaaatgggcgaaatttattacccattttggccaacaaattttccagcgacgttcaatctgaaataacacacaatgctcttcaagtgattttcccacccatcaatcacaatatagatgaagataatcgtctgaaagcggtatccgtatttgatgcactgcgtgccctgctctctctggcggaagagccgtcaccatataattcgtcaagcgcagaagcgatattcgttggcggccttttttcctacgatctggtggccggatttgagccgttaccggcagtaaaaaccgttcaacgctgcccagatttctgtttttatctcgcagaaacgttattggtgatcaaccaccagaataaaaatgcacgcttgcaaatctctcttttcagtgattctcaagcagaagagcaacgccttaaacaacgattgaaaacattagtggcactcattaccgagcccattgagccagtacaacaaatctctctgccaaccatgaaagtttcatacaatcgggatgacaagagctatgcagaaatggtggcacagttgcaacaatacatccgccaaggggatatttttcaagtagtgccatcaagacgcttctttttaccctgcccggcaccacttcatgcttatcaaaaacttaagtaccacaatccaagtccctacatgtttttcatgcaggacaaagatttctgtctgtttggcgcgtctcctgaaagcgcgcttaaatatgatgcatccaatcgccaaattgaaatctacccaatcgccggcacccgcccccgtgggcgcaatgcggccggcgagctggatgcggatcttgatagccggaccgaactggaaatgcgaacagatcataaggagctagctgagcacttaatgttagttgatttggcgcgtaatgacctggcccgcatttgtgaaccgggcagtcgctatgtcgcggatctgacaaaagttgatcgctactcttttgttatgcatctggtctcccgcgtcgtggggacattacgccatgatttagacacctttcatgcctatcaagcttgtatgaatatgggtacccttaccggcgcaccgaaagtacgcgcaatgcaacttatcgctcactatgaaagtgaacgccgtggtagttacggtggggctgtcggttatttcaccggcaaaggggatatggataattgtatcgttattcgctctgcttacgtggaagatggcatggcgacgattcaggttggcgcaggtatcgtactggattccgaacctttagccgaatccgaagagactcgtaacaaagcaagagccgtcattcgggcaattattgaggctcatcaggcagaggagactttctaa

SEQ ID NO: 3482 - protein, 524 aa, Photorhabdus luminescens
MTDKQPKITVIEQEAAYQPDPTQLFNQLCGERPATLLLESAEINSKKNLKSLLIIDSALRISANGNQVTFDALTENGRNLLPILANKFSSDVQSEITHNALQVIFPPINHNIDEDNRLKAVSVFDALRALLSLAEEPSPYNSSSAEAIFVGGLFSYDLVAGFEPLPAVKTVQRCPDFCFYLAETLLVINHQNKNARLQISLFSDSQAEEQRLKQRLKTLVALITEPIEPVQQISLPTMKVSYNRDDKSYAEMVAQLQQYIRQGDIFQVVPSRRFFLPCPAPLHAYQKLKYHNPSPYMFFMQDKDFCLFGASPESALKYDASNRQIEIYPIAGTRPRGRNAAGELDADLDSRTELEMRTDHKELAEHLMLVDLARNDLARICEPGSRYVADLTKVDRYSFVMHLVSRVVGTLRHDLDTFHAYQACMNMGTLTGAPKVRAMQLIAHYESERRGSYGGAVGYFTGKGDMDNCIVIRSAYVEDGMATIQVGAGIVLDSEPLAESEETRNKARAVIRAIIEAHQAEETF

SEQ ID NO: 3483 - DNA, 2934 bp, Photorhabdus luminescens
  CDS (1)..(2934)
atggcacctttttctattcctgggaaaacacttactatgacgccagactacctttggaatggcaaaacgctggaccaacaacttgccggatggtctggtatttggggcgataaaacagcgctgatctatcaagaacaacaactaacttaccgtgaattgcaccaatccgcagagagattggccagcggattatttcgtcgagggatccgtcgtggggataacgttatggtacaactgcctaaccgtatctcctttgtcgttacctgttttgccctgtttaggctcggtgctcatccggtgttattaatgccgacacagcgggcacatgatgttcatgctctttgccagattgcacgtccggttgcttacattatccctgattgcttccatgattttgactaccgcgaaatggcacgagaaattgcggcattttgccccgatctaaaacacattattgttgatggagaagcggaagaatttaccgcattggcatccattgatgataaaccagtaaatattcccgctccaagttatggtgatattgccgtattgctgctttcgggcggaacaaccggtacgccgaaactcattccccgtactcacgatgcttatacctatgattttgtgctctccgcccgtttgtgcgcagtaaatacggaaagtgtttatttggccgtactgcctgtggcacataacttcacgttaggcagccccggtattttgggtatcctttcccagggtggaagtgtccttctgagtgataccgccagttttgatgaggccatgccgctaatcgagcaacacaaagtgacccatttagcattagtaccggctctggctcggctctgggaacaggctcgcgactgggaacaaagcgatctttcatccctgcgctgtttgcaagtaggtggtggcaggttgacaccagaactggcgggacaagtaatagcacgccttgggcctttgcagcaggtgtttggtacagcggaaggattactctgttatacccgattggatgatccccacgaggtcatcattaatacccaaggacgtccgttatcagaagaagatgagatcaaaattgttgatgccaatttacaacctgtagtacccggtgaggtaggagagcttattacacgtggcccttacactattacgggatattaccgtgcagagcagcataataccgtagctttcaccaccgatgggttctatcgtactggcgatctggttcgtatgacctcagatggcaacctgatcgttgagggcagaattaaagagcagattaaccgcagtggtgagaaaatttcaacccaagaagttgagaccttgctgctgcaacaccctgatattgatgatgccgttgtcatttcagtgcctgatgaattgctgggtgaacgaacctgcgcctgtttacctaacaacggcaatcaaccagaaccggtgcagatagcggcatttctacaacagaaaggggttcagcgtcataaaattcctgaccaatggttgtttgtcccatattggccacttactaccgtgggaaaaattgataaacgccgcttggtacagatggcacaagcagaacatggccgcccaatgcagcaatatcatgaacaaacagttgttattaccagcactccgttagatttgatcacacatttgctttcagaaggcgaagcacaaccttatatgctctatgaagtgaaaggtgaatggtcactggggataggctgtgcagcgaccatcagtgcggatgcatcgggacaattgattgattcacaaggtaatcgccatccatacgatatcagcacgttgagccaaaaacttgaacaagcgcttaatgcccttcccattcaggattggcgggcctatggaagaacgttatttgaattctcccatatgacatatgggttgccattagcacaacagaacgaagcgttgataaaaatcactattccacagcatgaattacgcataactccaggacaggttctgatacgaacgctcgaagagagtcaactcaccatattgagggaaaaaattagccaggttgatcaattaggaacacctgttttcccgtggacaaaagatagggaaattatcagtacatcagacgcggcgaaacgttatcaggataacgtcgccaatgcggttaaggacattgcctcgggccactatcaaaaagtgatcctgtcacgtcgagttgaacttggctcggatattgacatgccacacagctactggttaggccgccaagctaacacacctgcccgctctttcttcttacgtgatgaagatttctctgtttatggttttagcccggaaaccgtagttgaagcggatggttcaggttgggttagcacgcaaccattggctggaaccagagcattgacacatgacaaagatcaggatcaacgattgagagcagatttgctttctgacccgaaggagatctctgaacatgctgtttcggctaaattggcattagaggaactggcaccgatttgtcaggctgacacactttgtgtatcagagtttatggcgattcgtgaacgaggttcagtacaacatttggcatcacgggtaaaaggattactacaaacagacaaaaatcgttgggatgcgttcatcgccctattcccggctgtaaccgcttcggggataccgaaaaaaacctctttacaggcaatttcacgttatgaaggtgaaccacgccggctttatagtggttgtgtcatgttattagatagctcaggtaaactggatgctgcgctggtattacgttctctctatcagcatcaaggtcgctgttggctccaggctggcgcaggattggtcagagattcaaaaccagaaagagagtggcaggaaacttgtgaaaaacttgactgcattatgaaatacgttcgcccttgctctggtaaaaaagagtaa

SEQ ID NO: 3484 - protein, 977 aa, Photorhabdus luminescens
MAPFSIPGKTLTMTPDYLWNGKTLDQQLAGWSGIWGDKTALIYQEQQLTYRELHQSAERLASGLFRRGIRRGDNVMVQLPNRISFVVTCFALFRLGAHPVLLMPTQRAHDVHALCQIARPVAYIIPDCFHDFDYREMAREIAAFCPDLKHIIVDGEAEEFTALASIDDKPVNIPAPSYGDIAVLLLSGGTTGTPKLIPRTHDAYTYDFVLSARLCAVNTESVYLAVLPVAHNFTLGSPGILGILSQGGSVLLSDTASFDEAMPLIEQHKVTHLALVPALARLWEQARDWEQSDLSSLRCLQVGGGRLTPELAGQVIARLGPLQQVFGTAEGLLCYTRLDDPHEVIINTQGRPLSEEDEIKIVDANLQPVVPGEVGELITRGPYTITGYYRAEQHNTVAFTTDGFYRTGDLVRMTSDGNLIVEGRIKEQINRSGEKISTQEVETLLLQHPDIDDAVVISVPDELLGERTCACLPNNGNQPEPVQIAAFLQQKGVQRHKIPDQWLFVPYWPLTTVGKIDKRRLVQMAQAEHGRPMQQYHEQTVVITSTPLDLITHLLSEGEAQPYMLYEVKGEWSLGIGCAATISADASGQLIDSQGNRHPYDISTLSQKLEQALNALPIQDWRAYGRTLFEFSHMTYGLPLAQQNEALIKITIPQHELRITPGQVLIRTLEESQLTILREKISQVDQLGTPVFPWTKDREIISTSDAAKRYQDNVANAVKDIASGHYQKVILSRRVELGSDIDMPHSYWLGRQANTPARSFFLRDEDFSVYGFSPETVVEADGSGWVSTQPLAGTRALTHDKDQDQRLRADLLSDPKEISEHAVSAKLALEELAPICQADTLCVSEFMAIRERGSVQHLASRVKGLLQTDKNRWDAFIALFPAVTASGIPKKTSLQAISRYEGEPRRLYSGCVMLLDSSGKLDAALVLRSLYQHQGRCWLQAGAGLVRDSKPEREWQETCEKLDCIMKYVRPCSGKKE

SEQ ID NO: 3485 - DNA, 1527 bp, Gloeobacter violaceus
  CDS (1)..(1527)
atggttgcgccggactttgagcgcttcgagacactggcaaaagacggcaattttattcctgtgtaccgcgagattctggcggatctcgaaacgccggtctctgcctggtatcgagtctgtgacggggcgagggaaagttttttgctcgaatcggtcgaggggggcgagaggctgggacgctacagcttcctggggtgcgagccgctctggaccctcgccgcccggggcgatacgtgcgagcaggtgtttcgcgacggtgggcggctcacccacacgggcgacccgttcgcggtgctcgatcgctgtttggaaccctaccagccggtgcacctgccggagttgccgccgggaatcggtgggctttttggttactggggctatgaactgattcgctggatcgaaccgacggtgcccgtgtatagcgatcccgacggcctgcccgacggcttctggatgcaggtcgattcgctgctcatcttcgatcaaatcaagcgcaagatctgggtgatcgcctacgcggatctgcgcgagggcgacacggcgagcgcctaccggctcgccggccaaaaagtggacgcgctggtggaacgattggcccggcccgccgccaaggccgagcccctgggcctggagtggacgccccacagggtccaagcccaaagtaccttcagccgcgagcagtactgtggggccgtcgagcgcgcccgcgaatatatccgggctggggatatctttcaggtggtactcgcccagcgcttcagcacgccctttgcgggcgagagctttgatctctaccggatgctgagggcgattaacccttcgccctacatggcttactaccagttcggcgattttcaactgatcggttcgagcccggaggtgatggtgcgtctggatcggcgcgacgggggagccctcgccaccgtccggccgatcgcgggcacccggcggcgcggccagagcgaagcggaggaccgctggctcgaaaaagatctgctcgccgatcccaaggaggtggccgagcacgtcatgctcgtggatctgggccgcaacgacctgggccgggtgtgcaaaccgggcagcgtgcgggtggacgaactgctcaccgtcgagcgctactcccacgtcatgcacatcgtctccaacgtcaccggcgaactagcctccggccgaggggcctgggatctgctcagggccacttttccggccggtacggtgagtggcgcccccaaaatccgggcgatggagattatccacgcactggaaccgtttcggcgcggaccctacgcgggcgcctacggctactacagcttcgacggccagctcaacaccgccatcaccatccgcacgctggtcgtccacggggggctcgccaacatccaggccggggcggggctggtggccgactcggtacccgagaccgagtacgaggaaacgctcaacaaagcccgcggcatgctcgaaacgatcgcccgcctcgcccggagcgggggcgcgtccgctaacgtagaagggcaagtgcaatag

SEQ ID NO: 3486 - protein, 508 aa, Gloeobacter violaceus
MVAPDFERFETLAKDGNFIPVYREILADLETPVSAWYRVCDGARESFLLESVEGGERLGRYSFLGCEPLWTLAARGDTCEQVFRDGGRLTHTGDPFAVLDRCLEPYQPVHLPELPPGIGGLFGYWGYELIRWIEPTVPVYSDPDGLPDGFWMQVDSLLIFDQIKRKIWVIAYADLREGDTASAYRLAGQKVDALVERLARPAAKAEPLGLEWTPHRVQAQSTFSREQYCGAVERAREYIRAGDIFQVVLAQRFSTPFAGESFDLYRMLRAINPSPYMAYYQFGDFQLIGSSPEVMVRLDRRDGGALATVRPIAGTRRRGQSEAEDRWLEKDLLADPKEVAEHVMLVDLGRNDLGRVCKPGSVRVDELLTVERYSHVMHIVSNVTGELASGRGAWDLLRATFPAGTVSGAPKIRAMEIIHALEPFRRGPYAGAYGYYSFDGQLNTAITIRTLVVHGGLANIQAGAGLVADSVPETEYEETLNKARGMLETIARLARSGGASANVEGQVQ

SEQ ID NO: 3487 - DNA, 1359 bp, Gloeobacter violaceus
  CDS (1)..(1359)
atgtcgatggttgcccccacctggcactggctgtaccttcccctcgaaggacgcaccggctcgtgcctgtttgagcgcctgttcggcgaggaggcggtggcggtcctgctcgaaagcccccaactctcgccgcgtaccgcccgctactcgatcttggctgcctgtccgcggcgcgtgcttgctcccgccgtcggtgagattctgcccgcgctgcgcgcttggcttgccgccgcgcggcggcagctgccgccgcccgagtggagggggctgccctttcgcggcgggcttgtgggctggttcggctacgacctggcctgggaaatcgaaaggctgccgtggctgcggaacgaccccttgccttttccgacggcctggtggtttgagccggccgtctttgccgtcgccgatcatcgcgaggataagcttttgctcgccgtcgacaatcggtcgggactcggtcccgaccggggaagcctggcgtactggtgcaagcggctcgacagaccgattttgaccgacgaggagatcaacagtggtgcgttgccgcgcctgacgtcgcgcgacaggtttttggaggctgtccatcaggtcaaggagcacattgcggccggggatatctttcagtgcaacctctcgcttcgcttcgaactcgactgggaaggcaatggctggcggctctaccgacggctggtcgggctcaatccttcgcctttcgcctgttactggcgcacgcccttcggcgaaatcgtcagctgctcgcccgagcggcttttagaagtgcgcggcgaagcgctgagcacccgcccgatcgcgggaacgcgcccgcgcgggttcaccgctgccgccgatcaacgcctggaaagcgaactgttaatcagtcccaaggaacgcgccgagcacatcatgctggtcgatctcgaacgcaacgatctcgggcgggtctcacaaccgggcagcgtgcaggtggacgaactgatggtcatcgagcgctactcccacgtcatgcacattgtctccaacgtcgtcggccgcctgcagcccggatgcgacgccctggacgcggtgcgcgccgtctatcccggcggcacgatcaccggctgtccgaaggtgcgctgcatggaaattatcgagaggctcgaaccggtgcgccgctcgcttttttacggctcggcgggttacctcgactgcaccggtgacctggatctcaacattttgatccgcacgctgctcaagtccggctcccggatttgggggcaagtcggggcgggcatcgtcgccgattctgatccccagggcgaatacctcgaatcgctcgccaaggccaaagccctctggaaagccctgggagacagtcgataa

SEQ ID NO: 3488 - protein, 452 aa, Gloeobacter violaceus
MSMVAPTWHWLYLPLEGRTGSCLFERLFGEEAVAVLLESPQLSPRTARYSILAACPRRVLAPAVGEILPALRAWLAAARRQLPPPEWRGLPFRGGLVGWFGYDLAWEIERLPWLRNDPLPFPTAWWFEPAVFAVADHREDKLLLAVDNRSGLGPDRGSLAYWCKRLDRPILTDEEINSGALPRLTSRDRFLEAVHQVKEHIAAGDIFQCNLSLRFELDWEGNGWRLYRRLVGLNPSPFACYWRTPFGEIVSCSPERLLEVRGEALSTRPIAGTRPRGFTAAADQRLESELLISPKERAEHIMLVDLERNDLGRVSQPGSVQVDELMVIERYSHVMHIVSNVVGRLQPGCDALDAVRAVYPGGTITGCPKVRCMEIIERLEPVRRSLFYGSAGYLDCTGDLDLNILIRTLLKSGSRIWGQVGAGIVADSDPQGEYLESLAKAKALWKALGDSR

SEQ ID NO: 3489 - DNA, 1293 bp, Chromobacterium violaceum
  CDS (1)..(1293)
atgttcacccagaaactcgatttcattcccgacctgctggcgctgcatgccgcggaccgcgaaaactttccctatctgatgcaatcgtccggcgacgtcggctgggacctgctgctgatgcagagcgagcggcgcgtgttcatggcgggcgaggggcaggccttcctcgaccagctgcgcgcgttccggccgcgggcggtgtccaatccgcacggcctgcctttcgtcggcggctggttcgtctacctggcctacgacctgttgtcggaattcgagccgcatgtgccggccgccttgccggacagctttccgctggcggcatgggcgcgcgcgccggccgcggtgctggtggaccgcgccaagaacgaagcctggctggtcggcgaaaccgccgatgactggcatgcgctggaacggctggtttcgatgaggcccgccttcgcgccccagccggtcgccttggccgcgctggaggaagatccgcccgagtggtataccgacgcggtggttcggctcaagcgctacatctacgaaggcgacgtgttccaggtgaacatctcgcgcggctggcgcgcccagctggcggacggcatcgccgcgcccgacctgttcgcggcgctgcgccgggccaatccggcgccgttctcggcgctggccgacttcggcgccgcgcagatcgtcagctcgtcgccggagcggctggtgcgggtgcgcgacggctgggccgaaacccggccgatcgccggcacccacccgcgctcccaggacccggccgaagacgccgagctgaaaaagcggctgatcaccagcatcaaggagcgcgccgagcatgtgatgctgatcgacctggagcgcaacgacctgggccgcatcagccggccgggcacggtggaagtcaacgagctgatggcggtggccagctacgcctacgtccatcacatcgagtccaatgtccgcggcaagctgcgcgacgacatcgcgccggcggacgtgctgcgcgcgctattccccggcggcaccatcaccggctgtcccaaggtgcggaccatgcagatcatccgcgagctggaaaacagcgcgcggcgcgcctataccggcagcctgggctatctgaaccgcgacggcagcatggacttcaacatcctgatccgcaccttcatgcaggagggcgacgcgctgcgcttccgcgccggcggcggcatcgtcgccgactccgatcccgagcgcgaattgcaggaaacccgtcacaaggcgcgcggcctgctgcgcgcgctgggcgtggagcaggcctga

SEQ ID NO: 3490 - protein, 430 aa, Chromobacterium violaceum
MFTQKLDFIPDLLALHAADRENFPYLMQSSGDVGWDLLLMQSERRVFMAGEGQAFLDQLRAFRPRAVSNPHGLPFVGGWFVYLAYDLLSEFEPHVPAALPDSFPLAAWARAPAAVLVDRAKNEAWLVGETADDWHALERLVSMRPAFAPQPVALAALEEDPPEWYTDAVVRLKRYIYEGDVFQVNISRGWRAQLADGIAAPDLFAALRRANPAPFSALADFGAAQIVSSSPERLVRVRDGWAETRPIAGTHPRSQDPAEDAELKKRLITSIKERAEHVMLIDLERNDLGRISRPGTVEVNELMAVASYAYVHHIESNVRGKLRDDIAPADVLRALFPGGTITGCPKVRTMQIIRELENSARRAYTGSLGYLNRDGSMDFNILIRTFMQEGDALRFRAGGGIVADSDPERELQETRHKARGLLRALGVEQA

SEQ ID NO: 3491 - DNA, 1467 bp, Chromobacterium violaceum
  CDS (1)..(1467)
atgcaagcgcaagagtttgaccaactggccgccgccggctacaaccgcatccccgtcacccaggaactgctggccgatctggacagcccgctgtccatctatctgaagctggccaaccagccgtacagctacctgctggaatcggtggtgggcggcgagcgccacggccgctactccatcatcggcctgccggccgacacccggctgcgcgtcaacggccagcgggtgcaggtggaatgcggcgacaaggtgatagaacgccacgacggcgacccgctggccttcatcgaggcgttccagcaccgtttccgtatccccgagctgcccggcctgccgcgctactccggcggcctggtcggctatttcggctacgacaccatacgctacattgaacgccgcctcgccgacgttcagaaacccgacccggtgggcacaccggacatcctgctgatgctgtcggaagagatcgccgtggtcgacaacctgtccggcaagctctacctggtggtctacgccgaccccgaggtgcccaacgcgctgcagaaagcgaaagcgcggctggcccagcttcgcgccaagctgcgcgagccgctggccatcccgctgtcgctgccccagccgcacgagggcgaggcggtgtcggaatacggcgaggaggcgttcaagcaggcggtggcgtcctgtcagcgctacatccacgacggcgacatcatgcaggtggtgctggcccagcgcatgcagcagccttaccacggctcgccgatcgcgctgtaccgcgcgctgcgcaacctcaacccgtcgccgtacatgttcttctaccacttcgacgacttccacgtggtgggcgcttcgccggaaatcctggtgcggcgcgaaggcgaaaccgtgaccgtgcgtccgatcgccggcacccgcccgcgcggccacacccgcgagcaggatgaggcgctggcggccgagctgctggccgaccccaaggaaatcgccgaacacgtgatgctgatggacctgggccgcaacgacgtcggccgcgtcgccgacatcggcacggtgaagatcaccgacaacatggcgatcgagcgctactcgcacgtgatgcacatcgtgtccaacgtggaaggccaggtggaccgcaagatcagcaatatcgacgtgatcaaggccaccttccccgccggcacgctgtccggcgcgcccaaggtgcgggcgatgcagatcatcgacgagttcgagccgaccaagcgcggcgtctacggcggcgcggtgggttacctcggcttcaacggcgacatggacctcgccatcgccatccgcaccgcggtgctgaagaacggcatgctctacgtgcagtccggcgccggcgtcgtcgccgactcggtgccgcaatcggaatggcaggaaacgcagaacaaggcgcgcgcggtgctgcgcgccgcgcagatggtgcgggacggcctggacgcctga

SEQ ID NO: 3492 - protein, 488 aa, Chromobacterium violaceum
MQAQEFDQLAAAGYNRIPVTQELLADLDSPLSIYLKLANQPYSYLLESVVGGERHGRYSIIGLPADTRLRVNGQRVQVECGDKVIERHDGDPLAFIEAFQHRFRIPELPGLPRYSGGLVGYFGYDTIRYIERRLADVQKPDPVGTPDILLMLSEEIAVVDNLSGKLYLVVYADPEVPNALQKAKARLAQLRAKLREPLAIPLSLPQPHEGEAVSEYGEEAFKQAVASCQRYIHDGDIMQVVLAQRMQQPYHGSPIALYRALRNLNPSPYMFFYHFDDFHVVGASPEILVRREGETVTVRPIAGTRPRGHTREQDEALAAELLADPKEIAEHVMLMDLGRNDVGRVADIGTVKITDNMAIERYSHVMHIVSNVEGQVDRKISNIDVIKATFPAGTLSGAPKVRAMQIIDEFEPTKRGVYGGAVGYLGFNGDMDLAIAIRTAVLKNGMLYVQSGAGVVADSVPQSEWQETQNKARAVLRAAQMVRDGLDA

SEQ ID NO: 3493 - DNA, 1287 bp, Synechococcus sp
  CDS (1)..(1287)
atgagcgtgccccagcggttggacctcccctggcgtgaaccgcttgccgtggcccgacagctggacggcgacgacgggctgatctggctggatggtgacggtagtgacctgggccgctgggtgaccctggccagccagccgctggaggtgatccactgccagggcctgccgggggatgcggacgcccgcgaccccttcaccgcattgaatgggctgggtccgggccactggaccggctggctcagttatgaggcggccgcctggactgaacccggcaacccctggtccagggatgccatggccaacctgtggatcgcccgccatgacccgctgctgcgatttgacctgcagcaacggcagttgtggatcgaaggcacggacccgatggcgatgcagcagctggcggcgcgactgcagcagcgagcgcccaccccgcctgccacagcgaacatcccgctggaggcctggcatcagcacaccagccgcgagggcttcgccgatggcgtacgccggatccgtgcgctgatcgccgccggtgatttgttccaggccaacctcaccgcctgctgcagcaccgactggcccggcgatgcctcagcggtggagctgtttcaacgggttcgccaacgctgcccagcgccgtttgcgggcctggtggtggcggacaacggcgaagcactgctctcctcctcgccggaacggttcctgcaggtggaccccgccggccgggtcgaaacccgaccgatcaaaggcacacggccacgccacagcgatccagaccgcgacgccgagctggcggcggagctggtctgcagcgacaaggaccgggccgaaaacgtgatgatcgtggacctgctgcgcaatgacctcggccgcgtctgccaaccgggctccatccaggtatcgcaactgctcggcctggagagctacagctcggtgcatcacctcacatcggtggtggaagggcagctgcaagccgggctcagctgggtggatctgctacgggcctgctggccgggtggatcgatcagcggcgccccgaagctgagggcctgccagcggctgcaggagctggaacccactagccgcggcccctactgcggctccctgatccgcatcgactgggacggacgcttcgacagcaacatcctgatccgcacactgatgcggaaggatcacaggctgagggcccatgccggttgcggcatcgttgccgactccgaccccgatggcgaagcagaggagctgatgtggaaattgcggccactgctggaggccctggcttga

SEQ ID NO: 3494 - protein, 428 aa, Synechococcus sp
MSVPQRLDLPWREPLAVARQLDGDDGLIWLDGDGSDLGRWVTLASQPLEVIHCQGLPGDADARDPFTALNGLGPGHWTGWLSYEAAAWTEPGNPWSRDAMANLWIARHDPLLRFDLQQRQLWIEGTDPMAMQQLAARLQQRAPTPPATANIPLEAWHQHTSREGFADGVRRIRALIAAGDLFQANLTACCSTDWPGDASAVELFQRVRQRCPAPFAGLVVADNGEALLSSSPERFLQVDPAGRVETRPIKGTRPRHSDPDRDAELAAELVCSDKDRAENVMIVDLLRNDLGRVCQPGSIQVSQLLGLESYSSVHHLTSVVEGQLQAGLSWVDLLRACWPGGSISGAPKLRACQRLQELEPTSRGPYCGSLIRIDWDGRFDSNILIRTLMRKDHRLRAHAGCGIVADSDPDGEAEELMWKLRPLLEALA

SEQ ID NO: 3495 - DNA, 1521 bp, Synechococcus sp
  CDS (1)..(1521)
atgctcagtcctgatcgcgtcgcctttcacgaggccgcagccaacggtgccaatctgattccgctggcccagagctggccggcggatcttgaaacccctctgacggcctggatcaaggtcggggccgatcatgcccctggagtgttgttggaatcggttgagggtggtgaaaccctcggcaggtggagtgtgatcgcctgcgatcccctgtggaccgcatcagcccgcaacgattgcctgcaacgacgttggcgtgacggccgcgaggaaaccttccgtggcaatcccttcgacagtctcaggcgttgtctggagccttaccgctgcatcagcctgcccggactgccaccgctagggcagctctacggtgtctggggctatgagctgattcagtggattgaacccagtgttccggtgcatccgcggcaggagtcggatccaccggacggcatctggatgctgatggactcgatcctgattttcgatcaggtgaagcgacagatcacggccgtggccttcgccgacctgagccagggtcaatcggaagacgctgcctgggacggggcgatggcgcggattgcagcgctccggcggcgcatggaagccccgctccctctggtggatccccttccctgggatgcgcaggccaagcagcttcccgatgtgaagagcaactgcagccaggagcgcttcgaggcggcggtcgacaccgcccgggaacacatcgccgccggtgacgtcttccagctggtgatcagccaacgcctggagacggttgttccccagcagccgctggagctctatcgcagcctgcggatggtcaatccatcgccctacatggccttcttcgacttcggcgactggcagttgatcggatcgagtccggaggtgatggtgcaggccgaccctgcgccggagggcatccgagccagcctcagacccattgccggcacccgtccgcgcggcacgacagcccatgaggatcgcgacctggagctggatctgctggccgaccccaaggaacgtgccgagcacgtgatgctggtggatctcggccgcaatgacctcggcagggtctgtcagcccggcagtgtggcggtgaaggatctgatggtgatcgagcggtactcgcacgtgatgcacatcgtcagccaggtggaggggcgtctggccccccagcacgacgtgtgggacctgctgatggcatccttccctgccggaaccgtgagtggagcccccaagatccgtgccatgcagctgatccatgagctggaacccgatgcccgaggcccctattccggtgtgtatggatcggtggatctggcgggagccctgaacaccgccatcacgatccgcaccatggtggttcaaccggacccgtccggtggttgcagggtgaaggtgcaggcgggtgcaggcgtggtggcggattcgaagcccacggcggaataccaggagaccctcaacaaggcccgcgggatgctcacggccctggcctgcctcaacccggagcggccatga

SEQ ID NO: 3496 - protein, 506 aa, Synechococcus sp
MLSPDRVAFHEAAANGANLIPLAQSWPADLETPLTAWIKVGADHAPGVLLESVEGGETLGRWSVIACDPLWTASARNDCLQRRWRDGREETFRGNPFDSLRRCLEPYRCISLPGLPPLGQLYGVWGYELIQWIEPSVPVHPRQESDPPDGIWMLMDSILIFDQVKRQITAVAFADLSQGQSEDAAWDGAMARIAALRRRMEAPLPLVDPLPWDAQAKQLPDVKSNCSQERFEAAVDTAREHIAAGDVFQLVISQRLETVVPQQPLELYRSLRMVNPSPYMAFFDFGDWQLIGSSPEVMVQADPAPEGIRASLRPIAGTRPRGTTAHEDRDLELDLLADPKERAEHVMLVDLGRNDLGRVCQPGSVAVKDLMVIERYSHVMHIVSQVEGRLAPQHDVWDLLMASFPAGTVSGAPKIRAMQLIHELEPDARGPYSGVYGSVDLAGALNTAITIRTMVVQPDPSGGCRVKVQAGAGVVADSKPTAEYQETLNKARGMLTALACLNPERP

SEQ ID NO: 3497 - DNA, 1644 bp, Rhodopirellula baltica
  CDS (1)..(1644)
atggaggcggactcgttcacgccttggaattctatcgctggccaacccggtttccaagcccgccgtcgcacttcacactatcgcaacgtcacaacgcgccgaaacttcatgcttggaaacctcatgcaccaaccgccgctttcgtcgttcgaatcgctggcccgtcggttcgacttcgttcccgtctaccgacgcttgctctctgatacgttgacccccgtcacggcgttcatgcacttggacgatggaggccccgctttcctgatcgaaagcgtgatcggaggcgaaaaggtgggacgtttcagcttcctgggctctcgaccactggcccgattcacggccaaaggcaacacggttcggcggacaaacatgtccaccggcgaggtcgttgaatcccagtgcgatgatccactgaacgcttttcgcgagagctttcaggaccgcactgccaccctggacgggttgcctcccttcatcggtggagcaatcgggtacgcgggttacgatgtggtgcgttatgtcgagaatttgccggacaccaccgaggacgaccgaaaccttcccgatctgaacttcgccttttatcacaccctgtgcgtgttcgatcacgtcgataaaaccatcaccgtggtctccctagccgattgccgcggcattgacgaggaaaccgattcaaccgccatttccgaggctcggcaagccgcggccgaagaagtcgaccaaacgatcaaacgcctgatgaccagtccacccgacctccgggtggacgagatcatcgaagaagaccaacgccagccgctgccggtcgagtccaacttcacccgtgagtcgttctgtgacgcggttcgccactgcgtcgagtacattcgtgccggcgatatcttccaagtcgtccccagccaacgactgaccgtcaaaagcgacgtcgacccgttcgcggtctaccgctcgctccgcgtcgtcaatccgtcgccgttcatgttctttgtccgcaacccggaatgcgtcctggtgggttgctcgccggagatcatgtgccgggtcaaagaccgtgaggtcacggtgcgtccacttgccggaacgcggccccgtggagcaactgaaaaagaagacaaagctctcgaaaaagacttgctggccgaccccaaggaacgtgccgaacacgtgatgctggtcgacctgggtcgcaacgacatcggccggatcgccgaattcggcaccgtggacttgaccgaaatcatggttatcgagcgttacagccacgtgatgcacatcagcagcgaggtgcgaggcaaactgcgggaaggcctcgacgcctttgacgctctgaaatcatgtttgcccgcggggactgtttcaggtgcccccaaagtccgggcgatgcaggtcatcgacgagatcgaaccgcatcgtcgcggcccctacggtggcgcggtgggctacatcgactaccgaggcaacatggacacctgcttggcccttcgcacgatcgtgcatcaaaacggggcgtatcacgtgcaagccggctgcggagtcgtcgccgacagcaaccccgactcggaatacgaagaaaccctcaacaaggcccgcgccctgatcgccgcgatcgagtggaccatcgcccgagaatcccgcaacgcctga

SEQ ID NO: 3498 - protein, 547 aa, Rhodopirellula baltica
MEADSFTPWNSIAGQPGFQARRRTSHYRNVTTRRNFMLGNLMHQPPLSSFESLARRFDFVPVYRRLLSDTLTPVTAFMHLDDGGPAFLIESVIGGEKVGRFSFLGSRPLARFTAKGNTVRRTNMSTGEVVESQCDDPLNAFRESFQDRTATLDGLPPFIGGAIGYAGYDVVRYVENLPDTTEDDRNLPDLNFAFYHTLCVFDHVDKTITVVSLADCRGIDEETDSTAISEARQAAAEEVDQTIKRLMTSPPDLRVDEIIEEDQRQPLPVESNFTRESFCDAVRHCVEYIRAGDIFQVVPSQRLTVKSDVDPFAVYRSLRVVNPSPFMFFVRNPECVLVGCSPEIMCRVKDREVTVRPLAGTRPRGATEKEDKALEKDLLADPKERAEHVMLVDLGRNDIGRIAEFGTVDLTEIMVIERYSHVMHISSEVRGKLREGLDAFDALKSCLPAGTVSGAPKVRAMQVIDEIEPHRRGPYGGAVGYIDYRGNMDTCLALRTIVHQNGAYHVQAGCGVVADSNPDSEYEETLNKARALIAAIEWTIARESRNA

SEQ ID NO: 3499 - DNA, 1554 bp, Rhodopirellula baltica
  CDS (1)..(1554)
atgtgcctcggcgagccaaccctcgccgaggcattttttttgcaccaatggcccgatatcactcgggcaaattttcgatccgaattgatcgcgatgcagcagactgccaagaacgcccactccgctatcaacaaacagaagatccctctgtggacgcattcgctcggccgggtcggtgatctggaagacctgttcggaaggcttgcgggaacgaaacatcggctctggttcgactcagcgtccgaccacgaacacgaccgagggcgatactcgttcctggcagcagacccggtcggctggctccacgcctccctcacagatcccgatccgtggcccaaactccacaactggtgttctcgaatcgcggacttcggccactctgccgaactgcctcccttttgcggcgggctggcgggactgattccgtatgaagcggcttggtggttggaaccaacgacccgaatgccggagagttttttaggtggtcgacctcaacttggaatggcgatcggaatctacgactggaccatcgcggtggaccactcctccggcgaagcaacgttgatcagcaacggcctggatagctcgctgaacgctgatttcgaacgagcacgccgtcgtggcgaagacgtgctgaaacgcttgagccgaaccgcccaagcacctcgcaccggtgcaccgccaccgaacgagaacctcgaatcgataggccatccaacaagagaagccggcgtccgaagcaacttcgaatcacaacgctacgtcgaggcggtcgccgagatcatcgaccgaatccgcgcgggcgactctttccaagtcaatctggctcagacactttcgcatcctgcgatgtgcgaagcaaatgagctctaccgtcgcctacgtcaatccaatccggcaccttactccgtcttctttgatgttggcaccgagcaaatcctgagctcctcaccggaaggatttttgcaggtacgcgatcgccacgttgtcacgcggccgatcaagggaaccgtgccgcgcaccggagacgagatcgaagacgaacgcttggctcaggttctcggtggtagcgcaaaggaccgagctgaaaacatcatgatcgtggatctgatgcgaaacgatctatccatcgtctgcaaagacgacagcgttcgcgtctccggactttgcgagattgaatgctaccaaagtgttcaacacctcgtatcgaccgtcaaaggcgacttgcgtgccgacgtcaccatcagcgagttgttggcagcttgcttcccaggtggaagcatcaccggcgctccaaaaatcgaagcgatgaaaaccatcgcccgactcgaaaggcaaccacgcggagcctactgcggatcgatcggttacatcagcgtttccggcaacgctgatttcaacattttgattcgaaccgtcactcaacgagatggccggtggcactttcccgtcggcggaggcgttaccgctcgcagcgaaccccaaagcgaactcgaggaaacctggaccaaagccgcgggtcttttgcgtgcaattcgaccggcggaaagctaa

SEQ ID NO: 3500 - protein, 517 aa, Rhodopirellula baltica
MCLGEPTLAEAFFLHQWPDITRANFRSELIAMQQTAKNAHSAINKQKIPLWTHSLGRVGDLEDLFGRLAGTKHRLWFDSASDHEHDRGRYSFLAADPVGWLHASLTDPDPWPKLHNWCSRIADFGHSAELPPFCGGLAGLIPYEAAWWLEPTTRMPESFLGGRPQLGMAIGIYDWTIAVDHSSGEATLISNGLDSSLNADFERARRRGEDVLKRLSRTAQAPRTGAPPPNENLESIGHPTREAGVRSNFESQRYVEAVAEIIDRIRAGDSFQVNLAQTLSHPAMCEANELYRRLRQSNPAPYSVFFDVGTEQILSSSPEGFLQVRDRHVVTRPIKGTVPRTGDEIEDERLAQVLGGSAKDRAENIMIVDLMRNDLSIVCKDDSVRVSGLCEIECYQSVQHLVSTVKGDLRADVTISELLAACFPGGSITGAPKIEAMKTIARLERQPRGAYCGSIGYISVSGNADFNILIRTVTQRDGRWHFPVGGGVTARSEPQSELEETWTKAAGLLRAIRPAES

SEQ ID NO: 3501 - DNA, 1521 bp, Prochlorococcus marinus subsp
  CDS (1)..(1521)
atgatcagttctcaaaaagatagttttttaaaggcttataaagaaggtaaaaattttatacctattttcaaaacatggcctgctgatttagagactccattatctacatggcttaaattatcaaataaagattcacatggggtcttttttgaatccgtcgaaggtggggaaaatttaggtagatggagtatcgttgctactgatcctctttgggaagcagtttgtcttggagaagaaactattaagacttggaataatggaaatagtgaaaaatataaaggcgatccttttgatttattaagaacttggaccgaagaatataagtcatataatatcgataatttaccttatgttggtcagttatatggttcttggggttatgaattaatcaatcgcatagagcctaatgtgcctattaatcctctagaagataataatataccctatggatcttggatgttttttgatcaattagtaatatttgatcaaatgaaaagatgtatcactgtagttgtatatgctgacacttccagaacatcagaaactcatgttcaagaaatttatcaagattcgattttaagaattaatagaatcaaagatttaatgagtgctccaattaatgaaagacatgctcttaactgggatgaaaaaaaagatttgaatattgcaatttcaagtaattgggaaagaaaagagtttgaagaagctgttgtttctgcaaaggaatatataagaaaaggagatatttttcaaattgttattagccaaaaatttcaatcgaaagttaaaagtgatccctttaatctatatagaagcttaaggattgttaatccttcaccttatatggctttctttgattttggatcatggtacttaataggttctagtcctgaagtaatggtcaaagcagagaagaataaaactaatcaaattgttgcaagcttaagaccgatagctggtacaaggccaagaggtcaagatgctgaacaagatttaaaatttgagaaagatttattaaaagatcctaaagagatatcagaacatgtaatgcttattgatctgggaagaaatgatttaggaagagtatgtgaaacaggcacagtagaggttaaagatttgatgataattgaaaaatattcacacgtaatgcacatagttagtgaagttgaaggtatcttaaaaagtaatactggggtatgggatttacttaaagcatgttttcctgctggtacagtaactggggctccaaaaattagagctatgcaattaattaaagactttgagaaagatgctagaggtccttatgctggagtttatgggtctatagatataaatggtgcactaaatactgcgataacaataagaacaatgatagttcagccttcaaatgatggggaatatatagtttctgttcaggctggtgctgggatagttgcagattcctctcctgcgaatgaatatcaagagactattaataaagccaaaggcatattaatggcattggcttgtttggatagataa

SEQ ID NO: 3502 - protein, 506 aa, Prochlorococcus marinus subsp
MISSQKDSFLKAYKEGKNFIPIFKTWPADLETPLSTWLKLSNKDSHGVFFESVEGGENLGRWSIVATDPLWEAVCLGEETIKTWNNGNSEKYKGDPFDLLRTWTEEYKSYNIDNLPYVGQLYGSWGYELINRIEPNVPINPLEDNNIPYGSWMFFDQLVIFDQMKRCITVVVYADTSRTSETHVQEIYQDSILRINRIKDLMSAPINERHALNWDEKKDLNIAISSNWERKEFEEAVVSAKEYIRKGDIFQIVISQKFQSKVKSDPFNLYRSLRIVNPSPYMAFFDFGSWYLIGSSPEVMVKAEKNKTNQIVASLRPIAGTRPRGQDAEQDLKFEKDLLKDPKEISEHVMLIDLGRNDLGRVCETGTVEVKDLMIIEKYSHVMHIVSEVEGILKSNTGVWDLLKACFPAGTVTGAPKIRAMQLIKDFEKDARGPYAGVYGSIDINGALNTAITIRTMIVQPSNDGEYIVSVQAGAGIVADSSPANEYQETINKAKGILMALACLDR

SEQ ID NO: 3503 - DNA, 1341 bp, Prochlorococcus marinus
  CDS (1)..(1341)
atgacttctctagagcggcgactttgccgctggcaagaaccagcgaagttggcaaaacaactcaccaaaacttggggagaagctgggcttgtctggctggatggagacggcagtggtctaggtcgttgggcgaccctggcagtcgatcccattaatcagatttgttgccgaggcatccctggcgaaaaaggcgccagcaacccattcgaagccctacgtgatctagaaccaggacactggacaggctggcttagctacgaagcagcagcatggatagaacccaaaaatccctggaaagcagattgcatggcgactctgtggatggcgcaacatgacccagtactgcgatttgaccttcaaaagcatcaactctggattgaaggatgtcatcccaaacgactgcaagaattggcaagctggctagaagccaacccacctgaagatgcacctaaaaggagcaaagatgagtcgttacttgcaacaacagacctcaatattcccgtcaatgcatggcaatggctcaccactagagctgactatgcacgtgatgtgcagcagatcagacattggattgccaacggcgatattttccaagccaatctcagcgcttgctgtaccaccacgatcccttccggaagcttcgccgtagaccttttcctaaaacttcgtcaccacaacccagctccatttgccggcctagtgatagctgcaggccttgcaaacggtgaagccgtgatctccgcctctccagagcgtttcctaaaagcactccccacaggagaaattgaaactcgaccaatcaaagggacccgaccacgccaccccaatcaaagccaagactctgatctggcagctgatcttgtttgcagcagcaaagaccgagctgaaaacgtgatgatcgtcgatctattgcgcaacgatctagggcgagtctgtcaacccggctccatcacagtgcctcaattggtaggccttgagagctatccccatgtgcatcacctcacctcaatagtgcaaggacggcttcgatcagaccaatcttgggtagacctactacaagcctgttggccgggaggctccatcagcggtgcccccaagctgcgcgcctgtcagcggctgaacgaactggaaccaacagcacgcgggccctattgcggatcgttgttgcatctcaactgggatgggcagctcgacagcagcattctgattcgctcgatgttgctcgaggggaacacgttacgagcccatgccggctgcggcatcgtgaccggttccgacccctattgcgaagctgatgagctgaactggaaactgctgccactactggaggcactgcaatga

SEQ ID NO: 3504 - protein, 446 aa, Prochlorococcus marinus
MTSLERRLCRWQEPAKLAKQLTKTWGEAGLVWLDGDGSGLGRWATLAVDPINQICCRGIPGEKGASNPFEALRDLEPGHWTGWLSYEAAAWIEPKNPWKADCMATLWMAQHDPVLRFDLQKHQLWIEGCHPKRLQELASWLEANPPEDAPKRSKDESLLATTDLNIPVNAWQWLTTRADYARDVQQIRHWIANGDIFQANLSACCTTTIPSGSFAVDLFLKLRHHNPAPFAGLVIAAGLANGEAVISASPERFLKALPTGEIETRPIKGTRPRHPNQSQDSDLAADLVCSSKDRAENVMIVDLLRNDLGRVCQPGSITVPQLVGLESYPHVHHLTSIVQGRLRSDQSWVDLLQACWPGGSISGAPKLRACQRLNELEPTARGPYCGSLLHLNWDGQLDSSILIRSMLLEGNTLRAHAGCGIVTGSDPYCEADELNWKLLPLLEALQ

SEQ ID NO: 3505 - DNA, 1521 bp, Prochlorococcus marinus
  CDS (1)..(1521)
atgctcagctctgatcgtgaccatttctttgagatggctgctagtggtgccaatttcattcctttggcccgcagttggccagcggatctggagactcctctaacaacttggttaaaagttggggcagatcatccccctggggtcttactcgaatcggtcgaagggggtgaaactcttgggcgctggagtgtggtggcctgcaatccactttggacagccacctgccgagggaaacacctcacacgtcgttggcgagaaggacgaaccgatgaagccatcggcaacccttttgaaggcctcaggcaatggcttgctccttatcgcaccgcaaccctgccaggcctacccccccttggccagctctatggaatgtggggttttgaactgatcaagtgggttgaacccacagtgcccgttcacttaagggacaacaacgatccgcctgatggcatctggatgctgatggacagcatcttgatcattgatcaagttaaacgcctcatcactgccgtggcatacgcagacctgagtgtcgagcaaacggctaacgaagcttgggacaaggcacaagcacgcattcaagacctagaaaagtgcatggcggaaccacttgcgccgattcagccactgcaatggcaaccaaaaagtcaatctccaccttccaccatcagtaactacagccaacaaggctttgaggaggcagttcaaaccgccaagcaacacatcgccgcaggtgatgtgttccagcttgtaatcagtcaacggctggagaccagagttcctcaacagccacttgagctctacagaagtctgcggatggtgaatccttctccatatatggctttctttgacttcggcgactggcagctgattggctcaagcccggaggtcatggtcaaggcggagcctgtcgccgatggcattaaggccagccttcggcctattgccggcacgcgtcagcgtggcggcaacgaacttgaggaccacaatcttgaagcagagttgatggcagatcccaaggaacgtgccgagcatgtgatgttggttgatcttggccgcaatgaccttggacgcgtttgcaggccgggcagtgtgatggtgaaagagctgatggtgatcgagaaatattcccacgtcatgcacatcgtcagtgcagtggaaggtgtgcttgccaaaggcaaggatgtttgggatctactcatggcctcattcccagcaggcacggtcagtggcgccccaaaaatcagagccatgcagctcattcatgagctcgaacccgactcaagaggaccttattcaggtgtgtatgggtccatcgatctcaacggtgctctgaatacagctataaccattcgcacaatgattgtgcggccccatcctgaaggcggctggcaagtcaaggttcaagcaggcgctggtgtggtggccgattccatccccaccaaggaatacgaagagaccctcaacaaggcaaggggaatgctcacagccctggcctgcctcgagtcccacaagtcatga

SEQ ID NO: 3506 - protein, 506 aa, Prochlorococcus marinus
MLSSDRDHFFEMAASGANFIPLARSWPADLETPLTTWLKVGADHPPGVLLESVEGGETLGRWSVVACNPLWTATCRGKHLTRRWREGRTDEAIGNPFEGLRQWLAPYRTATLPGLPPLGQLYGMWGFELIKWVEPTVPVHLRDNNDPPDGIWMLMDSILIIDQVKRLITAVAYADLSVEQTANEAWDKAQARIQDLEKCMAEPLAPIQPLQWQPKSQSPPSTISNYSQQGFEEAVQTAKQHIAAGDVFQLVISQRLETRVPQQPLELYRSLRMVNPSPYMAFFDFGDWQLIGSSPEVMVKAEPVADGIKASLRPIAGTRQRGGNELEDHNLEAELMADPKERAEHVMLVDLGRNDLGRVCRPGSVMVKELMVIEKYSHVMHIVSAVEGVLAKGKDVWDLLMASFPAGTVSGAPKIRAMQLIHELEPDSRGPYSGVYGSIDLNGALNTAITIRTMIVRPHPEGGWQVKVQAGAGVVADSIPTKEYEETLNKARGMLTALACLESHKS

SEQ ID NO: 3507 - DNA, 1518 bp, Prochlorococcus marinus
  CDS (1)..(1518)
atgtcaatatctgatcgtgtttcttttttagatgctgcttctaggggtataaattttattcccttagttcaaacttggccagcagatcttgagactcctctttctacatggctaaaaattggccagaagaatccaccaggggttctgcttgaatcagttgaaggtggagatactttgggtaggtggagtgttgtagcgtccaatccattatgggtagtgactataaaaggagagaaaataactagaacttggagaaataacgagaaagaagaatttgttggaaatccatttgaacttcttagaaagtgtttagcaccatataaatcgcaattaattcctggcctgccatctttagggcagctttatggaatgtggggatatgagttgatcaaatggattgaacctaaagtaccagtgtattctcaaaatgatgaacaattccctgatggtatctggatgttcatggataaaattttaatttttgatcaagttaaaagactaatcacagcagtatcttatggagatttgacgtccgcggattcccctgaagacgcgtatgaaaaagccttccaaggaattaaggaatttgagagtcttatgcaagaaccactgccttctattaaatctttgaaatggaaccaaaagccttcaatacctgattccattgagagtaattggagcaagtctgaatttgaacatgctgttgaagaagcaaaagaatacatttctaaaggcgatatttttcaacttgttttgagtcaaaaatttacgacccaagttcctcactctcctttggaactctataggagtttgcgaatagtcaacccttctccatttatggctttttatgattttggtgattggcaacttattggatctagtcccgaggtcatggttcaggcgaagcctattgataaaaaagtttcagcaagtttacgcccaattgcaggtactcgcccgagaggaaaaactgctaatgaagattccgagttggaagctcaacttttagctgatcctaaagaaatagctgagcatgtcatgttagtagatctaggccgcaacgatttaggacgcgtctgcagagcaggttctgtatcagtaaatgaattaatgattatcgaaaaatattcgcatgtcatgcatattgttagtgagctgcagggataccttaaagatgatatggatgtatgggatttattgatggcagcattccctgcaggaacagtctcaggggcgccaaaaattagagctatgcaattaattcatgagttggaacctcatatcagaggaccttattctggcgtatatggttcgatggatttaaatggagcattaaatactgcaataacgattcgtacaatgcttgtgtctcatcattccaaggatctttttaatgtggaagttcaagccggtgcaggaattgtggctgattcaattccacaaaatgaatttcaagaaactttgaataaagccaaaggaatgcttatcgctttgggttgcctagaaccttctatttga

SEQ ID NO: 3508 - protein, 505 aa, Prochlorococcus marinus
MSISDRVSFLDAASRGINFIPLVQTWPADLETPLSTWLKIGQKNPPGVLLESVEGGDTLGRWSVVASNPLWVVTIKGEKITRTWRNNEKEEFVGNPFELLRKCLAPYKSQLIPGLPSLGQLYGMWGYELIKWIEPKVPVYSQNDEQFPDGIWMFMDKILIFDQVKRLITAVSYGDLTSADSPEDAYEKAFQGIKEFESLMQEPLPSIKSLKWNQKPSIPDSIESNWSKSEFEHAVEEAKEYISKGDIFQLVLSQKFTTQVPHSPLELYRSLRIVNPSPFMAFYDFGDWQLIGSSPEVMVQAKPIDKKVSASLRPIAGTRPRGKTANEDSELEAQLLADPKEIAEHVMLVDLGRNDLGRVCRAGSVSVNELMIIEKYSHVMHIVSELQGYLKDDMDVWDLLMAAFPAGTVSGAPKIRAMQLIHELEPHIRGPYSGVYGSMDLNGALNTAITIRTMLVSHHSKDLFNVEVQAGAGIVADSIPQNEFQETLNKAKGMLIALGCLEPSI

SEQ ID NO: 3509 - DNA, 1497 bp, Helicobacter hepaticus
  CDS (1)..(1497)
atgtttgattttagcaattcacgcatagcctcaatagctcataaagaaatattgtgcgataatcttacccctttggcagtgcttggctcactgaatgcaaaagtgcttttagaatctgcttataacgaaacaggcaaagatagattttccattgtgattttaaacgaagcttttagaatctacaaagaatgtggtgcacattttctttatacgcaagggcaaaaaatccctttatatgaggctttagcagactatacgccactagattctatttctctacctcccacacataaagctggttttttagaatctctcgctcttgtgcgcactcttgcaccaaatcctactgatagtattcctgctcatttgcctttgcctcttggcggagcaggatatatcggttatgaattttttgcagagattgaagaggtaacatttaagaatccctccctctataatgcgcctgaatgtgcatttatctttggacgagattttttaatttttgaccatctttttgatagattgcatattgtgagtgtgggctatgcacacgagagagaagagcactcaactaagcagcgaatagagcatattgcacatagtcttgccactttagtgccacaaaatggattagattctatgcaaaaatcagattttgagtgtgtgagtgctacttcgcagcaagaatatgaatctatggtggaggcaatcaaaaaggcaatttatgcgggaaatttactccaatgtgtgccaagtcaatatatgcagattcgctcttcactttctccgcttcaagcttatcggaatttacgccatcaaaaccctagtccttatatgttttattataattttgatgattttgtgatacttggagcgagtccggagattatgctaaggcttaaaagcaagcaaggacaatcattttttacacttcgtccaattgcaggcacacgtcctagaggtgagagtgtggcgcaagatttggagcttgaaacagagcttttaaatgatgaaaaagaaaatgcagaacatctaatgttacttgatttagctcgtaatgatgcgggtaaagtaagtgtaggtggaggtgtaaaagtaatagcgcgtaataaaattgagcgatattcgcgtgttatgcacattgtatccgaagtgcaaggagagctagattctaagcattttagcaaagctgatgcgtttaaatctgtttttcctgcaggcacattaagtggtgcgccaaaaattgaggcaatcaaaaccatagaatctttagaatctcacgcacgaggtgtgtatggcggtgcgatagggtatttcacttatgatgaagatatggattttgctattgctattcgcacagcggtgtatcaaaatggtatgtattatatgcgctctggtgcgggtgtggtgcaagattctattccaagtgcagagtatatggagacacaaaataaagtccgctcacagcttgatatgtttaatatagacaaggaataa

SEQ ID NO: 3510 - protein, 498 aa, Helicobacter hepaticus
MFDFSNSRIASIAHKEILCDNLTPLAVLGSLNAKVLLESAYNETGKDRFSIVILNEAFRIYKECGAHFLYTQGQKIPLYEALADYTPLDSISLPPTHKAGFLESLALVRTLAPNPTDSIPAHLPLPLGGAGYIGYEFFAEIEEVTFKNPSLYNAPECAFIFGRDFLIFDHLFDRLHIVSVGYAHEREEHSTKQRIEHIAHSLATLVPQNGLDSMQKSDFECVSATSQQEYESMVEAIKKAIYAGNLLQCVPSQYMQIRSSLSPLQAYRNLRHQNPSPYMFYYNFDDFVILGASPEIMLRLKSKQGQSFFTLRPIAGTRPRGESVAQDLELETELLNDEKENAEHLMLLDLARNDAGKVSVGGGVKVIARNKIERYSRVMHIVSEVQGELDSKHFSKADAFKSVFPAGTLSGAPKIEAIKTIESLESHARGVYGGAIGYFTYDEDMDFAIAIRTAVYQNGMYYMRSGAGVVQDSIPSAEYMETQNKVRSQLDMFNIDKE

SEQ ID NO: 3511 - DNA, 1386 bp, Candidatus Blochmannia floridanus
  CDS (1)..(1386)
atgactgcaaatcttatagaatttccttatcatcctcattcttcattaaaactttttaaatctctatcttctaatccatggtctatattattatattccggttatgataataaacatccagatagtcgttttgatatattagtaactaatccgagtttaacactaactacatatgataaaatcactaccatttcatacaataacaaaaataaaactagcaatcaagatccttttttattattaaaaaaatatacacaaatctaccaattaaaaacagatcacaattatcctatcccattccaaggaggattcataggtgtgtttggatacgatttagtaagaaatatcgaattaataccaaccctcgcccaaaaagacattcatttaccagatatggcaataggtttttataaatgggctatcatttctgaccacaagactctaaaaaattatttagttacacataacgatcctaaaccaattttaaattggattcatcaacaatatgcatataatgataaacatatgcaatcatttcaactattaaatgcatggcaaagtaatattacaataaatgagtactcaaaaaaatttaaaatcattaaaaaacatttaaaaatgggtaattgttatcaaatatgcctatctcaacgttttaaagctccatacatagggcatgaatggacagcttttcgttatttattaaattacaatacagctcctttttctgcatttattagattaccaaattattcaagtatattaagtttttctccagaacgtttcataaaattaaaaaattcaaacattattacccagccaatcaaaggcacattagtgaaattaaaaaataccaaagaagatcaaaaacaaaaacaaaaattatcgcaatctagcaaggaccaatcagaaaacctcatgatagttgacttattaagaaatgatattggaaaagtagccattccaggtagtattcaagttactcgattatttgaaatccaatcattttctcaagtacatcatatggttagtacaattattggaaaacttgataataaattttcagctatagatttactaaaagcatgttttccaggaggatccattacaggagctccaaaaatccaagctatgaaattaatcgaaacacttgaaccacatcgtagaagtgtatggtccggtagcataggatatttaagttgctgtggcaatatggatactaatatcagtattagaactttattaactaataaatacaatcttttttgtactgttggcagcggaattatatttgaaagcaaacaagatctcgaatatcaggaaatgcaagataaaatctctactctgttaacaccattatcacaatataaccataaaaaatcttag

SEQ ID NO: 3512 - protein, 461 aa, Candidatus Blochmannia floridanus
MTANLIEFPYHPHSSLKLFKSLSSNPWSILLYSGYDNKHPDSRFDILVTNPSLTLTTYDKITTISYNNKNKTSNQDPFLLLKKYTQIYQLKTDHNYPIPFQGGFIGVFGYDLVRNIELIPTLAQKDIHLPDMAIGFYKWAIISDHKTLKNYLVTHNDPKPILNWIHQQYAYNDKHMQSFQLLNAWQSNITINEYSKKFKIIKKHLKMGNCYQICLSQRFKAPYIGHEWTAFRYLLNYNTAPFSAFIRLPNYSSILSFSPERFIKLKNSNIITQPIKGTLVKLKNTKEDQKQKQKLSQSSKDQSENLMIVDLLRNDIGKVAIPGSIQVTRLFEIQSFSQVHHMVSTIIGKLDNKFSAIDLLKACFPGGSITGAPKIQAMKLIETLEPHRRSVWSGSIGYLSCCGNMDTNISIRTLLTNKYNLFCTVGSGIIFESKQDLEYQEMQDKISTLLTPLSQYNHKKS

SEQ ID NO: 3513 - DNA, 1566 bp, Candidatus Blochmannia floridanus
  CDS (1)..(1566)
atgaaatatcaaatcacacatgcagaaaactttagaattccagtactatatcattccaatccaaccatagtttttaatcagttatgtagaaatcgttattcaacattattattagaatccgcagaaatccaaaacaaaagcaatatagaaagtatgatgattattgatagtgcattaagaatcacagcttataatacaaatgtcataattcataccctgactagaaacggaattaatttactaccactattacaaaaaacactacctagtattgttaaaataaaaaaaatacatgctggaatgcaattaacatttccaatgatacaagataaaaccgatgaagatacacgtcttaaatcaatctctattttagattgtttacgatcattactaaaaatcataaaaacgcctaaagataatcctaaatctatattcttaggaggattattttcttatgatttaatatcatgttttgaacctgtaccaaaatttaccaatgatattatatgtccagactattgcttttacttatctgaaatattattaatttttgatcatcaaaaaaaacttgcagaattacatggcacattatttattcctgatattacagaaaaaaatagattacaaagtagaatgcatgaattaaaaaaacaaattaatcatcaaacccataatactattccacataaacctatacagaatatacaattaaattgtaatcaagatgatgaatcttataaaaaaactatccgtaaaatacaacacgccatacaaagaggagaaatattacaagccgtaccatcaagatgttttttcctaccatgtccttctccgttagcagcatatcatgaattaaaaactaataatcctagtccttacatgtttttcatgcaagatgaaatattcactttatttggagcatctccagaaagctcattgaaatatgatgctaaaactagaaaaattgaaattcatcccatagccggcactagagcacgcgcatactataatgatggctcattagatatggatacagacaacaaaatagaattagaaatgcgtttaaatcataaagaattatcagaacatttaatgttagtagatttagccagaaatgatttagctcgagtttgtacagccggtagtcgctacgtagctgacttattaaaagtagaccgttattcttatgttatgcatttagtctctaaagtgataggaaaattagatcctagtcttgatgctttacatgcttatcgagcttgtatgaacatgggcacattaacaggagcaccaaaaattaaggctatgcaaataatccataaagtggaaagtagacgtcgaaatacttacggtggagcaattggatatttaacaggattaggtaatttagatacatgtatcataattagatcagcttatgttataaatggaatagctactgtacaagcaggagctggcattgtaatagattctgaaccccaatctgaagctgacgaaagtagaaataaagcacgagccgtgttacgctccattgctatagctcataattgtaaggaaattttctaa

SEQ ID NO: 3514 - protein, 521 aa, Candidatus Blochmannia floridanus
MKYQITHAENFRIPVLYHSNPTIVFNQLCRNRYSTLLLESAEIQNKSNIESMMIIDSALRITAYNTNVIIHTLTRNGINLLPLLQKTLPSIVKIKKIHAGMQLTFPMIQDKTDEDTRLKSISILDCLRSLLKIIKTPKDNPKSIFLGGLFSYDLISCFEPVPKFTNDIICPDYCFYLSEILLIFDHQKKLAELHGTLFIPDITEKNRLQSRMHELKKQINHQTHNTIPHKPIQNIQLNCNQDDESYKKTIRKIQHAIQRGEILQAVPSRCFFLPCPSPLAAYHELKTNNPSPYMFFMQDEIFTLFGASPESSLKYDAKTRKIEIHPIAGTRARAYYNDGSLDMDTDNKIELEMRLNHKELSEHLMLVDLARNDLARVCTAGSRYVADLLKVDRYSYVMHLVSKVIGKLDPSLDALHAYRACMNMGTLTGAPKIKAMQIIHKVESRRRNTYGGAIGYLTGLGNLDTCIIIRSAYVINGIATVQAGAGIVIDSEPQSEADESRNKARAVLRSIAIAHNCKEIF

SEQ ID NO: 3515 - DNA, 1428 bp, Bacillus cereus
  CDS (1)..(1428)
atgaaggacatgatgacgaaagaagaatttataaaacaaaaaagagagagaaagacatttttagtaatcactgaagaagaaggagatagcattacgccaatttctttatatagacgtatgaaagggaagcagaaattcttattagaaagttcacagcttcatcaagataaagggcgttattcttacttgggatgtaatccttatggagaagtgaaaagcgttggtacggaagtggaacgaacaatttacggccgggcagaaaagttacaaggtaatgtactgcaagtgttagaagaagtaatcgcaccatcacaagtagacagtccatttccattttgcggaggagcagttggttatattggatatgatgtcattcggcagtatgaaaacattggagcggatttacacgacccattaaatattccggaagtacaccttttactatatcgtgagtttatcgtttacgatcatttacgccaaaagttgtcgtttgtatatgtatgcaggcaagatgattcagcagattatgaagaagtatacgaaaggctacgagtatacaaagaggaagtgctacaaggagaagaagctgaagtaaatacaatacaatccccattatcatttacttcttctataacggaaaaagagttttgtgagatggtagaaatggcgaaagaatatataagagcgggagacatattccaagttgtactgtcacagcgtttacaaagtgaatgtattggtgatccattcgcgttatatcgaaaacttcgaattgcaaatccatcaccatatatgttctatatcgattttcaagattatgttgtactcggttcttcgccggaaagtttactatcagtaagggaggataaagtgatgacgaatccaattgctggtacaaggccgagggggaaaacgaagagggaagatgaggaaatcgcaaaagaactgttaggcaatgagaaagagcgagcagagcatatgatgcttgtagatcttgggcgaaacgatattggtagagtgagtgaaatcggctcggttacgatagataaatatatgaaagtagaaaaatattctcacgttatgcacattgtatccgaagtttacggaacattgcaaaaacaaatgggcggatttgatgcgttagcgtattgcttaccagcagggacggtttctggagctccgaaaattagagcgatggaaattataaatgaactagagaatgaaaaaagaaatgtatacgctggtgcagttggatacgttagtttttcaggaaatcttgatatggcgctcgccattcgaacgatggtcgtaaaggatgaaaaagcatacgttcaggcaggagcaggagtcgtttacgattcagatccagtagctgaatatgaagaaacattaaataaagcgagagcgcttttggaggtaatgaaatga

SEQ ID NO: 3516 - protein, 475 aa, Bacillus cereus
MKDMMTKEEFIKQKRERKTFLVITEEEGDSITPISLYRRMKGKQKFLLESSQLHQDKGRYSYLGCNPYGEVKSVGTEVERTIYGRAEKLQGNVLQVLEEVIAPSQVDSPFPFCGGAVGYIGYDVIRQYENIGADLHDPLNIPEVHLLLYREFIVYDHLRQKLSFVYVCRQDDSADYEEVYERLRVYKEEVLQGEEAEVNTIQSPLSFTSSITEKEFCEMVEMAKEYIRAGDIFQVVLSQRLQSECIGDPFALYRKLRIANPSPYMFYIDFQDYVVLGSSPESLLSVREDKVMTNPIAGTRPRGKTKREDEEIAKELLGNEKERAEHMMLVDLGRNDIGRVSEIGSVTIDKYMKVEKYSHVMHIVSEVYGTLQKQMGGFDALAYCLPAGTVSGAPKIRAMEIINELENEKRNVYAGAVGYVSFSGNLDMALAIRTMVVKDEKAYVQAGAGVVYDSDPVAEYEETLNKARALLEVMK

SEQ ID NO: 3517 - DNA, 1398 bp, Bacillus cereus
  CDS (1)..(1398)
atgcaacgaagaaaatctttagcgctttctattccatatcagttagatttctttaagcaatataaatttctttctcagggtaaatcgcaacatattttgttagaaagcggccgtggcggtcgttataacattgtagggctgaacccagtagcggtaatccgagggaaggatgaaacgttacatataagtgaaagtggtaagggaacaataaaacgagggaatccgttagatttaatgcaagaatatatggaacaatggaagacggactataacccagagtatccgccttttcaaggtggtgcaattggctatttcagttatgactgtatccgttatattgaaaagctgccttctcttgcggaagatgatattgatatacctgacatcttctttttattatttgatgacgtatttgtctatgatcaaaaagaacaagtgttatgggttattacgcattatgtagataaatatgaagaggcgaaagaacggctaaatgagtggaagagtctttggatgacagaagcgcctgaagtgaccgtgccctttgaaagtcctgaaaagaaaagtgaagcagttgcttttactgaagctggctttatgaaggcagttgaatgtattcaagaatatattggagcgggtgatgtgttccaagtaaacttgtcgatgagacaagaaagaacgttacagacacacccactagaaatttatacaagtcttcgtgaaattaatccatctccatatatgggttacctggagcttggggattttcaaatcgttagtggatcgccagagttgttaattaagaaacaaggaactgaagtaagtacaagaccgattgctggaacgagatctagaggcgcggatgagcaagaggatgaagaattagcaagagaattaattgagaacgaaaaagaaagagcagagcatgtaatgcttgtggatttagaaagaaatgatttaggacgtgtttgtaaatatggcactgtagaagtagatgaatttatggtaattgagaaatactcacatgttatgcatattgtttctaatgtgcgtggtgaggtggaagaagataaagatgcttttgatttagtgaaggctgtattccctgggggaacaattactggtgccccaaaaatacgtacgatggaaattattgaggaattagaacctgttcgaagagggatttatacagggtcaatcggttggattggttattctggagatacagaattgaatattgtaattagaacacttcttgctaaagatggaaaagctcatgtacaagcaggggcgggaattgtaattgattcaaatccggaaaatgaatataaagagtcgttaaaaaaggcgattgctttatggcgtgcaaaagaacgtagtgaagaaacggttaggtga

SEQ ID NO: 3518 - protein, 465 aa, Bacillus cereus
MQRRKSLALSIPYQLDFFKQYKFLSQGKSQHILLESGRGGRYNIVGLNPVAVIRGKDETLHISESGKGTIKRGNPLDLMQEYMEQWKTDYNPEYPPFQGGAIGYFSYDCIRYIEKLPSLAEDDIDIPDIFFLLFDDVFVYDQKEQVLWVITHYVDKYEEAKERLNEWKSLWMTEAPEVTVPFESPEKKSEAVAFTEAGFMKAVECIQEYIGAGDVFQVNLSMRQERTLQTHPLEIYTSLREINPSPYMGYLELGDFQIVSGSPELLIKKQGTEVSTRPIAGTRSRGADEQEDEELARELIENEKERAEHVMLVDLERNDLGRVCKYGTVEVDEFMVIEKYSHVMHIVSNVRGEVEEDKDAFDLVKAVFPGGTITGAPKIRTMEIIEELEPVRRGIYTGSIGWIGYSGDTELNIVIRTLLAKDGKAHVQAGAGIVIDSNPENEYKESLKKAIALWRAKERSEETVR

SEQ ID NO: 3519 - DNA, 1416 bp, Bacillus anthracis
  CDS (1)..(1416)
atgacaaaagaggaatttataaaacagaaagaacaaagaaaaacatttttggtaatcgctgaagaagaaggagatagcattacgccaatttctttatatagacgtatgaaaggtaaaaagaaatttttattagaaagctcacagcttcatcaagataaagggcgttattcttacttaggttgtaatccatatggtgaagtgaaaagcgttggtacggaagtggaacgaacgatttacggcagggcagaaaagttgcaaagtaacgtactacaagtgttagaagaaataatcgcaccatcacaagtagacagtccatttccattttgcggaggagcagttggatacattggctatgacgtcattcggcaatatgaaaacattggagcagatttacatgatccattgaatattccagaagtacaccttttactgtaccgtgagtttatcgtgtatgaccacttacgccaaaagttgtcgtttgtatatgtatgcagggaagatgattcagcagattatgaagaagtatacgaaaggctgcgagtatacaaagaggaagtgctacagggagaagaagcggaagtaactgaaataagatcaacattatcattcacttcttctataacggaaagagaattttgcgtgatggtagaaacggcgaaagaacacatcggggccggggacatatttcaagttgtattatctcagcgtttgcaaagcgaatgtattggagatccattcgcgttatatcgaaaacttcgaattgccaatccatcaccatatatgttttatatcgattttcaagattatgttgtactcggttcttcgccagaaagtttgttatcagtaagggaggataaagtgatgacgaatccaattgctggtacgaggccgagagggaaaacgaaggaggaagatacggagattgaaaaagaactgttagaaaatgagaaagagcgagcggagcatatgatgcttgtagatcttgggcgaaatgatattggtagagtgagtgaaatcggctcagttacgatagataaatatatgaaagtagaaaaatattctcacgttatgcacattgtatctgaagtttacggaacattgcgaaaacaaatgagcggatttgatgcattagcgtactgtttaccagcggggacggtatcaggtgctccgaaaattagagcgatggaaattataaatgagctagagaatgaaaaaagaaatgtgtacgccggtgcagttggatacgttagtttttcagggaatcttgatatggcgctcgccattcgaacaatggttgtaaaggatgaaaaagcatacgttcaggcaggagcgggtattgtttacgattcagatccagtagctgaatatgaagaaacattaaataaagcgagagcgctattggaggtaatgaaatga

SEQ ID NO: 3520 - protein, 471 aa, Bacillus anthracis
MTKEEFIKQKEQRKTFLVIAEEEGDSITPISLYRRMKGKKKFLLESSQLHQDKGRYSYLGCNPYGEVKSVGTEVERTIYGRAEKLQSNVLQVLEEIIAPSQVDSPFPFCGGAVGYIGYDVIRQYENIGADLHDPLNIPEVHLLLYREFIVYDHLRQKLSFVYVCREDDSADYEEVYERLRVYKEEVLQGEEAEVTEIRSTLSFTSSITEREFCVMVETAKEHIGAGDIFQVVLSQRLQSECIGDPFALYRKLRIANPSPYMFYIDFQDYVVLGSSPESLLSVREDKVMTNPIAGTRPRGKTKEEDTEIEKELLENEKERAEHMMLVDLGRNDIGRVSEIGSVTIDKYMKVEKYSHVMHIVSEVYGTLRKQMSGFDALAYCLPAGTVSGAPKIRAMEIINELENEKRNVYAGAVGYVSFSGNLDMALAIRTMVVKDEKAYVQAGAGIVYDSDPVAEYEETLNKARALLEVMK

SEQ ID NO: 3521 - DNA, 1482 bp, Streptomyces avermitilis
  CDS (1)..(1482)
atggacctcgagacgttccgcaagctggccaccgaccgccgtgtcattcccgtcagccgcaaactcctcgccgacggcgacaccccggtcgggctctaccgcaagctcgccgccgagcgccccggcaccttcctcctggagtccgcggagaacggccgctcggcgttcaaatggtcccgctactccttcgtgggcgtccgctccgccgccaccctcaccgagcgtgacgggcaggcgcactggctcggcaccccgcccgtgggcgtccccacggacggcgacccgctcgccgccctgcgcgccaccatcgaggcgctgcacacgccccacgaggagggcctgccgcccttcaccggcggcatggtcggctatctcggctacgacatcgtgcgccgcctggagaagatcggccccggcgagcgcgacgatctgaaacttcccgagctgaccatgctcctcaccagcgatctggccgtcatggaccactgggagggctccgtcctgctgatcgccaacgcgatcaaccacaacgacctcgacacgggcgtcgacgaggcctacgcggacgcggtcgcccgcctcgacgccatggaggcggacctgtcgcgcgcggtcgcgcagccccccgccgccctcccgccctccgaactcccggagtacaccgccctctggggcggccccgacttccaggacgccgtcgaggacatcaaggagcgcatccgggcgggcgaggcgttccaggtcgtcccctcccagcgcttcgaaacgccgtgcacggcaagcgcgttggacgtctaccgggtactgcgggcgaccaacccctcaccgtacatgtacctcttccgcttcgagggcttcgacgtggtcggctcgtcccccgaggccctcgtcaaggtcgaggacgggcaggcgatggtccaccccatcgcgggcacccggccgcgcggcgcgaccccgcaggaggaccaggccctcgcggacgagctgctggccgaccccaaggagcgcgccgagcacctgatgctcgtcgacctggggcgcaacgatctggggcgggtctgcgagcccggttccgtcgaggtcgtcgacttcatgaccatcgagcgctactcgcacgtgatgcacatcgtgtcgaccgtgaccgggcgggtcgcgcgggggcgtacggccttcgacgtgctgacggcctgcttcccggccggcaccctctccggcgcgcccaagccccgcgccctgcagatcatcgacgaactggagccgtcccggcgggggctgtacggcggctgcgtcggctacctcgacttcgcgggcgactccgacaccgccatcgccatccgcacggcgctgctgcgcgacggcacggcgtacgtgcaggcgggcgccggcatcgtcgcggactcggacccggtcgccgaggacgacgagtgccgcaacaaggcggcggcggtcctgcgcgcggtccacacggcgaaccggctgtag

SEQ ID NO: 3522 - protein, 493 aa, Streptomyces avermitilis
MDLETFRKLATDRRVIPVSRKLLADGDTPVGLYRKLAAERPGTFLLESAENGRSAFKWSRYSFVGVRSAATLTERDGQAHWLGTPPVGVPTDGDPLAALRATIEALHTPHEEGLPPFTGGMVGYLGYDIVRRLEKIGPGERDDLKLPELTMLLTSDLAVMDHWEGSVLLIANAINHNDLDTGVDEAYADAVARLDAMEADLSRAVAQPPAALPPSELPEYTALWGGPDFQDAVEDIKERIRAGEAFQVVPSQRFETPCTASALDVYRVLRATNPSPYMYLFRFEGFDVVGSSPEALVKVEDGQAMVHPIAGTRPRGATPQEDQALADELLADPKERAEHLMLVDLGRNDLGRVCEPGSVEVVDFMTIERYSHVMHIVSTVTGRVARGRTAFDVLTACFPAGTLSGAPKPRALQIIDELEPSRRGLYGGCVGYLDFAGDSDTAIAIRTALLRDGTAYVQAGAGIVADSDPVAEDDECRNKAAAVLRAVHTANRL

SEQ ID NO: 3523 - DNA, 2199 bp, Streptomyces avermitilis
  CDS (1)..(2199)
atgaagaccctgctcatcgacaattacgactcgtacacgtacaacctgttccagctgatcgccgaggtgaacggcgaggagccggtggtcgtcctcaatgacgccccgccggacgacattccggatctccgggatttcgccaacgtggtggtgtcgccggggcccggacaccccgcgaagagacgtgacttcggcatcgtcggcgagctgctcgccgcggcccccgtgcccgtgctgggcgtctgcctcggccaccagggcatcgcggcgggggagcgggcctgggtgaccccggcaccggagccccgccacggccatctgtccaccgtccggcacaacggccaggacctgttcgagggcctgccccagcagttcaccgcggtccgctaccactccctgtcggtacgggaaccgctgccactgagcctggagcccaccgcctgggcggaggacggcgtgctgatgggactgcggcaccgctcccggccgctgtggggggtgcagttccacccggagtccgtcctcaccgagttcggccaccggatgttcgtgaacttccgcgagctgacggcctcccgcgcccgcgagactcgcacggccaaggcccgtacgtccggaacgcgcacgaccgagccccccgtgcggcccccgtccccaagcgccgagggggccggggcagcacccgccgtgctggtcccccggccccgtcgcgtggccccgtcccaccgccttcacacccggcggatcgacgtggccgtggacgccgaggcggccttcacccggatgtacaccgacgcgccccgcgcgttctggctcgacagctcccgggtcgaggagggacagtcccgtttctcgttcttcggtgacggcaccggaccgctggccgagttcgtacggtacgacgtcgagagcggcctctgtgagatcgagcggcccgggcggcccgtgcgcaaggtcagggccagcgtcttcgactacctgaaacggcagttggtgacccgtcaggtggatgccacgggactgccgttcgacttcaccggcgggtatgtgggctacttcggctacgaggtgaaggccgactgcggttccgtcaaccgtcatcgggcccgaactcccgacgcctgctggctgttcgccgaccggctgatcgcagtggaccatcaggacggagccacctacgccgtctgtctcgccgagaacacccggcagggcgcacagcaagcggccgactggctcgacgcggcgatggcccagctcagtttcgtgtcctcggccaagccgaccgccccgccgcggccgacggcaccccgcctcgatgccgtggagccgtggctggtccgcgaccgtacgacctacctcgcggacatcgggacctgcaagcgggaactcaaggacggcaccagttacgagatctgtctgaccaacgcggccaggctgcccgccccgtacgacccctacgacttctaccgggtactgcgtcgtctcgacccggcgccgtacgcggcctatctgcggttcggtgacctcgatgtggccggctcgtcccccgagcgttttctgcggatcacccgcgacggcgtcgccgaggccagacccgtcaagggcaccgcgccccgcggcgagcggccggaggaggacgcccggctacgggacgcgctcaccacggacgacaagacccgcgcggagaacctggtgatcgtcgacctgctccgcaacgacctgggccgggtctgccggaccgggacggtgaaggtcacccgcctgatggcgaccgagacgtgcgccaccgtgcaccagttggtctccaccgtcgaggggcggctgcgcgagggcatcggagcggtggactgcgtacgtgtctgcttccccggaggttcggtgaccggggcgccgaaactgcgcacgatggagatcatcgactcgctggagaccgaggcccgcggggtgtactccggagccatcggctacttcgggtgcagtgggggcgcggacctcgccatcgccagccgcacggccgtgttcaccgacggggagatgcacctcggcgcgggcggtgcgatcgtcctcggctccgatccggtcggcgagtacgacgagatgctgctgaagacggccgcaccgatgcgcgcccaccgcgaccggatcgccggcctgcggcccgccgcccgcacgctcccgctgaaggaggcggtccgatga

SEQ ID NO: 3524 - protein, 732 aa, Streptomyces avermitilis
MKTLLIDNYDSYTYNLFQLIAEVNGEEPVVVLNDAPPDDIPDLRDFANVVVSPGPGHPAKRRDFGIVGELLAAAPVPVLGVCLGHQGIAAGERAWVTPAPEPRHGHLSTVRHNGQDLFEGLPQQFTAVRYHSLSVREPLPLSLEPTAWAEDGVLMGLRHRSRPLWGVQFHPESVLTEFGHRMFVNFRELTASRARETRTAKARTSGTRTTEPPVRPPSPSAEGAGAAPAVLVPRPRRVAPSHRLHTRRIDVAVDAEAAFTRMYTDAPRAFWLDSSRVEEGQSRFSFFGDGTGPLAEFVRYDVESGLCEIERPGRPVRKVRASVFDYLKRQLVTRQVDATGLPFDFTGGYVGYFGYEVKADCGSVNRHRARTPDACWLFADRLIAVDHQDGATYAVCLAENTRQGAQQAADWLDAAMAQLSFVSSAKPTAPPRPTAPRLDAVEPWLVRDRTTYLADIGTCKRELKDGTSYEICLTNAARLPAPYDPYDFYRVLRRLDPAPYAAYLRFGDLDVAGSSPERFLRITRDGVAEARPVKGTAPRGERPEEDARLRDALTTDDKTRAENLVIVDLLRNDLGRVCRTGTVKVTRLMATETCATVHQLVSTVEGRLREGIGAVDCVRVCFPGGSVTGAPKLRTMEIIDSLETEARGVYSGAIGYFGCSGGADLAIASRTAVFTDGEMHLGAGGAIVLGSDPVGEYDEMLLKTAAPMRAHRDRIAGLRPAARTLPLKEAVR

SEQ ID NO: 3525 - DNA, 1488 bp, Nitrosomonas europaea
  CDS (1)..(1488)
atgaatcattgcataactgaaagtgaattcaacgatctggcagcacaaggctataaccggatacctctggtgctggaaacattcgctgatctggatacgcccctctccatttacctcaagctggcgaaccagccttattcctatttactggaatcgatcctgggaggggagcggttcgggcgttactcggtcatcggattacctgcagaaatacggctggaagcatgttccagccgtgttcgcgtcatcagtggcaatgaaacgaaggaagaaatcgataccagcgacgtgctgggtttcattggcaccttcctgaaccggttcaaggtagcaccccatgcggaattgcctcgtttcagcggaggactggccgggtatttttcctacgataccattcgttacatcgagccaaaactagcagggcatgcacggccggatacgatacaaacaccggatattctgttactgctgtcggaagaactggttgtcatggacaatctctccggcaagctttacctgatcatctataccgacccgacactggaaaatgcctatcagaccagcaaaaatcggctccgggaattgctgcacaaactgcgagagccgctctcgataccagtcgagaaatctacttcctccaaagtagctgtgagtgaatttcccgaagccgacttcattgccgcagtggaaaaagccaagcattacatcctggagggcgacatcatgcaggttgtcctctcgcagcgtaccagcaaaccctactctgcttcaccattggcactgtatcgtgcgctgcgcagcctcaacccatcaccctatatgttcaattatcatctgggaaattttcatatcgttggcgcctcaccggaaattctggtcagactggaaaaggatacagttaccgtccgtccaattgccggtacccgaccacgtggccaggatacccaggctgacctggcactggcggcagatttgctggccgatcccaaggagcgggcggaacatatcatgctgatggatctgggacgcaacgatatcggccgggttgcccagaccggtagcgtaaaagtcactgagaacatgcagatagaatattattcgcatgtcatgcacattgtttccaatgttgaaggaaagctcaaatcgggtttgaatgcgatcgacgtactacgcgccaccttccctgcgggtaccgtcagcggcgcacccaaagtcagagcaatggaaatcatcgatgagctggaaatctccaagcgcggtatttatgctggcgcagtcggttatctcgaattcaatggcgacatggacttggccatcgcaatccgtaccggcctgatcaaggacggcatactgcatgtgcaggcgggagctggtatcgtagctgactctgttccacaaagtgagtggaccgaaacctgcaacaaagcgagggctgtcctgcgagcggcagaaattgccgagaatggcctggacagtacgatcacctga

SEQ ID NO: 3526 - protein, 495 aa, Nitrosomonas europaea
MNHCITESEFNDLAAQGYNRIPLVLETFADLDTPLSIYLKLANQPYSYLLESILGGERFGRYSVIGLPAEIRLEACSSRVRVISGNETKEEIDTSDVLGFIGTFLNRFKVAPHAELPRFSGGLAGYFSYDTIRYIEPKLAGHARPDTIQTPDILLLLSEELVVMDNLSGKLYLIIYTDPTLENAYQTSKNRLRELLHKLREPLSIPVEKSTSSKVAVSEFPEADFIAAVEKAKHYILEGDIMQVVLSQRTSKPYSASPLALYRALRSLNPSPYMFNYHLGNFHIVGASPEILVRLEKDTVTVRPIAGTRPRGQDTQADLALAADLLADPKERAEHIMLMDLGRNDIGRVAQTGSVKVTENMQIEYYSHVMHIVSNVEGKLKSGLNAIDVLRATFPAGTVSGAPKVRAMEIIDELEISKRGIYAGAVGYLEFNGDMDLAIAIRTGLIKDGILHVQAGAGIVADSVPQSEWTETCNKARAVLRAAEIAENGLDSTIT

SEQ ID NO: 3527 - DNA, 1293 bp, Coxiella burnetii
  CDS (1)..(1293)
atgaaagcaaaaattatcgagctgccttactttgaggatggggctgaatgtttttcgcattttgcgcatttgccttatgctgtttttttagatggttgcgaacgttaccatgtcataacagcacagccgcgtaaaactattaccgacaatatatttattcaaactcgcgctgctttacacgaattaaaatcgactgtacaaattcctccgtcagtttcgcatttgccttttaaaatcggcgctatcgggtatttaagttacgatttagcgcgacattattttcccttaaaggcacaaactaaaatcgatatcacgcttcctttggcggtcatggggatatacgattggagcttagtcatcgaccatcatgagcaaaaaacatgggcaattgcattttcggatgaacagttacgccatatccaaacgcaattaattacgccagcacacattgacctcttccacctgcttaacgattttcattccaacatgacccgcgacgattacgcctttgcctttaaaaaaatccaacaccacttgaggcagggcgattgctatcaagtaaatctttgccaacgttttagtgccacgtatcaaggttcaccttggtacgcctatcgatatctgcgacaaacgcaccctactcccttttcgacgtactttaaccttgacaatcagagggcgattttaagcttttctccagaacggtttttgcgagtagaaaaaaaccaagtggaaacaaaacccattaaaggcaccgcacctcgatttaaagatccatttgaagaccagcgctcagcagaaagtttattaaatagtgaaaaagaccgtgctgaaaatttaatgattgtcgatttattacgaaatgatctgtcaaaatgctgcaaacctaactccattcgtgtacctaaattagttgcgctggaaagtttccccaatgtccatcatctcgttagcaccattacaggacatttgcaggataatcaagatgcgcttgatttattgcggcattgctttccgggcggctctatcacgggcgcgcctaaattgagcgcaatgcaaattattgaaagtctcgaaacgcatcaccgttccgtttattgtggtgcgctgggttatctcgatatcagcggcgatttggattgcaatattatgattcgcaccttaatttgtgatcgcaaccgaatacattgctatggcggtggcggcattgttgctgattctgaactggaaagtgaatatcaagagtctcaattaaaagtcgaaaaactgattaatcaagtgagccgtttatga

SEQ ID NO: 3528 - protein, 430 aa, Coxiella burnetii
MKAKIIELPYFEDGAECFSHFAHLPYAVFLDGCERYHVITAQPRKTITDNIFIQTRAALHELKSTVQIPPSVSHLPFKIGAIGYLSYDLARHYFPLKAQTKIDITLPLAVMGIYDWSLVIDHHEQKTWAIAFSDEQLRHIQTQLITPAHIDLFHLLNDFHSNMTRDDYAFAFKKIQHHLRQGDCYQVNLCQRFSATYQGSPWYAYRYLRQTHPTPFSTYFNLDNQRAILSFSPERFLRVEKNQVETKPIKGTAPRFKDPFEDQRSAESLLNSEKDRAENLMIVDLLRNDLSKCCKPNSIRVPKLVALESFPNVHHLVSTITGHLQDNQDALDLLRHCFPGGSITGAPKLSAMQIIESLETHHRSVYCGALGYLDISGDLDCNIMIRTLICDRNRIHCYGGGGIVADSELESEYQESQLKVEKLINQVSRL

SEQ ID NO: 3529 - DNA, 1392 bp, Coxiella burnetii
  CDS (1)..(1392)
atgcttacgccaacccgggctttttatcaattgctggatttgtatccaacagcgattttgctggaatttagcccacgcaatgaaaagccctacgcttttatcggattcaacccgttagcccagatcatcgctcgcggggatgaaattaccgtttttttaaaaaacactgtcaccaaaatgaagggtgaccccttccatcatctacgccgtttacgccaacaaatcaattgcattgataaccatccattaacgaaattaacaggcgcagcaatcggctatttaagttacgatgctatccgttatgtagaatctattcctgatcgtcacacagcctctgaaaaaattgctgacattgattttaaattttatcgcgatggcattacctttgatctagaaagcaataatgccattgtttctcacattgttgaagttaaagacgaattaaaacattgctacgaatacggattagaaaaactagccgatattaccaataatctttttacgcccgcccgcccaaagctttcgacgaatcgaaaaactcattactcaaaatcaacttccctggatttcaaacccgatagcaatgacaccgattttaaaaaaatcgttaacaaggccaagcaatacattgccgcgggcgacatctttcaagtcgtgtcttcccgaacttttaaaaaaccgtatcaaggcaaaccctttgatatctaccgcgctttaaaaaaagtaagcccttctccctatcacttttatttacaaaatgattctcttgctatcgccggcgcttcaccggaaaaaatggttagcgttaaaaacggcataatcgacagcgtacctctcgccggcacgcggcctcgcggtaacggcaaaagtgatcagacattagcgcaggaattaataaatgatccgaaagaaacggctgagcatttaatgctagtggatctcgctcgcaatgatatcgggattgtttcacaagcgggtagcgtggaagtagcagaactgatgcagccggttaatttttcgcatgtcatgcaccttgcttctcgagttcaagtctcattagcaaaaaattatgacgcgattgatgtattaaaagctacctttcccgctggcactttaagcggtgcacctaaaattcgagcgatggaaattatcgatgaactcgaacattctcgtcgcggtttatacggtggcgccatcgttgctttagaccgcgacgataatttagatacttgcattattattcgtacgacgatagtcgaaaatggaatagcttctattcgcgcgggcgccggtattgttcatgattcggatccgattgccgaagctaatgaaacgcgtcacaaagcgaaaagcgtcatggccgccatccaactgaccgaaggaggattataa

SEQ ID NO: 3530 - protein, 463 aa, Coxiella burnetii
MLTPTRAFYQLLDLYPTAILLEFSPRNEKPYAFIGFNPLAQIIARGDEITVFLKNTVTKMKGDPFHHLRRLRQQINCIDNHPLTKLTGAAIGYLSYDAIRYVESIPDRHTASEKIADIDFKFYRDGITFDLESNNAIVSHIVEVKDELKHCYEYGLEKLADITNNLFTPARPKLSTNRKTHYSKSTSLDFKPDSNDTDFKKIVNKAKQYIAAGDIFQVVSSRTFKKPYQGKPFDIYRALKKVSPSPYHFYLQNDSLAIAGASPEKMVSVKNGIIDSVPLAGTRPRGNGKSDQTLAQELINDPKETAEHLMLVDLARNDIGIVSQAGSVEVAELMQPVNFSHVMHLASRVQVSLAKNYDAIDVLKATFPAGTLSGAPKIRAMEIIDELEHSRRGLYGGAIVALDRDDNLDTCIIIRTTIVENGIASIRAGAGIVHDSDPIAEANETRHKAKSVMAAIQLTEGGL

SEQ ID NO: 3531 - DNA, 1443 bp, Tropheryma whipplei
  CDS (1)..(1443)
atggagacaattgtggaagaagatcggggtgttttttgggtggattaccccgttgacctctccgaggattttgctgacagttgtttccgatacctctttgaagcccttttttacgattcggagaattgcttttggctggatgatgcacgaccactgcaaaaccgacgacgcagtgcgattggctctggtccgtcggtgagtcttcgatctgggagctgtcttgatccgactgatgtggagtcttttttctcaaagctcttggattgtgacccacagccttggccattaggctttgttgggtggattgattacgaagttggcgcatgtctattgggtgtaaattatccaacacagcaagatgctcctgctacaggtcaaactaatttatcctcgtggatttgctgcaaccgcgcgatatgtattgactacagaatgggattgctgaaaattatcagtttttccaaaaatactgttgatgcaaaagaatgggtaaatagggcttcaactctggttgagaagctcttgatgaaaggttcaatagaccgagaagattatatcccgcaggctaaatcaaggcatttagcaaactcaaaactcatgccaagaaatagttttgcttcagggttgcagtggcttcataccgatcaacaatatttgcaacttattcacagagttctggaaaaaatcatgcgtggagatgtttaccaaatttgtctggctaacagacttacgatcaggaactccggtaacaggtcaccattttctgccttttgggcccttagacagaaaagtccaacacagtactgtgcctatatcaaaatcggaccgcgccactttgttagctcttccccagagctttttctggcattatctgacaatattcttgtcacagaaccgatcaagggaacacgcccaaggggtaggtctccttccgaggattcatatctgatatcggagcttaaaacttctgaaaaagagaaagccgaaaaccttatgattgtcgatctaatgcgcaatgattttagtaaaatctgctcttcggttgaagttgattatatgtatagggtcagaacatataagggtttgcatcagcttgtatcgagagtaagcggtatcttgcgcccaggacgtggattttttgatattttgtgtgcaacatttccagcaggatcagtgaccggagcacctaaaatcgcagccgtcaagtctatatatgatttggaaagggcaagaaggggagtttattcaggtgcattcggttatatatcgggcgatggaaagaatatctgttttgcgatgtctattagatcagcagttttttgcaatggagaagtcagtattggtagtggagggggagtggtgtttgatagcgatccggagtttgaacttgccgagactaaactgaaggtagcggcaatgattgatgcgattttgggtaggtag

SEQ ID NO: 3532 - protein, 480 aa, Tropheryma whipplei
METIVEEDRGVFWVDYPVDLSEDFADSCFRYLFEALFYDSENCFWLDDARPLQNRRRSAIGSGPSVSLRSGSCLDPTDVESFFSKLLDCDPQPWPLGFVGWIDYEVGACLLGVNYPTQQDAPATGQTNLSSWICCNRAICIDYRMGLLKIISFSKNTVDAKEWVNRASTLVEKLLMKGSIDREDYIPQAKSRHLANSKLMPRNSFASGLQWLHTDQQYLQLIHRVLEKIMRGDVYQICLANRLTIRNSGNRSPFSAFWALRQKSPTQYCAYIKIGPRHFVSSSPELFLALSDNILVTEPIKGTRPRGRSPSEDSYLISELKTSEKEKAENLMIVDLMRNDFSKICSSVEVDYMYRVRTYKGLHQLVSRVSGILRPGRGFFDILCATFPAGSVTGAPKIAAVKSIYDLERARRGVYSGAFGYISGDGKNICFAMSIRSAVFCNGEVSIGSGGGVVFDSDPEFELAETKLKVAAMIDAILGR

SEQ ID NO: 3533 - DNA, 1494 bp, Burkholderia multivorans
  CDS (1)..(1494)
atgaccgaactcgaattccaatcgctcgcgaacgaaggctataaccgcatcccgctgatcgccgaagcgctcgccgatctcgaaacgccgctgtcgctctacctgaagctcgcgcagcccgaacgcgccggcgcgaactccttcctgctcgaatcggtggtcggcggcgaacgcttcggccgctactcgttcatcgggctgccggcacgcacgctcgtgcgcacccgcaacggcgtctccgaagtcgtgcgcgacggcgcggtcgtcgagacgcacgacggcgatccgttcgagttcatcgcgtcgttccaggcgcgcttcaaggtcgcgcagcgccccggtctgccgcgcttctgcggcggtctggccggctatttcggctacgacgcggtgcgctacatcgagaagaagctcgcacacaccgcgccgcgcgacgatctcggcctgcccgacatccagctgctgctcaccgaggaagtcgcggtgatcgacaacctcgccggcaagctgtatctgatcatctacgcggatccgggccagcccgaggcgtacgcgaaggcgaagcagcgcctgcgcgagctcaagcagcggctgcgcgcgaccgtgcagccgcccgtcacgtcggcgagcgtgcgcaccgagacgttccgcgaattcaagaaggacgactatctggccgccgtgcgtcaggcgaaggaatacatcgcggccggcgagctgatgcagatccaggtcggacagcgcctgacgaagccctatcgcgacaatccgctgtcgctgtatcgcgcgctgcgctcgctgaatccgtcgccgtacatgtactactacaacttcggcgagttccacgtggtcggcgcgtcgccggaaatcctcgtgcgccaggaaaagcgcggcgacgaccagatcgtcacgatccgcccgctcgccggcacacgcccgcgcggcaacacgcccgagcgcgacgcggaactcgcgaccgagctgctgaacgatccgaaggaaatcgccgagcacgtgatgctgattgacctcgcgcgcaacgacgtcggccgcatcgccgacatcggctcggtgcaggtgaccgacaagatggtgatcgagaagtactcgcacgtgcagcacatcgtcagctcggtcgaaggcaagctcaagcccggcatgacgaacttcgacgtgctgcgcgcgacgttcccggccggcacgctgtccggcgcgccgaaggtgcgcgcgatggagctgatcgacgagctcgagcccgtcaagcgcgggctctacggcggcgccgtcggctatctgtcgttctcgggcgagatggatctcgcgatcgcgatccgcacgggcctgatccacaacggcaacctgtatgtgcaagcggcggccggcgtcgtcgcggattcggtgcccgaatccgaatggcaagagaccgagaacaaggcgcgcgcggtgctgcgcgcggccgaacaggtccaggacggcctcgatagcgacttctga

SEQ ID NO: 3534 - protein, 497 aa, Burkholderia multivorans
MTELEFQSLANEGYNRIPLIAEALADLETPLSLYLKLAQPERAGANSFLLESVVGGERFGRYSFIGLPARTLVRTRNGVSEVVRDGAVVETHDGDPFEFIASFQARFKVAQRPGLPRFCGGLAGYFGYDAVRYIEKKLAHTAPRDDLGLPDIQLLLTEEVAVIDNLAGKLYLIIYADPGQPEAYAKAKQRLRELKQRLRATVQPPVTSASVRTETFREFKKDDYLAAVRQAKEYIAAGELMQIQVGQRLTKPYRDNPLSLYRALRSLNPSPYMYYYNFGEFHVVGASPEILVRQEKRGDDQIVTIRPLAGTRPRGNTPERDAELATELLNDPKEIAEHVMLIDLARNDVGRIADIGSVQVTDKMVIEKYSHVQHIVSSVEGKLKPGMTNFDVLRATFPAGTLSGAPKVRAMELIDELEPVKRGLYGGAVGYLSFSGEMDLAIAIRTGLIHNGNLYVQAAAGVVADSVPESEWQETENKARAVLRAAEQVQDGLDSDF

SEQ ID NO: 3535 - DNA, 1851 bp, Oryza sativa
  CDS (1)..(1851)
atggagtccatcgccgccgccacgttcacgccctcgcgcctcgccgcccgccccgccactccggcggcggcggcggccccggttagagcgagggcggcggtagcggcaggagggaggaggaggacgagtaggcgcggcggcgtgaggtgctccgcggggaagccagaggcaagcgcggtgatcaacgggagcgcggcggcgcgggcggcggaggaggacaggaggcgcttcttcgaggcggcggagcgtgggagcgggaagggcaacctggtgcccatgtgggagtgcatcgtctccgaccacctcacccccgtgctcgcctaccgctgcctcgtccccgaggacaacatggagacgcccagcttcctcttcgagtccgtcgagcaggggcccgagggcaccaccaacgtcggtcgctatagcatggtgggagcccacccagtgatggaggtcgtggcaaaggagcacaaggtcacaatcatggaccacgagaagggcaaggtgacggagcaggtcgtggatgatcctatgcagatccccaggagcatgatggaaggatggcacccgcagcagatcgatcagctccccgattccttcaccggtggatgggtcgggttcttttcctatgatacagtccgttatgttgaaaagaagaagctgcccttctccggtgctccccaggacgataggaaccttcctgatgttcaccttgggctttatgatgatgttctcgtcttcgacaatgtcgagaagaaagtatatgtcatccattgggtaaatcttgatcggcatgcaaccaccgaggatgcattccaagatggcaagtcccggctgaacctgttgctatctaaagtgcacaattcaaatgtcttctatatcttatttcattttcactccagacccaagctttctccaggatttgtaaagttacacactcggcagtttggtacacctttgaacaaatcaaccatgacaagtgatgagtacaagaatgctgttatgcaggctaaggagcatattatggctggtgatattttccagattgttttaagccagaggtttgagaggcgaacatacgccaatccatttgaagtctatcgagctttacgaattgtgaacccaagtccatacatggcatatgtacaggcaagaggctgtgtcctggtagcatctagtccagaaattcttactcgtgtgaggaagggtaaaattattaaccgtccacttgctgggactgttcgaaggggcaagacagagaaggaagatgaaatgcaagagcaacagctactaagtgatgaaaaacagtgtgctgaacatattatgcttgtagatttgggaaggaatgatgttggaaaggtctccaaacctggatctgtgaaggtggagaaattaatgaacattgaacgctactcccatgtcatgcacatcagttccacggtgagtggagagttggatgatcatctccaaagttgggatgccctgcgagccgcgttgcctgttggaacagttagtggagcaccaaaggtgaaagccatggagctgatagacgagctagaggtcacaagacgaggaccatacagtggcggccttggagggatatcatttgacggagacatgcttatcgctcttgcactccgcaccattgtgttctcaacagcgccaagccacaacacgatgtactcatacaaagacaccgagaggcgccgggagtgggtcgctcaccttcaggctggtgctggcattgtcgctgatagcagcccagacgacgagcaacgtgaatgcgagaacaaggcagccgctctggctcgagccatcgatcttgctgaatcagctttcgtagacaaggaatag

SEQ ID NO: 3536 - protein, 616 aa, Oryza sativa
MESIAAATFTPSRLAARPATPAAAAAPVRARAAVAAGGRRRTSRRGGVRCSAGKPEASAVINGSAAARAAEEDRRRFFEAAERGSGKGNLVPMWECIVSDHLTPVLAYRCLVPEDNMETPSFLFESVEQGPEGTTNVGRYSMVGAHPVMEVVAKEHKVTIMDHEKGKVTEQVVDDPMQIPRSMMEGWHPQQIDQLPDSFTGGWVGFFSYDTVRYVEKKKLPFSGAPQDDRNLPDVHLGLYDDVLVFDNVEKKVYVIHWVNLDRHATTEDAFQDGKSRLNLLLSKVHNSNVFYILFHFHSRPKLSPGFVKLHTRQFGTPLNKSTMTSDEYKNAVMQAKEHIMAGDIFQIVLSQRFERRTYANPFEVYRALRIVNPSPYMAYVQARGCVLVASSPEILTRVRKGKIINRPLAGTVRRGKTEKEDEMQEQQLLSDEKQCAEHIMLVDLGRNDVGKVSKPGSVKVEKLMNIERYSHVMHISSTVSGELDDHLQSWDALRAALPVGTVSGAPKVKAMELIDELEVTRRGPYSGGLGGISFDGDMLIALALRTIVFSTAPSHNTMYSYKDTERRREWVAHLQAGAGIVADSSPDDEQRECENKAAALARAIDLAESAFVDKE

SEQ ID NO: 3537 - DNA, 2241 bp, Neurospora crassa
  CDS (493)..(2241)
atggctcccctaccactcccacgcatacccgcctcaacggccgagaaactccaagactttgtcttcaaacggatcgtacacccagctctccaaggagtcgaagccatccaccctacaagaaccttcagccccatcacccggcggcaagatgccccgcccaccgccacggtaaccttcgtccaagtcgacaacgacaacgacaacgaccctgatgacgcgcaaaccctcagcggcggcgccattgccggcatcgtcatcggctccatcgtcggcttgcttcttctcatctggattatccgcagctgcttcaacctgggcgctccaccgacacacggcaagcgcaacagcaaggcttgcgtcacttggtgcatgatgtacacctttgatgccggcttatcggcttatcggccgtcaaggttgcgttcagccaggaacaaaccccgcccttccggcaccttttggcaggaagccccactccttcagttgttcaggatggctgccctcgacatcaggccgtccctggaggacgcgcgcaagctcttcgaccagacatgccaagcatcagcgacctcgacagcatccccaaggcccacccttctccccctctgcatctccttgcctgccgacctcttgacgccctcggccatctacctcaagctctccgcaggagcgacagctgagtactcgttcctcctcgagagcgccactggcagcaccgagactgtcggccgctacagcttcattggcgccaacccccgaaaggtcctcgagaccggccccggctaccaagatgtcggcgatcccatgaaggcccttgagcaggagctcagccaggacaaggtcctcagcatcccctccctccgactccccaagctgacgggcggcgctgtcggctacatctcgtacgactgcatcaagtacttcgagcccaggacggtcaagggtcgcgaactcaaggacaacctacacatccccgaggcccttttcatgctctacgataccatggttgcgttcgaccacttctcctccgccttcaccgtcgtcacccatgtccgacttcccgaggacccctccggcgacttcgaggcggcctacaacgcggcttgcgacagcattcgctcgacactcgaagtgatcaaccagccagagacgccgctcccgcccaaggactctagcgctcccgtcgccgatcagacattcgcttcgaacgttgggcgccacggttacgagacctttgtgacggagctcaagaagaacattgtcaagggtgacatcatccaggccgtcccatcccagcgcttctctcgcagcaccagcctgcaccccttcaacatttaccggaccctgcgcacgctcaacccctcgccgtacctcttcttcctctcgtgctctgacttccacattgttggcgcctcgcccgaatgcctgatgaagaccgacggctatgccgaccttcccacggatacccgttttggctatagtgctgccgaggcccgctctcgtcccaggatcgtcaaccacgccattgccggtaccatcaagcgtggcctcaactcggaggaggacgatgagcttgcggccgtgctgctggcctcaaccaaggaccgcgccgagcacgtcatgttggtcgatttggcccgcaacgatgtcaaccgtgtctgccacccgtctaccgtcaaggtcgaccgcctcatgcgcatcgaccgtttctcacacgtccaacatatcacctcggaggtctccggtctgctgcgccccgagtgcacccgctgggacgctttgcgctccatcttccccgccggtaccgtgtcgggcgcgcccaagattcgtgccatggagctgatttacgacttggagaaggagaagcgcggcatctacgctggcgctgccggttggttcgcctatgatgtcattcgcgtcgaaggtggtgagggtgatgcccctgttaccactttcttgagcgaaggacagatggatacctgcattgctatccgcaccatgttggtcaagaataaggttgcctacctacaggcgggcggtggtattgtatttgacagtgagaagacggaggagtggatggagaccatgaacaagttggccgccaacttgcgctgcatcgaactggctgagaagtactacggcgaaagtacgggatccaagtcggtgcaggaaatcattgaggaggagaggaagaagggcgacgagcagtacaagctgcagacgatgagcgctggggcgtaa

SEQ ID NO: 3538 - protein, 582 aa, Neurospora crassa
MAALDIRPSLEDARKLFDQTCQASATSTASPRPTLLPLCISLPADLLTPSAIYLKLSAGATAEYSFLLESATGSTETVGRYSFIGANPRKVLETGPGYQDVGDPMKALEQELSQDKVLSIPSLRLPKLTGGAVGYISYDCIKYFEPRTVKGRELKDNLHIPEALFMLYDTMVAFDHFSSAFTVVTHVRLPEDPSGDFEAAYNAACDSIRSTLEVINQPETPLPPKDSSAPVADQTFASNVGRHGYETFVTELKKNIVKGDIIQAVPSQRFSRSTSLHPFNIYRTLRTLNPSPYLFFLSCSDFHIVGASPECLMKTDGYADLPTDTRFGYSAAEARSRPRIVNHAIAGTIKRGLNSEEDDELAAVLLASTKDRAEHVMLVDLARNDVNRVCHPSTVKVDRLMRIDRFSHVQHITSEVSGLLRPECTRWDALRSIFPAGTVSGAPKIRAMELIYDLEKEKRGIYAGAAGWFAYDVIRVEGGEGDAPVTTFLSEGQMDTCIAIRTMLVKNKVAYLQAGGGIVFDSEKTEEWMETMNKLAANLRCIELAEKYYGESTGSKSVQEIIEEERKKGDEQYKLQTMSAGA

SEQ ID NO: 3539 - DNA, 1359 bp, Xylella fastidiosa
  CDS (1)..(1359)
atgacactcattcgatttctgcgtacggatccggatttattgtccatgcaccggttggcaccggagcgttatccggcgctttttgaatctactgcttctggtactcagcagagtcgttgggatgtgttgttgcatacagatggtcgtttcttccgtttggattccgatggtgtaacacgcgatgctcagggcagggcgctgtccggagactttttgcaggtattggatgcagtgtggagcactgagtacgtgctgcgtgatacgtgtgaggatgctcctccattccgtggcggttgggctttacttcttgactatgaactggctgggcaggttgagccagtgttgaaattgccagtgcgtactgatggtttgcctatggcgttagcattgcgttgtccggcagcggtattacgtgaccgccacagtggtgtttttttgattgtcgctgagctgggaaatgagcatttactggacgtgattgaggcggatttagctgctgttgccttgttgccgccattgccggtttggcgatctccagtggccgtgactgaggatgagccgtcgcagtttattgccaatgcagagcgtgtgctggattaccttcgtgagggagacgtgttccaggcaaatatctcacgcctttgggaagctcgctttgccactgcacttgatccagcagcgttgtacatgcgtttgcgtgtagccaatcctgcgcctttctcgggattgtttgtggctcatggccgagctgtggtgagctcctcaccagagcggttgatttcggtgcaaggagggcgcattcagacgcgtccgattgctggtacccggccacgttttgtcggtgaagatgacgcagcacgcatccgcgaactggtgaatcaccctaaggagcgtgctgagcatgtgatgttgattgacttagagcgtaacgatttagggagagtgtgtgtgcctgggaccgttgaggtcgatgagttgatgacggtggaaagctatgcgcatgtccatcatatcgtcagtaatgtgcgtggctggttgcctacgggcaggaccccaggggagatcattcgcgccgtgtttccgggggggacaatcactggttgtccgaaggtgcgttgcatgcagatcattgcccagctcgagcaggtggcacgcggtgcctacactggtgcctttggatggctcaattgtgatggtgatttggacctgaacattttaatccgcaccgctgagattgacggtgtgactgtacgtttccgtaacggtgccggcatcgtgatcaattcactgcctgagcgtgagctggatgagacccgtgccaaggcgactggcgtactgcgcgccctgcatgtcatctga

SEQ ID NO: 3540 - protein, 452 aa, Xylella fastidiosa
MTLIRFLRTDPDLLSMHRLAPERYPALFESTASGTQQSRWDVLLHTDGRFFRLDSDGVTRDAQGRALSGDFLQVLDAVWSTEYVLRDTCEDAPPFRGGWALLLDYELAGQVEPVLKLPVRTDGLPMALALRCPAAVLRDRHSGVFLIVAELGNEHLLDVIEADLAAVALLPPLPVWRSPVAVTEDEPSQFIANAERVLDYLREGDVFQANISRLWEARFATALDPAALYMRLRVANPAPFSGLFVAHGRAVVSSSPERLISVQGGRIQTRPIAGTRPRFVGEDDAARIRELVNHPKERAEHVMLIDLERNDLGRVCVPGTVEVDELMTVESYAHVHHIVSNVRGWLPTGRTPGEIIRAVFPGGTITGCPKVRCMQIIAQLEQVARGAYTGAFGWLNCDGDLDLNILIRTAEIDGVTVRFRNGAGIVINSLPERELDETRAKATGVLRALHVI

SEQ ID NO: 3541 - DNA, 1476 bp, Xylella fastidiosa
  CDS (1)..(1476)
atgatcactgcaatgcagtttcagcgtcaagttgccgaagggtgtacccgcattccagtggtgcgtgaagtccagtctgatttggatactccgctttcgatctatttaaagtttgccgatgctccatatacctatttgtttgagtcggtggaaggtggggagcattttgcgaggtattcgatcattgggttgccggcacgccgtgtctatacctttcatgggcataccctggtggtgagtgagttcggtaaggtgttggaaacgcgtcaagtcgccgatccgcttgccgaagttgagctgttgcgtgcgcagtatgtagtgccgcaattagaagggttgccaggttttacaggcggcttagtggggtggttcggctttgaatgtatccagtacatcgaacctcgcttcatgggaggtaaaaaacgtgatgaacttggtacgccagatattctgctgatgctttcggaagagtttgcggtgtttgacagcctcaagggtcgattatatttgatcgttcacgcggatcctgctcaaccgcattcttacgttcgtgcaatgaaacgtttggatgcgttgatccaccgtctgcggcaaggtgggatggattatccgcattcacatatttcggaagtgattaacgaggaagattttcactcttctttgacgcgtgagcagtatcacgctgtggtgcgtaaggcgcaggagtatgtgcgttcgggtgatatttttcaggttgtaccaagtcagcgcctgtgtacgcagtttcatgcacgtccgattgatgtatatcgggcgttgcgcacgctgaatccgtcgccttatatgtatttcattgatattggtgctactcaggtggttggttcatcaccggagatattggcgcgattgcagggggatgtggtcacggtgcgtcctattgccggcacacgcccgcgaggtgcgactccggagcatgacaaacggttggaaatggagttgttagccgatccaaaagagcgtgctgagcacgtgatgctgattgatttgggtcgcaatgatatcggacgtgttgtcgaggccgggagtgtacaagtcaaggagtcgtttgtaatcgagcgttatagtcatgtcatgcatattgtcagtgaggtcaccggtatcttgaagccgggtttgaactacgttgatgtgttacgtgcaacgttccctgcgggtactgtgtccggagcgccaaagattcgtgcattggagattatccgtgagttggaaccagtgtgtcgcaacgtatattccggtgcagtgggttacattggctggcatggagatgctgatactgcaatcgcgattcgtactgcggtgattcaaaacggttgcttgtacgtgcaggctggcggtggtgtggtgtatgactcggatccagatttggagtggcaggaaaccatgaacaaggcgcgtgcattatttagggctgtggcgcaggcggccagagggttgtga

SEQ ID NO: 3542 - protein, 491 aa, Xylella fastidiosa
MITAMQFQRQVAEGCTRIPVVREVQSDLDTPLSIYLKFADAPYTYLFESVEGGEHFARYSIIGLPARRVYTFHGHTLVVSEFGKVLETRQVADPLAEVELLRAQYVVPQLEGLPGFTGGLVGWFGFECIQYIEPRFMGGKKRDELGTPDILLMLSEEFAVFDSLKGRLYLIVHADPAQPHSYVRAMKRLDALIHRLRQGGMDYPHSHISEVINEEDFHSSLTREQYHAVVRKAQEYVRSGDIFQVVPSQRLCTQFHARPIDVYRALRTLNPSPYMYFIDIGATQVVGSSPEILARLQGDVVTVRPIAGTRPRGATPEHDKRLEMELLADPKERAEHVMLIDLGRNDIGRVVEAGSVQVKESFVIERYSHVMHIVSEVTGILKPGLNYVDVLRATFPAGTVSGAPKIRALEIIRELEPVCRNVYSGAVGYIGWHGDADTAIAIRTAVIQNGCLYVQAGGGVVYDSDPDLEWQETMNKARALFRAVAQAARGL

SEQ ID NO: 3543 - DNA, 1365 bp, Vibrio parahaemolyticus
  CDS (1)..(1365)
atggacaatcaattcattgattttaaagcgctggaatacgcaccagagtttgctcttcatctattttctcgcattcaacaccagccttggacgatgttgctgcgttctgcatcaaaaacgcatatcgatagtcgcttcgatgtattggttgccaacccaattgcaacgttagaaaccattgccgacagcacacaagttgaaacgccatcgaatgcctattcaattcaagatgacccattcacgctacttcatcagttgcaagaacagtggcttcctcacgttgagttaaataaagaattggatttgccttttgtcggcggagcgctcggttacttcagttacgatttaggtcgacgcgtagaaacaatgccagaacaggccgaaaaggatctcaacacgcctgatatggcggtaggtctgtatgaatgggccgtcgttgttgaccacaagcttaaaaaagcatgcttagtcggtcagaatatagagcaagcttggcaatggttagacaaacaagaagcggagcaaagtgtagacttcgctctgtccggcgattggcagtcaaacatgacgaaagagagctacgccactcgctttgacaaggtgcaagaatacttgttgagcggtgactgctatcagatcaatttggcgcaacgctttaacgcaccatatctaggcagcgagtggcaagcgtatctgaaattggagtccgccaaccaagcgccattctcagcgtttatccgtatgcctgagtcttcgattttgagtatctctccagagcgctttttagaactcaaagatcgcgtcattgaaacgaaaccaatcaaaggtactcgaccacgcagcgaagatccaaagcaagataacgctaatgcccatgacttgcagacagcggaaaaagatcaggcagaaaacctgatgattgtcgatttgctgcgtaatgacattggtcgagttgcatcaccgggtagcgttcacgtgccaaagctgtttgatattgaaagcttccctgccgtgcatcatttggtgagcaccattcgtgcgaatttggacgagcaatattctcctgcagatttgctacgagcgtgcttcccgggcggttcaattacgggcgcacctaaagttcgcgcaatgcagatcattgaagagttggagccacatcgacgcagcgcgtattgcggcagtattggctacatttctcgccatggtcgtatggataccagcatcaccatccgtactctcgtcgcggaaaatcacaaactgtacgcttgggctggcggcggcgtcgttgcagatagcgattgtgcctctgaatatcaagaaacgttggataagctttcaaagattttgccagcgctgcaatcgtag

SEQ ID NO: 3544 - protein, 454 aa, Vibrio parahaemolyticus
MDNQFIDFKALEYAPEFALHLFSRIQHQPWTMLLRSASKTHIDSRFDVLVANPIATLETIADSTQVETPSNAYSIQDDPFTLLHQLQEQWLPHVELNKELDLPFVGGALGYFSYDLGRRVETMPEQAEKDLNTPDMAVGLYEWAVVVDHKLKKACLVGQNIEQAWQWLDKQEAEQSVDFALSGDWQSNMTKESYATRFDKVQEYLLSGDCYQINLAQRFNAPYLGSEWQAYLKLESANQAPFSAFIRMPESSILSISPERFLELKDRVIETKPIKGTRPRSEDPKQDNANAHDLQTAEKDQAENLMIVDLLRNDIGRVASPGSVHVPKLFDIESFPAVHHLVSTIRANLDEQYSPADLLRACFPGGSITGAPKVRAMQIIEELEPHRRSAYCGSIGYISRHGRMDTSITIRTLVAENHKLYAWAGGGVVADSDCASEYQETLDKLSKILPALQS

SEQ ID NO: 3545 - DNA, 1344 bp, Pseudomonas syringae
  CDS (1)..(1344)
atgcccacctgttcgatacatcccctgccctatagcgccgacccggccgtgtttttctcgcggatctgtcaggcgccgggggccgtgctgctcgacagcggcagaccggttgccgagcgcggccgctacgacctgctcagcgcctggccacggcaggaactgacgattgcggatggcgagagcggcacggcttacctgcaacgattgcgcgacagcctggcgtcgctgggaacggcgaccttgccggcgggctgcgagctgccctttgccggcgggctgatcggctacctgagttacacgttcgggcgacgcctcgaaccgctgcccgatcaggccatcgacgacctgcaattgcccgaagcgcggctggggctctacgcctgggcgctgatcagtgatcatcaggcgcagaccagccaactgatgtttcatccagacttggccgacaccgagcgcgagcggctggttgacctgttcactggcagcatcagcgaggcgccatcgcacttcaggctcagccaaccgtttcaggccagtatcagcgccgacgactaccaggacgccttcgagcgaattcaggcttatattcaggcaggcgactgttatcaggtcaatttcgcacaacgctttcaggcgcagtgcactggcgatccgtgggcagcttattgcgcgcttcgagcagcctgcccgacgccgttttccggctacctgggcctgtcgggcgccgatgcggttttgagcctttcgccggagcgtttcgtcaagatcagcgcgaggcaggtggaaacccgcccgatcaaaggcacgcgcccgcgcagccaggacgctgtgcaagacgccgctttcgcccaagagctgctgaacagcgagaaggatcgcgccgaaaacctgatgattgtcgacctgctgcgcaacgacctggggcgcagctgcacaacaggctcggtgaaagtgcccgagttgttcagcctggaaagctaccccaacgtgcaccatctggtgagcagcgtgaccggcgagctggcggccggcaacgatgctctggacctgatcgccggcagcttccccggcggctccatcacgggtgcgccgaagatccgcgccatgcagatcatcgacgaactggaaccgactcgccgcagcctgtactgcgggtcgctgctgtatgtggatgtacgcggcgagatggacagctccatcgccatccgcagcctgctggtcaaggacgggcgcatttcctgttggggcggcggcggcattgtggcggactctcactgcgaggccgaatatcaggaaaccttcaccaaggtccgcgtgctgctagaaacgcttgaggcactttga

SEQ ID NO: 3546 - protein, 447 aa, Pseudomonas syringae
MPTCSIHPLPYSADPAVFFSRICQAPGAVLLDSGRPVAERGRYDLLSAWPRQELTIADGESGTAYLQRLRDSLASLGTATLPAGCELPFAGGLIGYLSYTFGRRLEPLPDQAIDDLQLPEARLGLYAWALISDHQAQTSQLMFHPDLADTERERLVDLFTGSISEAPSHFRLSQPFQASISADDYQDAFERIQAYIQAGDCYQVNFAQRFQAQCTGDPWAAYCALRAACPTPFSGYLGLSGADAVLSLSPERFVKISARQVETRPIKGTRPRSQDAVQDAAFAQELLNSEKDRAENLMIVDLLRNDLGRSCTTGSVKVPELFSLESYPNVHHLVSSVTGELAAGNDALDLIAGSFPGGSITGAPKIRAMQIIDELEPTRRSLYCGSLLYVDVRGEMDSSIAIRSLLVKDGRISCWGGGGIVADSHCEAEYQETFTKVRVLLETLEAL

SEQ ID NO: 3547 - DNA, 1482 bp, Pseudomonas syringae
  CDS (1)..(1482)
atgaaccgtgaagaattcctgcgtttggctgctgatggctacaaccgcatcccgcttgcccgcgaaaccctggctgacttcgacacgccgctgtcgatctacctcaagcttgccgatcagccgaactcctacttgctggaatcggtgcagggcggtgagaaatggggtcgttactcgatcatcggcctgccttgccgcactgtgatgcgcgtacatggccatcacgtcagcgtgacccacgatggcgtcgagatcgaaagcctggacgttgaagacccgctggacttcgtcgagaccttcaaagcgcgctacaacgtgccgaccatcgccggtctgccgcgtttcaatggcgggttggtcggttatttcggttatgactgcgtgcgttacgtcgaaaagcgtcttgccaactgcccgaaccctgacccgctgggcgtaccggatatcctgttgatggtgtccgatgccgtggtggtattcgacaatttggcgggcaagatgcacgccatcgtattggtcgacccggcgcagcaggacgcttacgacagtggcgctgcactgcttgatgagctgatgcacaagctgcgtcagccgatcacaccgcgtcgtggcctggatctggaccggcctccggctgccgacccggtgtttcgctcaagcttcacgcagaatgattacgaaaccgcagtcgacacgatcaagcagtacatcctggcgggcgacgtgatgcaggtcgtgccatcgcaacgcatgtccatcgattttgctgcagcgcccattgacctgtaccgtgcgctgcgctgcttcaacccgacgccgtacatgtatttctttaacttcggcgacttccacgttgtcggcagttcgccggaagtgctggtgcgcgtcgaggacaacctgatcacggttcggccaatcgccggtacgcgtccgcgcggggctactgaagaagcggatcgtgcgctggaagaggatctgctgtccgatcacaaggagatcgccgagcacttgatgctgatcgatctgggtcgtaatgacgtcgggcgggtgtccgggatcggtacggtcaaattgaccgagaagatggttatcgagcgttactccaacgtgatgcacattgtttccaacgtcactggcgagctgaaaagcgggctgacggcgatggatgcactgcgggcgattctgccggccggcaccttgtccggtgcgccgaaaatccgcgccatggaaatcatcgacgagctggagccggtcaagcgtggcgtctacggcggggcggtggggtacatggcgtggaacggcaacatggacaccgccatcgcaattcgtacggcggtgatcaagaacggtgagctgcacgtgcaggctggcggcggtatcgtcgccgactcggtgccagcactggagtgggaagaaaccctcaacaaacgccgcgccatgttccgtgccgtggctttggcttcgcagactgccgagggttga

SEQ ID NO: 3548 - protein, 493 aa, Pseudomonas syringae
MNREEFLRLAADGYNRIPLARETLADFDTPLSIYLKLADQPNSYLLESVQGGEKWGRYSIIGLPCRTVMRVHGHHVSVTHDGVEIESLDVEDPLDFVETFKARYNVPTIAGLPRFNGGLVGYFGYDCVRYVEKRLANCPNPDPLGVPDILLMVSDAVVVFDNLAGKMHAIVLVDPAQQDAYDSGAALLDELMHKLRQPITPRRGLDLDRPPAADPVFRSSFTQNDYETAVDTIKQYILAGDVMQVVPSQRMSIDFAAAPIDLYRALRCFNPTPYMYFFNFGDFHVVGSSPEVLVRVEDNLITVRPIAGTRPRGATEEADRALEEDLLSDHKEIAEHLMLIDLGRNDVGRVSGIGTVKLTEKMVIERYSNVMHIVSNVTGELKSGLTAMDALRAILPAGTLSGAPKIRAMEIIDELEPVKRGVYGGAVGYMAWNGNMDTAIAIRTAVIKNGELHVQAGGGIVADSVPALEWEETLNKRRAMFRAVALASQTAEG

SEQ ID NO: 3549 - DNA, 1341 bp, Pseudomonas putida
  CDS (1)..(1341)
atgccgacctgcacgctacaccccctgccctaccagcccgaccctgccgcctatttcgcccacctgcgccaggcccccggtgcgatcctgctcgacagcgctcgccccggcgccgaacgcgggcgtttcgacctgctcagcgcctggccgctgcaacaactgcaggcgcagcccgatgaagatggccgcgtcttcctccagcgcctgcgcgctggcctggcacaactgggccacgccgacttgcccaacggtgtagagctgcccttcgccgggggcctgatcggctacctgagctacgacttcggccgccgcctggaacacctgccaagcctggccgtggacgacctgggcctgccagacgcacaactgggcctgtatgcctgggcactggtcagcgatcacttgctcggcaccagccagctggtgttccaccctagcctggccggcgacgagcgcgaacgcctgatcagcctgttccaggacaccagcgccaccaccggcgacttccggctgctcgcgccgatggccggtgacctggagccggagcaatacaaaaccgctttcgaccaggtacaacgctacatccaggccggtgactgctaccagatcaacctcacccaacgctttcgcgcaccctgccaaggcgatccatggcgggcctaccaggccctgcgccaggcctgcccgacccccttctccggctaccagcaactggccgacggcagtaccctgctgagcttttcgcccgagcgcttcatccgcgtcagccagggccaggtggaaacccggccgatcaagggcacccgcccacgcgccagtgacccggcgcaagaccagcgtaatgcccaggagctgctgcacagcccgaaggaccgctcggaaaacctgatgatcgtcgacctgctgcgcaacgacctggggcgcacgtgcgagattggctcagtgaaggtaccggaactgttcagcctggagagttaccccaacgtgcaccatctggtcagcagcatcaccggccagctggccagcgacaaggatgcgctggacctgatcggcgacagcttccctggcggctcgatcaccggcgcaccgaagatccgcgccatgcagatcatcgacgaactggagcccgcgcgccgcgcgctgtactgcggctcgctgctgtatgtggatgtgcgcggcgaaatggacagttcgatcgccattcgcagcttgctgatcaaagatggccaggtcagttgctggggcggcggcgcggtggtagccgactcgcagtggcaggccgagtatgaagagtcgatcgccaaagtgcgggtgctgatgcagaccctgcagggcttgtag

SEQ ID NO: 3550 - protein, 446 aa, Pseudomonas putida
MPTCTLHPLPYQPDPAAYFAHLRQAPGAILLDSARPGAERGRFDLLSAWPLQQLQAQPDEDGRVFLQRLRAGLAQLGHADLPNGVELPFAGGLIGYLSYDFGRRLEHLPSLAVDDLGLPDAQLGLYAWALVSDHLLGTSQLVFHPSLAGDERERLISLFQDTSATTGDFRLLAPMAGDLEPEQYKTAFDQVQRYIQAGDCYQINLTQRFRAPCQGDPWRAYQALRQACPTPFSGYQQLADGSTLLSFSPERFIRVSQGQVETRPIKGTRPRASDPAQDQRNAQELLHSPKDRSENLMIVDLLRNDLGRTCEIGSVKVPELFSLESYPNVHHLVSSITGQLASDKDALDLIGDSFPGGSITGAPKIRAMQIIDELEPARRALYCGSLLYVDVRGEMDSSIAIRSLLIKDGQVSCWGGGAVVADSQWQAEYEESIAKVRVLMQTLQGL

SEQ ID NO: 3551 - DNA, 1482 bp, Pseudomonas putida
  CDS (1)..(1482)
atgaaccgcgaagaattcctgcgcctggccgctgccggctacaaccgtattcccttggcctgtgaaaccttggccgacttcgacacgccgctgtcgatctacctgaaactggctgaccagcccaactcgtacctgctcgaatcggtgcagggcggggagaagtggggccgttactcgatgatcggcttgccatcgcgcaccgtgatgcgtgtgcatggctaccgtgtcagcatcctgcacgatggcgtcgaggtggaaagctgtgaggtcgaagacccgctggcattcgttgaaaccttcaaggaccgctacaaagttgccgatatcccaggcctgccgcgtttcaatggcggcctggtcggctactttggctacgactgcgtgcgctatgtagaaaagcgcctgggggccagccccaacccagacccgctgggcgtaccggatatcctgctgatggtgtccgacgcggtggtggtgttcgacaacctggcgggcaagatgcacgccatcgtgttggtcgacccagctgaagatcaggccttcgaacagggccaggcacgtctgcaaggcttgctggaaaccttgcgccagccaatcaccccgcgccgcggcctggacctgagcggcccgcaggcggccgagccggcgttccgctccagctacacccgcgaggattacgaaaacgccgtcggtcgtatcaaggaatacatcctggccggggactgtatgcaggtggtgccgtcgcagcgcatgtcgatcgatttcaaggctgcgcctatcgacctgtaccgcgcgctacgctgcttcaacccgacgccatatatgtacttcttcaacttcggtgacttccatgtggtcggcagctcgcccgaagtgttggtacgtgtcgaggacaacctggtcaccgtacgcccgattgccggtacccgcccgcgtggtgcgaccgaagaggccgatcgtgcgctggaagatgacctgctgtcggacgacaaggaaattgccgagcacctgatgctgatcgatctgggccgcaacgatgtcggccgtgtgtcttcgaccggcagtgtgcgcctgaccgagaagatggtgatcgagcgttactccaacgtgatgcacattgtttccaacgttaccggccagctgcgtgaaggcctgacggcgatggatgcactgcgggcgattctgccggctggcaccttgtcgggtgcgcccaagatccgtgcgatggagatcatcgacgagctggaaccggtcaagcgtggggtttacggcggtgccgtcggctattttgcctggaacggcaacatggataccgcaattgccattcgtaccgcagtgatcaaggacggcgagctgcatgtgcaggccggtggcggcatcgttgccgactcggtgccggcgctggaatgggaagaaaccatcaacaagcgccgggcgatgttccgtgcggtggcgttggccgagcagacttccgccagataa

SEQ ID NO: 3552 - protein, 493 aa, Pseudomonas putida
MNREEFLRLAAAGYNRIPLACETLADFDTPLSIYLKLADQPNSYLLESVQGGEKWGRYSMIGLPSRTVMRVHGYRVSILHDGVEVESCEVEDPLAFVETFKDRYKVADIPGLPRFNGGLVGYFGYDCVRYVEKRLGASPNPDPLGVPDILLMVSDAVVVFDNLAGKMHAIVLVDPAEDQAFEQGQARLQGLLETLRQPITPRRGLDLSGPQAAEPAFRSSYTREDYENAVGRIKEYILAGDCMQVVPSQRMSIDFKAAPIDLYRALRCFNPTPYMYFFNFGDFHVVGSSPEVLVRVEDNLVTVRPIAGTRPRGATEEADRALEDDLLSDDKEIAEHLMLIDLGRNDVGRVSSTGSVRLTEKMVIERYSNVMHIVSNVTGQLREGLTAMDALRAILPAGTLSGAPKIRAMEIIDELEPVKRGVYGGAVGYFAWNGNMDTAIAIRTAVIKDGELHVQAGGGIVADSVPALEWEETINKRRAMFRAVALAEQTSAR

SEQ ID NO: 3553 - DNA, 1437 bp, Lactobacillus plantarum
  CDS (1)..(1437)
atgaatccaacattaccaaccttgattccttatcaggatcattatccctacgtaccagtgatggtcaaacgaccactcgccacatttgaccccattgcggttgctaaaattgtccaccagatggggaacggtttcgcgctgacgattgatcggcaccaacgatatagctattttagttttaaaccacagcgaagtctcacgggtcggcaactagccaagcacaaacgaccagctaatgagacactccaagccattctaaaccaatatcgaacaccacgaattcaaggattaccaccatttacggggggcttgatagggtacttcggctatgagtatattcaacaatttgtactcaagttgcatttgaaatcaccagcaaccgcagatctcgatgacttaggtttattcttagttacgagtgtgctcgtctatgatcatcgacatcatgagcttgggttgacgcagctgatttcaactgcggatttagcggcaacttacgccgtgactcaaacggctctaacgcaacagttagccgccattattgaacaattacagcaaccaatagctctgccaccatttgacttacagcaaccattacacatgcaagcggatcaagcgacctatgcgcgtcaggttgaccgaattcgccaacacatctacgctggtgatattttccaaatgatatatgctaatccatgtttggggaccatgagcgggtcattgctggcagtttatcagcaacttcaaaaaacagcggccccgtatacctgttattttaaacaggctaatttcgaaatgacggtggcctcaccagaaacgttagtgacgaaggatggggaacaaatcgcgacgtatccattggccgggacgagacgccgtggtcgaacacctgccgaggatcagcagttggctcatgaattacaaaccagccctaaagagattgccgagcacaatatgttagttgatttgggacgtaacgatttaggacaagttgcaaagtttaaaagtgtccgagtgactaatttacggcgattaattcgttattcgcaagtcatgcacttagggtctcgggtggccgcagaagtggcgccgactactacagcactccaagtgcttgccgctacttttccagctgggacgttagctggcgcgcctaagattgaagcaatgaccctgattaatcattatgagcaggtgccgcggggtgcttatggtggttgctttggttacttggattgtaacggtaatttagacatggcgattggcatccggctggcctaccgaatgaatgaacagttggtgattccagcgggtgcgggcattgttgctgacagtatcggcgctcaagaatttaaggagtgccagaataaacaacgagtgatcgttaatgcagtacaagacgcgaaaggacgagttaaagatggaattattaattga

SEQ ID NO: 3554 - protein, 478 aa, Lactobacillus plantarum
MNPTLPTLIPYQDHYPYVPVMVKRPLATFDPIAVAKIVHQMGNGFALTIDRHQRYSYFSFKPQRSLTGRQLAKHKRPANETLQAILNQYRTPRIQGLPPFTGGLIGYFGYEYIQQFVLKLHLKSPATADLDDLGLFLVTSVLVYDHRHHELGLTQLISTADLAATYAVTQTALTQQLAAIIEQLQQPIALPPFDLQQPLHMQADQATYARQVDRIRQHIYAGDIFQMIYANPCLGTMSGSLLAVYQQLQKTAAPYTCYFKQANFEMTVASPETLVTKDGEQIATYPLAGTRRRGRTPAEDQQLAHELQTSPKEIAEHNMLVDLGRNDLGQVAKFKSVRVTNLRRLIRYSQVMHLGSRVAAEVAPTTTALQVLAATFPAGTLAGAPKIEAMTLINHYEQVPRGAYGGCFGYLDCNGNLDMAIGIRLAYRMNEQLVIPAGAGIVADSIGAQEFKECQNKQRVIVNAVQDAKGRVKDGIIN

SEQ ID NO: 3555 - DNA, 2166 bp, Bradyrhizobium japonicum
  CDS (1)..(2166)
atgaacaggacagtctttgccctcccggccagaagcgattacgtgacccgcggcggtctcgcgatcacgcgcgtggcggagcagtttaccggcggcgcgagccggctcgacgatctcgtcaacctgctcgaccgccgccgcggcgtggtgctgtcctcgggcacgaccgtgccgggccgctacgagagcttcgacctcggcttctccgatccgccgctcaagctcgagaccacaggcgtcaatttcaagctggaagccctgaacgagcgcggccaggtgctgatcgccttccttgccgatgtcctgcgcgagccctgcgtggtgatatccgaaaagaccgcttcgcgcctcgccggccacatcatccgcggcgatgccccggtcgaggaagaccagcgcacccggcgcgccagcgtggtgtcgctggtgcgcgacctcgtcgccgccttctccgccaatgacgacgggctgctcggcctgttcggcgccttcgcctacgatctcgtgttccagatcgaggatctcgtgcagaagcgcgcgcgcgagagcgaccagcgcgacatcgtgctctacgttcccgatcgcctgctggcctatgaccgcgccaccggccgcggcgtcgtgctcagctacgacttcacgtggaagggcagatccaccgagggcctgccgcgcgagaccgccgacagcccgtacatgaagacaccgcgccagggctttgccgatcatgcgcccggcgaataccaggccaccgtcgagaccgcgcgcgcggcctttgcccgcggcgatctgttcgaggccgtgccgggccagctgttcgccgagccctgcgatcgttctccggcggaagtgttccagcgcctctgtgtcatcaacccgtcgccctacggcgcgctgatgaatctcggcgacggcgagtttctcgtctccgcctcgcccgagatgttcgtgcgttcggacggccgccgcgtcgagacctgcccgatctcgggcaccatcgcgcgcggcaccgatgcgatcggcgatgccgagcagatccgccagctcctgaattcggagaaggacgagttcgagctcaacatgtgcaccgacgttgatcgcaacgacaaggcgcgcgtctgcgtccccggcaccatcaaggtgctggcgcgccggcagatcgagacctactcaaaactgttccacaccgtcgaccacgtcgagggcatgctgcgtcccggcttcgacgcgctcgatgccttcctcacccatgcctgggccgtcaccgtgacaggtgcgccgaagctctgggcgatgcagttcgtcgaggatcacgagcggtcgccgcggcgctggtatgcgggtgcgatcggcgcggtgaatttcgacggcagcatcaataccggcctcaccatccgcaccatccgcatgaaggatggtctcgccgaggtgcgcgtcggcgccacctgcctgttcgattccgatcccgctgccgaggaccgcgaatgccaggtcaaggcggcggcgctgttccaggcgctgcgcggcgatccgccaaaaccgctctcgacctttgcgcccgatgcgaccggaagcggcaagcgggtgctgctgatcgaccacgacgacagcttcgtgcacatgctcgccgactatttccgccaggtcggcgccagcgtcaccgtggtccgctatgtgcatgcgctcgacatgctcaagcagaagaggtgggatttgctggtgctgtcgcccggcccgggcaggcccgaagatttcgggatcaggaagacgatcgatgcggcgctggagaacaagctgccggtgttcggcgtctgcctcggcgtgcaggcgatcggcgaatattttggcggcgagctcggccagctcacgcatcccgcccacggccggccctcgcgggtgcaggtgcgcggcggccgcctgatgcgcaatttgccgagcgagatcgtgatcggccgctatcactcgctctatgtcgagcgcgacagcatgccggaggttttgtccgtcaccgccagcaccgaggacggcgtcgctatggcgctggagcacaagaccctgccggtcgcgggcgtgcaattccacccggagtcgctgatgtcgctcggcggcgaggtgggcttgaggattgtcgagaacgcgttccggctggatgcgcgtgttgattga

SEQ ID NO: 3556 - protein, 721 aa, Bradyrhizobium japonicum
MNRTVFALPARSDYVTRGGLAITRVAEQFTGGASRLDDLVNLLDRRRGVVLSSGTTVPGRYESFDLGFSDPPLKLETTGVNFKLEALNERGQVLIAFLADVLREPCVVISEKTASRLAGHIIRGDAPVEEDQRTRRASVVSLVRDLVAAFSANDDGLLGLFGAFAYDLVFQIEDLVQKRARESDQRDIVLYVPDRLLAYDRATGRGVVLSYDFTWKGRSTEGLPRETADSPYMKTPRQGFADHAPGEYQATVETARAAFARGDLFEAVPGQLFAEPCDRSPAEVFQRLCVINPSPYGALMNLGDGEFLVSASPEMFVRSDGRRVETCPISGTIARGTDAIGDAEQIRQLLNSEKDEFELNMCTDVDRNDKARVCVPGTIKVLARRQIETYSKLFHTVDHVEGMLRPGFDALDAFLTHAWAVTVTGAPKLWAMQFVEDHERSPRRWYAGAIGAVNFDGSINTGLTIRTIRMKDGLAEVRVGATCLFDSDPAAEDRECQVKAAALFQALRGDPPKPLSTFAPDATGSGKRVLLIDHDDSFVHMLADYFRQVGASVTVVRYVHALDMLKQKRWDLLVLSPGPGRPEDFGIRKTIDAALENKLPVFGVCLGVQAIGEYFGGELGQLTHPAHGRPSRVQVRGGRLMRNLPSEIVIGRYHSLYVERDSMPEVLSVTASTEDGVAMALEHKTLPVAGVQFHPESLMSLGGEVGLRIVENAFRLDARVD

SEQ ID NO: 3557 - DNA, 1407 bp, Bacteroides thetaiotaomicron
  CDS (1)..(1407)
atgaaaacattcagttatacagcccatagcaaacaggtactcggagatatgcacactcctgtcagtatctatctgaaagtacgtgatatgtacccacaatctgcattgatggagagttccgattatcatgcaggagaaaattccctctcgttcatcgctctttgtccgctggcaagtatcggtgtcaatagcggaatagtcactgctagttatcctgacaaaagtcggaaggaagagccgctcacccaatcattcacggtagaaaaagcgatgaatcaattcatcagtcagtttcaagtgaccggagaaaacaagaatgtgtgcggactttacggatacaccacattcaacgcagtgaaatacttcgaacatatcccggtgaaagaaagtcatgatgagcagaatgatgctccggacttgctatacatattatataagtatatcatcgttttcaatcatttcaagaatgaattgacattggtagaaatgctgggcgaaggtgaagaaagcggtttgccggaactggaggccgctatcgaaaacagaaattatgcttcttataatttctcggtgacaggtcctgtcagcagcccgatctccgatgaggagcataaagcgaacgttcgcaagggtattgcccattgtatgcgtggtgatgtttttcagattgtcctttccagaagattcatccagccttatgccggagatgatttcaaagtctatcgtgctcttcgcagcatcaacccttctccttatcttttctatttcgatttcggaggataccgcattttcggttcttctccggagactcactgtaaaattgaagacggacgtgcctacatcgacccgattgccggaacaacccgccgtaccggagatacggtaaaagaccgcgaattggcggaagcactgcttgccgatccgaaagagaacgcggagcatgtgatgctggttgatctggcaagaaatgatctttcacgtaattgccatgatgtacgggtattgttttataaggaaccacagtattacagtcatgtgattcatctggtcagccgcgtgagcggtcagctgaatgaaggggcggataagattaaaactttcatcgatactttccctgcgggaacgttgagcggagcaccgaaagtacgcgccatgcagctgatcagtgaaatcgaacctcataaccgcggtgcttatggcggctgtatcggctttatcggacttaacggagaactgaaccaggcaatcaccatccgtacttttgtcagccgtaataacgagttatggttccaggccggaggcggtatcgttgcacgcagtcaggatgaatacgagttgcaagaggtaaacaataaattaggagctcttaaaaaggctatcgatttagctgttaatttaaaaaactaa

SEQ ID NO: 3558 - protein, 468 aa, Bacteroides thetaiotaomicron
MKTFSYTAHSKQVLGDMHTPVSIYLKVRDMYPQSALMESSDYHAGENSLSFIALCPLASIGVNSGIVTASYPDKSRKEEPLTQSFTVEKAMNQFISQFQVTGENKNVCGLYGYTTFNAVKYFEHIPVKESHDEQNDAPDLLYILYKYIIVFNHFKNELTLVEMLGEGEESGLPELEAAIENRNYASYNFSVTGPVSSPISDEEHKANVRKGIAHCMRGDVFQIVLSRRFIQPYAGDDFKVYRALRSINPSPYLFYFDFGGYRIFGSSPETHCKIEDGRAYIDPIAGTTRRTGDTVKDRELAEALLADPKENAEHVMLVDLARNDLSRNCHDVRVLFYKEPQYYSHVIHLVSRVSGQLNEGADKIKTFIDTFPAGTLSGAPKVRAMQLISEIEPHNRGAYGGCIGFIGLNGELNQAITIRTFVSRNNELWFQAGGGIVARSQDEYELQEVNNKLGALKKAIDLAVNLKN

SEQ ID NO: 3559 - DNA, 1407 bp, Staphylococcus epidermidis
  CDS (1)..(1407)
atggatattgtatacaaaaaggtgaatgctcaaattacgccagaagctttagcaaaattaaaacaaaaaaagatcatttttgaaagtacaaatcaacagaaacttaaaggtaggtactcgatagtagtattcgatcattatggcaaaattacattagataattctcaacttttaattaatttagacaatcattgtgaaatagttaagaatcaaccgtatcaacgacttaaggaatttgtagataaatattattttgaaatcaaagataaatatttaaaagatttaccttttatttcgggctttatagggacatgtagctttgatttagtacgacatgaatttaaaaaattacaagatattaaattagaagatcatcaaactcatgatgtccaattttatctagtggaagatgtatttgtttttgatcattataaagatgaattatatattatcgcaagtaacttattttctgatagaacaaaagagagattaaaggaatctattgaacgtaaaattgaagatttaaaaaacatacatttttcggttgaggatataaattataaatccatccctcgacatataaccaccaatatatcagagcaacaatttgttcaaactattagaattttaaaaaagaaaattactgaaggagatatgtttcaagtagttccttcaagaatttatagttataaacaccattttcaacacaatttacatcaattaacttttcagttatatcaaaatttaaagcgacaaaatcctagtccatatatgtattatattaataaagatgtaccgattgtaataggaagttctcctgaaagttttgtaaaggtaaaagatggaaaagtttatacgaatcctatagctggaacaattaaaagaggtcaaaataaaaaagaagatgaaaataatgaaaagacattaatgaaagatgaaaaggaattgagtgaacatcgtatgctcgtagatttaggaagaaatgatattcatcgaataagtaaaacaggcacttcacaaattaccaaactaatgacaatagaacgttatgaacatgtcatgcatatcgttagtgaagttattggagaattaaaaccccatctatctcctatgagcgtcatcgcaagtttgctaccaacgggtactgtctcaggtgcacctaaacttagagctatacagagaatatacgaatcttatccttataaaagaggtatctatagcggtggtgttgggtatatcaactgtaatcatcatttagattttgcattggctatacgtaccatgattatcgatgaggaaaaagtcagtgtcgaggcaggatgtggagtagtatatgattctattccagagaaagaacttgaagaaacaaaacttaaagctaaaagtttattggaggtaactccatga

SEQ ID NO: 3560 - protein, 468 aa, Staphylococcus epidermidis
MDIVYKKVNAQITPEALAKLKQKKIIFESTNQQKLKGRYSIVVFDHYGKITLDNSQLLINLDNHCEIVKNQPYQRLKEFVDKYYFEIKDKYLKDLPFISGFIGTCSFDLVRHEFKKLQDIKLEDHQTHDVQFYLVEDVFVFDHYKDELYIIASNLFSDRTKERLKESIERKIEDLKNIHFSVEDINYKSIPRHITTNISEQQFVQTIRILKKKITEGDMFQVVPSRIYSYKHHFQHNLHQLTFQLYQNLKRQNPSPYMYYINKDVPIVIGSSPESFVKVKDGKVYTNPIAGTIKRGQNKKEDENNEKTLMKDEKELSEHRMLVDLGRNDIHRISKTGTSQITKLMTIERYEHVMHIVSEVIGELKPHLSPMSVIASLLPTGTVSGAPKLRAIQRIYESYPYKRGIYSGGVGYINCNHHLDFALAIRTMIIDEEKVSVEAGCGVVYDSIPEKELEETKLKAKSLLEVTP

SEQ ID NO: 3561 - DNA, 1161 bp, Staphylococcus epidermidis
  CDS (10)..(1161)
gggttaaatatgcacattgaatttaagtatcgctattatgaaaatgaaaaggactatgaagactatcaattagaaatggataactttcaagattctaaaattgcatatcgtcttgatgaagtaggggatgtcattcactttgcagaacaagaacaacgtaacggaagctatgttgcactttatgttacttatgaagcagcacctttttttaataaggaaatggtggtcaataatgtgaaacaatcccatatttttgctgcagcttattcatttaaatcggtcaattcgataaaaaatataaaaaaagtaatgcccaataaaaatcatataaaaactgaaggattttatttttgtgaaagtgataaagcgatgattaacaagatcaaatcgattcataaagccattattgaaggggcaacgtatcaggtgaattacacaacccgcttaaaagcagaagttttctgtcctataagtcacttatattatcaacttactatgtcacaaaatggtaattataccgttttaatggacacacctgatataaaagtagcatcaatatcgcctgaacttttctttcaaaaaggtgactataaaggtaaatcaaatatgattgttagtaagccgatgaaagggactatgcctagagggaaaaatgttaaagaagatgagctatattataataatttaaaaacctcctctaaagatatggcggagaatgtgatgattgtagacttattacgtaacgatattacaagaattgctcaaagtggaactatagatgtacctgaattgttttcgattgagaaatatgacacagttttccaaatgaccagtacagtgtgtggccgattacaagatgacattcaattgatagatatgatgcgagcgctctttccttgtggttctattacaggtgcaccaaaaataaatacaatgcaatatatagctcagttggaggacatgccaagatccatttactgtggaacaattggcttattacttccaaaccaaaggatgatatttaatatccctatacggacaattgagtataatcatgaagaagcggtttatggggtgggtgctggtataacaattgattcagtacccgaaaatgaagttcaggaatttcacgataaaactaaaattttggagcggttataa

SEQ ID NO: 3562 - protein, 383 aa, Staphylococcus epidermidis
MHIEFKYRYYENEKDYEDYQLEMDNFQDSKIAYRLDEVGDVIHFAEQEQRNGSYVALYVTYEAAPFFNKEMVVNNVKQSHIFAAAYSFKSVNSIKNIKKVMPNKNHIKTEGFYFCESDKAMINKIKSIHKAIIEGATYQVNYTTRLKAEVFCPISHLYYQLTMSQNGNYTVLMDTPDIKVASISPELFFQKGDYKGKSNMIVSKPMKGTMPRGKNVKEDELYYNNLKTSSKDMAENVMIVDLLRNDITRIAQSGTIDVPELFSIEKYDTVFQMTSTVCGRLQDDIQLIDMMRALFPCGSITGAPKINTMQYIAQLEDMPRSIYCGTIGLLLPNQRMIFNIPIRTIEYNHEEAVYGVGAGITIDSVPENEVQEFHDKTKILERL

SEQ ID NO: 3563 - DNA, 1401 bp, Vibrio vulnificus
  CDS (1)..(1401)
atgcagcaatcgaactctttgtcacaaattaaacaaatgaataacagcataaatacggccatttcttcaaaaacactgccttatcaaacggacctttcccaacagtggtttgacaccatccaacatcaaccttgggcaatgctgttgcgttcggcatcaccaacacatgttgacagccgttttgacattctcgtcgcaaagcccgttgcgacattagaaacacgtggtgcggtgactgagatcaacaccaatgacgaagtcattgaaagtaaagatgatcctttcacgcttcttgcgcgttatcaacagcgttttacccctgctctatccagtgatgaagagattccttttattggtggcgctctgggttactttagctacgatttaggtcgttgcgttgaaaaactgcctgagattgcaacacaagatatcgctgcgcccgacatggcagtgggcatctacacatgggcgttgattgtcgatcatcagacgcagaccgcgcaactggttggccaagacgtagaacaagcttatcaatggctaagcacgcaaacaaaagcggatgatgcgacgtttgccctgaccagtgattggcaatccaacatgaatcgtcgtgattaccaaagtaagttcgattgcgtacaggagtacttgctcagtggtgactgctaccaaattaacttagcgcagcgctttcatgccaattaccaaggcagcgaatggcaagcttaccagaagctagagcagagcaaccaagcaccattttctgctttcattcgtttgaaggacgcggcgattttaagtgtgtcgccggagcgttttctcgagctcaaaaaacgtgtcattgaaaccaagccgatcaaaggaactcgtcctcgtcataatgatgaacaacaggacaaacaggcggcacttgagcttgccaatgccgaaaaagatcaagcggaaaatctgatgatcgtcgatctgctgcgcaacgatattggccgtgtcgccaaaccgggcagcgtgcatgttcctaaactgtttgacatcgaaagctttcccgccgtgcatcacttagtcagcacgattcgagctgagttggcagcgcagtatactgccgctgacttactgcgagcgtgtttcccgggaggctcgattaccggcgcgccgaaagtgcgcgcaatggaaatcattgaagagcttgagcctcatcgacgctcagcctattgcggtagtatcggttacatcagtcgccatggtcgcatggataccagcattacaattcgtaccttagtggcggagcaaggtaagttgttcgcttgggctgggggcggtgtagtggctgacagtcaatgcgatgcggaatatcaagagacgttagataaactgtcgaaaattctaccaacattgcaataa

SEQ ID NO: 3564 - protein, 466 aa, Vibrio vulnificus
MQQSNSLSQIKQMNNSINTAISSKTLPYQTDLSQQWFDTIQHQPWAMLLRSASPTHVDSRFDILVAKPVATLETRGAVTEINTNDEVIESKDDPFTLLARYQQRFTPALSSDEEIPFIGGALGYFSYDLGRCVEKLPEIATQDIAAPDMAVGIYTWALIVDHQTQTAQLVGQDVEQAYQWLSTQTKADDATFALTSDWQSNMNRRDYQSKFDCVQEYLLSGDCYQINLAQRFHANYQGSEWQAYQKLEQSNQAPFSAFIRLKDAAILSVSPERFLELKKRVIETKPIKGTRPRHNDEQQDKQAALELANAEKDQAENLMIVDLLRNDIGRVAKPGSVHVPKLFDIESFPAVHHLVSTIRAELAAQYTAADLLRACFPGGSITGAPKVRAMEIIEELEPHRRSAYCGSIGYISRHGRMDTSITIRTLVAEQGKLFAWAGGGVVADSQCDAEYQETLDKLSKILPTLQ

SEQ ID NO: 3565 - DNA, 1566 bp, Vibrio vulnificus
  CDS (1)..(1566)
atgaacaaggccattaacatcaccacactaggacagctagagcttctgtcaacgacggttccttaccattcggatcctacgcgcctttttcacactttgtgtgaaaacaagcgcgatagcttattgctcgaatcagctgaaatcgattcaaaacaagatcttaaaagcttactgattgtcgattccgcggtacgtatggtttgccatggccatgtcgtgaccatgacggcactcagtgacaacggcaagaatctgttaacgcatttgacaaagaatgtcgcgcaagaggttgaacatcagtttgatggacaacaacttactctcaccttctcaagcccagatgaccgcctagatgaagactctcgcttacgtgaagcctctagtttcgacgcattgagactggttcaacacagttttgatttggcggaaaaagacaagcacgcgatctttatcggcggtctgtttgcctatgacttggtggccaactttgaaccactgggtgaagcccacgcaataaatcaatgtcctgactatgtcttctacgtggcagaaacgctgatggtggtcgaccaccagaccgagagttgccatttacaagcaacgctttttgcagacgactcacaaaaagaagcactaaatcagcgtattgaacaaatccgcactctgtgtgctaccccgaaagcgctacctaaagccattcatctcgataaggttgaggtcgataccaatatcagcgatgacgccttttgccaagtggtacgcgacctaaagcaatacgtagtcaaaggcgacattttccaagtcgtaccatcacgccgctttaccctgccctgcccgtcaccattggcggcgtataaagagctcaaagtcagcaacccaagcccttacatgttttacatgcaagatgaactctttacgttgtttggcgcatcaccggaaagcgcgttgaaatatgaaacgcaaaccaatcaggtggagatctaccccattgctggtactcgacgccgtggcaagcgagccaatggtgagatcgatttcgacctcgatagtcgaattgaactcgaacttcgcactgacaagaaagaaaacgccgagcacatgatgttggtggatctcgctcgaaatgatgtcgcacgcatttctcgcgcagggacacgccacgtcgccgatttacttaaagtggaccgctacagccatgtgatgcacttggtctcacgcgttgttggacaattacgtgacgatcttgacgcactacacgcctaccaagcgtgtatgaatatgggcacattaacgggcgctccgaaaattcgtgccatgcaattgattcgtgatgttgaaggggctcgccgtggcagttacggtggggctgtcggttacctcactggcgaagggacactggatacctgtatcgtgattcgttcggcttacgttgaaaacggcattgcacaagtgcaagccggtgccggagtggtctttgattccgccccccaagccgaagccgatgagacgcgcggcaaagctcaggcagtcatctctgccattcagaaagcccacaaggagtcgtaa

SEQ ID NO: 3566 - protein, 521 aa, Vibrio vulnificus
MNKAINITTLGQLELLSTTVPYHSDPTRLFHTLCENKRDSLLLESAEIDSKQDLKSLLIVDSAVRMVCHGHVVTMTALSDNGKNLLTHLTKNVAQEVEHQFDGQQLTLTFSSPDDRLDEDSRLREASSFDALRLVQHSFDLAEKDKHAIFIGGLFAYDLVANFEPLGEAHAINQCPDYVFYVAETLMVVDHQTESCHLQATLFADDSQKEALNQRIEQIRTLCATPKALPKAIHLDKVEVDTNISDDAFCQVVRDLKQYVVKGDIFQVVPSRRFTLPCPSPLAAYKELKVSNPSPYMFYMQDELFTLFGASPESALKYETQTNQVEIYPIAGTRRRGKRANGEIDFDLDSRIELELRTDKKENAEHMMLVDLARNDVARISRAGTRHVADLLKVDRYSHVMHLVSRVVGQLRDDLDALHAYQACMNMGTLTGAPKIRAMQLIRDVEGARRGSYGGAVGYLTGEGTLDTCIVIRSAYVENGIAQVQAGAGVVFDSAPQAEADETRGKAQAVISAIQKAHKES

SEQ ID NO: 3567 - DNA, 1521 bp, Synechococcus elongatus
  CDS (1)..(1521)
atgtaccccgattttcagactttttgtcagcttgccgagcagggtaactttatccccctctatgaggagtgggtggcggatatggatacacctgtgtcggcttggtatcgggtctgtcgcgatcgcccctacaactttttgctcgagtccgtcgagggaggcgaacaactggcccgctacagtctcctcagttgtgatcccctgtgggtactggaaacccgcggcaaccaaaccacccaaacccatcgcgatgggtcagttaccaggtttaccggcaatcccttcaccattttggccaactgccttgcaccctatcagccggtgaagctagcgcaactgccggggggcattggtggtctttttggtttttggggctatgaactgattcagtggattgagccacgggttcccattcatcctgccacggcaagggatttgcctgacggggtgtggatgcaggtggatcaaatcctgatttttgatcaggtgaagcgaaaaatctgggcggtggtctatgccgatacccgtgagacggacttgaaaacagcctatacccacgcgagcgatcgcctagagcggcttttgcgtaaactgcaaacccgtattccccctgaggccactcagctccattggcaacccagtcgtcagatccccagttacactagcaacattacctccgaagccttccgtaccaatgtggcgcgcgctaaggactatattcgtgcgggggatattttccaagtcgttctctcccaacgcctcagtgccacctaccgcggcgatccctttgccctctatcgctccttgcgcctgattaacccttccccctacatggcctactttcaatttggcacgtggcagatcattggctctagtccagaggtcatggttaaagccgagcaccatcctgaaaacgctggctctctccttgcgactgtgcgtcctattgccggtactcgccagcgggggcacacctacaccgaagatcagcagcttgccgcagaactccttgccgataccaaagaagtggccgaacacgtcatgctggttgatttggggcgcaatgatttggggcgcgtgtgtcgtcaggggagtgtcagcgttgaagcctttatggtgattgagcgctattcccatgtcatgcacattgtcagtaatgtggtgggtgaactattgcctgataaaacggcatgggacttactccaagcctgtttccccgctggtacagtcagtggtgcccccaaaattcgtgccatggaaattatctatgaattggagggttgccgccgtggcccctactccggtgcctatggttactatgactttgaaggtcaactcaatacagcgatcgccattcgcacaatggtggtgcaacccctgacggaccatcaacatctgattcatgtgcaagcgggtgctggtattgttgccgactccgatccgcagcgggaatacgaagaaaccctcaacaaagcacgggggctgttggaagcgatttctgccctgacaacaaaaccttaa

SEQ ID NO: 3568 - protein, 506 aa, Synechococcus elongatus
MYPDFQTFCQLAEQGNFIPLYEEWVADMDTPVSAWYRVCRDRPYNFLLESVEGGEQLARYSLLSCDPLWVLETRGNQTTQTHRDGSVTRFTGNPFTILANCLAPYQPVKLAQLPGGIGGLFGFWGYELIQWIEPRVPIHPATARDLPDGVWMQVDQILIFDQVKRKIWAVVYADTRETDLKTAYTHASDRLERLLRKLQTRIPPEATQLHWQPSRQIPSYTSNITSEAFRTNVARAKDYIRAGDIFQVVLSQRLSATYRGDPFALYRSLRLINPSPYMAYFQFGTWQIIGSSPEVMVKAEHHPENAGSLLATVRPIAGTRQRGHTYTEDQQLAAELLADTKEVAEHVMLVDLGRNDLGRVCRQGSVSVEAFMVIERYSHVMHIVSNVVGELLPDKTAWDLLQACFPAGTVSGAPKIRAMEIIYELEGCRRGPYSGAYGYYDFEGQLNTAIAIRTMVVQPLTDHQHLIHVQAGAGIVADSDPQREYEETLNKARGLLEAISALTTKP

SEQ ID NO: 3569 - DNA, 1377 bp, Synechococcus elongatus
  CDS (1)..(1377)
atgatgggcccctgtgagccgtggctttggcgttctctgcccctgggtgggcgcacgggtcgcgtgatttttcaacagttgtttttgagggagccgattgctgtcctactggaaagtccagcccaagcccccacaccccaagctcgctactccatttgtgcggggtcaccgcggcgcgatcgccagtgggtgttatccctcggtgaagtgctgccaacattacaaacatttccccagggaagcactgtgcctgaagcagtcagccatctgccctttgcaggcgggtggttgggatggctggggtacgaattggcatgggaaattgaagcgctacccccgcccaaacccgatccgcttccttttccagtggccttttggtatgagcctcaagcctttgctgtcttggatcatcaggcggattgcctgtatctggcggcgtcgagcgcgagtcaactggcggcgctgcaacaaactcttgaagagccttcccctgagcagtccctcttattccccgatcgccccggcaggattgagctagcggcgggctggcagccccatacctaccaagcagccgttgagcacattctccgccatatccgcgctggcgatatttttcaggccaatctgtcggcgcgcttttgccatgatggcggcgttgatccgtggcaacaatatctgcggctacagcagattaacccctctccctttgccagcttttggcagaccccttggggctacattgtcagttgttcaccggaacgcttggtgcaggttcagggcgattgggtgcaaacacgacccattgccggtacccgtccccgtggccaaacccctgcggccgatcgcgcctatgccgaggaactccgtagcaatatcaaggaacaggcagaacacattatgcttgtggatttggagcgcaacgacttggggcggatctgccaatggggcactgtggtggtggatgaactcctaagtttggagtactacagccatgtgatgcacctcgtgagcaatgtgcgcggcaagttgcagccggggagatcccccgtggatgtcatccgtgctctctttccgggtggcaccatcactggctgtcccaaggtgcgctgcatggagattttggcaggtcttgagccctttccccgcaatttgttctacggttcctgtggctactgggatcagcgagggcatctggacttgaatatcctcatccgtaccctcttggtggggcgcgatcgccagacaacttggggacaagtcggtgccggtattgtggccgacagcgctccagagcgggaatggcacgaatccctgagcaaagcccaagccctactccttgccctcggaacaccaacgcccattgccacccattcctaa

SEQ ID NO: 3570 - protein, 458 aa, Synechococcus elongatus
MMGPCEPWLWRSLPLGGRTGRVIFQQLFLREPIAVLLESPAQAPTPQARYSICAGSPRRDRQWVLSLGEVLPTLQTFPQGSTVPEAVSHLPFAGGWLGWLGYELAWEIEALPPPKPDPLPFPVAFWYEPQAFAVLDHQADCLYLAASSASQLAALQQTLEEPSPEQSLLFPDRPGRIELAAGWQPHTYQAAVEHILRHIRAGDIFQANLSARFCHDGGVDPWQQYLRLQQINPSPFASFWQTPWGYIVSCSPERLVQVQGDWVQTRPIAGTRPRGQTPAADRAYAEELRSNIKEQAEHIMLVDLERNDLGRICQWGTVVVDELLSLEYYSHVMHLVSNVRGKLQPGRSPVDVIRALFPGGTITGCPKVRCMEILAGLEPFPRNLFYGSCGYWDQRGHLDLNILIRTLLVGRDRQTTWGQVGAGIVADSAPEREWHESLSKAQALLLALGTPTPIATHS

SEQ ID NO: 3571 - DNA, 1362 bp, Streptococcus mutans
  CDS (1)..(1362)
atgaaaaagaagatattgagtgctgatattttgaccccaatccttgcttacatgcgtgtacagggcgaccataaggtgattttggagtctatccctcgtgaaaaggaaaatgcgcgtttttcaattgttgcttacaatcctgtttttgaaatcaaatttgaaaatgggcaattgacagagaatgacaaagttattgaaagtgatcccttagattatctcagtcaaatcactgtcaaatcacaactgtctcaagatttaccttttaatggtggcgctattggttttgtgggctatgacatggttggtctttatgaaaatattggcaagattcctcaagatacgattggaacaccggatatgcacttttttgtttatgaatcttatcttatttttgatcataagaaagaaaaaattgtcattgttgaagataatatttacagcggcagagaagaagaggaacaaaaggctgccttgcaggaagtcttagcagatcttaaaaaacaggcggttgatgaattttcggaacgcgatttacacactttgacttttaggaaccatttggaagaagctacttttaaagacatggttaccaaagcaaaaaaatttattcgtcagggagatatgtttcaatgcgtgctcagccagcgtttctcagcggatattagtggcaagccgctagatttttatcgtaatttacgtattaccaacccttccaattatctttacttttatgattttggtgattatcagattattggagccagtccagaaagtctcgtttctcttaaaaatggtgtggttactacaaatcctattgcaggaacacgtcctcgtggtgccaacgatcagaaagacaaagacttatctgaagagctcttatcagatgtcaaggaagtagcagagcaccgtatgttggtagatttgggccgcaacgatattgggaaaattgctgaggtaggaagtgttcaagttaccaagtatatggaagtcgaattttttcgctatgttatgcatttaactagtgttgtcaagggtaaacttctgtcaggtttgactggtatggatgctcttaagtcaacattgccagcgggtacggtatcaggagcaccgaaaattcgtgctatgaagcgcatttatgagttggaaaaagaaaagcgcggtatctatgcaggagcaattggttatctgtcagcaagcggagatatggactttgccattgccattcgtaccatgattatcaaaaatcaaaaggcttatgttcaagcaggtgcggggattgtctatgatagcgttcctgaaaatgaatactacgaaaccattaataaggccaaagcaatgactagaataggagagatacagtga

SEQ ID NO: 3572 - protein, 453 aa, Streptococcus mutans
MKKKILSADILTPILAYMRVQGDHKVILESIPREKENARFSIVAYNPVFEIKFENGQLTENDKVIESDPLDYLSQITVKSQLSQDLPFNGGAIGFVGYDMVGLYENIGKIPQDTIGTPDMHFFVYESYLIFDHKKEKIVIVEDNIYSGREEEEQKAALQEVLADLKKQAVDEFSERDLHTLTFRNHLEEATFKDMVTKAKKFIRQGDMFQCVLSQRFSADISGKPLDFYRNLRITNPSNYLYFYDFGDYQIIGASPESLVSLKNGVVTTNPIAGTRPRGANDQKDKDLSEELLSDVKEVAEHRMLVDLGRNDIGKIAEVGSVQVTKYMEVEFFRYVMHLTSVVKGKLLSGLTGMDALKSTLPAGTVSGAPKIRAMKRIYELEKEKRGIYAGAIGYLSASGDMDFAIAIRTMIIKNQKAYVQAGAGIVYDSVPENEYYETINKAKAMTRIGEIQ

SEQ ID NO: 3573 - DNA, 1725 bp, Shewanella oneidensis
  CDS (1)..(1725)
atgaccctaaagacatttaatcaggttacccaagccgatagagcgaatttagcctcgtctcaacagacattcgcacgttcacatacgctcaaagccaccctggtataccatagcgatccactgcgtctgtaccagcacatcactgaagatgcgccccataccatgttgttagaatcagcggaaatcaacagtaaggaaaatcttaaaagcatggtgatgacccatgcggcactgatgatccgctgcgacggttatcgtttacgctttagcgcactgaccgacaatggtgccagtttgctcacgcccattgagcaattttttatggcgcgttcatgccatacacaatgccaacgcaatggccaacacttagtggtgacgctgcaaaaagacactgagcttaaggatgaagatgcgcgcttaaaatccacctcgcccctcgatggtttgcgcttgtttgttaaacatatcgactgcggcgctcatactgacagccaatccaagccagcgttcgaagacttatttttaggtggcgtgctttcctacgatttgattgataccgtcgagccgctgccagaagccccgaatggtgcaaatgattgtcctgattatttattttatctcgccgaaaccttaattcttatcgatcacaaacaaaaacaagccgagattatcacccacaacttcagtgaaagcgcagaacaacattcagaggtgacccaagccttagccgagcgagttgaaaacatccgcgcccaatgtgaagccttagccaagagtgcaacgcctgcgcctgccctcgttggcataacagccacagagcaagtgaatgtcagtgatgaggcctttaaacaaactgttatcgatttaaaagaacacattattgcgggcgatatcttccaagtggtgccttctcgcagttttagcctgccctgcccgaataccttaggtgcttaccgcgcgctgcgtctaaccaatcctagcccctatatgttttatttcaggggaaatgatttcaccctgtttggcgcctcgccagaaagcgcgctgaaatttgattccagcaacaatcaggtcgaagtctatccaatcgcaggtacccgtaaacgcggcaaaaccgccagtggcgagattgatttcgacctcgatagccgcatcgaactcgaactgcgtttagataaaaaagagttatctgaacatttaatgctggtcgatttggctcgcaacgatatcgcccgaatcagccaaagcggcagtcgtaaagtggctgagttacttaaagtcgaccgctactcccacgtcatgcaccttgtgagccgcgtcaccggccaattacgccaagacttagatgcgctccacgcctaccaagcctgtatgaacatgggcactttagttggcgcgcccaaagttcgtgcttcgcaattagtgcgtcaggcagaaaagacccgccgaggcagctatggcggcgccgtgggctacctcaatgcccttggcgatatggatacctgcattgtgatccgctccgcttttgttaaagacggtgtagcccatatccaagccggtgcaggagtggtgtttgactccgatccacaaagtgaagccgatgaaacccgccaaaaggcgcaagcggtgatttcggccatcaaaatgggcgcaggtttagcaggcataaataactgcaacgagcacacttccacaaaagtctcaacagcagcgcagcaaggataa

SEQ ID NO: 3574 - protein, 574 aa, Shewanella oneidensis
MTLKTFNQVTQADRANLASSQQTFARSHTLKATLVYHSDPLRLYQHITEDAPHTMLLESAEINSKENLKSMVMTHAALMIRCDGYRLRFSALTDNGASLLTPIEQFFMARSCHTQCQRNGQHLVVTLQKDTELKDEDARLKSTSPLDGLRLFVKHIDCGAHTDSQSKPAFEDLFLGGVLSYDLIDTVEPLPEAPNGANDCPDYLFYLAETLILIDHKQKQAEIITHNFSESAEQHSEVTQALAERVENIRAQCEALAKSATPAPALVGITATEQVNVSDEAFKQTVIDLKEHIIAGDIFQVVPSRSFSLPCPNTLGAYRALRLTNPSPYMFYFRGNDFTLFGASPESALKFDSSNNQVEVYPIAGTRKRGKTASGEIDFDLDSRIELELRLDKKELSEHLMLVDLARNDIARISQSGSRKVAELLKVDRYSHVMHLVSRVTGQLRQDLDALHAYQACMNMGTLVGAPKVRASQLVRQAEKTRRGSYGGAVGYLNALGDMDTCIVIRSAFVKDGVAHIQAGAGVVFDSDPQSEADETRQKAQAVISAIKMGAGLAGINNCNEHTSTKVSTAAQQG

SEQ ID NO: 3575 - DNA, 1404 bp, Shewanella oneidensis
  CDS (1)..(1404)
atggtaaatagggcgtcaaaacagcttgcatcacgccaacttgactggacattaagcacggcagacctctttgaacactttgcggcagaaccttgggcaatactgctcgactcggccaatgccccccatctggatgctaagttcgatatcatttgcgtaaatcccattgccacccttatcacccatggtgaactgaccgaaattaaggttcagttgcccgaattaaccattcccacccaaatgagtgcaaccgatgatccctttacgctggtcaaccagttattgcgccactggtatccgcaatcctttgcttgtgaactcccctttagtggcggcgccatgggcagctttagctacgatttaggccgtcgtgttgaagctatccccaatattgcggcgcaagatattcaacttggggagatgaatattggtttttacgactgggccctaatttttgactatcagcaacaatgctggcatttagtgcattatttgggtgaaaccgcgctagaaactcaattgaaaataattgaagcaaaaatggctaaaactgtaaaaatagccgaattcaccctcgttaccccttgggctgcacaactcaaaaaggctgattacgttaaaaaattcaatcaagttcaagcctacctgcatagcggcgattgctatcaaattaatttaacgcaacgatttgaagcacaatatcaaggcgatgaatggagcgcctattgcaaactgcgcagtgccaatcaggcgcccttctctgcctttatgcggcttaatgacaatacgattttatcgatttcgcctgagcgttttattcagctgcgcggggatgatattcaaaccaaaccgattaaaggcactctgccgcgccataacgaccctgcgctagataagcaagcggcgcaaatactcgccaactccccaaaggatcgcgccgaaaacgtgatgattgtggatttgctacgtaatgatatcggcaaagtcgcggcgcccggctcagtgcaagtgccgcatctatttgccgtcgaaagctttccggctgtgcatcatttagtgagtaccgtcaccgctaaactcgatccacaataccaagcctgtgatttgctgcgggcagcctttcccggtggttcaattaccggcgcccccaaaattcgcgctatggaaattattgaagaattggaaccctcacgccgcagcctgtattgtggttcaataggctatatcagccaagatgggcaaatggatactagcattaccatccgcaccattgttgccgagcgcggcaagctctattgttgggcaggcgggggcatcgtcgccgactccgatgtcgatgcggaatatcaagaaagcttcgacaaggtgagccgaattttacccctgttagaaaatcagcgataa

SEQ ID NO: 3576 - protein, 467 aa, Shewanella oneidensis
MVNRASKQLASRQLDWTLSTADLFEHFAAEPWAILLDSANAPHLDAKFDIICVNPIATLITHGELTEIKVQLPELTIPTQMSATDDPFTLVNQLLRHWYPQSFACELPFSGGAMGSFSYDLGRRVEAIPNIAAQDIQLGEMNIGFYDWALIFDYQQQCWHLVHYLGETALETQLKIIEAKMAKTVKIAEFTLVTPWAAQLKKADYVKKFNQVQAYLHSGDCYQINLTQRFEAQYQGDEWSAYCKLRSANQAPFSAFMRLNDNTILSISPERFIQLRGDDIQTKPIKGTLPRHNDPALDKQAAQILANSPKDRAENVMIVDLLRNDIGKVAAPGSVQVPHLFAVESFPAVHHLVSTVTAKLDPQYQACDLLRAAFPGGSITGAPKIRAMEIIEELEPSRRSLYCGSIGYISQDGQMDTSITIRTIVAERGKLYCWAGGGIVADSDVDAEYQESFDKVSRILPLLENQR

SEQ ID NO: 3577 - DNA, 1407 bp, Oceanobacillus iheyensis
  CDS (1)..(1407)
atgagtatccattatgtagttgagaaacaaccaatcgatcgattattacctattcaagtactaacccaactaactagcacaaaaaaatatttattagaaagcagctttccgcatgaagaaaaaggacgcttttcatttctaggaatgaatccataccaagaaattctaggattcgataaccgtaccaagatttgcaactatacgaatgacgaagatgaatgggtagaacaacatgccttacattatataaaacaccatctacctaaagccgaaatcgatatttccattccattctatggtggcgcaatcggatatatcggctacgatacgatacgttcctttgaacacatcggagatcgattacccgatgaacgaaacatgccagacatacatctgatgttatttgaagatacgatcatattcgaccatgaacaagatacctgctacctccttgtgattgatacggattcatccacttctcgagatgatttacaggaacgtctaggccaactcagaaaaataataaagaaagcaagagcagcgacagtccccatcccagcgagatattcatttactccagagatggaccaagacgtattcgaaaaaaatgtagctactgcaaaaaaacatattgaagacggagatatttttcaagttgtattgtctcagcgaatgaaggcaaaggtcgaaaatccagaaaccttttccctctccttttatgaacaactgagacaatcgaatccttccccttacatgttttatatggattttaatgattacctcattcttggggcttcaccagaaagtctcatcgaaacaactggcaagaagatcatcacgaatccaatagcaggtacaagaaaaagaggaagcacgaacgaaattgatctcatgctcacagaggaattgcttgctgatgaaaaagaaagagcggagcatcaaatgcttgtagatctaagtagaaatgaccttggaaaggtatgtgaaatcggaagtattgatattccggtatatatgaaaatagaaaaatatcaacatgtcatgcatatggtctctgaagtcactggcattttaaaatctaactactctagtattgatgctttaatctcttgtttaccagctggaacagtatccggagcacccaaaatacgtgcaatgcaaataatcaacgagttagagcaacaccaaagaggtccttatggaggaggtattggatttattaactttcaacaagatgttcacatggctttagctattcgaacggtgatcgttaaagatgacaaagcatacttacaagcaggagcaggaatcgtttatgattccatacctacaagtgagtatattgaaacgctaaataaagccaaatcatttatggaggtggacgatcatgattttattaatcgataa

SEQ ID NO: 3578 - protein, 468 aa, Oceanobacillus iheyensis
MSIHYVVEKQPIDRLLPIQVLTQLTSTKKYLLESSFPHEEKGRFSFLGMNPYQEILGFDNRTKICNYTNDEDEWVEQHALHYIKHHLPKAEIDISIPFYGGAIGYIGYDTIRSFEHIGDRLPDERNMPDIHLMLFEDTIIFDHEQDTCYLLVIDTDSSTSRDDLQERLGQLRKIIKKARAATVPIPARYSFTPEMDQDVFEKNVATAKKHIEDGDIFQVVLSQRMKAKVENPETFSLSFYEQLRQSNPSPYMFYMDFNDYLILGASPESLIETTGKKIITNPIAGTRKRGSTNEIDLMLTEELLADEKERAEHQMLVDLSRNDLGKVCEIGSIDIPVYMKIEKYQHVMHMVSEVTGILKSNYSSIDALISCLPAGTVSGAPKIRAMQIINELEQHQRGPYGGGIGFINFQQDVHMALAIRTVIVKDDKAYLQAGAGIVYDSIPTSEYIETLNKAKSFMEVDDHDFINR

SEQ ID NO: 3579 - DNA, 1362 bp, Escherichia coli O6
  CDS (1)..(1362)
atgaagacgttatctcccgctgtgattactttaccctggcgtcaggacgccgctgaattgtatttctcccgcttaagccacctgccgtgggcgatgcttttacactccggctatgccgatcatccatatagccgctttgatattgtggtcgccgagccgatttgcactttaaccactttcggtaaagaaaccgttgttagtgaaagcgaaaaacgcacaacgaccactgatgacccgctacaggtgctccagcaggtgctggatcgcgcagacattcgcccagcgcataacgaagatttgccatttcagggcggcgcgctggggttgtttggctacgatctgggccgccgttttgagtcactgccagaaattgcacagcaagatatcgttctgccggatatggctgtgggtatctacgactgggcgctggttgttgaccaccagcgtcaaacagtttctttgctgagtcataatgatgtcaatgctcgtcgggcctggctggaaagccagcaattctcgccgcaggaagatttcacgctcacttccgactggcaatccaatatgacccgcgagcagtacggcgaaaaatttcgccaggtacaggaatatctgcacagcggtgattgctatcaggtgaatctcgcccagcgttttcatgcgacctattctggcgatgaatggcaggcattccttcagcttaatcaggccaaccgcgcgccatttagcgcttttttacgtcttgaacagagtgcaattttaagcctttcgccagagcggtttattctttgtgataatagtgaaatccagacccgcccgattaaaggcacgctaccacgcctgcccgatcctcaggaagatagcaaacaagcagaaaaactggcgaactcagcgaaagatcgtgccgaaaatctgatgattgtcgatttaatgcgtaatgatatcggtcgtgttgccgtagcaggttcggtaaaagtaccagagctgttcgtggtggaacccttccctgccgtgcatcatctggtcagcaccataacggcgcaactaccagaacagttacacgccagcgatctgctgcgcgcggcttttcctggtggctcaataaccggggctccgaaagtacgggctatggaaattatcgacgaactggaaccgcagcgacgcaatgcctggtgcggcagcattggctatttgagcttttgcggcaacatggacaccagcattactatccgcacgctgactgccattaacggacaaatttactgctctgcggggggtggaattgtcgccgatagccaggaagaagcggaatatcaggaaacttttgataaagttaataagatattacgccaactggagaagtaa

SEQ ID NO: 3580 - protein, 453 aa, Escherichia coli O6
MKTLSPAVITLPWRQDAAELYFSRLSHLPWAMLLHSGYADHPYSRFDIVVAEPICTLTTFGKETVVSESEKRTTTTDDPLQVLQQVLDRADIRPAHNEDLPFQGGALGLFGYDLGRRFESLPEIAQQDIVLPDMAVGIYDWALVVDHQRQTVSLLSHNDVNARRAWLESQQFSPQEDFTLTSDWQSNMTREQYGEKFRQVQEYLHSGDCYQVNLAQRFHATYSGDEWQAFLQLNQANRAPFSAFLRLEQSAILSLSPERFILCDNSEIQTRPIKGTLPRLPDPQEDSKQAEKLANSAKDRAENLMIVDLMRNDIGRVAVAGSVKVPELFVVEPFPAVHHLVSTITAQLPEQLHASDLLRAAFPGGSITGAPKVRAMEIIDELEPQRRNAWCGSIGYLSFCGNMDTSITIRTLTAINGQIYCSAGGGIVADSQEEAEYQETFDKVNKILRQLEK

SEQ ID NO: 3581 - DNA, 1668 bp, Corynebacterium efficiens
  CDS (1)..(1668)
atgttcttaaacgttcgtcccagtgaaaggcccggttcccatgtcagttgtgacacccgtcctgagtctcaggcaggtgagtgccccatgagcaccgccccccatgttctatcccgcacggtgcggtaccacgaggatgcctccagtctgttcgcccacctcggtgggactgtagccgatgatgcggcgctgttggagagcgcggacatcaccaccaagaacggcatctcctccctggctgtgctcaagggttcggtccgggtcacctgcgagggccagcgggtcacggcgcagcctctgaccgagtcggggcgcatcgtagcctcccgcctggcggaggagctgggtgagtaccggatctccgcactgtcgccggagcatggcaacccggtcaccttcgagttcccggtctcggatgcggtggatgagcgcgagcgcctcacctccatcagcacgatcgaggtgctgcggaagctgcagttcgattccggttatgatcacccggcgctgccgttgctgatgggcggtttcgccttcgactacctggagaccttcgagactctgccggcggtgggagaggggatcaacacctaccccgattatcagttcctggtcgcggagatcatcctggacatcaaccaccaggagcagaccgcccagctggtcggtgtgtccagcgacccggacgcgctgggggaggagctcgcgcagctcgccgggcttatcgacgccgcactgcccggctccgatcacgcctacaaggtcaccccacacgccggcgacaccctgcgcgtggtcgccgacatcccggatgcggagttccgccagcaggtcgccgatctcaaggacaatatccacaacggtgacatctatcaggtggtgccggcgcggtccttctccgcaccgtgcccggatgccttcgcagcctatctccagctgcgggccaccaacccgagcccgtacatgttctatgtgcgcggtctggacaacaaccgtccctatgaactcttcggcgcctccccggagtccaacctgaagttcaccgccgccaccggcgagctgcagctgtatccgatcgccggcacccgcccgcgtgggttgaatgcggatggcaccattaatgatgagttggatatccgtaatgaactggatatgcgcaccaacgccaaggaggttgcggagcacaccatgctggtggatctcgcccgcaatgacctggcgcgggtgtcggtaccggcgacccgtcgcgtggcggatctgctccaggtcgaccgctactcccgggtgatgcacctggtgtcccgggtcaccgccaccctggatccggagctggatgccctggatgcctaccgtgcgtgcatgaacatggggacgttgacgggtgccccgaagttgcgcgccatggagttgctgcggggcgtcgagaagcgtcgccgtgggtcctacggcggtgccgtggggtacctgcgcggcaatggcgacatggataactgcattgtcatccgctccgcgttcgtgcaggacggggtggcggccgtgcaggccggcgccggtgttgtgcgcgattccaatccccagtccgaagccgatgagacactgcacaaggcctatgccgtgctcaatgccatcgcactcgccgccggttccaccctggaggtcgtccgatga

SEQ ID NO: 3582 - protein, 555 aa, Corynebacterium efficiens
MFLNVRPSERPGSHVSCDTRPESQAGECPMSTAPHVLSRTVRYHEDASSLFAHLGGTVADDAALLESADITTKNGISSLAVLKGSVRVTCEGQRVTAQPLTESGRIVASRLAEELGEYRISALSPEHGNPVTFEFPVSDAVDERERLTSISTIEVLRKLQFDSGYDHPALPLLMGGFAFDYLETFETLPAVGEGINTYPDYQFLVAEIILDINHQEQTAQLVGVSSDPDALGEELAQLAGLIDAALPGSDHAYKVTPHAGDTLRVVADIPDAEFRQQVADLKDNIHNGDIYQVVPARSFSAPCPDAFAAYLQLRATNPSPYMFYVRGLDNNRPYELFGASPESNLKFTAATGELQLYPIAGTRPRGLNADGTINDELDIRNELDMRTNAKEVAEHTMLVDLARNDLARVSVPATRRVADLLQVDRYSRVMHLVSRVTATLDPELDALDAYRACMNMGTLTGAPKLRAMELLRGVEKRRRGSYGGAVGYLRGNGDMDNCIVIRSAFVQDGVAAVQAGAGVVRDSNPQSEADETLHKAYAVLNAIALAAGSTLEVVR

SEQ ID NO: 3583 - DNA, 1869 bp, Corynebacterium efficiens
  CDS (1)..(1869)
atgcgcgtactgatcatcgacaattatgattccttcaccttcaacctcgccacgtatgtggaggaggtcaccggtgcggcaccgacggtggtgcccaatgatgcgcagatcgacgagacgctgttcgacgccgtcatcatctcacccggccccggccaccccggggtggcggcggatttcggcagctgccgcggggtgatcgaacgtggtctggtcccggtcctcggggtgtgcctggggcatcagggcatcgcgctcgcccacggcggcgcggtgggcccggcgccggtcccggtgcacggtcaggtcacccgcatccaccacgacgggtccgagcttttcgacgccatcccgccccagttcgacgccgtccgttaccactccctggtggccaccgatctgccgccggaactggaggtcaccgcgaggaccggggacgggctgatcatggcgctgcgccaccgcgagctgccccagtggggtgtgcagttccacccggaatccatcggcgggcagttcgggcaccggatcatggcgaatttcctgagcctggcgcgtcgacaagcgcaccggtgggagatcaccgagcatgtggtggagacaagcgtcgacccggcggcggtgttcgagacgctcttcgccgggtcggagcacgcgttctggctcgatgatccgcagggcaccacctatatgggtgatgcctccgggccgcatgcacggatccgcacccaccgggtgggggagggggagctgttcgactggctgcgtgatgatctgcgtcgcaaccgcgtggccccgggggtgggtttccgcctggggtgggtgggatacctcgggtatgagatgaaggccgaatgcggggtggacaatcggcacgcctcatcgcatcccgatgcccacctgatcttcgccgaccgggccatcgccatcgaacccggccgcgtgtggctcatggcgctcggtgagcagggggagtggttcgcggagatgaccgccgccctggggcagctgcgcccaccccgtgccgctgccgccccggccgcccagctcaccgtccgggatgaccgcgacagctacctggacatgatcgcccgcgcccaggagttgatcacccgcggggagtcctatgagatctgcctgaccacccagctgcgcgcggaggtggaggtggatcccctcgccgcctatctggcgctgcgggcggccaaccccacctcctatggatcattcctgcagctgggggagatggcggtgctgagctcgtcgccggaacggttcatcaccatcgacgcctccggacgtgtggaatccaaacccatcaagggcacccgcccgcggggcagtaccgagcaggaggatgcggccttgatcgccgatctcaccgacaaccccaaggaccgcgccgagaacctcatgatcgtcgacctggtccgcaatgatctcgcccgcggggcgcaaccggcaacggtgcaggtggagaagcttttcgacgtcgagacctacgccaccgtccaccagctcgtcagcaccattaccgcccagctggagggtaaggaccccattgactgcgtgcgggcggcgttccccggtggttccatgaccggtgcaccgaagatccgcaccatggagatcatcgacgagctggagaccggcccccgtggtgtctattccggtggcctgggctatttctcccttgatggggcggtggatctgtcgatggtgatccgcaccgtggtctacacccccggcgtcctggagtacggggtcggcggggcgatcctggccctgtcggaccccgccgcagagtgggaggagatccgggtgaaatcgaggcccctgctgggtctgctcggggtggagttcccgtga

SEQ ID NO: 3584 - protein, 622 aa, Corynebacterium efficiens
MRVLIIDNYDSFTFNLATYVEEVTGAAPTVVPNDAQIDETLFDAVIISPGPGHPGVAADFGSCRGVIERGLVPVLGVCLGHQGIALAHGGAVGPAPVPVHGQVTRIHHDGSELFDAIPPQFDAVRYHSLVATDLPPELEVTARTGDGLIMALRHRELPQWGVQFHPESIGGQFGHRIMANFLSLARRQAHRWEITEHVVETSVDPAAVFETLFAGSEHAFWLDDPQGTTYMGDASGPHARIRTHRVGEGELFDWLRDDLRRNRVAPGVGFRLGWVGYLGYEMKAECGVDNRHASSHPDAHLIFADRAIAIEPGRVWLMALGEQGEWFAEMTAALGQLRPPRAAAAPAAQLTVRDDRDSYLDMIARAQELITRGESYEICLTTQLRAEVEVDPLAAYLALRAANPTSYGSFLQLGEMAVLSSSPERFITIDASGRVESKPIKGTRPRGSTEQEDAALIADLTDNPKDRAENLMIVDLVRNDLARGAQPATVQVEKLFDVETYATVHQLVSTITAQLEGKDPIDCVRAAFPGGSMTGAPKIRTMEIIDELETGPRGVYSGGLGYFSLDGAVDLSMVIRTVVYTPGVLEYGVGGAILALSDPAAEWEEIRVKSRPLLGLLGVEFP

SEQ ID NO: 3585 - DNA, 1557 bp, Bifidobacterium longum
  CDS (1)..(1557)
atgagcgaatgcagcgtcaaacacctgaagtggggcgccacctggcccagtcgcgaacagttccacgaactggccgacgccggataccgtgtgattccgattgtgcgccgtctgctcgccgactcgctcaccccggtcggcttctacgagcgtctcgccggcggccgatccggcaccttcatcctcgaatcggcggaatacggcggcacgtggagccgttacagttttatcggcgtcaactcgatggcccagctgcgctccaacaacggtcaggccgactggctgggcaaggtcccggtcggcgtgcccgtcaccggtgacgtagtcgaagtcgctcacgccacgttgaagactctgaaggccccgcatgtggaaggcctgccgaacctgaccagcggtctggtcggcacggtcggctgggatgccatccgccactgggaaccgaccctgcgcgccgaagctccggacgagaccggccagcctgagaccgtgcttgccctggccaccgatatcgccgtggtcgaccacgtatccggttcggtatggctcatcgccaatgcggtgaatgtggatgataaatccactcgcgccgacgctgcctacaacgaggccgtcgctcgactcgaccagatgcagcgcgatgccgccaccccggctccggacgagtctcgcgtcaacatcctggacgaaacggtcgcccaacccgagctgcgcttccgcaccgagaagagccactacgagcaggccgtcgaacgagccaagcagtacatcgtcgacggcgacgtgttccaggtggtcatctcccagcgcctcgacatcgattcgcctgctgacccgttcgacgtgtaccgtgtgttgcgcacgctgaacccgagcccgtacatgtatttcatggcgttgaccgacgctcagggccgcgacttcaacgtgatcggctccagcccggaaaccctcatcaaggtggacaacggccacgcgatgaccttcccgattgctggatcccgccctcgcggcgccacccctgaggaagacgagaaattcgccaaggagctgcttgccgatccgaaggaatgcagcgagcacatcatgctcgtcgacctgtctcgcaacgacctgagtaaggtgtgcgtgccgcagtccgtggaagtcgtgcagctcatggacatcaagcgtttcagccacatcatgcacatctgctcgacggtcaccggcaaggtcgacccctcgctgaccgcattcgatgtgttcaagtccgcgttcccggccggcacgctgtctggcgcgcctaagccgcgcgcagtcgaaatcatcgacgagttggaaccggccgaccgcggcatctacggcggcaccgtcggctacttcgatttctccggcaacatggacatggccatcgccatccgcaccgcgttcctgcgcgaccatgaggcgagcgtgcaggccggtgccggcattgtgctcgactccgtgcccgccaccgaatggcaggagacgcgcaacaaggccgaggccagcgtcgaatccatccagatcgccgcccagttgcgcgaactgtaa

SEQ ID NO: 3586 - protein, 518 aa, Bifidobacterium longum
MSECSVKHLKWGATWPSREQFHELADAGYRVIPIVRRLLADSLTPVGFYERLAGGRSGTFILESAEYGGTWSRYSFIGVNSMAQLRSNNGQADWLGKVPVGVPVTGDVVEVAHATLKTLKAPHVEGLPNLTSGLVGTVGWDAIRHWEPTLRAEAPDETGQPETVLALATDIAVVDHVSGSVWLIANAVNVDDKSTRADAAYNEAVARLDQMQRDAATPAPDESRVNILDETVAQPELRFRTEKSHYEQAVERAKQYIVDGDVFQVVISQRLDIDSPADPFDVYRVLRTLNPSPYMYFMALTDAQGRDFNVIGSSPETLIKVDNGHAMTFPIAGSRPRGATPEEDEKFAKELLADPKECSEHIMLVDLSRNDLSKVCVPQSVEVVQLMDIKRFSHIMHICSTVTGKVDPSLTAFDVFKSAFPAGTLSGAPKPRAVEIIDELEPADRGIYGGTVGYFDFSGNMDMAIAIRTAFLRDHEASVQAGAGIVLDSVPATEWQETRNKAEASVESIQIAAQLREL

SEQ ID NO: 3587 - DNA, 1482 bp, Streptomyces globisporus
  CDS (1)..(1482)
atgaccgaccagtgcgtggtctcggccccggtgcgggtgcggacacgacgcctcgatgtgaaggagacgggcgccctgcccgcctaccgcgcgctggccgagcacttcggccccgacgaggtctacctcctggagtccgcggccggcccggcccgcgaccgcaggcaccagttcgtcggcttcggcgcgctgctctcgctctcggtcaccgaccgggtggtgcgcgtcgagggcgtacccgccctgcggggcctgctcctggagcgggccggcgcgctcctggaggacggcccccaggggctgcggctgcgtaccgcgggcgggttgtggccgctgctgcgggccatgcgggacatgttcgacgccgaggggtccgcgtccggcttccgcttcgggttcctcgggttcttcgggtacgacacggcccgctacatcgaggacctgccccacctcatcgagaaccggcctggcctgccggacgtacgcatggtcctgcaccggggcagcgtggtcaccgatctcgccaccggccgatgcgaactgctgctccacgagtccccgtactggcccggcctcgcgccggagaccgtcaccgggctcctcgccgacgtggagcaggcctggcccgatccgtccgcagacggcttccccgcctccgcggtcaccgacgacagcgcccccgaagtgttcgcgaacgacgtcgagcggtgtctgaagcacatcgccgtcggcgacatctaccaggtgcagatcggtcacgagctctccatccgctcgacggccgaccccgcggacgtctaccagcgcctgcgcgggcggaacgcctccccgtacatgtatctggcgggcatcgacgggcaccgtctgatcggcgccagccccgagctgttcgtacgcatcgaggacggcgaggtcacgatgcggccgatcgcgggcacggtgccgcggtccggcgcggacggcggcatcgccgcgggagtccggctgaggtcggatcccaaggagatcgccgagcacaccatgctggtggacctctgccgcaacgacatcggacggatcgcccggccgaacacgctcgacgtacccgaccagctggacgtggagggctactcccacgtgctgcacctggtctccacggtcgtcggccgggcgcgggtggacaccgatgccttcgacaccatcgccgccctgttccccgccggcaccatgacgggcgcgccgaagatccgcgccatggagatcatcgagtccgtcgaacgcagccgccgcggcctgtacgccggggcgctcggcctcctcgacgtgggcgggtacaccaacctcgcgctgtgcatccggacccttttccaccacgagggcgtctaccgcacccgggcctcggccggaatcgtcgccgattccgaaccgggggcggagtggaccgagacgctggccaagatgagcgccactcactgggcggtcaccggagaggagttgctgtga

SEQ ID NO: 3588 - protein, 493 aa, Streptomyces globisporus
MTDQCVVSAPVRVRTRRLDVKETGALPAYRALAEHFGPDEVYLLESAAGPARDRRHQFVGFGALLSLSVTDRVVRVEGVPALRGLLLERAGALLEDGPQGLRLRTAGGLWPLLRAMRDMFDAEGSASGFRFGFLGFFGYDTARYIEDLPHLIENRPGLPDVRMVLHRGSVVTDLATGRCELLLHESPYWPGLAPETVTGLLADVEQAWPDPSADGFPASAVTDDSAPEVFANDVERCLKHIAVGDIYQVQIGHELSIRSTADPADVYQRLRGRNASPYMYLAGIDGHRLIGASPELFVRIEDGEVTMRPIAGTVPRSGADGGIAAGVRLRSDPKEIAEHTMLVDLCRNDIGRIARPNTLDVPDQLDVEGYSHVLHLVSTVVGRARVDTDAFDTIAALFPAGTMTGAPKIRAMEIIESVERSRRGLYAGALGLLDVGGYTNLALCIRTLFHHEGVYRTRASAGIVADSEPGAEWTETLAKMSATHWAVTGEELL

SEQ ID NO: 3589 - DNA, 1686 bp, Streptococcus pyogenes
  CDS (1)..(1686)
atggtagccaagtccttagatcaggtcggtccagtcattgaaaacgtacaacactaccaacagctgggctattacgtggtgggctatctcagttacgaagcaactgctttttttgacaatgccttacaaacccataatgacagactaggcaacgagtaccttgcctattttacggtgcacaaaacctgtcaaaaaaaagacctacctcttgattatgacagcattactatccctaaccaatgggtcagcctcactcaaaaagaagcctatcaaaaagccattgaaaccattcaccatgagatgcgacagggcaatacttatcaggtcaactatacccttcaattaactcaggaactcaatgcagctgacagcttagccatttacaataaactcgtcattgaacaggccgctggctacaatgcctatatcgcccatgatgactttgctgttatttcggctagtcctgagttgttctttaaacaagagggcaacaggttaactacaagacctatgaagggtaccaccaagcgtggggttaatagctggctggatcaacaagaacatgactggctccaaactgatgggaaaaatcgctctgaaaacatgatgattgtggatttgctccgcaatgacatggggaaaatttgccaaacaggcagtgtttgtgtcgataggctctgtgaggtcgagcgatactctaccgtctggcaaatgacctcaactattgttggtgacctcaaagcggactgtgacctgatagacattctcacagctctctttccttgtggctctatcacgggggctcctaaagtctccaccatggcaattatcacatctctggagccaaaaccaagggggatttattgtggaagtattggcatttgcctacctgatggtcgccgtttcttcaatgttcccattagaaccatccagctcagtcataatcaagctacttatggtgtcggaggcggtatcacttggcaaagcaagtgggaagacgaatacgaagaagtccagcaaaaaacaacttttctctatcggcacaaacaaatctttgacctcaaaacaaccgccaaggtggaacaccaaaaaatagccttccttgagcaacacctcaatcgccttaaagaagcagccacttattttgcttacccttataatgaaaaagctttgcagaaacaactagcaacctatttggaaaataaggataatgctgcctaccgcttgatgattcgtttatccaaagatggaaagattagcctctctgatcaacctttggagcctttatcagccgattttctgacagctcaactctccttacaggacaaggacgtgacagcttcgccttttacctactttaagaccagctaccggcctcatattgagcaaaaatcttatgaacagctattctataaccaagcggggcaattattggaaacgtccattggcaatctctttgttcagctgggtcagaccctctacacaccaccagtggctgtggggattttaccaggactttttcgccaagaactgctagctactggtcaagctcaggaaaaagaggtgacactagctgatttaaaagaggctagcgctatttttggaggaaatgctgtccgtggcctctatcctctcaaccttgagcttactcaccttgatgccctcttaactaagagtcaagcctaa

SEQ ID NO: 3590 - protein, 561 aa, Streptococcus pyogenes
MVAKSLDQVGPVIENVQHYQQLGYYVVGYLSYEATAFFDNALQTHNDRLGNEYLAYFTVHKTCQKKDLPLDYDSITIPNQWVSLTQKEAYQKAIETIHHEMRQGNTYQVNYTLQLTQELNAADSLAIYNKLVIEQAAGYNAYIAHDDFAVISASPELFFKQEGNRLTTRPMKGTTKRGVNSWLDQQEHDWLQTDGKNRSENMMIVDLLRNDMGKICQTGSVCVDRLCEVERYSTVWQMTSTIVGDLKADCDLIDILTALFPCGSITGAPKVSTMAIITSLEPKPRGIYCGSIGICLPDGRRFFNVPIRTIQLSHNQATYGVGGGITWQSKWEDEYEEVQQKTTFLYRHKQIFDLKTTAKVEHQKIAFLEQHLNRLKEAATYFAYPYNEKALQKQLATYLENKDNAAYRLMIRLSKDGKISLSDQPLEPLSADFLTAQLSLQDKDVTASPFTYFKTSYRPHIEQKSYEQLFYNQAGQLLETSIGNLFVQLGQTLYTPPVAVGILPGLFRQELLATGQAQEKEVTLADLKEASAIFGGNAVRGLYPLNLELTHLDALLTKSQA

SEQ ID NO: 3591 - DNA, 1887 bp, Chlorobium tepidum
  CDS (1)..(1887)
atggctcgaagaggtgctcgggaaacccattctgatcgaagcccgcgtccggtaatggctttgtacgaaaagcttgctagtccgggatcgctctggtttgaatcgaccttgcccggcgcgctctacggcgattccctctttttctccgatccgctcgaaacgctgacgctccatgcgggcgacagcgtcgcgccgtggttcgccacgctggagtcgcggctcgacgcaggcctctgcctcgctggatggctcagctatgaggcgggttacctgctcgatccggcactcgcggctctcgcatctgccggggctgatcgcgagcttcttggctggttcggcgtctatggtcgcccggagcgcgtccgccgcgaaacggttgaggccgaggacgcggcggcagcggcgcggagctgcgcagtcagcggattcggtttcgagttcagcgaggcggagtattgcgagcgcatcgacagacttcggactgagatcgcggcgggcaacgtctatcaggcaaacttcaccgggcgctgccgcttcagcttcgacggtgctgtcgaagcgctttacgtcaagatgaagcgtcgccaaccctcgccgtggtcggccttcctcaacaccggcgaccgtcagattctttccttttcccctgaactctttttcgccagcgatggccgcttgatcgaaaccatgccgatgaagggcaccgcgccgcgccgcgagcggcccgaagaagacctcgccgaaaaggcggggctggcaaagtgtgagaagaaccgcgcggagaacctgatgatcgtcgatctgttgcgcaacgacctggggcgcatctgcgcgaccggctcggtgcaggcctccgggctgttcgagacgcagacctatccgacgctgcaccagatggtttcgaccgtgcgtggcgagctgcgtccggcgacccggctgcacgatcttttccgggcgctgtttccctccggctccgtgaccggtgcgccgaaggtgcgggcgatgcagctcatctgcgagttggaaaaaagcctgcgaggggtttacaccggcgcggtcggtttcatgctgcccgaagggcgtatggccttcaacgtggcgatccgtaccatcgaactgcgagggcagagcggtgtttacggtacggggagcggcatcgtctgggactccgacccgcacgcggagtttcgcgaatgtatgctcaagacgcggattctcgccgacctcgtgccgccctccgatccatcggttccgggcattttcgagacgatgcaatggaacggcggggagttcctgctggctggcgaccatctcgaccggctcgtttcgtccgccatggcgctcggatttacgttcgaccgcgccgctatcgccgaggcgctgtctgccaaggaacgcgagttgaggaaaaacggtggcaggcatcgcgtgcggcttacactttctcacgacggtgggattttgataacttcggagccgttcgatttcgatgcatccggcaagtccgtccgggtctgcattgccgccgagcgggtcgattcgcgcgatccgctgcttcggcacaagagcgtcgctcgcgagcggtacgatcgcgccttgcgcgaggcgcgggagcgtggattcggcgaagtactgtttctgaacgagcgcaacgaagtcaccgaaggggcgatcagcaatgtgctcgcccgcatcgacgggcgctggctgacgccgccggagtcgtgcggactgctcaatggtgttttccgccgctacctcctgcgctcgcgcccgtggatcgtcgaaaaagcgtttacccttgacgatctgcaccgggccgatatggtgttcgtttgcaactcactgcgcggcgtgcgcccggtggcgatcgtctttccggaataa

SEQ ID NO: 3592 - protein, 628 aa, Chlorobium tepidum
MARRGARETHSDRSPRPVMALYEKLASPGSLWFESTLPGALYGDSLFFSDPLETLTLHAGDSVAPWFATLESRLDAGLCLAGWLSYEAGYLLDPALAALASAGADRELLGWFGVYGRPERVRRETVEAEDAAAAARSCAVSGFGFEFSEAEYCERIDRLRTEIAAGNVYQANFTGRCRFSFDGAVEALYVKMKRRQPSPWSAFLNTGDRQILSFSPELFFASDGRLIETMPMKGTAPRRERPEEDLAEKAGLAKCEKNRAENLMIVDLLRNDLGRICATGSVQASGLFETQTYPTLHQMVSTVRGELRPATRLHDLFRALFPSGSVTGAPKVRAMQLICELEKSLRGVYTGAVGFMLPEGRMAFNVAIRTIELRGQSGVYGTGSGIVWDSDPHAEFRECMLKTRILADLVPPSDPSVPGIFETMQWNGGEFLLAGDHLDRLVSSAMALGFTFDRAAIAEALSAKERELRKNGGRHRVRLTLSHDGGILITSEPFDFDASGKSVRVCIAAERVDSRDPLLRHKSVARERYDRALREARERGFGEVLFLNERNEVTEGAISNVLARIDGRWLTPPESCGLLNGVFRRYLLRSRPWIVEKAFTLDDLHRADMVFVCNSLRGVRPVAIVFPE

SEQ ID NO: 3593 - DNA, 1515 bp, Chlorobium tepidum
  CDS (1)..(1515)
atgatcagatctttttcggacaatacggccgacccggcaaaggagccgtcttttattctgacccctctggtcagaacctttcaggctgatacggaaaccccggtgtcggtgtacctcaaactccagcgcccttactcctgcctgctcgagtcggtcgaaggggaggagcgtatggcccgttattcctatatcgccgtcgatccggtagccgtactcaaggggacggttggcggagagattttgcttgacgttcgtgacgagcgtttccgccagttgtctgccattgttgaacaggagcgtgaccttcgcgccgtcgtggatcgctgcatggcgatgttctcctccgaaaagctgcctcgccacaagagcggttcgcagcagatgagcacctccggtgtgttcggttatttcggttacgacaccatgcacctcatcgaaaagattcccgccgccgagcagcccgatccggcagggatgccagacctttgcttgcttttctgcgacacgctcgtcatctttgacaacgtgatgcgcaagctctttctcgtgaccaactatctcgacgccgccgaccgcacgcgcgccgaccgcaaaatcgacgagcttgccgcactgttgcagaagccgctcgtgcctgctctcgtgccgtttcagcccgagaaaccggagccggtcatctcgaacaccacgcgtgacgagtattacgccaaggtgctcaaggccaaggagtacattctgagcggtgacatcttccaggtgcagatttcgcagcgcctgaagcgcaagctgcacacccgtccgttcgacgtctatcgcgcgctccggacgatcaacccttcgccttacctctacttctttgacttcgaggattttcatgtcgtcggctcatcgcccgagctgctggtcaaggtagagcgcgaccacaccggacgccgcatggtcgatacccggcctatcgccggaacgcgacggcgcggcgagagcttcgaggaggacgagcgcaacgccaaggagctgatctccgacgaaaaggagcgggccgagcacctgatgctcatcgacctaagccgcaacgacatcgggcgcatcgccaagatcggcacggtcgagaccaacgagatgatggtgatcgagaagtactcgcatgttatgcacatcgtcagcaacgtccggggtgaattgcaggacggtctgacggcgatggacgccttctggtcgtgcttcccggcgggaacgctgaccggcgcgccgaaggttcgcgccatggagatcatctacgagctggagaaagagaagcgcggcctttacggcggcgcggtgggctacctcgatttccgggggcagctcaacactgccatcgctatccgcacgatggtgatccgcgacggcgttatctacttccaggcggcgggcggcatcgtggccgattcgacgccagaatttgaatacgaagagaccatgaacaagatgagagcaggcctgacggctcttgaaagtattgagacctttgtctga

SEQ ID NO: 3594 - protein, 504 aa, Chlorobium tepidum
MIRSFSDNTADPAKEPSFILTPLVRTFQADTETPVSVYLKLQRPYSCLLESVEGEERMARYSYIAVDPVAVLKGTVGGEILLDVRDERFRQLSAIVEQERDLRAVVDRCMAMFSSEKLPRHKSGSQQMSTSGVFGYFGYDTMHLIEKIPAAEQPDPAGMPDLCLLFCDTLVIFDNVMRKLFLVTNYLDAADRTRADRKIDELAALLQKPLVPALVPFQPEKPEPVISNTTRDEYYAKVLKAKEYILSGDIFQVQISQRLKRKLHTRPFDVYRALRTINPSPYLYFFDFEDFHVVGSSPELLVKVERDHTGRRMVDTRPIAGTRRRGESFEEDERNAKELISDEKERAEHLMLIDLSRNDIGRIAKIGTVETNEMMVIEKYSHVMHIVSNVRGELQDGLTAMDAFWSCFPAGTLTGAPKVRAMEIIYELEKEKRGLYGGAVGYLDFRGQLNTAIAIRTMVIRDGVIYFQAAGGIVADSTPEFEYEETMNKMRAGLTALESIETFV

SEQ ID NO: 3595 - DNA, 1832 bp, Acinetobacter baumannii
  CDS (321)..(1637)
cgcgtgtacgtaatactggtgaagccccacgtcctaagacgatgtttgagccaggtgaagaattacttgttattgacggtccattcacagactttaaaggtgtggtggaagaggttcaatacgataagtcacgtttaacgttgacgattaacgtgtttaatcgaccaactcaggttgaactcgaatttcgccaagtcgaaaaaacgatttaatcttaattggttgaaaagcgcccgattttatcgggcattgttgttgtaacagtattgttacgtagaaattggggagcctaacggcgtttgtacccagaggtatttaaaatggctaagaagattgacggctatatcaagctgcaagttccagctggtaaagcaaatccatctccaccgattggtcctgcactaggtcaacgtggtgtaaacatcatggcgttctgtaaagaattccaaaaacaatttaaagttcctacggctaaactcttaccagacttaccaagttttacgggcggcttggtgggttatttgggctacgatgctgtccgctacatcgagccacgtttaaagaatgtacctgcggctgatccgattacgctgccagatttatggttgatgctctcaaagacagtcattgtttttgacaatcttaaagatacgctatttttaattgtgcatgcggatacagagcagagtaatgcttatgaagacgctcaacaaaaattagatcaattagaacagttgttggcgactccagttagtttgcaagcgcgaccacatacgcctccgcattttgaatcaattactggtaaagcaaaattcttagagacggtagagaaggttaaagaatatattcgtgcaggcgatgtgatgcaggttgtacctgggcagcgtatggtttctgattttgatggagaagctttacaggtttaccgtgcattacgtcatttaaatccatcaccttatctattcttggttcaaggacaaacgattactgataaaaaaccatttcatattgttggttcatcaccggaaattttatctcgtttagaaaatggtattgctacagttcgacctttggcaggaactagaccgcgcggtaaaactaaagaagaagatatagcattagaaaaagatttgctttctgatgaaaaagagattgctgaacatttaatgctgattgatcttgggcgaaacgatgtagggcgcgtatcaaaaataggtaaggtccaagttacggatcaaatggtgatcgagcgctattcacatgtcatgcatattgtttcaaatgtacaaggtgaagtgcgtgatgatatcgatgcacttgatgtatttaaagccacctttccggcaggaacgttatcaggtgccccaaaaattcgtgcaatggaaattattgatgaagtagagcctgtgaaaagaggagtttttggcggggctgttggttatttgggatggcatggtgaaatggatatgtcgattgcaatccgtacttgtgttatccgtgacaaaaaggtgtatgtacaggctggtgcagggctagttgctgactcaaatccagaatctgagtggaatgaaacccaaataaaagctcgcgcagtgatcaaagcggttgaattatcatcaaacggattgattttatgagtttttagcggtttttttaaaaaaaccgcttgcatcgtttggaagttttgctaaactgcacaccgttccgatacgaaacgtacgaaacactaagaaacgccggcatagctcagttggtagagcaactgacttgtaatcagtaggtccacagttcgaatccgtgtgccggcaccattttaaagtgttaagttaatt

SEQ ID NO: 3596 - protein, 438 aa, Acinetobacter baumannii
MAKKIDGYIKLQVPAGKANPSPPIGPALGQRGVNIMAFCKEFQKQFKVPTAKLLPDLPSFTGGLVGYLGYDAVRYIEPRLKNVPAADPITLPDLWLMLSKTVIVFDNLKDTLFLIVHADTEQSNAYEDAQQKLDQLEQLLATPVSLQARPHTPPHFESITGKAKFLETVEKVKEYIRAGDVMQVVPGQRMVSDFDGEALQVYRALRHLNPSPYLFLVQGQTITDKKPFHIVGSSPEILSRLENGIATVRPLAGTRPRGKTKEEDIALEKDLLSDEKEIAEHLMLIDLGRNDVGRVSKIGKVQVTDQMVIERYSHVMHIVSNVQGEVRDDIDALDVFKATFPAGTLSGAPKIRAMEIIDEVEPVKRGVFGGAVGYLGWHGEMDMSIAIRTCVIRDKKVYVQAGAGLVADSNPESEWNETQIKARAVIKAVELSSNGLIL

SEQ ID NO: 3597 - DNA, 1356 bp, Xanthomonas campestris
  CDS (1)..(1356)
atgacgctgacccgaccactgcacgcggacatcgacctgctggcgctgcatcgcctggcaccgcagcggtatcccgcgttgctggaatccagcgcgtcgggcaccgcgcacgggcgttgggatgtgttgctgctggcgcagggcgcgcagctgcgtctggacccggacggctgcacccgcaatggtgacggccaactgctggaaggcggctttctcgacgccctggatgcagcctggcaggccgagcggctgccgcacgagggcgaaagttcttggccgtttcgcggtggctgggcggtgctgctggactatgaggtggccgcacaggtcgagccgatcctgcgcctgcccatgcgcagcgacgccgcgcccgcggcattggccctgcgggcgccggcggcagtgctgcgcgaccgcatggacgggcgctgcttcgccgtggccgagccggggcgcgaagacctgctgcagcagattgacgacgacatcaccgcctgcgccagcctgccagccttgcctgcctgggcagcgccgacggtggtgcaggaagacccgcctgagcaattcaccgatgcggtgctgcgggtgctggactatttgcgtgccggcgatgtgttccaggccaatatctcgcgcgcctggcaggcgcagttcgatcggcccgtcgaccctgccgccttgcatgcgcggctgcgtgcggccaatccggcgccgttttccggcctgtttgtggcggccgggcgcgcgatggtgagttcttcgccggagcggttggtgtcggtgcacgggcgagtagtgcagacccggccgattgccgggacccgtgcacgctttgccggtgacgatgatgccgcgcgcatccgcgagctggtcggtcacccgaaggaacgcgccgaacacgtgatgctgatcgacctggagcgcaacgacctgggccgcatctgcgcgccgggcagcgtggaggtggacgaactgatgggcgtagagagctatgcgcacgtgcatcacatcgtcagcaatgtccgcggccggttgcggcagggcgtcacccctggcgaggtgattgcggcggtatttccgggcggcaccatcaccggctgcccgaaggtgcgctgcatgcagatcattgccgagctggaacagaccgcgcgtggcgcctataccggcgcgttcggttggctcaaccgcgacggcgacatggatctgaacatcctgatccgcaccgccgaagtggccggcagccaggtacggttccgcaccggtgctggcatcgtggtggactcggacccgcagcgggaactggacgaaacccgtgccaaggcgcgcgggctgctgcgtgcgctggacccggcatga

SEQ ID NO: 3598 - protein, 451 aa, Xanthomonas campestris
MTLTRPLHADIDLLALHRLAPQRYPALLESSASGTAHGRWDVLLLAQGAQLRLDPDGCTRNGDGQLLEGGFLDALDAAWQAERLPHEGESSWPFRGGWAVLLDYEVAAQVEPILRLPMRSDAAPAALALRAPAAVLRDRMDGRCFAVAEPGREDLLQQIDDDITACASLPALPAWAAPTVVQEDPPEQFTDAVLRVLDYLRAGDVFQANISRAWQAQFDRPVDPAALHARLRAANPAPFSGLFVAAGRAMVSSSPERLVSVHGRVVQTRPIAGTRARFAGDDDAARIRELVGHPKERAEHVMLIDLERNDLGRICAPGSVEVDELMGVESYAHVHHIVSNVRGRLRQGVTPGEVIAAVFPGGTITGCPKVRCMQIIAELEQTARGAYTGAFGWLNRDGDMDLNILIRTAEVAGSQVRFRTGAGIVVDSDPQRELDETRAKARGLLRALDPA

SEQ ID NO: 3599 - DNA, 1356 bp, Xanthomonas axonopodis
  CDS (1)..(1356)
atgacgcttacccgatcactgcacgcggacatcgacctgctggcgctgcatcggctgtcaccgcaacgctatccggccctgctggagtccagcgcttccggcaccgagcatggtcgctgggatgtgctgctgctggcagaggggccatgcctgcggctggatccggacggatgtacgcgcgatggcgctgggcggttgctggagggcggctttctggcggcgctggatgccgcctggcaggccgagcgcgtgccgcacgacgcggcaagcccatggccgtttcgcggcggttgggcagtgctgctggattacgaacttgccgcgcaggtcgagccgattctgcaactgcccacgcgccgcgacggcgtgcccaccgcgctggccttgcgcgcgccggcagcggtgctgcgcgatcgcctgcacgggcgctgtgtggcgctggcagagccgggccgcgaggagttgttgcagcagatcggcgacgaccttgctgcctgcgctgcactgccgccgctgcctgcctgggccgggccgcttgcggtggacgaagaggcccccgagcgttttaccggggcagtggagcgcgtgctcgattacctgcgtgccggcgatgtcttccaggccaatatctcgcgcgcctggcacgcggcattcgctgcggtggtcgatccggccgcgttgcatgcgcgcctgcgtgcggccaatccggcgccgtttgccggcctgttcgttgccgccgggcgtgcagtggccagttcctcgccagagcggctggtctcggtacagggcgatgtggtgcagacgcgcccgatcgccggcacccgcgcgcggtttgccggggacgacgatgccgcacgtatccgggagctggtcgggcatccgaaggagcgcgccgagcacgtgatgctgatcgatctggagcgcaacgacctgggccgcatctgcgcgccgggcaccgtggaggtggacgagttgatgtgcgtggagagctatgcgcatgtgcatcacatcgtcagcaacgtgcgcgggcgtctgcgcgccggggtaacgcccggtgaggtgattgccgcggtgtttcccggtggcaccattaccggttgcccgaaggtgcgctgcatgcaggtcatcgccgagctcgaacaaactgcgcgcggggcctataccggtgcattcggctggctcaatcgtgatggcgacatggatctgaatatcctgatccgcaccgccgaggtggccggtcaccatgtgcatttccgcaccggtgccgggatcgtggtggattcggatccgcagcgcgagctggatgaaacccgcgccaaggcgcgtggcgtgttgcgtgcgatcgagcagacatga

SEQ ID NO: 3600 - protein, 451 aa, Xanthomonas axonopodis
MTLTRSLHADIDLLALHRLSPQRYPALLESSASGTEHGRWDVLLLAEGPCLRLDPDGCTRDGAGRLLEGGFLAALDAAWQAERVPHDAASPWPFRGGWAVLLDYELAAQVEPILQLPTRRDGVPTALALRAPAAVLRDRLHGRCVALAEPGREELLQQIGDDLAACAALPPLPAWAGPLAVDEEAPERFTGAVERVLDYLRAGDVFQANISRAWHAAFAAVVDPAALHARLRAANPAPFAGLFVAAGRAVASSSPERLVSVQGDVVQTRPIAGTRARFAGDDDAARIRELVGHPKERAEHVMLIDLERNDLGRICAPGTVEVDELMCVESYAHVHHIVSNVRGRLRAGVTPGEVIAAVFPGGTITGCPKVRCMQVIAELEQTARGAYTGAFGWLNRDGDMDLNILIRTAEVAGHHVHFRTGAGIVVDSDPQRELDETRAKARGVLRAIEQT

SEQ ID NO: 3601 - DNA, 1476 bp, Xanthomonas axonopodis
  CDS (1)..(1476)
atgatcactgcagagcagttccagcgccaggccgctgaaggtcacacccgtattcccgttgtccgcgaagtgttgtccgacctggacacgccgctctcggtctacctgaagctcgccgacggcgcctatacctatctgttcgaatcggtcgaaggcggggagcgcttcgggcgctactccatcatcggcctgccggcgcggcgcgtgtacagctttcggggccacacgctggaggtcagcgaacacggcgaagtcgtcgagacccgtgaggtcgccgacccgctggccgaagtcgatgcgttgcgggccgaacattcggtgccgcagctggatgggctgcccggcttcaccggcgggctggtcggctggttcggtttcgagtgcatccaatacatcgagccgcgcctggggagtggcgacaagcccgacgaactcggcacgccggacatcctgctgatgctctccgaagagctggcggtgttcgacaatctcaagggccgtctgtacctgatcgtgcatgccgacccgcggcagccgcaagcctatgtgcgcgccaatcggcgcctggacgagctggcgcatcgcctgcgtcagggcggcgccggttacccgcaggcgcagatttccgatgcgatcgacgaagcggacttccattcctcttttacccgcgaggaatatcacgccgtggtgcgcaaggcgcaggaatacgtgcgtgccggcgatatcttccaggtagtgccatcgcaacgcttgcgcgtgccgttccgcgcgcgcccggtggatgtgtatcgcgcgttgcgtgcactgaatccgtcgccgtacatgtattttctcgatgtcggcggtacccaggtggttggttcgtcgccagaaattctggcgcgcctgcgcgatggcgtggtcactgtgcgcccgatcgccggcacccgcccgcgcggcgccacgcccgaactggacaaggcactggaagccgaactgctggccgacccgaaggaacgcgccgagcacgtgatgctgatcgatctgggtcgcaacgatgtcggccgcgtggccgaaccgggcacggtcaaggtcggcgagcagttcgtgatcgaacgctatagccatgtcatgcacatcgtcagcgaggtgaccggcaccctgaaagccggcctgaattatagcgacgtgctgcgcgccaccttcccggccggcactgtcagcggcgcgccgaagatccgcgcgctggaaatcatccgcgagctggagccggtcaaacgcaacgtgtattccggcgcggtcggctatatcggctggcatggcgatgccgataccgccatcgccatccgcaccgccgtcatccaggacggttacctgtatgtgcaggccggcggcggcgtggtctacgactccgaccccgacctggagtggcaggaaaccatgaacaaggggcgtgcgctgtttcgcgcagttgcccaggcggcgaagggcctgtga

SEQ ID NO: 3602 - protein, 491 aa, Xanthomonas axonopodis
MITAEQFQRQAAEGHTRIPVVREVLSDLDTPLSVYLKLADGAYTYLFESVEGGERFGRYSIIGLPARRVYSFRGHTLEVSEHGEVVETREVADPLAEVDALRAEHSVPQLDGLPGFTGGLVGWFGFECIQYIEPRLGSGDKPDELGTPDILLMLSEELAVFDNLKGRLYLIVHADPRQPQAYVRANRRLDELAHRLRQGGAGYPQAQISDAIDEADFHSSFTREEYHAVVRKAQEYVRAGDIFQVVPSQRLRVPFRARPVDVYRALRALNPSPYMYFLDVGGTQVVGSSPEILARLRDGVVTVRPIAGTRPRGATPELDKALEAELLADPKERAEHVMLIDLGRNDVGRVAEPGTVKVGEQFVIERYSHVMHIVSEVTGTLKAGLNYSDVLRATFPAGTVSGAPKIRALEIIRELEPVKRNVYSGAVGYIGWHGDADTAIAIRTAVIQDGYLYVQAGGGVVYDSDPDLEWQETMNKGRALFRAVAQAAKGL

SEQ ID NO: 3603 - DNA, 1839 bp, Methanosarcina mazei
  CDS (1)..(1839)
atgctttcctttgacattggggaagaagagtttaagagacttgtatcagggcttgaaaaaccaggtcttatccagctccttgcaaaagtggattcaaatttttctcgttcctgttctcctctcgatctttatcaaatactgaaaaaatctggatgttcaggaggttcaggatactcctaccttctcgaatccgtggaaaaacaggcgagcaaagcaaggtattcttttgttggaaattccccggattctctcctgacaattaacgacaggaagctttcccttgaactccttaacccgaatgcctctgatttttttgaagaaatagtctcaaaagtgaaaaaagtatgctcagccggaacaggagaagaagtagaagaagtagctaaagaaaaagagaaagaaaacaaaaacaaaaacaaaaaacgtggagaagaaaataatgcagaagaggataatgcagaagagaatactgaagtgcgaaaactccgaaaattcacggcctctatcccggaaggaaaagactcttttgatgcacttcgcctggtttttcctccggcaaacgggattgagttcctcaatgaaaagcgctttgaaaggcagacttttctcggaggagctatcgggtacacggcttatgatgcagtttatgacagctggcttggggctgataagggctttgaatccgaaatcccggaacttcagtaccttctggtcacgaaaagttatgttttcgaccacctgaccgaagaggtctatatcgtggtcactccctttataaatccagactcggatacaggaaaaatatatgaagaagccctttcagaggcagaaaaactttattcagctatcagggaagtttccctgtatgaaagtacaggaaaagcagcatttctgaatcggttagcaggaccacaatcaacagaattacagccaacgaaattacagtcagcagaattacaatcaacagcgtcaaactcaacaggattacagttggaagggtcaggttcacctttacaggtctgcagttctgacagatctgagtttgaaacttctgtactcagggcaaaagaacacatttttgcaggggatatcttccaggctgtcctgtccagaaaatgtgagttcaggcttgaacagcctccattcgagctttatgcacagctcagggcgataaaccccagtccttatatgtatattttcgagttcggagacctggcaatagtgggggcaagccctgaaaccctgatgactgtacataagcgtacagttatgataaatcccattgcaggcacatgcccaagggggaaatccgaagttgaagatgaaatactggcttcccatatgctcaatgatgaaaaagaaagggcggaacatgtaatgctggttgacctggggagaaacgatgtccgcatggtttgcgaaagcggctccgtaaaagtttcaggatttatgaaagtcctcaagtattctcatgtacagcacatagaaagtacggtttcgggaaccctgaggcctgaatgcgaccagttcgatgccttcagggcaatctttcctgcagggaccctttcaggagctccgaaaatcagggcaatggagattatttccgaacttgaaacagccccgagggggatttacggcggtggagtcgggtattacagctggaacggggacgctgattttgcaatagtgataagaaccctgcttatacaggggaaaaaggtttcattacagtcaggggcagggattgttgcggattccgatcctgcatatgagttcagggaaacagaaaggaaaatggcagcaatgcttacagctataggtggagaaactgagctctga

SEQ ID NO: 3604 - protein, 612 aa, Methanosarcina mazei
MLSFDIGEEEFKRLVSGLEKPGLIQLLAKVDSNFSRSCSPLDLYQILKKSGCSGGSGYSYLLESVEKQASKARYSFVGNSPDSLLTINDRKLSLELLNPNASDFFEEIVSKVKKVCSAGTGEEVEEVAKEKEKENKNKNKKRGEENNAEEDNAEENTEVRKLRKFTASIPEGKDSFDALRLVFPPANGIEFLNEKRFERQTFLGGAIGYTAYDAVYDSWLGADKGFESEIPELQYLLVTKSYVFDHLTEEVYIVVTPFINPDSDTGKIYEEALSEAEKLYSAIREVSLYESTGKAAFLNRLAGPQSTELQPTKLQSAELQSTASNSTGLQLEGSGSPLQVCSSDRSEFETSVLRAKEHIFAGDIFQAVLSRKCEFRLEQPPFELYAQLRAINPSPYMYIFEFGDLAIVGASPETLMTVHKRTVMINPIAGTCPRGKSEVEDEILASHMLNDEKERAEHVMLVDLGRNDVRMVCESGSVKVSGFMKVLKYSHVQHIESTVSGTLRPECDQFDAFRAIFPAGTLSGAPKIRAMEIISELETAPRGIYGGGVGYYSWNGDADFAIVIRTLLIQGKKVSLQSGAGIVADSDPAYEFRETERKMAAMLTAIGGETEL

SEQ ID NO: 3605 - DNA, 1362 bp, Fusobacterium nucleatum
  CDS (1)..(1362)
atgcaaatagaagttaaaaaacttgagaaatatattgatatttatgatatttatgatatttttagagtattgatgagtcaagataattttaaagaaaataagctttcatttttagactcttcattaaaaaataaatatggaaaatattcaataatagggataaattcttatttagaattaaaagaaaaagataataaattctatataaatgataagttaagtgatgaaaattttgaagaatatttagatagatttttaaaggaaaataaacaagaaaataaatatgatttacctttaatttcaggaggaatagcatatttttcttatgactatggaagaaaatttgaaaatataaagacaagacataagaaagatgtggatattccagaagcagttatcagattttacaaaacttatataattgaagatattgaaaagcaagaaatatacataagttaccaagataaaaaagattttgataatttaataaatattttagaaaatactaaaatagaagaagaaaatttaataaaaaataataatcttgcaaactttaaatctaattttgaaaaagatgagtatttaaaagctatcaaaaagactattgactatatcattgagggagatatttacataatgaacttaactcaaagacttatgatagaaagtaaaaaatctcctttacaagtattttcatatttaaggaaatttaatccagcaccttttggagcatatttagattttgataattttgaagttgtaagtgcctcacctgaaagatttatcaaaatgaaagatagacttatagaaacaagacctattaaggggacaagaaaaagaggagcaacaacagaagaagatttagctttaaagaatgagttagcaaactctgaaaaagataaaagtgagcttttaatgatagttgacttggaaagaaatgatttaaatcgtatttgtgagttaaaatcagtagttgtggatgagctttttgaagtggaaacttattcaacagtttttcatttagtttcaacaataagagggaaattgaaagaagaatatagttttgtagatttgataaaagctacttttccaggaggttcaattacaggagcacctaagataagagcaatggaaataatagatgaattagaaaattcaagaagagatttatacacaggttcaataggttatgtttcatttaatggagattgtgatttgaatattgttataagaactgcaattcataaagaaggtaagtattatcttggtgtaggtggaggaattacctgtgaatctgagttagattttgaatatgaagaaactttacaaaaggcaaaagctattttggaggctatatgttaa

SEQ ID NO: 3606 - protein, 453 aa, Fusobacterium nucleatum
MQIEVKKLEKYIDIYDIYDIFRVLMSQDNFKENKLSFLDSSLKNKYGKYSIIGINSYLELKEKDNKFYINDKLSDENFEEYLDRFLKENKQENKYDLPLISGGIAYFSYDYGRKFENIKTRHKKDVDIPEAVIRFYKTYIIEDIEKQEIYISYQDKKDFDNLINILENTKIEEENLIKNNNLANFKSNFEKDEYLKAIKKTIDYIIEGDIYIMNLTQRLMIESKKSPLQVFSYLRKFNPAPFGAYLDFDNFEVVSASPERFIKMKDRLIETRPIKGTRKRGATTEEDLALKNELANSEKDKSELLMIVDLERNDLNRICELKSVVVDELFEVETYSTVFHLVSTIRGKLKEEYSFVDLIKATFPGGSITGAPKIRAMEIIDELENSRRDLYTGSIGYVSFNGDCDLNIVIRTAIHKEGKYYLGVGGGITCESELDFEYEETLQKAKAILEAIC

SEQ ID NO: 3607 - DNA, 1431 bp, Thermoanaerobacter tengcongensis
  CDS (1)..(1431)
atggtaaatatttctaaagaagatttttatgcctataaaaaaatgggatacactttcccagtatatgaggaaataaatggtgatgaaatcacgccaataaacgttttttatagtctttctggtaaacacaaatttttattggaaagtgcaaatggagggagtcactggggtagatattcttttataggaaaggacccttatttgtcagttttaagctatggaagggatataaaaattatcacaacagaagaagaatcgaataaaagaggtttagcactggaagaggtaaaaaactttctgcagattaattataacccattagggcttaacattccttttacaggaggtgcggtaggctatgtatcttatgatgcgataaggctttatgaaaaattgccagaaaaaaatcctgatgaaataaatataccggatgtatacttcatgttttacaagagtttcatctgctatgaccattttaagcatgaagtctacattgtctacaatgtatttgctaatgaggataccgagtatgaggaagttttgcaaaagattaatgagcttttaaatgagataaagtcaaataaaatagagtttcacgacctttcgcttcaagaagaaaaagtgataacttacaacttcacaaaagaagagttttgtcaaattgttgaaagagccaaaaaatacattgaaaaaggagacatatttcaagtggtgttatcccagaggctaaaggcaaagacaaattcagatccttttgagatttacaggaggttgcgttcaaagaatccatctccctatcttttctatatcgactttggcgattttcagcttctgggttcttctcctgaaagtcttgtgagagtctttcaagacaaagtgaccacaaatcctatagcaggcacaagacgaaggggaaaagatgaaaaagaggatttaaaaaacaaagaagaacttttgaaggatgaaaaagaaagggcagagcatgtgatgttggttgacttagggagaaacgacataggaaaggtcagtgaatttggaagtgttaaagtggagcgctttatggaggtggatttttactctcatgtaatgcacattgtatcaactgtttctggaaaattaaaaaaaggatttaccgcttttgatgcccttatagcttgtcttcctgcaggcacagtttctggagcgccaaagataagagcgatggaaataatagaggaattagaaaatgtaaaaaggtccttttacgcaggggctgttggctatttttcctataacggcaatatggatatgtgcatagcaataaggactattctcataaaagaaaatactgcttattttcaagcaggagcaggtattgtgtatgactcaattcctgagatggaatactatgaaattttaaataaagtgatggtacttaaggaggttctttga

SEQ ID NO: 3608 - protein, 476 aa, Thermoanaerobacter tengcongensis
MVNISKEDFYAYKKMGYTFPVYEEINGDEITPINVFYSLSGKHKFLLESANGGSHWGRYSFIGKDPYLSVLSYGRDIKIITTEEESNKRGLALEEVKNFLQINYNPLGLNIPFTGGAVGYVSYDAIRLYEKLPEKNPDEINIPDVYFMFYKSFICYDHFKHEVYIVYNVFANEDTEYEEVLQKINELLNEIKSNKIEFHDLSLQEEKVITYNFTKEEFCQIVERAKKYIEKGDIFQVVLSQRLKAKTNSDPFEIYRRLRSKNPSPYLFYIDFGDFQLLGSSPESLVRVFQDKVTTNPIAGTRRRGKDEKEDLKNKEELLKDEKERAEHVMLVDLGRNDIGKVSEFGSVKVERFMEVDFYSHVMHIVSTVSGKLKKGFTAFDALIACLPAGTVSGAPKIRAMEIIEELENVKRSFYAGAVGYFSYNGNMDMCIAIRTILIKENTAYFQAGAGIVYDSIPEMEYYEILNKVMVLKEVL

SEQ ID NO: 3609 - DNA, 1683 bp, Methanosarcina acetivorans
  CDS (1)..(1683)
atgctttcctttgatcttggaaaagaagaatttctggagcttgtctccgggctcgaaaagccgggccttgtccagctctttgcaaaagtagaaggctgttcccctgcctgctctcccctcgaactttacggagccctgcggggttcagggacaacaggctactcttacctgctggaatccgtggaaaagcaggaaagcagggcaaggtactcttttgttggaaacgaccccgatgccgtgctgaaaataaatgaccgaaaaatttcccttgaactcctgaacccgaaagcttctcctctctttgaagcgatttgcacaaagatggaggaagtctgcggcccggaaaccgcagaaaaagaaaatgaatcaaagaaaaatgcaggtccggaaaagtttacggctgcaattcccagaggaaaagatgttttcgatgctctccgcctggcttttcctccggcaaacgggatagaacttctcaattccaggcgttttgcgaggcagactttcctggggggagctatcggctatactgcgtacgacgcaatctatgacagctggttaggagtcgagaagggctttgagtccgacattcccgaccttcagtacctcctcgtttcgaagagttttgtcctcgaccacctgactgaagaggtttacatagttctcacccccttcgtaagcccgggttcggatgcagaacaggtgtacgaagaagctctctcggaagcagaacggttttactccgtaattaaaaaagctactcaaccggaagatgcagcaaaggcagcagaaggaataattgcatcaggcacagatgtttccggtccggcaaaagccccaaattcaaatgtgcaggtctgcagcgttgatcggtcgggatttgaggagtccgtactccaggcaaaggagcatatttttgcaggagatattttccaggtcgtcctttccaggaaatgcgagtttaaaatggaacagtctcctttcgagctttacatacagctccgggcaataaacccgagtccctacatgtatatctttgagtttggggaccttgcaattgtgggggcaagccctgaaaccctgctgaccgtacacaaacgcactgttataataaaccccattgcaggcacctgtccgaggggaaagtccgaagctgaagacgaaaccctggcttcacacatgctcaacgacgaaaaggaaagggcggaacatgtaatgctagttgacctcggacgaaacgatgtccggatggtttcggaaagcggctcggtcaaggtctcaggttttatgaaagtcctgaagtattcccatgtccagcacatcgaaagcacggtttcgggaaccctaaggcccgaatgtgaccaattcgatgccttcagggcggtatttcctgcaggaacactttcaggggctccgaaaattcgggcaatggagattatttccgaacgtgaagctgtcccaagaggaatttacggaggtggggttgggtactacagctggaacggagatgctgattttgcaattgtaatcaggaccctgcttatacagggaagaaaggcttctgtgcaggcaggggcaggaattgttgcggactcagatcctgcgtatgagttcagggaaacagaccggaaaatggcagcaatgcttacagctatcggcggagaaatccgggttgagaaatga

SEQ ID NO: 3610 - protein, 560 aa, Methanosarcina acetivorans
MLSFDLGKEEFLELVSGLEKPGLVQLFAKVEGCSPACSPLELYGALRGSGTTGYSYLLESVEKQESRARYSFVGNDPDAVLKINDRKISLELLNPKASPLFEAICTKMEEVCGPETAEKENESKKNAGPEKFTAAIPRGKDVFDALRLAFPPANGIELLNSRRFARQTFLGGAIGYTAYDAIYDSWLGVEKGFESDIPDLQYLLVSKSFVLDHLTEEVYIVLTPFVSPGSDAEQVYEEALSEAERFYSVIKKATQPEDAAKAAEGIIASGTDVSGPAKAPNSNVQVCSVDRSGFEESVLQAKEHIFAGDIFQVVLSRKCEFKMEQSPFELYIQLRAINPSPYMYIFEFGDLAIVGASPETLLTVHKRTVIINPIAGTCPRGKSEAEDETLASHMLNDEKERAEHVMLVDLGRNDVRMVSESGSVKVSGFMKVLKYSHVQHIESTVSGTLRPECDQFDAFRAVFPAGTLSGAPKIRAMEIISEREAVPRGIYGGGVGYYSWNGDADFAIVIRTLLIQGRKASVQAGAGIVADSDPAYEFRETDRKMAAMLTAIGGEIRVEK

SEQ ID NO: 3611 - DNA, 1407 bp, Methanopyrus kandleri
  CDS (1)..(1407)
atgcgcttgactgtaagggagctagatatagacaggtctcccgacgaggtctacgcggccttgaggacgctgtcctcacacacgttcctattcgagtcggccgagatcggtgccagcggccggtactccttcgtaggcttctcaccggcgcttaggatagagtgcgtcgacggtcgagtccgcgtggacgtcggtgacccggagtacgccgatttagtggttgaaggtcgaaaggaaacggatgaggaccacttccagctcatgcgccgcgtgttctcccgaatcccgaaggtcgaggggtccggcttcgtcggcggtctcgtgggctacatatcgtacgacgtcgtcgaagactggctggacgtcaaatcgaccaccgtcgccgacccggagtggccgtccttcgagctgtgcctctacgactcggtggtgcgcttcgaccactacgaggacagagtcgagctgatctccgtccatcccgacgactacgaggtcgagtggacggcggaggcgatcgaggagtgtgtccgagaggtgagcggacagacggcccctaaggtgcaccggacgggggagctgaagcgggacctggagaaagaggagttcgaggggatcgtcgagcgggcgaaggagtacataatctcgggggacatcttccaggttgtactctcgaggcgggtggaggtgcgagcggtcgcggatccgctcgaggtgtaccgaaggctccgcgacatcaacccgtccccgtacatgtactgcttggagttcggcgagcggaggatcatcgggtccagtcccgagacgctcgtccggctggaaggtgatcgcatcatcacgaaacccatagccggcaccaggccccgtggtagtaccccagaagaggacgaagagctggcccgtgagatgctcgaagatgagaaagagctcgcggagcacgcgatgctcgtggatctcgccagaaacgacgtgggtaaggtctcgagacccggaacggtcgaagtcacgcggctcatggagatcgagaagtacagtcacgtgcagcacatcgtgtccgaggtggtgggtgagagaaaggagggagttaccccctgggacgtactccgggcgacgttcccggccggaaccgtctccggggccccgaaggtgagggctatggaaatcatcgacgagctggaggtgtacaagcgaggcccgtacgccggaggcgtcggatacgtcagctggacaggggatatggacttcgcgatatcgatccgtaccattttctcgacgggccgtcgatggttcacgcaggcgggtgccggtatcgtgtacgactcggtgcccgaaaacgagtggttcgaaactgaaaataaaatgaaagcgatggtgggagctatccttgaggagactagttctgataaataa

SEQ ID NO: 3612 - protein, 468 aa, Methanopyrus kandleri
MRLTVRELDIDRSPDEVYAALRTLSSHTFLFESAEIGASGRYSFVGFSPALRIECVDGRVRVDVGDPEYADLVVEGRKETDEDHFQLMRRVFSRIPKVEGSGFVGGLVGYISYDVVEDWLDVKSTTVADPEWPSFELCLYDSVVRFDHYEDRVELISVHPDDYEVEWTAEAIEECVREVSGQTAPKVHRTGELKRDLEKEEFEGIVERAKEYIISGDIFQVVLSRRVEVRAVADPLEVYRRLRDINPSPYMYCLEFGERRIIGSSPETLVRLEGDRIITKPIAGTRPRGSTPEEDEELAREMLEDEKELAEHAMLVDLARNDVGKVSRPGTVEVTRLMEIEKYSHVQHIVSEVVGERKEGVTPWDVLRATFPAGTVSGAPKVRAMEIIDELEVYKRGPYAGGVGYVSWTGDMDFAISIRTIFSTGRRWFTQAGAGIVYDSVPENEWFETENKMKAMVGAILEETSSDK

SEQ ID NO: 3613 - DNA, 1299 bp, Pyrococcus furiosus
  CDS (1)..(1299)
atgcttatcaaagagttagatcgagtgtctcctcttcgcttataccttattctcagacaacttgagtatccttttatcctaatgtcagcagaaaagcatagcaaaaaggccagattcacttacctctcagcagcacctgaattcattgtgagtataaatgagagaggaacttatttagatggaaaaaaggtatcaaaagaaagaaatccatttaaggggttaaagggctttataaagcactcaataagtggagaaagattcatgggcggcttggttggatatatagcttatgatgccgttcacaactacatagaggggaatgttgaggagccttcagtttttggctattatccatggacatacatttatgatcatttagaaaataaactctactttgtttccctagaagaaccgccatttgatccagaagctatagtggaaaaggccaaaagggcaaaaattcccagagaggatggaggaagttcaattttaaaaactgatgcaaataaagaagagtttgttgaaattgtagaaaaaggaaaagagtacatattttcaggagacgtatttcaagtagtcctttcgagagagtacgtagttgagacggacttagatccttttacaatctaccttagattgctagacattaatccatcgccttatacttttctccttgaatttgaaaaagtagtggtgggagcgtctcctgaaacaatgggctctgttgaaggaaaaattgttaagataaacccaattgccggaactattccaaggggaaagaacgaggaagaagacaaggcacttgaaaaagccctactctctgatgagaaagaaagagcggagcatgtaatgctagtggatttagctagaaatgacgttaggagagtttcgaaacccaggagtgttaaggtagtgaggtactttgatgtggtcaagtatagctatgtccagcacattgaaagtgagataattggggagttggccgaggataaagacatgtttgatgcaattgaggcaactttcccagctggaacattgacaggagctccaaaaattagggcaatggaaattatagatgaactggaaaaaagcaggagaagagtttatggaggagctgttggatatttttccgtaacaggctatgcagattttgccatagcgataagaatggcggaaatagataagcacgctcacattagagcgggagcaggtatagttgcagattcaattccagaaaaggagttttatgaaactgaaaacaagatgagggctgttctaaaagcctttggggtggagtag

SEQ ID NO: 3614 - protein, 432 aa, Pyrococcus furiosus
MLIKELDRVSPLRLYLILRQLEYPFILMSAEKHSKKARFTYLSAAPEFIVSINERGTYLDGKKVSKERNPFKGLKGFIKHSISGERFMGGLVGYIAYDAVHNYIEGNVEEPSVFGYYPWTYIYDHLENKLYFVSLEEPPFDPEAIVEKAKRAKIPREDGGSSILKTDANKEEFVEIVEKGKEYIFSGDVFQVVLSREYVVETDLDPFTIYLRLLDINPSPYTFLLEFEKVVVGASPETMGSVEGKIVKINPIAGTIPRGKNEEEDKALEKALLSDEKERAEHVMLVDLARNDVRRVSKPRSVKVVRYFDVVKYSYVQHIESEIIGELAEDKDMFDAIEATFPAGTLTGAPKIRAMEIIDELEKSRRRVYGGAVGYFSVTGYADFAIAIRMAEIDKHAHIRAGAGIVADSIPEKEFYETENKMRAVLKAFGVE

SEQ ID NO: 3615 - DNA, 1347 bp, Clostridium perfringens
  CDS (1)..(1347)
atgaattttgaaattaaggaaatagaaaataagcttaagccacatgaagtatattttttatttaaagatgaaataaacagtatatttttagatagttcaaaggaagatagcgaattttctttatattcattcataggattaaatccttttaaaaagtttatctctaagggaaatgagatttttatagatgaaaaactagtcttaggagatccttttaaaaaattagaagagcttattttagaatataaaataaattataatagtgagataccttttttaggaggtgctatgggatatttttcttatgatataggaagagttattgaagatatgcctaaaagtgctaaggatgatgtgtgtattccagatagttattttttattttatgataatgtaataatatttgatttgagaaatcaaaaaacatatataacagccctaggaattaaggaagagtcagaaaaaagtatagctaatatttatgagaggataaaagataaggatataaatttaaatatcagcttagataaaaatactgagtttagttcaaatttttcaagagaagaatacataaattcagtaaaaaaggttaaagagtacataaaagaagggcatacatatattgcaaacctaacacagagattttcctgtgattttaattctgatccttttgatacatatataagtttgagaagtataaataaagcccctttttcctgttatttaaatttagatggttttcaaattataagttcttctccagagaggtttttaaaagtgtttaataataaggttgaaacaagaccaattaaaggcacaagaccaagaggaaaagataaattagaagatgaaaagaataaaaaagaacttttaaatagtgaaaaggataagtcagagcttttaatgattgttgatttagagagaaatgatttaagtaaggtatgcaaacctttttctgtgaaggttacagaattatttaaattagaggaatatgctacagtatttcacttagtttccacagttataggagaactaaaggaagatgttagttctgtaaaatgtataagagaatgttttccaggaggttctataacaggcgctcctaaaataagaagtatggagataatagaggaactagaaggcattagaagagggatatatactgggtccataggttattttgatttaagaggaaattgtgattttaatatagtaataagaactatattagcaaaagataataaggcttattttggagtaggtggaggcataactattgaatcagaagaagagatggaatatgaggaaactttagataaggcaaaggctttaatgagagtattataa

SEQ ID NO: 3616 - protein, 448 aa, Clostridium perfringens
MNFEIKEIENKLKPHEVYFLFKDEINSIFLDSSKEDSEFSLYSFIGLNPFKKFISKGNEIFIDEKLVLGDPFKKLEELILEYKINYNSEIPFLGGAMGYFSYDIGRVIEDMPKSAKDDVCIPDSYFLFYDNVIIFDLRNQKTYITALGIKEESEKSIANIYERIKDKDINLNISLDKNTEFSSNFSREEYINSVKKVKEYIKEGHTYIANLTQRFSCDFNSDPFDTYISLRSINKAPFSCYLNLDGFQIISSSPERFLKVFNNKVETRPIKGTRPRGKDKLEDEKNKKELLNSEKDKSELLMIVDLERNDLSKVCKPFSVKVTELFKLEEYATVFHLVSTVIGELKEDVSSVKCIRECFPGGSITGAPKIRSMEIIEELEGIRRGIYTGSIGYFDLRGNCDFNIVIRTILAKDNKAYFGVGGGITIESEEEMEYEETLDKAKALMRVL

SEQ ID NO: 3617 - DNA, 1530 bp, Ralstonia solanacearum
  CDS (1)..(1530)
atgaccgaactcgaattcaaatcgctggccgaccagggctacaaccgcatcccgctgatcgccgaggcgctggccgacctggagacgccgctctcgctgtacctgaagctggcgcaatcgcacgaccgcggcacgcacaccttcctgctggaatccgtggtgggcggcgagcgcttcgggcgctattccttcatcggcctgcatgcgcgcacgctgctgcgcaccaccggccaccgcaccgaggtcgtcaccgacggccaggtggtcgaaacgcatgacggcaatccgctggaattcatcgccgccttcgagcaacgccacaagatcgcgctgcgcccgggcctgccgcggttctgcggcggcctggccggctatttcggctacgacgccgtgcgctacatcgagccgcgcctgaccgacaccgcgccgcccgatgacctgcagttgcccgacatccagctgatgctgtgcgaagagctggccgtgatcgacaacctgtcgggcaagctctacctgatcgtctatgccgatccgtccaagcccgaggcttatccgcgcgccaggcagcgcctgcgcgaactgcgcgccaagctgcggcatccggtggacgtgccggtgacctcgccgtcggtgcgcacggacatcgtgcgggaattcgacaaggcggactacatcaccgcggtgctcaaggccaaggagtacatcgcggcgggcgatatgatgcaggtgcaggtcggccagcgcctggtcaagccgttccgcgacgcgccgctgtcgctgtaccgcgcgctgcgctcgctgaacccgtcgccctatatgtacttctacaacttcggcgacatgcagatcgtcggggcctcgccggagatcctggtgcgccaggaagagcgccgcgtgccggccggcgcgaacggcaacggcgcggaggaatccgcccgcatcgtgacgatccgcccgctggcgggcacccgcccgcgcggcagcacgcccgagcgcgacgcggaactggccaccgagctgctcaacgacccgaaggagatcgccgagcacgtcatgctgatcgacctggcgcgcaatgacatcggccgcatcgccgagatcggctcggtcaaggtgaccgaccagatggtcatcgagaagtattcgcacgtgcagcacatcgtcagctcggtcgaggggcgcctgaagcccggcatgaccaatatggacgtgctgcgcgccaccttccccgcaggcacgctgtcgggcgcgcccaaggtgcgggcgatggagatcatcgacgagctggagccggtcaagcgcggcatctacggcggcgcggtgggctacctgtcgttctcgggcgagatggacctggcgatcgccatccgcaccggcatcatcaaggacggcaacctgtacgtgcaggccgccgccggcgtggtggccgattccgacccggatgccgaatggcgcgagaccgaacacaaggcgcgcgccgtgctgcgcgccgccgagcaggtccaggacggcctggacgccgatttctga

SEQ ID NO: 3618 - protein, 509 aa, Ralstonia solanacearum
MTELEFKSLADQGYNRIPLIAEALADLETPLSLYLKLAQSHDRGTHTFLLESVVGGERFGRYSFIGLHARTLLRTTGHRTEVVTDGQVVETHDGNPLEFIAAFEQRHKIALRPGLPRFCGGLAGYFGYDAVRYIEPRLTDTAPPDDLQLPDIQLMLCEELAVIDNLSGKLYLIVYADPSKPEAYPRARQRLRELRAKLRHPVDVPVTSPSVRTDIVREFDKADYITAVLKAKEYIAAGDMMQVQVGQRLVKPFRDAPLSLYRALRSLNPSPYMYFYNFGDMQIVGASPEILVRQEERRVPAGANGNGAEESARIVTIRPLAGTRPRGSTPERDAELATELLNDPKEIAEHVMLIDLARNDIGRIAEIGSVKVTDQMVIEKYSHVQHIVSSVEGRLKPGMTNMDVLRATFPAGTLSGAPKVRAMEIIDELEPVKRGIYGGAVGYLSFSGEMDLAIAIRTGIIKDGNLYVQAAAGVVADSDPDAEWRETEHKARAVLRAAEQVQDGLDADF

SEQ ID NO: 3619 - DNA, 1269 bp, Pyrobaculum aerophilum
  CDS (1)..(1269)
atgagaaaagtccccctatcaaaactgcctgagcccagggccctcgcgcgggggctttacgcagatggggaggagttcgtggcgttgttagaatcgggtatgggttacgctgaacgcagtagatatactctcgtggcgtggggagtagctgagaaatacgtctcgtgggggcccgacgtatataaaatggcgtatactgcgtataagaagataagacagttcaactcgccgtttggaggcgacgtagtcataggggctgtttcttacgacgcctctgcgtatatagagccattgctgttacgttacgggaaggtcgacaagacgctccccgcggcgtttttcataaagccagagggctgggttttgtacgacaaactcctaggccgcgcctatatttacggagagctcccggccctaaaaagcgggggagtcgactcgccccgcgtgagggggcctgtggctgggactgacgacagttcgtttaagaggtgggttgcggaggcgaagaggaggattgaagagggtgagatattccaagtggtgctctcgcggcatgtggatttcgcggtggatggggatctcttctccctctacacctccatggcatctataaacccctctccctatatgtactttataaagtggagggggctgtacctcttgggcacttcccctgagttattagtaaaagtccagggagatagggcggagacgcaccccattgctgggacaaggccgaggggggccactgaggaagaggacttagcccttgaggaggatatgttgcaagacgagaaagagctggcagagcactatatgttagtggacctcgcccgcaacgacttgggcagagtctgcaggcccggcactgtaaaagtcgacgagttattcgccgtagagaaatacagcagagttcaacacatagtgtcgcgggttttgtgcgtcctcgagaaaaaggccactccagtagacgcgttatttgccacacaccccgccggcactgtatcgggggctcccaaggtgagggccatggagataatcgccgagcttgaagacgagcccaggggttattatgccggctcagttggcttcctctcgccgaatatgtccgaattcgccattgtgattagaaccgccattgttaaagacgggctactcagacttcaagccggggctggggtggtgtatgactcaacgcccgagagggagttccgggaaactgaggcaaaacttaaagcgttaaaagaggcgctggggctatggacttga

SEQ ID NO: 3620 - protein, 422 aa, Pyrobaculum aerophilum
MRKVPLSKLPEPRALARGLYADGEEFVALLESGMGYAERSRYTLVAWGVAEKYVSWGPDVYKMAYTAYKKIRQFNSPFGGDVVIGAVSYDASAYIEPLLLRYGKVDKTLPAAFFIKPEGWVLYDKLLGRAYIYGELPALKSGGVDSPRVRGPVAGTDDSSFKRWVAEAKRRIEEGEIFQVVLSRHVDFAVDGDLFSLYTSMASINPSPYMYFIKWRGLYLLGTSPELLVKVQGDRAETHPIAGTRPRGATEEEDLALEEDMLQDEKELAEHYMLVDLARNDLGRVCRPGTVKVDELFAVEKYSRVQHIVSRVLCVLEKKATPVDALFATHPAGTVSGAPKVRAMEIIAELEDEPRGYYAGSVGFLSPNMSEFAIVIRTAIVKDGLLRLQAGAGVVYDSTPEREFRETEAKLKALKEALGLWT

SEQ ID NO: 3621 - DNA, 1479 bp, Arabidopsis thaliana
  CDS (1)..(1479)
atgatcaagaggctccaagtttccttttcgaatctgttgagccaggacatcactcttccactgtttgtcgttggagcgcatccgaaaatggaaattgtggcaaaggagaataaagttacagtcatggatcatgtgaaaggcactaagactacagaggaagttgaagatccaatgatgattcctagaagaatctcagagacttggaaaccacaattgatcgatgatcttcctgatgttttttgtggtggatgggttggttacttttcttatgatactgttccctatgccgaaaagcgaaagctacctctctcaaaggctccggttgatgaccgaaatttaccagatatgcatcttggtctttatgatgatgtggttgtgtttgatcatgtcgaaaagaaaatacatataattcattgggtgaggttatcagaaaactcatcatttgatgatgtttatgctaatgctgtgaaacacttggaagaacttgtttcgaggatcaaatgcatgaatccccccaagctaccttatggatcagtggacttgcacacaaatcaatttggcactcctttggaaaaatcaagcatgacaagtgatgcatataagaatgctgtacttcaagccaaagaacacatactggctggagatatctttcagattgttttaagtcaaagatttgagcgccacacttttgcccatccgtttgaagtttatcgagctttgagaattgtgaacccaagtccttctatgtgttacttgcaagcaagaggttgtattctagtagcgtcaagtcctgagattctcactagagtgaagaaaaacaagatcgtgaatagaccactagcaggaactgcaagacgaggaaagagtttcgaggaggatcaaatgttggaggaggcacttttaaaagatgaaaaacagtgtgcagaacacatcatgctcgttgacttgggtcgcaatgatgttggaaaggtgtccaagaacggctcagtgaaagtagaaaggctcatgaatatagagcgttattctcatgtcatgcatattagctcaacggtgattggagagttgcaagagaatctgacttgctgggacacgcttcgtgctgctttacccgttggaaccgttagcggagctccaaaggtgaaggctatggagttgatcgatgagctagaggtgactagaagaggtccatatagtggtggattcggtagtgtctcattcactggagacatggacatagctttggctcttaggaccattgtgttcccaacacaagctcgttacgacacaatgtactcatacaaagacaaagacacgccacgccgtgagtgggtagcctatctacaagcaggtgcaggcattgtagctgatagtgacccagaggatgagcaccgtgagtgtcagaacaaagctgctgggctagcacgtgccattgacttggctgagtctgcattcgttgataaaagtgatacaacaatctag

SEQ ID NO: 3622 - protein, 492 aa, Arabidopsis thaliana
MIKRLQVSFSNLLSQDITLPLFVVGAHPKMEIVAKENKVTVMDHVKGTKTTEEVEDPMMIPRRISETWKPQLIDDLPDVFCGGWVGYFSYDTVPYAEKRKLPLSKAPVDDRNLPDMHLGLYDDVVVFDHVEKKIHIIHWVRLSENSSFDDVYANAVKHLEELVSRIKCMNPPKLPYGSVDLHTNQFGTPLEKSSMTSDAYKNAVLQAKEHILAGDIFQIVLSQRFERHTFAHPFEVYRALRIVNPSPSMCYLQARGCILVASSPEILTRVKKNKIVNRPLAGTARRGKSFEEDQMLEEALLKDEKQCAEHIMLVDLGRNDVGKVSKNGSVKVERLMNIERYSHVMHISSTVIGELQENLTCWDTLRAALPVGTVSGAPKVKAMELIDELEVTRRGPYSGGFGSVSFTGDMDIALALRTIVFPTQARYDTMYSYKDKDTPRREWVAYLQAGAGIVADSDPEDEHRECQNKAAGLARAIDLAESAFVDKSDTTI

SEQ ID NO: 3623 - DNA, 1302 bp, Sulfolobus tokodaii
  CDS (1)..(1302)
atggaaatctatcctataacttcttttgctcaaccttatgaagtatttaaatgtatattagatgaggcagatatagcagcactattagaaagtggttctggtcctcaacataaatcgagatatagtataatagcatggggaaagaaagggtatcttaatataaacggagttaggtcttctggcgatattaatgatagcttctatgaccctatcgaggtcttagagaagtttctttccaaagctcctttgcttaatttacctggaagattcaaaggaggtataattgggtacgttagctatgacgctgtgagatattgggaatctataagagatttgaagagagaggcagaagaatggcctaatatggaattttttataccagagaatgttatagtctatgatcatattgaaggcaaagtatatgttgagggtgagctacctaaggttacaatatgtaaggatattggtaatgtgaagttcgaatttgaaatagaatctttagataaaacgcaatttgaaaaagctgtttcggacatcttggattacataaaaaatggatatgcttttcagatagtaatttctaggtttttaagatatatttacagaggagatttaatgagtttctattacaacctaaggaaaataaatccatctccctatatgtattatttaaagttttatgatagacatgttatcggatctagcccagaaacattatttagtttgcaagatggtatagttgagacgtatcctatagctggatcaagacctagaggagcgacaccagaagaagatttgaatttagaaaaagaacttttagcttctgagaaagaaagggctgaacatataatgctagttgatttagctaggaatgatataggtaaagtttgttacatgggctcagttaaggttcctgaatttatgtacatagaaaaatatagtcatgtacaacatatagtaagtaaggtagtaggtacattaaaaagaaattatagtgcatttgacgttttaaaggctgtattccctgccggtactgtaagtggagcaccaaaacccatggctatgaatgttattgaattattagagccgtttaagagaggaccctatgctggaggagtaggtttcttttcggctaatggtgatgcagaatttgcaataactataagaagtgcttttgtaaataaagatttattcagaattcaagccggtgctggtatagtttatgactcaataccggaaatggaatattatgagactgaacataaaatgagagccttaaaagttgctatgggggtagtttag

SEQ ID NO: 3624 - protein, 433 aa, Sulfolobus tokodaii
MEIYPITSFAQPYEVFKCILDEADIAALLESGSGPQHKSRYSIIAWGKKGYLNINGVRSSGDINDSFYDPIEVLEKFLSKAPLLNLPGRFKGGIIGYVSYDAVRYWESIRDLKREAEEWPNMEFFIPENVIVYDHIEGKVYVEGELPKVTICKDIGNVKFEFEIESLDKTQFEKAVSDILDYIKNGYAFQIVISRFLRYIYRGDLMSFYYNLRKINPSPYMYYLKFYDRHVIGSSPETLFSLQDGIVETYPIAGSRPRGATPEEDLNLEKELLASEKERAEHIMLVDLARNDIGKVCYMGSVKVPEFMYIEKYSHVQHIVSKVVGTLKRNYSAFDVLKAVFPAGTVSGAPKPMAMNVIELLEPFKRGPYAGGVGFFSANGDAEFAITIRSAFVNKDLFRIQAGAGIVYDSIPEMEYYETEHKMRALKVAMGVV

SEQ ID NO: 3625 - DNA, 1056 bp, Thermoplasma volcanium
  CDS (1)..(1056)
atgttagctgatcagatagatgagtttaggacctatagtaattttgcatattttgcctctttccctgacagggtaaatggatatgagtacgtatttgcatcagataccttccaaaatgatccttctaagatattcgatggcgctcttaggccaattctagtaacatacgattatgtaaacgagatcttcgatacgaaggttaagagttctggatggccatactttctatctatggatgcggaaactattgaaaaacgtccaataatgcgtacttctgcctttaaaaagaagaactcaggtagcttaaaggatgaagcgttggagggaaagattaggaaaatagtgaatctaataaggaacggggaagttttgcaggtagtaatttcccgggaatttgaggctaacgtaaatgttaacgaaaagattcatgaattcctcacgaaggatcggtcaagatacgtcttttactataggttcggcaagtacgaagtggttggaagttccccggagaatatatttacggttatagggaacagaatttatgtcgatcctatcgctgggacaatatcacattcatttagctccgatacactctatagaagtgaaaaggatagatgtgagcataggatgcttcttgacctggctaggaacgatgtaagcaaatttgctgacattggcagcctagaagttcctaaggtgatggaaattgaggaattttcaagtgtaaagcaccttgtaagccaggtaaaggctacgttctcaaacaagaattatgtggacattctaagggcaatgtttcctgccggcaccgtaacgggatcgccaaaggagagggctattgagatcatagacaagttcgaagaaacgcctaggggcccttacggcggagctgtaggaatagtcggttcaggtatatttgatatggggcttgccatacgcatggcctattcttctggaaatggttttagggtgcgtgcaggtgcaggcatagtcaaggattccgatccctcttctgaggtcaatgagatatataacaaggcgaggtcagttctatga

SEQ ID NO: 3626 - protein, 351 aa, Thermoplasma volcanium
MLADQIDEFRTYSNFAYFASFPDRVNGYEYVFASDTFQNDPSKIFDGALRPILVTYDYVNEIFDTKVKSSGWPYFLSMDAETIEKRPIMRTSAFKKKNSGSLKDEALEGKIRKIVNLIRNGEVLQVVISREFEANVNVNEKIHEFLTKDRSRYVFYYRFGKYEVVGSSPENIFTVIGNRIYVDPIAGTISHSFSSDTLYRSEKDRCEHRMLLDLARNDVSKFADIGSLEVPKVMEIEEFSSVKHLVSQVKATFSNKNYVDILRAMFPAGTVTGSPKERAIEIIDKFEETPRGPYGGAVGIVGSGIFDMGLAIRMAYSSGNGFRVRAGAGIVKDSDPSSEVNEIYNKARSVL

SEQ ID NO: 3627 - DNA, 2202 bp, Rhizobium loti
  CDS (1)..(2202)
atggagacggcaatgacgatgaaggttctggaaaacggcgctgaaagcttcgtgaccgcgggtggcatcaccattacgcgtgagcgccacgaccggccctatgcgggtgcgatcgacgcttatgtcgatggcttgaactcgcgccgcggcgcggtgttttcctccaactacgaatatcccggccgctatacgcgctgggacaccgccatcatcgatccgccgctggtcatttccgcgcggggccgcgccatgcgcatcgaagcgctgaaccgccgcggcgaggcgctgttgccggtgatcggcaaaacgctgggcggccttgccgacatcaccatcgccgagacgacgaagacgctcatccgcctcgacgtcgccaagcccggccgcgtcttcacggaggaagagcgcagccgcgtgccctcggtcttcaccgtgctgcgcgccatcaccgctttgttcaaaaccgacgaggacgccaatctcggcctctatggcgccttcggctacgacctctccttccagttcgacccggtcgactacaagctcgagcgcaagcccagccagcgcgacctcgtgctgttcctgcccgacgagatcctggtcgtcgaccactattccgccaaagcctggaccgaccgctacgactattcgggcgaaggattttcgaccgaaggtctgccgcgcgacgcaatcgccgagccgttcaagaccgccgaccgcatcccgccgcgcggtgaccatgagccgggcgaatacgctaatctggtgcggcgtgccatggactcgttcaagcgcggcgacctgttcgaggtcgtgcccggccagatgttctacgagcgctgcgagacgcagccctccgacatttcgcgcaagctgaaatcgatcaacccctcgccttattcgttcttcatcaacctcggcgaaaacgaatatctgatcggcgcctcgcccgaaatgttcgtgcgcgtcaatggccgccgcgtcgaaacctgcccgatttcgggcaccatcaaacgcggcgacgacgccatttccgatagcgagcagatcctgaagctgctcaattcgaagaaggacgaatccgagctcacaatgtgctcggacgtcgaccgcaacgacaagtcgcgggtctgcgagcccggctcggtgcgcgtcatcggccgccgccagatcgagatgtattcgcgcctcatccacaccgtcgatcacatcgaaggccggctgcgcgaaggcatggacgctttcgacgccttcctgtcgcatgcctgggcggtcactgtcaccggcgcgccgaaactgtgggccatgcgcttcatcgagcagaacgagaagagcccgcgcgcctggtatggcggcgcaatcggcatggtcaacttcaacggcgacatgaacaccggcctgacgctgcgcaccatccgcatcaaggacggcattgccgaagtgcgggccggcgcgacattgctgttcgacagcattcccgaggaagaagaagccgaaaccgaactgaaggcatccgccatgctctccgccatccgcgacgccaagacgggcaactccgccagcaccgagcgcaccaccgcgcgggtcggcgacggcgtcaacatcctgctcgtcgaccacgaggactctttcgtccacacgctggccaactacttccgccagaccggcgccaatgtctcgaccgtgcgcacgccggtgccggacgaagtgttcgagcggctgaagccggaccttgtcgtgctctcacccggaccgggtacgccgaaggatttcgattgcgccgcgaccatcagacgagcgcgcgcccgcgacctgccgatcttcggcgtctgcctaggcctgcaggcgctggccgaggcctatggcggggaactgcgccagctgcatattcccatgcacggcaagccctcgcgcatccgcgtctccaagcccggcatcatcttctccggcctgcccaaggaagtcactgtcggccgttaccactcgatcttcgccgatccggtgcgcttgcccgatgatttcattgtcacggcagagactgaggacggcatcatcatggctttcgagcaccgcaaggagccgatcgcggcggtgcagttccacccggaatcgatcatgacgctcggccacaatgccggcatgcgcatcatcgagaacatcgtcgcccatttgccgcgcaaggccaaggaaaaggcagcctga

SEQ ID NO: 3628 - protein, 733 aa, Rhizobium loti
METAMTMKVLENGAESFVTAGGITITRERHDRPYAGAIDAYVDGLNSRRGAVFSSNYEYPGRYTRWDTAIIDPPLVISARGRAMRIEALNRRGEALLPVIGKTLGGLADITIAETTKTLIRLDVAKPGRVFTEEERSRVPSVFTVLRAITALFKTDEDANLGLYGAFGYDLSFQFDPVDYKLERKPSQRDLVLFLPDEILVVDHYSAKAWTDRYDYSGEGFSTEGLPRDAIAEPFKTADRIPPRGDHEPGEYANLVRRAMDSFKRGDLFEVVPGQMFYERCETQPSDISRKLKSINPSPYSFFINLGENEYLIGASPEMFVRVNGRRVETCPISGTIKRGDDAISDSEQILKLLNSKKDESELTMCSDVDRNDKSRVCEPGSVRVIGRRQIEMYSRLIHTVDHIEGRLREGMDAFDAFLSHAWAVTVTGAPKLWAMRFIEQNEKSPRAWYGGAIGMVNFNGDMNTGLTLRTIRIKDGIAEVRAGATLLFDSIPEEEEAETELKASAMLSAIRDAKTGNSASTERTTARVGDGVNILLVDHEDSFVHTLANYFRQTGANVSTVRTPVPDEVFERLKPDLVVLSPGPGTPKDFDCAATIRRARARDLPIFGVCLGLQALAEAYGGELRQLHIPMHGKPSRIRVSKPGIIFSGLPKEVTVGRYHSIFADPVRLPDDFIVTAETEDGIIMAFEHRKEPIAAVQFHPESIMTLGHNAGMRIIENIVAHLPRKAKEKAA

SEQ ID NO: 3629 - DNA, 3859 bp, Brucella abortus
  CDS (341)..(2536): Xaa of translated CDS can stand for any naturally occuring amino acid which can be translated from respective CDS-codon
gcctgtttttacaagcattcgggttttctttttatcctgatagcaagaaataatgtcatatgataaatccgggtttccaatttttccggttgccaaggtggcatgtttgaacgctaaccagtacttccatgaacatttcgcgcattatcgtcatcaacggttggtggtgggctcgctaaaagcggccacgcaggcgttcgtgcatatgcgttcagaagacaggccgctgggattatccgggcggcctttttgtttggctgttggaataagaccgaaagcatgtctcgcgaagcgggaacaggaaatattcggaaacgaaagagatttgggatagccgatcatgaatgcgaagactgcggatagcgagatattccagcacgaaacggctggcggtatcatcgtcgagcgggtgcgccacctcacggcctataagggcgccattgaaagctatatcgatgtgctgaacgaatggcgcggtgcggtgttctcgtccaattacgaatatccgggccgctatacgcgatgggataccgcaattgtcgatccgccggtcgtcatcacgtcgcgtgcccgcacgatgcgcatcgaggcgctgaacgcgcgcggcgtcatcctgcttcggcccattctggataccgtcaaggcgctttcggaagtaaagatcgaccagtccggcgaaaaccgtatcgatctgacgattgtggaaccggtcggcaccttcacggaagaagaacgctcgcgcatgccctcggtctttacggtgctgcgcgccatagtcgggcttttcttctcggaggaggatgccaatctcggcctttatggcgcctttggctatgatctggcgttccagttcgatcccatccagtacaagctgaagcgcccggacgaccagcgtgacctcgtgctgttcattcccgacgaaatcttcgtcgccgaccattatgcggcgcgcgcctgggtggaccgttatgaatttcgctgcggcggttcgtccacgcacggtcttgatcgcgcgacgccggtggtgcctttcaagccatcggagcgcaagcttgcgcgcggcgatcataatccgggtgaatatgccaggcttgtcgagcgcgccaaggaaagcttcaagcgcggcgacctgttcgaggttgtgccgggccagaccttctatgagcgctgccacacggcgccgtcggagattttccgccggctgaagtcgatcaatccttcgccctattcctttttcatcaatctgggcgagagcgaatatctggtcggcgcatcgccggaaatgtttgtgcgcgtcaatgggcggsgcatcgagacctgcccgatttccggcaccatcaagcgcggtgaagatgcaatttcggattctgagcagatattgaaactgcttaattccaagaaggacgaatccgagctgaccatgtgttcggatgtggaccgcaacgacaagagccgcgtttgcgagccgggttcggtgcgtgttatcggtcgccgccagatcgagatgtattcccgcctgatccatacggtcgatcatatcgaaggccgcctgcgtgacggcatggatgcgtttgacggcttcctcagccatgcatgggctgtgacggtgacaggcgcgccgaagctgtgggcaatgcgctttcttgaggaaaacgaacgcagcccgcgcgcatggtatggcggcgcgatcggcatgatgcatttcaatggcgatatgaatacagggctgacgctgcgcaccatccgcatcaaggatggtgtggcggaaatccgtgcaggggcgacgcttctgttcgattccaaccctgacgaggaagaagacgagaccgaattgaaggcatcgcccatgattgcggctgtgcgggacgcacagaagagcaatcagatcgcggaagaaagtgtggcgccaaaggtgggtgagggggtttcgatcctgctggtcgatcacgaggattccttcgtccatacgcttgccaattatttccgccagacgggcgccaaggtttccaccgtgcgttcaccggtggcagaggagatattcgaccgcgtcaatcccgatctggtggtgttatcgccgggaccgggctcgccgcaggatttcgattgcaaggcgaccatcgataaggcgcgcaagcgccagcttycgatttttggsgtctgcctcggccttcaggcactggcggaagcctatggcggggcgttgcgccagcttcgcgttccggtgcatggcaagccttcacgcatccgcgtatcaaagccggagcgcattttctccggcttgccggaggaagtgacggtggggcgttatcattcgatcttcgccgatcctgaacgcctgccggatgattttctcgtcacagccgaaacggaagacgggatcatcatggcttttgaacataaacatgaaccggtggcagccgttcaattccatcccgaatccatcatgacgcttggccataatgccggtatgcgcatgatcgagaatgtcgtgacgcatcttgcaggcaagcacaaggcgcgccgcaccaactattgatagaatatattccgccctaacttkgaagccagccgcaggccaaaaccttggcgggtttggtttttttcaatgcttttggggsgattcctggcctgttgcttgctccggcaactcatttgcaactgtaataccttacatttgcaggaaaaaattagagcgcgtttcgatctgattgaatcagatcggcgctctaatcctttgttttgacgcgcatcttttcccgaaaaccgtttcacacttttcgggatgcgctctaaatgctggaacgcaaaaaacagggtacgaagttttgtttttctggggtatagagcatttccagcaaaagtgtgaaacggttttgtgccggataatgcgacaaaacaaagagttagagcgtttccagcgatttcgttgaaacaggaaccgctctggcgaacgaatgaagggcttacgcgtaggcccgtcccggtttcgggaaagatcaagataaccaaaggttcattatggacgcgagtgcaaaggttcggcggcttgccgcttggtctattcccgttgctttcggtgtgatggggctgaaatatgtggcctatgcgctgacaggctccgtggctctttattcggatgcactcgaatcgattgtcaatgtgattgcggcaatcggcgccgtggtgggccattcgggtcaagctatctgcccgccgacgacaatcatcccttcgggcaccacaaggcggaatatatttcggctgtggtggagggcgttctgattacggtcgccgcacttttgatcttccgcgaggcctggtttgcactggaaacaccgcgaatgctcgatgaaccctggytgggtctcggcatcaacatggctgctgctgccataamcggcctgtgggcgacattgttgattcgcaccggacgcaaattccgctcgccagcactggaagccgacgccaagcacatcatgacggatgtgttcacctctgcgggcgttctggtcggccttgtcggcgtggtggtaaccggttggtcggtgctcgatccattgctcgccattctggtggccatcaatattctctggcagggctggcacgtcatcaattcctcggtccaggggctgatggatattgcggtcgagccgaccgaggaaatgcgtatccgcaatgttatctcggccaatgcgggtggggctatcgaggttcacgctctcaagacacgcattgcggrccgcgtgaccttcatcgagtttcaccttgtcgtggcggcggatatgagcgtcggcgatgcacatgtcatctgtgaccgcatcgaggatgcggtgaaggcgcagatcgagggggggcccgg

SEQ ID NO: 3630 - protein, 731 aa, Brucella abortus
  misc_feature (323)..(323): Xaa can be any naturally occuring amino acid
  misc_feature (602)..(602): Xaa can be any naturally occuring amino acid
MNAKTADSEIFQHETAGGIIVERVRHLTAYKGAIESYIDVLNEWRGAVFSSNYEYPGRYTRWDTAIVDPPVVITSRARTMRIEALNARGVILLRPILDTVKALSEVKIDQSGENRIDLTIVEPVGTFTEEERSRMPSVFTVLRAIVGLFFSEEDANLGLYGAFGYDLAFQFDPIQYKLKRPDDQRDLVLFIPDEIFVADHYAARAWVDRYEFRCGGSSTHGLDRATPVVPFKPSERKLARGDHNPGEYARLVERAKESFKRGDLFEVVPGQTFYERCHTAPSEIFRRLKSINPSPYSFFINLGESEYLVGASPEMFVRVNGRXIETCPISGTIKRGEDAISDSEQILKLLNSKKDESELTMCSDVDRNDKSRVCEPGSVRVIGRRQIEMYSRLIHTVDHIEGRLRDGMDAFDGFLSHAWAVTVTGAPKLWAMRFLEENERSPRAWYGGAIGMMHFNGDMNTGLTLRTIRIKDGVAEIRAGATLLFDSNPDEEEDETELKASPMIAAVRDAQKSNQIAEESVAPKVGEGVSILLVDHEDSFVHTLANYFRQTGAKVSTVRSPVAEEIFDRVNPDLVVLSPGPGSPQDFDCKATIDKARKRQLXIFGVCLGLQALAEAYGGALRQLRVPVHGKPSRIRVSKPERIFSGLPEEVTVGRYHSIFADPERLPDDFLVTAETEDGIIMAFEHKHEPVAAVQFHPESIMTLGHNAGMRMIENVVTHLAGKHKARRTNY

SEQ ID NO: 3631 - DNA, 1410 bp, Bradyrhizobium japonicum
  CDS (1)..(1410)
atgaccgataacccgatgtacgttcgcgagttgcagtgggttgaacctgtcacagcgatgcgacgtcttgggcatcgatcgcatctcacgtttctcgatagcgcagcaaggcacgagctgcttgggcgctactcatatctaacgtgcgaccccttcagcacctacagggtcgcgaacggccaagccagttggaacggactgactctcgaggccgatccatggaaggtccttcgcacgctactcgcgaagtacccgcaagagcatcgtcccgatctcccgccattccagggaggagcggcaggctaccttgcctacgacatgaacaggacattggagcgattgtctgccccgccaattgccggtctgggtttgccccaatccatcctgcatttctatgacgtggtcatcagcttcgcccaccgggataacaaatgctggatcgtctcgaccggatggccggagcaggatcgcgtgcgacggagcgaacgagcgcttcgtcgagccgacgagtttgcagcattgcttgccggtccaaacgcgccacagaagggttgtcccagcaaagcgggcgcgtggcgctcgaacttcagccgcgacggctacattgcggcggtacaacgcgtgatcgacttgattctcgcgggtgacgtgttccagacaaatattgcgcagcgtttcagcacccgcctgtcgacctcgtttgatccgctcgccttctattgccagctacgatcattgaatccggcgccttttgcggccctgctgcgatggggaaagctgaccatcgcatcaagttcgccggaacgattcctgaaacttgaggggcgacaagtcgagacacgccccatcaagggcacgatagcgcgttcgcctgatcccaaggaagaccaccgccgtgcggctgctctcctcgcttccgaaaaggatcaggccgagaacacgatgattgtcgaccttttgcgtaacgatctgtcacgcgtttgcactgcgcattcggtcggggttccggccctatgcaatctcgagtcctatgcctcggtgcaccatctcgtgtcgatcgttacggggaaacttgccggagacgaagacgccgttagcctgctccgcgcttgctttcccggcggctccattacgggagcgccaaagccgcggtcgatggaaattattacagaaatcgagcgcatagcgcgagaggtctattgtggggcgatcggcttcatcggcttcaacgggcacatggacaccagtattgcgatccgcactgtcacgatcgacggcgacctggctgtgtttcatgcgggcagcggtataacggccctgtcgaagcccgaggccgaatacgaggaaacgctcaccaaggcagagcgaatctttgatgcatttggtactgaaccagctggtgcattttga

SEQ ID NO: 3632 - protein, 469 aa, Bradyrhizobium japonicum
MTDNPMYVRELQWVEPVTAMRRLGHRSHLTFLDSAARHELLGRYSYLTCDPFSTYRVANGQASWNGLTLEADPWKVLRTLLAKYPQEHRPDLPPFQGGAAGYLAYDMNRTLERLSAPPIAGLGLPQSILHFYDVVISFAHRDNKCWIVSTGWPEQDRVRRSERALRRADEFAALLAGPNAPQKGCPSKAGAWRSNFSRDGYIAAVQRVIDLILAGDVFQTNIAQRFSTRLSTSFDPLAFYCQLRSLNPAPFAALLRWGKLTIASSSPERFLKLEGRQVETRPIKGTIARSPDPKEDHRRAAALLASEKDQAENTMIVDLLRNDLSRVCTAHSVGVPALCNLESYASVHHLVSIVTGKLAGDEDAVSLLRACFPGGSITGAPKPRSMEIITEIERIAREVYCGAIGFIGFNGHMDTSIAIRTVTIDGDLAVFHAGSGITALSKPEAEYEETLTKAERIFDAFGTEPAGAF

SEQ ID NO: 3633 - DNA, 2145 bp, Catharanthus roseus
  CDS (53)..(1879)
ctcattcattcattcagtggctgctcaacacagcacaattctcaatattgcaatgcaatctgtatcatcttcttcttcaatttctactttcaagtctggatcgctatctccggtaatggaaaccctagcatttttctcagaaaccgaacgtttgcccttctcttctccatgttccgtccagttacaaagctatttctttcgccaactcgcctgctgctctcttcacctcctcgtcttatcaagtccgctgctcgataaatgttctgccgtctcgccgccttcatttgtcgaccattcagcgaagttcaaggtggcggcgaagcatgggaacttgattcctttgtacaggcctatattttcagatcacttgacgccagttctagcttaccgttgcttggttaaggaagatgacagagaagctcccagctttctttttgagtccgttgagcctggcttgaaagtctccaacgttgggagatatagtgtgattggagctcaaccaactatggaaatagttgctaaagagaacatggtgactgtgatggatcaccgtcaaggtcgtcgtgtggagcagtatgaggaggatcccatggtagttcctcggagaattatggagaagtggaaaccccagcggaccgaggagctacctgaagctttttgtggtggctgggttggttatttctcatatgatacagtaaggtatgtagagaagaagaagttgccattctcaaatgctcctgtggatgatagagaccttcctgacattcatctaggactttatgatgatgtaattgtatttgaccatgtggagaagaaagcttatgtaatacattgggtgcggctggatcaattttcttctgttgaggaggcttataaagatggaatgaagcgcttggaatctttggtatcgagagtgcatgacatagtccctcctaagttgtccgcggggtcgattaatttacatactagtctttttggccctaaattgaagaattcgaccatgacaagtgaagaatatgagaaagccgtcttgcaggctaaggagcacatcctggctggggacatattccagcttgtcctaagtcagcgttttgaacggcgaacatttgcagatccatttgaagtctaccgagcattgagaattgtcaacccaagtccatatatgacttatttacaagcaagagggtgtattttggttgcttcaagtcctgaaattcttactcgagttaaacagggaacaataacaaatcggcccttagcagggactactcggagggggaaaacaccaaaagaagattatatgttggaacaacagctccttaatgatgaaaaacaatgtgcagaacacattatgcttgtagacttgggaaggaatgatgttggaaaggtatcaaaacctggttctgagaaggtggagaaactgatgaacattgaaccatattcacatgtcatgcacatcagctctacagttactggagagttacttgataacttaactagctgggacgttctacgtgcagcattgcctgttggaactgttagtggagcaccaaaggtcaaagctatggaattgatcgatgaactggaagttacaaggcgtggaccatatagtggtggatttggaggaatttccttttccggtgatatggatgttgcattagcattgagaaccattgtattctccattggaacaagatatgacactatgtactcttacaagacgaggttcaagcgccgagaatggatcgcccatctgcaagctggtgcaggtatagtagccgatagtgatccagctgacgagcagagagaatgtgaaaataaatctgcagctcttgctcgcgctattgatcttgcagagtcatcatttgttgataaatgatcggccaagaaagaagtcgtctccttgccacatcgcgatcgttgtgtgtatcaaaatggtaggagaaaactgtatgatttttgcaaggcagatttcttgatgatttttagcaaaatttggccttggagaagtccctagttagttgtggttagttagtcataataatccatgaatcatccattgtaggtcagtaaatttggtgtaatgttgtttttattggaaaccaataatgccaattgatgagccttaaaaaaaaaaaaaaaaaa

SEQ ID NO: 3634 - protein, 608 aa, Catharanthus roseus
MQSVSSSSSISTFKSGSLSPVMETLAFFSETERLPFSSPCSVQLQSYFFRQLACCSLHLLVLSSPLLDKCSAVSPPSFVDHSAKFKVAAKHGNLIPLYRPIFSDHLTPVLAYRCLVKEDDREAPSFLFESVEPGLKVSNVGRYSVIGAQPTMEIVAKENMVTVMDHRQGRRVEQYEEDPMVVPRRIMEKWKPQRTEELPEAFCGGWVGYFSYDTVRYVEKKKLPFSNAPVDDRDLPDIHLGLYDDVIVFDHVEKKAYVIHWVRLDQFSSVEEAYKDGMKRLESLVSRVHDIVPPKLSAGSINLHTSLFGPKLKNSTMTSEEYEKAVLQAKEHILAGDIFQLVLSQRFERRTFADPFEVYRALRIVNPSPYMTYLQARGCILVASSPEILTRVKQGTITNRPLAGTTRRGKTPKEDYMLEQQLLNDEKQCAEHIMLVDLGRNDVGKVSKPGSEKVEKLMNIEPYSHVMHISSTVTGELLDNLTSWDVLRAALPVGTVSGAPKVKAMELIDELEVTRRGPYSGGFGGISFSGDMDVALALRTIVFSIGTRYDTMYSYKTRFKRREWIAHLQAGAGIVADSDPADEQRECENKSAALARAIDLAESSFVDK

SEQ ID NO: 3635 - DNA, 1551 bp, Pasteurella multocida
  CDS (1)..(1551)
atgtcattcgcttttattcataccttaactcaatcattaccttattacgccgatccaacacatgtttttgcggcactctgtcaggataaaaccaacacgctgttactcgaatctgctgaaattcacagtaaaaatagtttaaaaagcctcttagttatacaacccgcactaaaaattacctgtcatggattacgtgtgaccttctgtgctaaaacacaaaatggcgtcgctgttttgcatgcacttatagagaagttacaatgtcactatgaaatcagtgcagtcacagagagtcaattctcagttatctttccaaaacttgacaaaaaccttgatgaagacaacaaattacatgcttcaacttgttttgatgcgctacgtgccctgctctcactttatcaacatagtgaggtccccgttctgttaggcggtttatttgcttatgatttagtgacccagtttatccctatggataacatccaattacaagaggatgggctcgattgccctgactattgtttctacttagcggaacatcaattgacactcgatcatcaattacaacaagctcagctacacagtttctgttttgcgccacaatatcaaacagcgctacagcaacaagctgatcagataatacaaaaatttgcaaatattgaaccgcacttacattgtgtttcagcggacactacgctgacaacgaaccttgatgatgtacaatttaaacaaattattcaggtattaaaacaacatctttatcaaggtgatgtatttcaaattgtgccttcccgtcgcttttcgttagcctgtccaaatacattggcaagttaccgacagctgaaacacacgaatccgagcccttatatgttctttatgcaagatgaagactttactctctttggcgcctcaccagaaagtgcattgaaatatacacagcaaacccgtcagctcgagatttatccgattgcgggttcacgcccgcgcggtttttatcccaatggtcagattgatccagaattggacgctcgcttagaactggaattacgtttagatcaaaaagaactcgcagaacatttgatgttagtggatttagcccgtaatgatattgcacgggtttgtgaaaccgggacacgccaagtggcggatttaatgcaggtagatcgctattctcacattatgcacttagtttctcgcgtggtgggcaaattacgacctgaattagatgcgttacacgcctatcaagcttgcatgaacatggggacactcactggtgctccaaaaattaaagcaatgcaactgctctatcaagttgaacaacaaaaacgacatagttatggcggtgcggtagggtatctcgcttcgaatggcgatttagacacgtgtattgtgatacgttccgcctttgtgcaacaaggtattgcctacatccaagccggttgtggcgaagtgctcgattcagatccgcaaaaagaagccgatgaaacacgacacaaagcacaagccgtgattaacgcgattgttcaaactcaccaaacacctcgtcaagcataa

SEQ ID NO: 3636 - protein, 516 aa, Pasteurella multocida
MSFAFIHTLTQSLPYYADPTHVFAALCQDKTNTLLLESAEIHSKNSLKSLLVIQPALKITCHGLRVTFCAKTQNGVAVLHALIEKLQCHYEISAVTESQFSVIFPKLDKNLDEDNKLHASTCFDALRALLSLYQHSEVPVLLGGLFAYDLVTQFIPMDNIQLQEDGLDCPDYCFYLAEHQLTLDHQLQQAQLHSFCFAPQYQTALQQQADQIIQKFANIEPHLHCVSADTTLTTNLDDVQFKQIIQVLKQHLYQGDVFQIVPSRRFSLACPNTLASYRQLKHTNPSPYMFFMQDEDFTLFGASPESALKYTQQTRQLEIYPIAGSRPRGFYPNGQIDPELDARLELELRLDQKELAEHLMLVDLARNDIARVCETGTRQVADLMQVDRYSHIMHLVSRVVGKLRPELDALHAYQACMNMGTLTGAPKIKAMQLLYQVEQQKRHSYGGAVGYLASNGDLDTCIVIRSAFVQQGIAYIQAGCGEVLDSDPQKEADETRHKAQAVINAIVQTHQTPRQA

SEQ ID NO: 3637 - DNA, 1416 bp, Streptomyces coelicolor
  CDS (1)..(1416)
atgagcaccggatcccggaacatctgggaggcatgggcgaggtccgtcccaccactcgtgtgcgcgagcacccgcgagccctgccacgacccggccgccaccgccacccgcctcgcacgggcgggcttggcgggccagtacgtggtgtacgagtcggaaggcggggtctggcacttcgctgcgggctccgacgtcagcgtcaccgcggatgccaccggcatcaccgcgcgggccgccgggcgtacctggagctcgcgcacgcagcggcggccgttgacggcgttcgccgacgccctggccgcgttgccgcccgtgtccggcttgcccgacgagagcggcgaggagcgccgcttctacggctgggcggccttcgaactcgcccacctcctgcacgcggaccccgcgacggccggagaccggccgctgctgcacgccctgatcccgtccgtcgaagtgaccctcaccggcgactcgacagtgatccgcgcggtggacgaggcatgggcgcgcaaggtcgccgacctgctcgcggagcccgcggccgagcagaccccccacgacgaaccggcgcgggaccggaccgaggacgtcatcgccgtcggtaccgccgcctacggccgagcggtctcccgcacggtccgggacatccgcgccgggttgctggagaaggccgtcgtctcccggcaggtccccctgcccgccgagccgcgccccgacttccccgcgacctacctcgcgggccgccgggccaacacaccggcacgttcctacgtgctggacctcggcggttaccgggctgccggattcagccccgagaccgttctcgaggtcgaagacgacgggcgggtcagcacccagccgctcgcgggcacgcgcgccctgggcgccgacccggcggagaacgagcgccggcgcgcggaactgctcagcgaccccaaggagatacacgaacacgccgtgtccgtacgtctcgcctgggaggagatggcggccgtgtgccgtcccggctccgtggtggtcgaggagtacatggcggtccgcccacgaggatcggtgcagcacctggcctcacgggtgacgggccggctccggccggacgccggaccctgggacgccttcgcctccctgttccccgcgatcaccgccaccggagtctccaaacgcgccgcgctccaggccctggcccgccacgaggaagggccacgcggcctgtacggcggggcggtcttccggggcagcaccagcggcgccctcgacgccgccctcgtcctgcgcaccctgatcggcgcgggcgacgaggcgtggctgcgagccggcgccggggtcaccgcccagtccagccccgagcgggagaccgaggagacctgcgagaaactccgcagcgtcgccccgtacctgaggttctccctgacctga

SEQ ID NO: 3638 - protein, 471 aa, Streptomyces coelicolor
MSTGSRNIWEAWARSVPPLVCASTREPCHDPAATATRLARAGLAGQYVVYESEGGVWHFAAGSDVSVTADATGITARAAGRTWSSRTQRRPLTAFADALAALPPVSGLPDESGEERRFYGWAAFELAHLLHADPATAGDRPLLHALIPSVEVTLTGDSTVIRAVDEAWARKVADLLAEPAAEQTPHDEPARDRTEDVIAVGTAAYGRAVSRTVRDIRAGLLEKAVVSRQVPLPAEPRPDFPATYLAGRRANTPARSYVLDLGGYRAAGFSPETVLEVEDDGRVSTQPLAGTRALGADPAENERRRAELLSDPKEIHEHAVSVRLAWEEMAAVCRPGSVVVEEYMAVRPRGSVQHLASRVTGRLRPDAGPWDAFASLFPAITATGVSKRAALQALARHEEGPRGLYGGAVFRGSTSGALDAALVLRTLIGAGDEAWLRAGAGVTAQSSPERETEETCEKLRSVAPYLRFSLT

SEQ ID NO: 3639 - DNA, 1350 bp, Xanthomonas albilineans
  CDS (1)..(1350)
atgctgcgtaccgttcccctgccggccgagattgatctgctggccttgcatcgtctggcgccgcagcgctatccggtgttgctggagtcggcggcatcgggcaccgcgcaagggcgctgggatttgctgttggtcgccgacggccaggggctgcgcctggatcgtgatggtgtcacccgcgaactgcagggggtggccgtcgagggcgatttcctgagtgtgctggatgcgcgctggcacgccgcgcgcagcgcgcgcgacgagccgcgctggccgttccgcggtggttgggcgttgctgctggattacgaactggccgcgcaggttgaaccgatactaccgttgccgcagtccgcggcggcgacgcccgcggcgctggccttgcgttgccccgccgcgttgctgcgcgaccatgtcagcggcgattgcgtggcggtggccgagtccgcgcatgcggcgctgttggagaccgtccttgccgatctaggtgccttgcccggtgcggccccggcgcctgtctggaccgcgccgctggcgatcgaggaagacccgccgcaacgctttatcgagggggtgcgccgtattctcgattacctgggggccggtgacgtatttcaggtcaacctgtcgcggcgctggacggcgcgcttcgctgcggcggtggcgccggcggcgctgtacgcgcagttgcgccgtgccaacccggcgccgtttgctggcctgttcgtcggtcatggtcgtgccgtggtgagttcctcgccggagcgtttagtgtcggtgcgcggcgacgtggtcgagactcggccgattgcgggtacccgcgcgcgcgcgccgggcgacgacgctgccgcgcgcatccgcgaactggtcggccatcccaaggaacgtgccgagcacgtgatgctgatcgatctggaacgcaacgacttgggccggatttgcgcgcctgacagtgtcgaagtggacgaactgatgacggtggagagctatgcccatgtgcatcacatcgtcagcaacgtgcgcggccgcctgcgcgatggggtcagcccaggcgaggtgatccgcgccacgtttccgggcggcaccatcaccggctgtcccaaggtgcgttgcatgcagatcatcgccgaactggagcaaaccccacgcggcgcctacaccggcgcgttcggttggctgaactgcgacggcgacatggacctgaacatcctcatccgcaccgccgaggtggaggctgcgcaggtgcagttccgcaccggtgccggcatcgtgttcgattcccagcccgagcgcgaactcgacgagaccctggccaaggcgcgcggcctgctgcgcgctctggaaccctga

SEQ ID NO: 3640 - protein, 449 aa, Xanthomonas albilineans
MLRTVPLPAEIDLLALHRLAPQRYPVLLESAASGTAQGRWDLLLVADGQGLRLDRDGVTRELQGVAVEGDFLSVLDARWHAARSARDEPRWPFRGGWALLLDYELAAQVEPILPLPQSAAATPAALALRCPAALLRDHVSGDCVAVAESAHAALLETVLADLGALPGAAPAPVWTAPLAIEEDPPQRFIEGVRRILDYLGAGDVFQVNLSRRWTARFAAAVAPAALYAQLRRANPAPFAGLFVGHGRAVVSSSPERLVSVRGDVVETRPIAGTRARAPGDDAAARIRELVGHPKERAEHVMLIDLERNDLGRICAPDSVEVDELMTVESYAHVHHIVSNVRGRLRDGVSPGEVIRATFPGGTITGCPKVRCMQIIAELEQTPRGAYTGAFGWLNCDGDMDLNILIRTAEVEAAQVQFRTGAGIVFDSQPERELDETLAKARGLLRALEP

SEQ ID NO: 3641 - DNA, 1071 bp, Thermoplasma acidophilum
  CDS (1)..(1071)
atggtggtgtgcatgaacctgatcgatgagctctcagagtacagagaccgcgggtcattggcttactttgcgtcatttcctgatcgcatttcaggctacgagtacgcctttctcggagacggcatgatcacggatccggagaggatattcgacgggaagctcaggcccttgatcgtcacatacgatttcgtgaacagcgtattcggacaaaaagtccgcagatcggggtggccggagatggtctcgttcgatcctgatacggttatgaagaggaggatcgtgagaagcggctatctcaccagaaaggaggtcggcgatttctcggacccggatctttccaggaaaatagctgaggtcagggatctcataagatccggcgaggtactgcaggccgtcatatcgcgcgacttcgaagcatgcatagatccctgggaaaagctgcgggaattcatagatcacgatcggtcacgttacgttttctactacaggatcggaaaataccaggtcgtcgggagctcccccgagaacctggtcaccgtcagcggaaacgaggtgttcaccgatcccatagcgggtaccgtgccttccacggtcagatcttccgtgcttcttgaaagcatgaaggacgcaaacgagcaccgcatgcttctggatcttgccaggaacgatctcagcaagttcgcggatatcggtacgctcggcgtttccaaggtcatgcagatagaggagttctcctcagtgaagcatctggtgagccaggtgcgggcatcattttcaaacactccgtacctagacatactgaagtcgatgttccccgccggcacggtgtccggatcacccaaggaacgtgcaatagagatcatagagaagtacgaagaaacgccgcggggcccctacggcggatccataggcataaccatggacggcatgatggatcttgcgctgacaataagaagcgcgtattccgatggcagcggattccgggtcagggccggtgcaggcatagttaaggattccgatcctgatgccgaggttcgcgagatatattccaaggcgaggtcggtcatttga

SEQ ID NO: 3642 - protein, 356 aa, Thermoplasma acidophilum
MVVCMNLIDELSEYRDRGSLAYFASFPDRISGYEYAFLGDGMITDPERIFDGKLRPLIVTYDFVNSVFGQKVRRSGWPEMVSFDPDTVMKRRIVRSGYLTRKEVGDFSDPDLSRKIAEVRDLIRSGEVLQAVISRDFEACIDPWEKLREFIDHDRSRYVFYYRIGKYQVVGSSPENLVTVSGNEVFTDPIAGTVPSTVRSSVLLESMKDANEHRMLLDLARNDLSKFADIGTLGVSKVMQIEEFSSVKHLVSQVRASFSNTPYLDILKSMFPAGTVSGSPKERAIEIIEKYEETPRGPYGGSIGITMDGMMDLALTIRSAYSDGSGFRVRAGAGIVKDSDPDAEVREIYSKARSVI

SEQ ID NO: 3643 - DNA, 2986 bp, Buchnera aphidicola
  CDS (1)..(1566)
atgcaaagtattagccataaaattgaaattattcaaagacaagcacaatatcattctgatcctacattgttttcaaatcattttgcggcgtcaagatcagctacactattattagaaacagcagaaattaagaagaaaaacaacttagaaagcattatgattgttgatagtgcaatacgaatatctgctattaaaaattcagttcaaatgactgctttatctattaatggacaagcaatattagctgctttcaaacaaacatatcatcacacattaacgctattggaaaaacaatctagcctctgtttcacttttcctactatgaatcataatgctgatgaagatgaaaaaattcttgcattatcaatattcgattcgtttcgatttattatgaagctattttcgaatacgactaaagtgagtaaagggatgttttttggtggactattttcttatgatcttattgctaactttgaacaattaccggatgtaatacgaacacaaaagtgtcccgatttgtgtttttatttagctgaaactttattagtattagatcatcagaaacaacaatgtttgattcaaagtagtatatttagtcaaaataccaatgaacataagagaatcgaaataagatccaaagacatacaaaagatgttacaacaagagttgtcttacaccccacctaaaatagcacatgttcacactaatgtaacttcaaatatgagtgatgctgaatattcatcaatcattacagaattacaagaattcattcaaaaaggtgatatttttcaagttgtaccttcgcgaaaattttttttatcatgttatcatgcactgtcagcgtatcaggcattaaaaattagcaatcccagtccatatatgttttttatgcaagatcaactattcacgttatttggtgcatcccctgaaagttctttaaagtataatcgcattacaagacaagtggaactctatcctatcgccggaacgaggcctcgaggaaaacgcacagacgggagtatagattacgatttggatagcagaattgaactagaaatgagaaccaatcaaaaagagttatctgaacatttaatgcatgtagatttagctcgaaatgatctggctcgtatttgtgaaccgggttcacgatatgtatcagaattagtcaaagtagataaatattcacatgtgatgcacttggtatctaaagttatcggcacactaaaatctcatttggatgcgcttcatgcatatgcctcctgtatgaatatgggtaccttaaccggagcccctaaagtgcgtgccatggaattgattgcagcatgcgaaaaagaaacacgggggagctacggtggcgctatcggatattttactgatgaaggtaatttagatacgtgtatcaccattcgttcagcttacatcgaaaaagatatggcaacggttcaatctggagcaggtgttgtgttgaactctactgctcaagaagaggtgacagaaagtgtcaataaagctgctgcagtaattaacgctattcaaacagcacatcgtttaacaggatctttttaaaatatggctgatattttacttttagataacattgattcgtttacataccatcttgtagatcaaataagaaaacacgcacataatgtgattatatatcgtaataccgtaaaattgaattattttaacatgcctaatgcaggtaaattgcatcctgttatcatggtatctcctggaccaggtcgacccattcatgcaggatgtatgttacgcttaattaaaatagtaaagggaaaggtgccgatcataggtatttgtttaggtcatcaagcgattgtagaagcgtatggtggcgtgattgactatgctgatgcaatattccatggaaaagtgtcgcgtatctgtcacgatggtctagaaatgtttcacaatattccccaacacttatcagtagcacgatatcattcattggtgtgcaaaaaatgtccttcatactttgttgttaactcttatgttgacaatattatcatgtctatcagacataatactcatcgtgtatgtggttttcaatttcaccccgaatctatcttaacgcctgttggtgatcaattattagaacaagtcatctattgggcggtatcaaaaaatagttcacatcagaacagagtataagattgttttgcgatgatatacatcattctatcccaacacagatggtatcatttgtatatcggttatattcttttctatacattaaaacattacgattagcatacccctattattaagtttcaccccttttttaaacggttgcttcaatacaagttatccacaagttatccacaatagagataatctactaaattagattgtaagatagaaaatcgtgataagatgatatgtcttgtaagatagaaaatcgtgataagatgatatgtcttgtaattaacgatatttattgaaaatatcactaatatcctgatggctgttagtactagtgtttaataaaaagatagcatgtccgaaaaactgtatcaaatcaacaatatctagtactgtttaattaaataacagttgttatatagtgctattttaatatagttcatatgtgctgtttctattataacatcacatgctattgtattgatatgagaatattcaaaacatgtgagtaagaacataaaatacaaaaacattagatatgttttttgttactatatttattattaatatttattaattattattagtattaatatttattaattattattagtattaatatttattaattattattagtattaatatttattaattatttagtattaatttgtatatttatcatatacttaagaacatttgataccttttaaagtataaagtatatctatactaattatgtaataaaactgattgaaatcaaagacgatatgttattgataatgcaatatcatgatgtatgaacagagatgtcaaacgt

SEQ ID NO: 3644 - protein, 521 aa, Buchnera aphidicola
MQSISHKIEIIQRQAQYHSDPTLFSNHFAASRSATLLLETAEIKKKNNLESIMIVDSAIRISAIKNSVQMTALSINGQAILAAFKQTYHHTLTLLEKQSSLCFTFPTMNHNADEDEKILALSIFDSFRFIMKLFSNTTKVSKGMFFGGLFSYDLIANFEQLPDVIRTQKCPDLCFYLAETLLVLDHQKQQCLIQSSIFSQNTNEHKRIEIRSKDIQKMLQQELSYTPPKIAHVHTNVTSNMSDAEYSSIITELQEFIQKGDIFQVVPSRKFFLSCYHALSAYQALKISNPSPYMFFMQDQLFTLFGASPESSLKYNRITRQVELYPIAGTRPRGKRTDGSIDYDLDSRIELEMRTNQKELSEHLMHVDLARNDLARICEPGSRYVSELVKVDKYSHVMHLVSKVIGTLKSHLDALHAYASCMNMGTLTGAPKVRAMELIAACEKETRGSYGGAIGYFTDEGNLDTCITIRSAYIEKDMATVQSGAGVVLNSTAQEEVTESVNKAAAVINAIQTAHRLTGSF

SEQ ID NO: 3645 - DNA, 2630 bp, Buchnera aphidicola
  CDS (1)..(1566)
atgcgaataaaaatagtcgtcataaaattcaagcaaaaacaagtacattatcaccctgatcctacaattatttttaatcatctttgtggatcaagatcagcgacattattgctggaaaccgctgaaattaataagaaaaaaaatttagaaagcatcatgatcatcgacagtgcgatacgatatcccgcgatgaaaaattcagtccaaatcaccgctctttctcttaatggaagagtaatactgtcatttttaaaagatacgcttgaaaaaaaaataaccattctgtcaaatgatacaagtattaatttaatttttcctgttatagaaaaaaatattgatgaagataaaaaaattttatcattgtcaatatttgattgttttagattcattatgaatatgtttaaaaatacaaaaaaaatcagcaaagctatgtttttcggaggcctgttttcctatgatcttattgctaactttgaatctttacctcatgtaaaaagaaaacaaaaatgccctgatttatgcttttatttagcagaaaccttgctggtattagatcatcaaaaacaaacctgtttaattcaacatagtttatttagcaataattgtgatgaatataaaagaatacaaaaaagatcaaagaagatcacaaagaaactgacacaaccattatttaagattccaaaaaaaaacgtacatatggcgacctcattaacgtcaaatatgagcgatcttgaatatgcgtcgattattaaagaattacatttatttattcaaaaaggtgatatttttcaggtagtgccttcccgaaagtttttcttaccgtgctatcattcgttagcagcgtatcaagaattaaaaataagtaatccaagtccgtacatgttttttatgcaggatgaaatatttacattatttggtgcgtctccagaaagttctttaaaatatgatgaaaccaccagacaagcagaactatatcctatagcaggtacgagaccgagaggcaaaaaaaaagacggtactatagattatgatttagatagcagaattgagttagaaatgagaaccaatcaaaaggaactagccgaacacttaatgcttgttgatttagcacgaaacgatcttgctcgcatttgtgaaccgggttcacgatatgtatcagagttagtaaaagttgataaatattcacatgttattcatttagtttctagggtaattgggacattaaaatctgatttagatgctttacatgcttattctgcttgtatgaatatggggactctaactggtgtccctaaagtacgcgctatgcaactcattgcaagatatgaaaaaggaacacgaggcagctatggaggcgctataggatattttactgacacaggccagttagatacctgcataacaattcgatcagcttatgtagagcaaaatatggcaacaattcaagctggtgcaggtattgtattaaattcaatagccgaagaagaaatcaaagaaagcttaaacaaagcaaaggctgtaattaatgctataaaaacagcacattatttaataggatctttttaaacatggcaaatattttactcttagataatgttgactcctttacttataatcttgtggatcaattaagaaaacataaacataatgttttagtctatcgtaatactgttagcattcaaataatttcacagacgcttatgcaattgataaaccctattgtagtattatcgcccggcccaggtttgcctcatgcttcaggatgtatgttagatttgataaaaacagtaaagggtcaagtacctattataggtatttgtttaggacaccaagcgatagttgaggcgtatggtggaacgatcgagtatgcaagtgaaatattccatagcaaggtatctttaattcagcatgacggtttagagatgtttaaagacattccacaacctctttctgtcgcatcgatcgattcattaatttgtaatcaacttccagcgtgttttatcatcaattcctcaattgataatatgattatgtctataagacataatgctgatcgcgtatgtggttttcaatttcatcctgaatctattttaactccttatggtgatcaaatattagaacaaattatctgttggtcattattgaaatatgattcaaatatcaaataattaatatatcaaaatgattacaccaatggtatatatgatattatgaaggagtgattatccacaagttattacaacttaataaatttagtagaaatgctaattaattagcattttttaaaaaatattcaatatttctatttttgatcaaaattaatataaaaatattttttaatatatagatatagagttaataaacattgtaaacaaaaaaaaagattaataaatgtagataaaaaatacattatgcctttagaaataattcactatgattctttttatctggtatactttactaaagtaatatcaatttatttaaattatatattttatagcattgaatattattaattatgtgtctgttttagtatgtataaatgcttccacagtctgtatggctaaatcaagtgaatctattgtttatagaaaagaatgtgatataatttttttaacgaaagagatatt

SEQ ID NO: 3646 - protein, 521 aa, Buchnera aphidicola
MRIKIVVIKFKQKQVHYHPDPTIIFNHLCGSRSATLLLETAEINKKKNLESIMIIDSAIRYPAMKNSVQITALSLNGRVILSFLKDTLEKKITILSNDTSINLIFPVIEKNIDEDKKILSLSIFDCFRFIMNMFKNTKKISKAMFFGGLFSYDLIANFESLPHVKRKQKCPDLCFYLAETLLVLDHQKQTCLIQHSLFSNNCDEYKRIQKRSKKITKKLTQPLFKIPKKNVHMATSLTSNMSDLEYASIIKELHLFIQKGDIFQVVPSRKFFLPCYHSLAAYQELKISNPSPYMFFMQDEIFTLFGASPESSLKYDETTRQAELYPIAGTRPRGKKKDGTIDYDLDSRIELEMRTNQKELAEHLMLVDLARNDLARICEPGSRYVSELVKVDKYSHVIHLVSRVIGTLKSDLDALHAYSACMNMGTLTGVPKVRAMQLIARYEKGTRGSYGGAIGYFTDTGQLDTCITIRSAYVEQNMATIQAGAGIVLNSIAEEEIKESLNKAKAVINAIKTAHYLIGSF

SEQ ID NO: 3647 - DNA, 2591 bp, Buchnera aphidicola
  CDS (1)..(1560)
atgcaaaacgaccgtcatgaagttgatatttatcaaaaaaaagtgtgttatcattccgatcctacaataatttttcatcatctttgtggatcgagatcagcaacgttattactggaaacagcggaaattaacaaaaaacacaatttagaaagtatcatgatcattgacagtgcaatacgcatatctgcacaaaaaaattcagtacaaataactgccttatccctgaacggggcagcaatattagctgccttaaaacatagactgcacaaaaaagttacaatgtttgaagatagtaataaaaaaattcatttaatttttcccttgttaaacaaaaatatcgatgaagataaaaaaattcttgcattatccatctttgattgttttagattcattatcaatgcatttaaaaatacagaaaaaatcagcaaaggcatgtttttcggcggtcttttttcttatgatcttattgaaaattttgaagttttacctcttttgcaacgaaaacaacagtgccccgatttgtgtttttatttgtcagaaactttattagtttgggatcatcaaactcaaacatgtttaattcaaaacagtttatttactagggacagcaatgaacgagacagagtgaaagagagatcaaaaacgatacaacacaaattaacacaacaattgcacagcatcccccaacatcaagcacatacacaagaagcactcttgacatcaaatatgaccgatgctcaatatttatcaatgattaaacaattacaaatatttattcaaaaaggtgatatttttcaagtcgttccttctcgaaaattttttttaccgtgtcggtatgcgttgtcggcatatcaggaattaaaaaaaagtaatcccagcccttatatgttttttatgcaagatcaagcatttatattatttggccgttcgcccgaaagttctttaaaatatgatgaaaaaaacagacaaatagaactgtatcctatagcaggtacaagatctcgagggaaaaacaaaaacgggagtataaattatgatttagacagtagaattgaactagaaatgagaactaatcaaaaagaattatctgaacatttgatgcttgtagatttagcacgtaacgatcttgcccgtatttgtgaacccgggtcacgatatgtttcagagttgttaaaagtggacaaatactcacatgttatgcatttggtttcgaaagtgattggtacgttaaaatctaacttagacgtgttacacgcctatgctgcttgtatgaacatgggaactttaacgggcgcacctaaggtacgtgcgatgcaattaattgcaaaatatgaaaaagaaacaagaggcagttacggcggagctataggttatttgaccgatgcaggtaatttagacacttgcataacaattcgttctgcttatgtagaacaaaatattgcaactgtgcaagccggagcgggggtggtattaaactcaattgctaaagaagaagttcaagaaagtatcaataaagctacagccgtaattaatgctatcaaaacagcacattacatttgatgaggctcgtaaaacatggcgaatattttacttttagataatgttgattcgtttacttataatcttgtggatcaattaagaacacacaacaacactgttgtggtgtatcgtaatactgttgatatcaaaattatattacaaactttagctcaatggagcaatcctatcttagtgttgtcacctggaccggggaccccttacactgcaggatgtatgttaaatcttatcaaaagcgttaaggggaatatccctattataggaatttgtttagggcatcaagcgataatcgaagcctatggcggttcaattaagtatacagatgagatatttcatggaaaggtatctttaatcaatcacgatggtttagagatgtttaaaggcatcccccagcctttatcagtcgctcgataccactccttggtttgtgatgaaatcccttcatgttttaccgtgaattcttctatacataaaatgatcatgtctataagacataatgttgaatatgtatgcgggcttcaatttcaccccgaatctattttgacccctcatggtgaccagatattaaaacaaatcattgattgggcatcattaaaatatatctaacgatcaacatcatcgttatagaactgcgcatgttatatgataaatcttttttttttattagtttgtaatttattttgagttcatatctttttcaaaaaaagtcaatccaagttattccaggtttatcaatcaacctaatcaattattttacttatccacaggttatccacaggttatccacaagataaaataggataacctatgttattaaagttaaatatataccggttatacaaatttatataatggttattaaaaaaataaaaaaaataaaaaatactattattatattgttatttctctcttatttcagtacactaattgataattaaaattatattaaatgtttacatattttaatgctatagtatttaaaaaataacacttagacatataaaaaatcaatgaaattaatagagatgtagaaa

SEQ ID NO: 3648 - protein, 519 aa, Buchnera aphidicola
MQNDRHEVDIYQKKVCYHSDPTIIFHHLCGSRSATLLLETAEINKKHNLESIMIIDSAIRISAQKNSVQITALSLNGAAILAALKHRLHKKVTMFEDSNKKIHLIFPLLNKNIDEDKKILALSIFDCFRFIINAFKNTEKISKGMFFGGLFSYDLIENFEVLPLLQRKQQCPDLCFYLSETLLVWDHQTQTCLIQNSLFTRDSNERDRVKERSKTIQHKLTQQLHSIPQHQAHTQEALLTSNMTDAQYLSMIKQLQIFIQKGDIFQVVPSRKFFLPCRYALSAYQELKKSNPSPYMFFMQDQAFILFGRSPESSLKYDEKNRQIELYPIAGTRSRGKNKNGSINYDLDSRIELEMRTNQKELSEHLMLVDLARNDLARICEPGSRYVSELLKVDKYSHVMHLVSKVIGTLKSNLDVLHAYAACMNMGTLTGAPKVRAMQLIAKYEKETRGSYGGAIGYLTDAGNLDTCITIRSAYVEQNIATVQAGAGVVLNSIAKEEVQESINKATAVINAIKTAHYI

SEQ ID NO: 3649 - DNA, 1706 bp, Bordetella bronchiseptica
  CDS (75)..(1595)
cggaacccgtaactggaccgggctttttgctgcatgcccggtccgtaccagaaaaacgccgtacgagacccgacatgactgaacttgaattcaaagcgctggccgcccaaggctacaaccgcattcccctggtcgcggaaacctacgccgacctcgacacgccgctggcgatctacctcaagctggcccacagcggcccgcaaggcggccgcatgagctgcctgatggagtcggtggtgggcggcgagcgctttggccgctactcgttcatcggcctgccggcgcgcaccgtcatccgcgccagcggctcgaccaccgaagtgctgcaggacggccacgtcgccgaaacccacgaaggcgacccgctggcgttcatcgagtcgtaccaggcccgcttcaaggtggcgctgcgccccggcatgccgcgcttttgcggcggcctggccgggtacttcggttacgacaccgtgcgccacatcgaacagcgcctgggcccggcggtcaagccgtttcccgacggcatggaagaaggcacgcccgacatcatgctgctgcacgtcgacgaactggtcatcgtcgacaacctggccggccgcacctacctgatggtgtatgccgacccggcccagcccgaagcctacagccgcgcccagcagcgcctgctggagttgcgcgcgcggctgcgccgcccggtcgagatcccgtacagccacgccagcatgcagaccgaagagcggcgcgacttccagaaggccgactacctggccgcggtggcgcgcgccaaggaatacatcgccgccggcgacgtcatgcaggtgcaggtcggccaggtcatcgccaagccgtttcgcgacgcgccgctgtcgctgtaccgcgcgctgcgttcgctgaacccctcgccctatatgtatttctggaacttcggcgatttccaggtggtcggcgcctcgccggaaatcctggtgcgccaggagcagatcgacgaccagggcgaaacccgctcgcagatcaccatccggccgctggccggcacccgcaagcgcgghggcacgccggaagaagacctggcgctggccgccgaactgcaggccgaccccaaggagcgcgccgaacacgtgatgctgatcgacctggcgcgcaacgacgtgggccgggtggcggaaatcggctcggtgcgcgtcagcgacaccatggtcatcgagcgctactcgcatgtcatgcacctggtctccaacgtggcgggcaagctgctgcccggcatgagcagcatggatgtgctgcgcgccgccttcccggccggcacgctgaccggcgcccccaaggtacgggccatggaaatcatcgacgaactcgaaccggtgcgccgcggcatctacggcggcgccgccggctacctgagctacggcggcgaaatggacgtggccatcgcgatccgcaccggggtgatcaagaacggcacgctgtacgtgcaggccgccgcgggtatcgtggccgactccagccccgaagccgaatgggccgagaccgaggccaaggcgcgcgccgtgctgcgcgcggccgagcaggtccagcacggcctggacgaacccatctgagcccccccattgcgcagacctacgccgggccgcgcgcccggccggagaaccgaacatgctattgatgatcgacaactacgattccttcacctacaacctggtgcaatattt

SEQ ID NO: 3650 - protein, 506 aa, Bordetella bronchiseptica
MTELEFKALAAQGYNRIPLVAETYADLDTPLAIYLKLAHSGPQGGRMSCLMESVVGGERFGRYSFIGLPARTVIRASGSTTEVLQDGHVAETHEGDPLAFIESYQARFKVALRPGMPRFCGGLAGYFGYDTVRHIEQRLGPAVKPFPDGMEEGTPDIMLLHVDELVIVDNLAGRTYLMVYADPAQPEAYSRAQQRLLELRARLRRPVEIPYSHASMQTEERRDFQKADYLAAVARAKEYIAAGDVMQVQVGQVIAKPFRDAPLSLYRALRSLNPSPYMYFWNFGDFQVVGASPEILVRQEQIDDQGETRSQITIRPLAGTRKRGGTPEEDLALAAELQADPKERAEHVMLIDLARNDVGRVAEIGSVRVSDTMVIERYSHVMHLVSNVAGKLLPGMSSMDVLRAAFPAGTLTGAPKVRAMEIIDELEPVRRGIYGGAAGYLSYGGEMDVAIAIRTGVIKNGTLYVQAAAGIVADSSPEAEWAETEAKARAVLRAAEQVQHGLDEPI

SEQ ID NO: 3651 - DNA, 2027 bp, Buchnera aphidicola
  CDS (1)..(1587)
atgaaaaatagccgtcataaaattgaaattattcaaaaaaaagcgcattatcatcccgatcccacaatgatttttaatcatatttgtggattaaaatcagcaacactattattagaaacagcagaaatcaataagaaacgaaacttaggaagtattatgattattgacagtgcaatacgcatatccgcgataaaaaattcagttcagataactgctttttctttaaatgggatggcaatattgacggctttaaaaaacatgttacataataaaattaataaaattcaaatatttgaaaataaacaaaatatttatttaattttccctagtatagataaaaatattgacgaggatcaaaaaattttatcaatatcaatatttgattgttttagattcattatgaaaatgttcacgaacccccataaaatcagcaaagcaatcttttttggaggactattttcttatgatcttattgctaattttgaattcttatctcatttagtccgcaaacaaaaatgtcctgatatatgtttttatttagctgaaactttattagttttagatcatcaaaaacaaacatgtttaattcaaaatagcttgtttagtcataatatgaatgagaaatatagaattcaaaaacgatcagcagaaatagaaaagaaacttaaacaaccattatcgggaatattaactaataatgcacatgttaaagtatgtgaaacagcgtcattgacttcaaatataagcgatgttgaatatttatctattattaaaaaattacaaatatttattcaaaaaggtgatatctttcaagtcgtcccctctcgaaaattttttttaccgtgttatcatgcgttatcagcatatcaggaattaaaaaaaagcaatcctagcccctacatgttttttatgcaagatgaaatctttacattatttggagcttctcccgaaagttctttaaaatataatcatcaaaataggcaaatagaactctatccgatagcaggtaccaggcctagaggaaaaacaaaaaatggtaatatagactatgatttagacagcaaaatcgagctagaaatgagaactaatcaaaaagaattatctgagcatttaatgcttgtggatttggcacgcaacgatcttgctcgtatttgtgaaccggggtcgcgatatgttgcagagttactaaaagtcgacaaatactctcatgttatgcatttagtctcgcgcgtcattggtacgctcaaatctcacttagatgccttacacgcatattcttcttgtatgaatatgggaactttaaccggtgctccgaaggtgcgtgcgatgcaattaattgctgaatatgaaaaagaaacacggggcagctacggcggcgctataggttattttactgattctggagatttagatacctgtatcacaattcgttcagcttatatagaacaaaatattgcgactgttcaagccggggcgggtattgttttgcactcaatagcggaagaagaaatacaagaaagcttgaataaagcaactgcggtgattaatgctatcaaaacagcgcattatgtaacaggatctttttaaacatggctaatattttacttttagataatattgactcatttacttataatcttgtagatcagttaagaaacacgcaaattcatgttgtcgtttatcgcaatattgtagatattaaaattattttacatgcacttatgcaattaaaaaatccaattttaatattatcacctggccctggtttaccccgcgatgctggttgtatgcctgatttaattgaaacagttaaaggtcaagtgccgataataggtatttgtttaggccatcaagcgatcgtagaagcttatggcggtcagattggatacgcaagtgaaatattccatggacaagtgtctttaatcaatcacgacggtttggagatgtttcaaaatctccctccattgttaccagtagctcgatatcattcgttaatttgcaatcgtatccccaaagattttatcgtt

SEQ ID NO: 3652 - protein, 528 aa, Buchnera aphidicola
MKNSRHKIEIIQKKAHYHPDPTMIFNHICGLKSATLLLETAEINKKRNLGSIMIIDSAIRISAIKNSVQITAFSLNGMAILTALKNMLHNKINKIQIFENKQNIYLIFPSIDKNIDEDQKILSISIFDCFRFIMKMFTNPHKISKAIFFGGLFSYDLIANFEFLSHLVRKQKCPDICFYLAETLLVLDHQKQTCLIQNSLFSHNMNEKYRIQKRSAEIEKKLKQPLSGILTNNAHVKVCETASLTSNISDVEYLSIIKKLQIFIQKGDIFQVVPSRKFFLPCYHALSAYQELKKSNPSPYMFFMQDEIFTLFGASPESSLKYNHQNRQIELYPIAGTRPRGKTKNGNIDYDLDSKIELEMRTNQKELSEHLMLVDLARNDLARICEPGSRYVAELLKVDKYSHVMHLVSRVIGTLKSHLDALHAYSSCMNMGTLTGAPKVRAMQLIAEYEKETRGSYGGAIGYFTDSGDLDTCITIRSAYIEQNIATVQAGAGIVLHSIAEEEIQESLNKATAVINAIKTAHYVTGSF

SEQ ID NO: 3653 - DNA, 1569 bp, Buchnera aphidicola
  CDS (1)..(1569)
atgaataaacgtcttaaaagaatggatgttttaaaagttgaagctttataccaatctaatccaacaattgtttttcatcaaatctgccgaaataaaagtaatacattactcttagaatctgctgaaattaataaaagagatagtttagaaagtatgatgattatagattctgctttacgtatctcagcattaaatcaaatagttgtattagaagcattaacaaaaaatggagaaagtctattaccaatttttatatctttgctgccaaaatcagtaaaaatattggttaataaaaatttattaaaaattgaatttcctttaatttctatgaacttagatgaggataaaaaattacatgtattatctatatttgattcaatacgattcttaataaatagtactaaaaacaacaaagtgtctaaatctatgttttttggtggattgttttcatatgatttaattactaattttgaaaatcttccaaaattaaaaactactcaatcttgtcctgacttttgtttttacttggctgaaactttattagtattagatcataaaaaaaaaacttgttatatacaagctagcttattttcttcagacatatttgaaaaaaatagactacagtctagactgttaatgataaaaaaacaattatctagttctttttatccattacaacctatttttttaaaaaaaatggtattaacttgcaataagacagataaagtatatattaaaattattgaagaaatgcaaaaattaatattaattggagaaatttttcaggtagttccatcgagacgattttatttgccatgtattgattctttggcagcgtatgatgttttaaaaaaaaataatcctagcccgtatatgttttttatgcaagattctcatttcactttgtttggtgcttctccagtaagtgctttaaaatatgatgtatcgtctagacaaattgaaatttatcctattgctggaactaggccaagggaaagaaaaataaatggatcgttagatttagatttagatagtagaatagaacttgaaatgagaacaaatcataaagaattagctgaacatttaatgttagtagatttagcaagaaacgatttagcaagaatttgtgatcctggtactcgttatgtagctaatttaacacaagtagatcggtattctcacgttatgcacttagtttctcgagttgtcggaaaattaaaatctaatttagatgtatttcatgcatatcaagcatgtatgaatatgggaacgttaagtggtgccccgaaaattcgagcaatggaattaatttcatatgtagaaaaggaaaaaagaggtagttatggaggatcaataggatattttactgcttcaggagcattagatacttgcattgttattcgatctgcgtatgttgaaaataatatagctattgttcaagcaggagctggaatagttgtagattctattccgcaatcagaagcagatgaaagcaaaaataaagctaaagctgtactacaagctatttctgaatcacattcctgtcatatagagtatcataatgaatga

SEQ ID NO: 3654 - protein, 522 aa, Buchnera aphidicola
MNKRLKRMDVLKVEALYQSNPTIVFHQICRNKSNTLLLESAEINKRDSLESMMIIDSALRISALNQIVVLEALTKNGESLLPIFISLLPKSVKILVNKNLLKIEFPLISMNLDEDKKLHVLSIFDSIRFLINSTKNNKVSKSMFFGGLFSYDLITNFENLPKLKTTQSCPDFCFYLAETLLVLDHKKKTCYIQASLFSSDIFEKNRLQSRLLMIKKQLSSSFYPLQPIFLKKMVLTCNKTDKVYIKIIEEMQKLILIGEIFQVVPSRRFYLPCIDSLAAYDVLKKNNPSPYMFFMQDSHFTLFGASPVSALKYDVSSRQIEIYPIAGTRPRERKINGSLDLDLDSRIELEMRTNHKELAEHLMLVDLARNDLARICDPGTRYVANLTQVDRYSHVMHLVSRVVGKLKSNLDVFHAYQACMNMGTLSGAPKIRAMELISYVEKEKRGSYGGSIGYFTASGALDTCIVIRSAYVENNIAIVQAGAGIVVDSIPQSEADESKNKAKAVLQAISESHSCHIEYHNE

SEQ ID NO: 3655 - DNA, 2124 bp, Oryza sativa
  CDS (19)..(1839)
ggcttaaagcctatcgcaatggagtccatcgccgccgccacgttcacgccctcgcgcctcgccgcccgccccgccactccggcggcggcggcggccccggttagagcgagggcggcggtagcggcaggagggaggaggaggacgagtaggcgcggcggcgtgaggtgctccgcggggaagccagaggcaagcgcggtgatcaacgggagcgcggcggcgcgggcggcggaggaggacaggaggcgcttcttcgaggcggcggagcgtgggagcgggaagggcaacctggtgcccatgtgggagtgcatcgtctccgaccacctcacccccgtgctcgcctaccgctgcctcgtccccgaggacaacatggagacgcccagcttcctcttcgagtccgtcgagcaggggcccgagggcaccaccaacgtcggtcgctatagcatggtgggagcccacccagtgatggaggtcgtggcaaaggagcacaaggtcacaatcatggaccacgagaagggcaaggtgacggagcaggtcgtggatgatcctatgcagatccccaggagcatgatggaaggatggcacccgcagcagatcgatcagctccccgattccttcaccggtggatgggtcgggttcttttcctatgatacagtccgttatgttgaaaagaagaagctgcccttctccggtgctccccaggacgataggaaccttcctgatgttcaccttgggctttatgatgatgttctcgtcttcgacaatgtcgagaagaaagtatatgtcatccattgggtaaatcttgatcggcatgcaaccaccgaggatgcattccaagatggcaagtcccggctgaacctgttgctatctaaagtgcacaattcaaatgtacccaagctttctccaggatttgtaaagttacacactcggcagtttggtacacctttgaacaaatcaaccatgacaagtgatgagtacaagaatgctgttatgcaggctaaggagcatattatggctggtgatattttccagattgttttaagccagaggtttgagaggcgaacatacgccaatccatttgaagtctatcgagctttacgaattgtgaacccaagtccatacatggcatatgtacaggcaagaggctgtgtcctggtagcatctagtccagaaattcttactcgtgtgaggaagggtaaaattattaaccgtccacttgctgggactgttcgaaggggcaagacagagaaggaagatgaaatgcaagagcaacagctactaagtgatgaaaaacagtgtgctgaacatattatgcttgtagatttgggaaggaatgatgttggaaaggtctccaaacctggatctgtgaaggtggagaaattaatgaacattgaacgctactcccatgtcatgcacatcagttccacggtgagtggagagttggatgatcatctccaaagttgggatgccctgcgagccgcgttgcctgttggaacagttagtggagcaccaaaggtgaaagccatggagctgatagacgagctagaggtcacaagacgaggaccatacagtggcggccttggagggatatcatttgacggagacatgcttatcgctcttgcactccgcaccattgtgttctcaacagcgccaagccacaacacgatgtactcatacaaagacaccgagaggcgccgggagtgggtcgctcaccttcaggctggtgctggcattgtcgctgatagcagcccagacgacgagcaacgtgaatgcgagaacaaggcagccgctctggctcgagccatcgatcttgctgaatcagctttcgtagacaaggaatagagtctctctcaagagagttgattttgttagttcttgttcatggttcttctcgctgcatgtttagcaggaaaggtatcatcagtgagttgagagaagcaataagcctatgttgtcatgtgaatcgaataaactggaggttatggtcgtgagctattattagctgtgttcattagaaaggtatatgcttttagattgttttgtttggtggaggcatgtatagtgcgctctctggctaaatcaagcaagggcttaacaggggtattgtcaaaaaaaaaaagcggccgc

SEQ ID NO: 3656 - protein, 606 aa, Oryza sativa
MESIAAATFTPSRLAARPATPAAAAAPVRARAAVAAGGRRRTSRRGGVRCSAGKPEASAVINGSAAARAAEEDRRRFFEAAERGSGKGNLVPMWECIVSDHLTPVLAYRCLVPEDNMETPSFLFESVEQGPEGTTNVGRYSMVGAHPVMEVVAKEHKVTIMDHEKGKVTEQVVDDPMQIPRSMMEGWHPQQIDQLPDSFTGGWVGFFSYDTVRYVEKKKLPFSGAPQDDRNLPDVHLGLYDDVLVFDNVEKKVYVIHWVNLDRHATTEDAFQDGKSRLNLLLSKVHNSNVPKLSPGFVKLHTRQFGTPLNKSTMTSDEYKNAVMQAKEHIMAGDIFQIVLSQRFERRTYANPFEVYRALRIVNPSPYMAYVQARGCVLVASSPEILTRVRKGKIINRPLAGTVRRGKTEKEDEMQEQQLLSDEKQCAEHIMLVDLGRNDVGKVSKPGSVKVEKLMNIERYSHVMHISSTVSGELDDHLQSWDALRAALPVGTVSGAPKVKAMELIDELEVTRRGPYSGGLGGISFDGDMLIALALRTIVFSTAPSHNTMYSYKDTERRREWVAHLQAGAGIVADSSPDDEQRECENKAAALARAIDLAESAFVDKE

SEQ ID NO: 3657 - DNA, 1734 bp, Oryza sativa
  CDS (1)..(1734)
atggccagcctcgtgctctccctgcgcatcgcccgttccacgccgccgctggggctgggcggggggcgattccgcggccgacgaggggccgtcgcctgccgcgccgccacgttccagcagctcgacgccgtcgcggtgagggaggaggagtccaagttcaaggcgggggcggcggagggttgcaacatcctgccgctcaagcgatgcatcttctccgaccacctcacgccggtgctcgcgtaccgctgcctcgtcagggaggacgaccgcgaggcgcccagcttcctgtttgagtccgtcgagcagggatccgagggcaccaatgtggggaggtacagtgtggttggggcacagcctgcgatggagatcgtagccaaggccaaccatgtgactgtcatggatcataagatgaagtctaggagggagcaatttgcgcctgacccgatgaagataccaaggagcattatggaacagtggaacccacagattgttgaaggcctccctcatgcattttgtggaggatgggttggattcttctcttacgacacagtgcgttatgttgaaacaaagaagcttccattttctaacgcgccagaggatgataggaaccttcctgacatccatttaggcctctacaatgacatagttgtgtttgatcatgttgaaaagaaaacacatgttatacattgggtgagggtagattgccatgagtcagttgacgaagcgtatgaggacgggaagaatcagctggaagctttgttatcaagattacatagtgttaatgtgccaactcttactgctggttctgtaaaacttaacgttgggcaatttgggtcagcactacagaaatcatcaatgtcaagggaggactataagaaagctgttgttcaagcaaaagagcacattctagctggtgacatttttcaagtagtcttaagccagcgttttgagaggcgtacatttgctgacccctttgaggtgtaccgtgcattgcgtattgtcaatcctagtccttatatggcctatctacaggctcgtggttgtattctggtagcatcaagtcctgaaattcttacccgggtggaaaagaggacaattgtcaacaggccacttgctggaacaattagaagaggaaaatcgaaagcagaagacaaagttttagaacaactgctgttgagtgatggaaagcagtgtgctgagcatattatgttagtagatcttggacggaatgatgttggaaaggtgtccaaaccaggttcagtaaaggtggagaaactgatgaacgttgaacgatattcacatgtcatgcacattagctcaacagttactggagagttgcgtgatgatctgacttgttgggatgctcttcgagcagcattgcccgttggaacagttagtggtgcaccaaaggtgagagcgatggagctgattgaccagatggaagggaagatgcgtgggccgtacagtggtggctttggaggggtttctttccgtggagacatggacatcgcacttgctctccgtaccatcgtcttccccacgggatctcgcttcgacaccatgtactcctacactgacaagaatgctcgtcaggagtgggtggctcaccttcaggctggagctgggatcgtcgctgacagcaagcctgacgatgagcatcaggagtgcttgaacaaggctgctggccttgctcgtgccatcgatcttgccgagtctacattcgtagatgagtag

SEQ ID NO: 3658 - protein, 577 aa, Oryza sativa
MASLVLSLRIARSTPPLGLGGGRFRGRRGAVACRAATFQQLDAVAVREEESKFKAGAAEGCNILPLKRCIFSDHLTPVLAYRCLVREDDREAPSFLFESVEQGSEGTNVGRYSVVGAQPAMEIVAKANHVTVMDHKMKSRREQFAPDPMKIPRSIMEQWNPQIVEGLPHAFCGGWVGFFSYDTVRYVETKKLPFSNAPEDDRNLPDIHLGLYNDIVVFDHVEKKTHVIHWVRVDCHESVDEAYEDGKNQLEALLSRLHSVNVPTLTAGSVKLNVGQFGSALQKSSMSREDYKKAVVQAKEHILAGDIFQVVLSQRFERRTFADPFEVYRALRIVNPSPYMAYLQARGCILVASSPEILTRVEKRTIVNRPLAGTIRRGKSKAEDKVLEQLLLSDGKQCAEHIMLVDLGRNDVGKVSKPGSVKVEKLMNVERYSHVMHISSTVTGELRDDLTCWDALRAALPVGTVSGAPKVRAMELIDQMEGKMRGPYSGGFGGVSFRGDMDIALALRTIVFPTGSRFDTMYSYTDKNARQEWVAHLQAGAGIVADSKPDDEHQECLNKAAGLARAIDLAESTFVDE

SEQ ID NO: 3659 - DNA, 1888 bp, Lactococcus lactis
  CDS (147)..(1559)
agatctcttatagaatagcaatgaaatcttgggcgtatacgtaatatactgaatatatcaatcgtattgagcatggtatatcactgtgcaaagacatacggactgactgaacagtagcgtggcataagtcgatcgaaaggaattagatgttcacaatcagtggagtagtattgataacaagaccagtatacgatgaaggaagtttgaattactgtcagagtggagcaatgaacaacggaatcttgttggaaagtgtagaaggaaacaagcctcgatacagtatcggaggagcagaacctatcggaactatcaacgcaaacgcagtattgactgcagcaacttacgcagaagatgtaaagttcactgatgcagatcctttgaacggaactagagtagcaatctgtaacggagaagatactcaacaagaagaaatgggattccaaggaggagcattgggatacttcgcatacgatgtaggaagaagattggaaggatacaacgatttgggaatcgaagattgggcaatcccagatttggcaggaagtagttacgaaatcggagtaagtgcagatcatcaaaacgatgtaatcgtattgatcgcacatgcaagtgcagatggaaacgatgtattcatcacaagtagtagacaattgagtatggtagcaggaccaacatgttgtgcaagtggagatgtagaaatcttgagaaacaagttgcattactacggagtaatcccattcagtcaagatgattgtggattcaacagattgaaggattacttgggaagtggagatatgtaccaagtaaacttgggaaacagaaacgtaggagcaatcgtaatgacattgttccaaggatacaaccaattgagattgatgaacccgggaccatacatggtattcttggatgaagcaaacatcatcatggcaagtccagaaatcgtattggcagatgaagcaaacgatttgaacacaagaccaatcgcaggaacattgatgagattgaacgagcaagatgaagatggagtaaacgcagcatgtctgggacaacatcataaggatagagcagaacatatgatgatcgtagatttggtaagaaacgatttgggaagagtgggaagattcggaagtgtaaacgtacaagaaatcgtaggagctgaaaactacagtgtagtaatgcatatcgtaagtagagtaacaggatccttgaacgaagcattcgaagcaatggaaatcatcagagcaggattcccaggaggaagtatcacaggagcaccaaaggtaagagcaatggaaatcatcgaagaattggaaccacaaagacgagatggatggggaggaagtatcggatacatcgcatacagaggaaacatcggttacagaatcgcaatcagaacattgttcgcttgtaacggacaattgttcgcaagtagtggagcaggattggtaggagatagtatggaagacggagaatacaacgaaacattcgaaaagatgagagcattgagaagtttcttctgtgcagcggtacatatgggaaagacaccatacttgagttaattacgatccgtaatatgtacttataagcgttgcaatatgcgtaagtagtacttaattacgtaatgttttatttcaatagtaatagatcatgactagaatatcgaatgtaatagatctgatgtaattaaattcagtataatcgtatcatgacaaaatgcatgaatcgttatcggtaactataatgctcagtgatatgtgaatcgtatccgtgcctagcgatttaactaaagctagcatgataaatagaatagataactgatacaaatactagtcatacattgactatagtacgccggtacgtatagattcgtaatccgtacgtaggatcc

SEQ ID NO: 3660 - protein, 470 aa, Lactococcus lactis
MFTISGVVLITRPVYDEGSLNYCQSGAMNNGILLESVEGNKPRYSIGGAEPIGTINANAVLTAATYAEDVKFTDADPLNGTRVAICNGEDTQQEEMGFQGGALGYFAYDVGRRLEGYNDLGIEDWAIPDLAGSSYEIGVSADHQNDVIVLIAHASADGNDVFITSSRQLSMVAGPTCCASGDVEILRNKLHYYGVIPFSQDDCGFNRLKDYLGSGDMYQVNLGNRNVGAIVMTLFQGYNQLRLMNPGPYMVFLDEANIIMASPEIVLADEANDLNTRPIAGTLMRLNEQDEDGVNAACLGQHHKDRAEHMMIVDLVRNDLGRVGRFGSVNVQEIVGAENYSVVMHIVSRVTGSLNEAFEAMEIIRAGFPGGSITGAPKVRAMEIIEELEPQRRDGWGGSIGYIAYRGNIGYRIAIRTLFACNGQLFASSGAGLVGDSMEDGEYNETFEKMRALRSFFCAAVHMGKTPYLS

SEQ ID NO: 3661 - DNA, 1317 bp, Aeropyrum pernix
  CDS (1)..(1317)
atgccttcacccccagagcctcccctccactggagggactgtaggctagagcctatcctaggatttcctaggcctagggagctagccaagtcacttgaagtccagggggaggagtggatagcactccttgagagtgggggaggcctacagcataggagcaggtactctttcctagcgtggggcaggagaaagtcgagtgaaacagacgctatcagggcgtatgaggaactcgagcgcttagcggacgataagtgcagggcgctgccttgccgcagccccacgttctttctggtatcctatgaggctgttgtcggtgaggagccgtggctatcgcggctggttggtaggcatgagtggccaggtatgacagccttctcccctgaatatgttgtagtctacgatcacgcagggggaagggtgtcggtttgcccaggtgacaccccccttccggcgccggcgagtaggaaagagagtttctcggcggaaggccctacctatgagacctccaggaaagggttcgaagctatggtcgctgacgcgttggagaggatcagggctggagaggctttccaggtagtgttatccagggttgagaggtatagggtctgggggagcctgtttagcgcgtatgagaggctcgccgatgccaaccctagtccctacctatactacgctaggctgggcggcagggttatcatagggagtagcccggagctcctggtcaagctggaggcgggcagagttgagactcacccgatagctggtaccaggcctcgcggctcaacgcccattgaggacatcgagttagaagtagagttgttgaacgacgagaaggagagggcagagcatgtgatgcttgttgacctggctaggaacgatataacccgtgtatcgatccctggaaccgtacaggtaacaagcttcatggatatcgagagatacgagactgtaatgcatatagtaagcagggttgaaggagtgacaaggcccagcaccacattcgtcgaagcccttaaagccctccaccctgcaggcacggttagcggagcgccaaagcctagggccatggaaattatagccgaactagaggaagaggccaggggcccctacgcaggagccataggagtagcgggttctagcgcgggcgaggcggccatagtgctgaggagcgcctggctcctagatgacggggagaccttggaagctagagctggcgccgggatagtctatgatagcaagcccgagagagagtacatggagactgtccagaaactcggaagcctaaagagggctctgggggtggatatgtgtggctga

SEQ ID NO: 3662 - protein, 438 aa, Aeropyrum pernix
MPSPPEPPLHWRDCRLEPILGFPRPRELAKSLEVQGEEWIALLESGGGLQHRSRYSFLAWGRRKSSETDAIRAYEELERLADDKCRALPCRSPTFFLVSYEAVVGEEPWLSRLVGRHEWPGMTAFSPEYVVVYDHAGGRVSVCPGDTPLPAPASRKESFSAEGPTYETSRKGFEAMVADALERIRAGEAFQVVLSRVERYRVWGSLFSAYERLADANPSPYLYYARLGGRVIIGSSPELLVKLEAGRVETHPIAGTRPRGSTPIEDIELEVELLNDEKERAEHVMLVDLARNDITRVSIPGTVQVTSFMDIERYETVMHIVSRVEGVTRPSTTFVEALKALHPAGTVSGAPKPRAMEIIAELEEEARGPYAGAIGVAGSSAGEAAIVLRSAWLLDDGETLEARAGAGIVYDSKPEREYMETVQKLGSLKRALGVDMCG

SEQ ID NO: 3663 - DNA, 1788 bp, Arabidopsis thaliana
  CDS (1)..(1788)
atgtcttcctctatgaacgtagcgacgatgcaagcactgactttctctcgccggcttctcccttctgttgcttctcgttatctctcttcttcttctgtgaccgttactggatactccggtagaagctcggcttacgcgccttctttccgttcgattaaatgcgtctctgtttctccggaagcttcaatagtaagtgatacaaagaagttggcagatgcttctaagagtacaaaccttataccaatttaccgctgtatattctctgatcagcttactcctgttcttgcttaccgttgtttggtcaaagaagatgaccgtgaagctcctagctttcttttcgagtccgttgagcctggttctcagatgtctagcgttggtcgttatagcgttgttggggctcagcctgcgatggagatcgtggcaaaggagaataaagttattgtaatggatcacaacaatgaaaccatgactgaggaattcgtcgaagatccaatggagatcccaagaaaaatctctgagaaatggaaccctgatcctcaactagttcaggaccttccagatgcgttttgtggtgggtgggttggttttttctcgtacgacactgttcgttatgttgagaagaggaaattgccattttcaaaggcccctgaggatgataggaacttgccagacatgcatcttggtctgtacgacgatgtagttgtatttgatcacgtggaaaagaaagcatatgtcattcactggattagactagatgggagccttccttacgaaaaggcatacagtaatggaatgcaacatttggagaacttggtggccaagttacatgatattgagccgccaaaactggctgcaggtaacgtgaatcttcagacacgacaatttgggccatctttggataattcaaacgtgacatgcgaagagtacaaggaggctgtggtcaaggccaaagaacatatacttgcaggagacatatttcagatcgtgctgagtcaacgttttgagcggcgaacatttgcagacccctttgaagtttatagagcactaagagttgtgaatccaagtccgtatatgggttatttgcaggctagaggatgcattttggtagcatcaagtccagaaattctcaccaaagtaaagcagaacaagatagtgaatcggccattggcaggaaccagcaagagagggaagaatgaagttgaggataagagattagaaaaggaactgctagagaatgaaaagcaatgtgctgagcacatcatgttggttgatctcggtcgcaacgatgttggaaaggttacgaaatacggatcagtgaaagtagagaagcttatgaacatcgaacgttattcccatgttatgcatataagctccacggtgacaggagaattacaagatggtttgacttgctgggacgtactacgtgcggctttaccagtgggaacagttagtggtgcaccaaaggtcaaagctatggaactaatcgatgagctagagccaacgaggcgtggaccatacagtggcggttttggtggagtctccttcactggtgacatggacattgctttatcccttaggacaatcgtttttccgacagcatgtcaatacaatacaatgtactcttacaaggatgctaacaaacggcgtgagtgggtggcttatcttcaagctggagctggtgtagtagctgatagtgacccgcaagacgaacactgtgagtgccagaacaaagccgctggtcttgctcgagccatcgacttggctgaatctgcatttgtgaaaaaatga

SEQ ID NO: 3664 - protein, 595 aa, Arabidopsis thaliana
MSSSMNVATMQALTFSRRLLPSVASRYLSSSSVTVTGYSGRSSAYAPSFRSIKCVSVSPEASIVSDTKKLADASKSTNLIPIYRCIFSDQLTPVLAYRCLVKEDDREAPSFLFESVEPGSQMSSVGRYSVVGAQPAMEIVAKENKVIVMDHNNETMTEEFVEDPMEIPRKISEKWNPDPQLVQDLPDAFCGGWVGFFSYDTVRYVEKRKLPFSKAPEDDRNLPDMHLGLYDDVVVFDHVEKKAYVIHWIRLDGSLPYEKAYSNGMQHLENLVAKLHDIEPPKLAAGNVNLQTRQFGPSLDNSNVTCEEYKEAVVKAKEHILAGDIFQIVLSQRFERRTFADPFEVYRALRVVNPSPYMGYLQARGCILVASSPEILTKVKQNKIVNRPLAGTSKRGKNEVEDKRLEKELLENEKQCAEHIMLVDLGRNDVGKVTKYGSVKVEKLMNIERYSHVMHISSTVTGELQDGLTCWDVLRAALPVGTVSGAPKVKAMELIDELEPTRRGPYSGGFGGVSFTGDMDIALSLRTIVFPTACQYNTMYSYKDANKRREWVAYLQAGAGVVADSDPQDEHCECQNKAAGLARAIDLAESAFVKK

SEQ ID NO: 3665 - DNA, 2017 bp, Arthrobacter globiformis
  misc_feature (12)..(12): n is a, c, g, or t
  misc_feature (36)..(36): n is a, c, g, or t
  misc_feature (44)..(44): n is a, c, g, or t
  misc_feature (55)..(55): n is a, c, g, or t
  misc_feature (66)..(66): n is a, c, g, or t
  misc_feature (279)..(280): n is a, c, g, or t
  CDS (402)..(1997)
aacaggtcctantgctgggctggatgacaaacgagnccctcaangaccataccancggcccgggtntcgttctactcccgctcccgccaggagtactggcgcaagggtgacacgtccggcctcgtgcagtgggtcaagtcggtggccctggactgcgacggcgacgccctcctcgtgcgggtggaccaggtgggtgcagcatgccacaccggtacgcggacctgctttgacttccgggccttcgacgtagtggcaggtccggccaactagcggcccccnnccccccaacaggcccccacccaacaggccctcacccaacaggccctcacactcaacaggcccccacccaacaggccccaccccactggcactggcctagaacagacggagaaccaatagcaatgcaggacctcggaatcatcagccctggcctggaagaattccgggaactcgccgcccacagccgcgtcatccctgtccggctcaaggtgctggcggacgctgaaacgccgatcgggctgtaccggaagctggcgcagggccagccaggcacgttcctcatggagtcggcagctgtcggcggcgcctggtcccgctactccttcatcggttcccggtcccgcgccacgctgaccaccaaggacggacaggcgcactggctgggcgagccgccggcgggggtgcccgtcgacggaaatccggttgatgccatccgcgacaccatcgaggcgctgcgcaccgaccggttcgacgggcttccgccgttcacctccggcctggtgggcttcctgggctgggaaacggtccgccactgggagaagctcaccagaccgcccgaggacgacctgcagctgcccgaactggcgctgaacctcgtcacggacatggccgtccacgacaacatggacggcacggtgctgctcatcgccaacgccatcaactttgacaacagctccgaacgcgttgacgaggcctggcatgacgccgtcgcccgcgtgaaggagctgctggcacgcatcagcaccccggtgctccaaccggtgtccgtgctggagccggctgccctcgattttgctgccagcgtccaggaacgctggaacgagcccgagtaccttgccgccctcgaccggggcaaggaggcgatcgtggacggcgaagtcttccaggtggtcatctcccgccgcttcgaaatggagtgcggggcgtcgcccttggatgtctaccgggtgctgcgcaacaccaacccgagcccgtacatgtacattttcagcctcgaggacgccgccggccggcagtattcgatcgtcggttcgtcgccggaggcgctggtgacggtcaccggcgaggacgtcatcacgcaccctatcgccggctcccggccgcgcggcaagaccgtggacgcggacaaggcattggccgaggaactcctcgcagaccagaaggaacgggcggaacaccttatgctggtggacctgtcccggaacgatctttcgaaggtctgcgtggcgggttccgtggacgtcacccagttcatggaggtggagcgcttcagccacatcatgcacctggtctccaccgtcgtcgggcgcctggctccgacggcgaaagcctatgacgtcctgaaggccaccttcccggccggaaccctttccggcgccccgaagccccgggcgctgcggctcctggatgaactcgagccgcaccggcgcggcatctacggcggcgtggtgggctacctggacttcgccggcgacatggacatggccattgccatccgttccgcactgctgcgcgaaggacgggcctacgtccaggcgggcggcggcatcgtggcggattcgagcaatccggccgaggcgcaggaaaccgtcaacaaggcggcggccccgctgcgtgctgtccacacggccggatcgctgcacaacatcacgccggactccgtcagcgctcccgattccgtcagcagccccgattccgtcacggaggcaaactcctgatggcggttcccgcaggatcc

SEQ ID NO: 3666 - protein, 531 aa, Arthrobacter globiformis
MQDLGIISPGLEEFRELAAHSRVIPVRLKVLADAETPIGLYRKLAQGQPGTFLMESAAVGGAWSRYSFIGSRSRATLTTKDGQAHWLGEPPAGVPVDGNPVDAIRDTIEALRTDRFDGLPPFTSGLVGFLGWETVRHWEKLTRPPEDDLQLPELALNLVTDMAVHDNMDGTVLLIANAINFDNSSERVDEAWHDAVARVKELLARISTPVLQPVSVLEPAALDFAASVQERWNEPEYLAALDRGKEAIVDGEVFQVVISRRFEMECGASPLDVYRVLRNTNPSPYMYIFSLEDAAGRQYSIVGSSPEALVTVTGEDVITHPIAGSRPRGKTVDADKALAEELLADQKERAEHLMLVDLSRNDLSKVCVAGSVDVTQFMEVERFSHIMHLVSTVVGRLAPTAKAYDVLKATFPAGTLSGAPKPRALRLLDELEPHRRGIYGGVVGYLDFAGDMDMAIAIRSALLREGRAYVQAGGGIVADSSNPAEAQETVNKAAAPLRAVHTAGSLHNITPDSVSAPDSVSSPDSVTEANS

SEQ ID NO: 3667 - DNA, 2199 bp, Azospirillum brasilense
  CDS (1)..(2199)
atgtaccccgccgaccttcttgcctcgcccgacctcctcgaaccgctgcgtttccagacgcgcggcggcgtcaccgtcacgcggcgggcgacggcgctcgacccgcggaccgccctcgacccggtgatcgacgcgctggaccgccgccgcggcctgctgctgtccagcggggtggaggcgccgggccgctaccgccgtcacgcgctgggcttcaccgaccccgcggtggcgctcacggcgcgtgggcggacgctgcgcatcgacgcgctgaacgggcgggggcaagtgctgctgcccgccgtcgccgaggccctgcgtggcctggaggccctggccggtctagaggaggcgccgtcgcgggtcactgcctcgtccgcaagcccagcaccccttcccggagaggagcggagccgccagccctccgttttctcggtcctgcgggcggtgctggatctgtttgccgcccccgacgacccgttgctcgggctctacggggccttcgcctacgacctcgccttccagttcgagccgatccgccagcggttggagcggcccgacgaccagcgcgatctgctgctctacctgccggaccggctcgtcgcgctggaccccatcgcaggactcgcccggctcgtcgcgtatgagttcatcacggcggcgggcagcaccgaggggctggagtgcggcgggcgcgaccacccctaccgtcccgacaccaacgccgaggccggctgcgaccacgcgcccggtgactatcagcgcgtcgtcgagagcgccaaggccgccttccgccgcggcgacctgttcgaggtggtgcccggccagaccttcgccgagccctgcgccgacgcgccttcgtcggtgttccggcggctgcgcgccgccaacccggcgccttacgaggccttcgtcaacctcgggcggggcgagttcctcgtcgccgccagcccggagatgtatgtgcgggtggcgggcgggcgggtggaaacctgcccgatctccggcaccgtggcgcgcggggccgacgcgctgggcgacgccgcgcaggtcctgcgcctgctgacctcggccaaggacgcggcggagctgaccatgtgcaccgacgtggaccgcaacgacaaggcgcgggtgtgcgagccgggatccgtccgggtgatcgggcggcggatgatcgagctgtactcccgtctgatccacacggtggaccatgtggagggacggctgcggtccggaatggacgcgctggacgccttcctcacccacagctgggcggtgacggtgaccggcgcgcccaagcgctgggccatgcagttcctggaggatacggagcaatcgccgcgccgctggtacggcggggccttcggccggctgggcttcgacggcgggatggacaccggcctgaccctgcgcaccatccgcatggccgagggcgttgcctacgtgcgggcgggggcgacgctgctgtccgacagcgatccggacgcggaggacgcggagtgccgcctgaaggccgccgccttccgcgacgccatccgcgggacggcggcgggtgcggcgcccacgctgccggcggctccccgtggcggggagggcaggcgggtgctgctggtggatcacgacgacagcttcgtccacacgctggccgactatctgcgccagacgggcgcttcggtgacgacgctgcgtcacagtcacgcacgggcggcgctggcggagcggaggccggatctggtcgtgctgtcccccggtccggggcgcccggcggatttcgacgtggcgggcaccatcgacgcggcgctggcgctcggcctgccggtgttcggcgtctgcctgggcctgcaagggatggtggagcgcttcggcggcgcgctggacgtgctgccggagcccgtccacggcaaggcgacggaggtccgggtgctgggcggcgcgctgttcgccggcctgccggagcggctgacggtcgggcgctaccactctctggtggcccggcgcgaccggctgccggcggacctcacggtgaccgcggagaccgccgacggtctggtgatggcggtcgagcaccggcggcttccgctcgccgccgtgcagttccaccccgagtcgatcctgtcgctcgacggtggggccggtcttgccctgctgggcaacgtgatggaccggctggccgccggcgccctgacggacgctgcggcttga

SEQ ID NO: 3668 - protein, 732 aa, Azospirillum brasilense
MYPADLLASPDLLEPLRFQTRGGVTVTRRATALDPRTALDPVIDALDRRRGLLLSSGVEAPGRYRRHALGFTDPAVALTARGRTLRIDALNGRGQVLLPAVAEALRGLEALAGLEEAPSRVTASSASPAPLPGEERSRQPSVFSVLRAVLDLFAAPDDPLLGLYGAFAYDLAFQFEPIRQRLERPDDQRDLLLYLPDRLVALDPIAGLARLVAYEFITAAGSTEGLECGGRDHPYRPDTNAEAGCDHAPGDYQRVVESAKAAFRRGDLFEVVPGQTFAEPCADAPSSVFRRLRAANPAPYEAFVNLGRGEFLVAASPEMYVRVAGGRVETCPISGTVARGADALGDAAQVLRLLTSAKDAAELTMCTDVDRNDKARVCEPGSVRVIGRRMIELYSRLIHTVDHVEGRLRSGMDALDAFLTHSWAVTVTGAPKRWAMQFLEDTEQSPRRWYGGAFGRLGFDGGMDTGLTLRTIRMAEGVAYVRAGATLLSDSDPDAEDAECRLKAAAFRDAIRGTAAGAAPTLPAAPRGGEGRRVLLVDHDDSFVHTLADYLRQTGASVTTLRHSHARAALAERRPDLVVLSPGPGRPADFDVAGTIDAALALGLPVFGVCLGLQGMVERFGGALDVLPEPVHGKATEVRVLGGALFAGLPERLTVGRYHSLVARRDRLPADLTVTAETADGLVMAVEHRRLPLAAVQFHPESILSLDGGAGLALLGNVMDRLAAGALTDAAA

SEQ ID NO: 3669 - DNA, 1542 bp, Bacillus pumilus
  CDS (1)..(1542)
atgaattcccaatcaaacctgacccaatttttaaaggacagcgagtcctacaaaacgatcccaattgttgaaaccattacagtcgatacgctctcaccgattcaaattgttgaaaaactcaaacaagatattgtgtatttgctagaaagcaaagatgagtcttccagctggtcgagatattccttcattggattacacccgtttttaaccttacacgatgaccaaaacaaatacattgcacgtgacgctgcggggcagaaactcatgcaaaagcaagagctgaaagaactgctagattggatgaaagagcaatatcaaatcaaaacgccagatattgatatcccatttacaggcggggctgttgggtacttaagctacgatctgatcccaacattgacctctgtcaggcctcaccgcagcgcatcgacgatagaaaatgcacatatttgtctgccaacgatgattgcatttgatcatgaaacaaatcatgttcattttatccagtacacgcagctaaccggacatgaaacagaggacgaaaaaatacgcgcctacaaagaaaaacaaaagcagcttgaacagatgattcacaagctccattcaaaggttgatatgaaagaactgattttatcagggaatatgaatgagccgccatcctttgaacatgtgacgtcaacctatgaaaaagcgcaatttttaaaagacgtagaaaaaatcaaagaatacattcgagcgggtgacatttttcaaggcgtactctcgcagcgatttgatatccctgtatcagtgagttcatttgagttataccgcgtgcttcggattgtgaatccatctccttatatgtattttatgaaattaaaagatcgtgatttagtcggcagctcaccagaacgattaatccatgccaaaaatgggcatttagaaattcatcctattgctggcacaagaaaacgaggaacaacaagagaagaggatgctgaactagcaagagagctgcttgaagatgaaaaggaaaaagccgagcattacatgttagtggatcttgccagaaatgatgtaggccgtgtggcagaatacggcagtgtgtccgtaccaacctttacaaaagtagtgaacttctctcatgtcatgcacatcatctccattgtgacaggaaagctaaagcgggatacacatccagttgatgcgctcatgtccgcattcccagcaggcacattaacaggtgccccgaaaataagagcgatgcaattattaaatgaaatggagcctgagccaagggaaacgtatggcggctgtattgcttatattggattcgacggcaatatcgactcttgtattacgattcgtacgatgagcgtcaaaaatcataccgcttctatacaagcaggcgccggcattgtggctgattctgtcccagaaaatgaatgggaagagacttgtaacaaggcaggagcacttctgaaagccattcagcttgcggaacatattttctcagaaaaggagagtgtgcaggatgaatcaccgactatcagctcttgttag

SEQ ID NO: 3670 - protein, 513 aa, Bacillus pumilus
MNSQSNLTQFLKDSESYKTIPIVETITVDTLSPIQIVEKLKQDIVYLLESKDESSSWSRYSFIGLHPFLTLHDDQNKYIARDAAGQKLMQKQELKELLDWMKEQYQIKTPDIDIPFTGGAVGYLSYDLIPTLTSVRPHRSASTIENAHICLPTMIAFDHETNHVHFIQYTQLTGHETEDEKIRAYKEKQKQLEQMIHKLHSKVDMKELILSGNMNEPPSFEHVTSTYEKAQFLKDVEKIKEYIRAGDIFQGVLSQRFDIPVSVSSFELYRVLRIVNPSPYMYFMKLKDRDLVGSSPERLIHAKNGHLEIHPIAGTRKRGTTREEDAELARELLEDEKEKAEHYMLVDLARNDVGRVAEYGSVSVPTFTKVVNFSHVMHIISIVTGKLKRDTHPVDALMSAFPAGTLTGAPKIRAMQLLNEMEPEPRETYGGCIAYIGFDGNIDSCITIRTMSVKNHTASIQAGAGIVADSVPENEWEETCNKAGALLKAIQLAEHIFSEKESVQDESPTISSC

SEQ ID NO: 3671 - DNA, 1527 bp, Bacillus stearothermophilus
  CDS (1)..(1527)
atgtccattgatcggctagccgcttttttagcggatgctcgccagtttcgcaccatcccgatcatgcgcaaatttttagccgatgtcatcgaaccgttgcaagtgtttgccaatttgcgcgaggaagcggtgtttctgcttgaaagcaaagacgacgaatcgccatgggcgcgttattcgtttatcggcgtggccccatttttgacgcttgagagcgagacaggagaaacgtttttgatcaaagacgagaacggaaatgtccaaatgacggcgtcgacgttgaaagaagcgtttcaagcggtcgagcgggcgctttgcgttaagccgctcgccgaagcggcgccgtttacgggcggcgcggtcggctttttaggctatgatttcatttccgccattgaaaaggtgccgcgccatcgtgcccccgacctagccatgaaagccgggcattttgtgttttgcgagtcgctgttcgcttttgatcacgaaaaacgcgagctgtctctcattcattatatccggttgaagggtcatgaaacgatgcaggagaaaatcgcgatataccgagccgccgaagaacgcatcgccgcgctggcagcgaaagcgtcgcgcccccgggccgaacagccgctgctgccggccgaagacgaggccgagcgggccgccttgttctcgaaagcgtcgtccaattacgaaaaagagcaatttttgcgtgacgtcgaggcggtgaaacagtatattgcggccggcgatgtgtttcaggcggtgctgtcgcagcggttctccgtcccggtgcaagcgggtgggtttgccatttatcgcatcttgcgccacatcaacccgtcgccgtacatgttttattttcggcttgacggcattgaaattgtcggtagttcgccggaaaagctcatccaagtgcgcaaccggcgcgccgagatcgacccgatcgccggaacaaggcggcgcggacgctcaccggcggaggatgaaaagctcgccgacgagctgtaccatgacccgaaagagcgggcggagcattatatgctcgtcgatttggcgcgcaatgacatcggccgggtggcgaagtacggaacggtcgaggtgccggtgttgatggaaatcggcaagttctctcatgtgatgcatttaatttccaaagtcgtcggcgtgcttgacgacgacatccacccgatcgacgcgctcttggccgcttttccggctggaacggtgagcggggcgcccaaagtgcgggcgatgcaaatcttgcaggagctcgagccgaccgcccgaggattgtacgctggagcgatcgcgtacatcggctttgacggcagcattgattcgtgcatcgccatccggacggcggtcattaaagacggttatgcgtacgtgcaggccggcgccggcattgtcgccgactcggttccggagcttgaatggaaagagacgcgcaacaaggcgagcgccctcatttacgccatcgaacaagcggaacgattatttgcgaaaggggaacagatcgtatgttaa

SEQ ID NO: 3672 - protein, 508 aa, Bacillus stearothermophilus
MSIDRLAAFLADARQFRTIPIMRKFLADVIEPLQVFANLREEAVFLLESKDDESPWARYSFIGVAPFLTLESETGETFLIKDENGNVQMTASTLKEAFQAVERALCVKPLAEAAPFTGGAVGFLGYDFISAIEKVPRHRAPDLAMKAGHFVFCESLFAFDHEKRELSLIHYIRLKGHETMQEKIAIYRAAEERIAALAAKASRPRAEQPLLPAEDEAERAALFSKASSNYEKEQFLRDVEAVKQYIAAGDVFQAVLSQRFSVPVQAGGFAIYRILRHINPSPYMFYFRLDGIEIVGSSPEKLIQVRNRRAEIDPIAGTRRRGRSPAEDEKLADELYHDPKERAEHYMLVDLARNDIGRVAKYGTVEVPVLMEIGKFSHVMHLISKVVGVLDDDIHPIDALLAAFPAGTVSGAPKVRAMQILQELEPTARGLYAGAIAYIGFDGSIDSCIAIRTAVIKDGYAYVQAGAGIVADSVPELEWKETRNKASALIYAIEQAERLFAKGEQIVC

SEQ ID NO: 3673 - DNA, 1545 bp, Buchnera aphidicola
  CDS (1)..(1545)
atgaaaaaaagcgcatatccaattgaaataattcaaaaacaggccccctatcatcccgatcctactatgatatttaatcacctttgtgaatcacgatcagaaacattgttactagaaacagctgataataaaaaaaaaagatctagaaagataatgattattgatagtgctatgcgaatttcttcagaacacaatgcagttaaattaacaccactatctataaatggaatggaaattttattagtcttaaaaaaaataatatccaaaaaaattgaaatataccgaagaaaaaaaaatacaattcttatttttcccaacattgaaaaagatcttgacgaagataaaaaacttttttcactatcagtttttgatgcctttagattaatcattaaaacatttgaaaatagagaaaaaaaatcaaaagcaatgtttttcgggggattattttcttacgatttaatttcagtttttgaaacattacctaaattaaaagggaatcaaaaatgttcaaatttttgtttttacctggcagaaacactacttgttttagatcatcaacaaaaaacatgcttaattcaaagcagtttatttactaaaaattcaaacgaaaaaaaaagaattgaggaaagatctgtagaaataaaacaaaaactcaatcaaaagttaaattcaataccgaaaataaaaattaaagatattaatttaacttcaaatatgaataattttgaatatgggtcaataataaaaaaactacaaaaactaatccaaaaaggtgaaatttttcaagttgtaccgtctcgaaaattttatttaccctgtcccaatccgctatctgcttatcaaaaattaaaaaaaagcaacccaagtccttatatgttttttatgcaagatcaagattttacactgtttggagcttcaccagaaagttcattaaaatatgatgaaaaaacaagaaagattgaactatatcctatcgcaggaacaagacccagggggagaactaaggatggaaatttagatttagatttagatagcagaatagaacttgaaatgagaactaatcataaagaattagcagagcacttgatgctcgtagatttagcacgtaacgatcttgctcgtatttgtaaaccgggatctagatacgtgtcggatttagtgagggtagatcgatattctcatgtaatgcacttggtatcaagagttataggtgaacttagagagggtttagacgcattacatgcatatgcttcctgtatgaacatgggaacgctaacaggtgctccaaaggtttgcgcgatgcaattaattgcggaatatgaaaaagaaaaaagaggaagttacggtggtgctataggttattttacagatttaggtaatttagacacgtgtattacaatacgttcagcgtatgtggaaaaaaggtattgctacaatcaagcaggagccggtattgtttataattcaattccagaagatgaagtaaatgaaagtttaaacaaagcgcaagctgtaattaacgctataaaaaacgcacattattaa

SEQ ID NO: 3674 - protein, 514 aa, Buchnera aphidicola
MKKSAYPIEIIQKQAPYHPDPTMIFNHLCESRSETLLLETADNKKKRSRKIMIIDSAMRISSEHNAVKLTPLSINGMEILLVLKKIISKKIEIYRRKKNTILIFPNIEKDLDEDKKLFSLSVFDAFRLIIKTFENREKKSKAMFFGGLFSYDLISVFETLPKLKGNQKCSNFCFYLAETLLVLDHQQKTCLIQSSLFTKNSNEKKRIEERSVEIKQKLNQKLNSIPKIKIKDINLTSNMNNFEYGSIIKKLQKLIQKGEIFQVVPSRKFYLPCPNPLSAYQKLKKSNPSPYMFFMQDQDFTLFGASPESSLKYDEKTRKIELYPIAGTRPRGRTKDGNLDLDLDSRIELEMRTNHKELAEHLMLVDLARNDLARICKPGSRYVSDLVRVDRYSHVMHLVSRVIGELREGLDALHAYASCMNMGTLTGAPKVCAMQLIAEYEKEKRGSYGGAIGYFTDLGNLDTCITIRSAYVEKRYCYNQAGAGIVYNSIPEDEVNESLNKAQAVINAIKNAHY

SEQ ID NO: 3675 - DNA, 1593 bp, Buchnera aphidicola
  CDS (1)..(1593)
atgtgtgaacatcttaagagtatggatgttttaaaagttgaaacattttaccaacccaatccaacagctatttttcatcatatttgtcgtaatagaagtaatacgttacttttagaatcagctgaaattaataataaaaaaaatttagaaagcatgatgattgtagattctgcattacgcatttcagctttaaatatggtagttacattagaagcattaactaaaaacggagaaagtttattacctgtctttaagtctttattaccaaaagaagtgagaattcttagtaatgacaattttttaaaaattaaattcccttcaatcgttaaagatattgatgaagacaagaagttacatgtattgtctatatttgattcgatacgttttttgataaatagtgtaaaaaataataaaggttctaagtctatgttttttggaggattatttgcatatgacttggtttctagttttgagaatttacctaaattaaaaacttctcaatcttgccctgatttttgcttttatttatctgaaatattacttgttttgaaccataaaagaagaacttgttatatacaagcaagtttgttttcttctagcaatcttgaaagaaataaattacaacatagattattagaagtaaagaacaagttgtctcaaaatttttatccattagaatcaacttcattaaaaaaaatgattttaaaatgtaatagaacagatagagaatatgaaaaaatcattaaggaaatgaaaaaatcaataatgattggagaaattttccaagttgtaccgtctagaaaattttatttgccatgtactaattcgttagcggcttatgatgttttaaaaaaaaataatcctagtccatatatgttttttatgcaagattctaattttactttatttggtgcttctccagaaagttctttaaagtatgatacattatcgcggaaaattgaaatttatcctattgcaggaactaggccgcgagccagaaagatagatggatctatagatttggatttagatagtagaatagagttggaaatgcgaacaaatcataaagagttgtctgaacatttaatgttagtggatttggcacgtaatgatttagcaaaaatttgtgatcctggaactcgttatgttgctgatttaacacaagtagataagtattctcatgttatgcatttagtatcgagagttgtgggcaagttaagattagatttagatgtttttcatgcatatcaggcatgcatgaacatgggaacattaagtggtgctccaaaaattagagcgatggagttaatttctaatgcagagaaagagaaaagaggaagttatgggggatctataggatattttactgcgtctggaacattagatatgtgtattattattagatctgcatatgtagaaaataatattgctactattcaagtaggagctggaatagtactagattctatacctcaattagaagtagatgagagtaagaataaagctaaagctgtattacaggcaatttctgaatcacattcttgtcatatagagttaaacatagaaaatgaacgacatacttttgctggataa

SEQ ID NO: 3676 - protein, 530 aa, Buchnera aphidicola
MCEHLKSMDVLKVETFYQPNPTAIFHHICRNRSNTLLLESAEINNKKNLESMMIVDSALRISALNMVVTLEALTKNGESLLPVFKSLLPKEVRILSNDNFLKIKFPSIVKDIDEDKKLHVLSIFDSIRFLINSVKNNKGSKSMFFGGLFAYDLVSSFENLPKLKTSQSCPDFCFYLSEILLVLNHKRRTCYIQASLFSSSNLERNKLQHRLLEVKNKLSQNFYPLESTSLKKMILKCNRTDREYEKIIKEMKKSIMIGEIFQVVPSRKFYLPCTNSLAAYDVLKKNNPSPYMFFMQDSNFTLFGASPESSLKYDTLSRKIEIYPIAGTRPRARKIDGSIDLDLDSRIELEMRTNHKELSEHLMLVDLARNDLAKICDPGTRYVADLTQVDKYSHVMHLVSRVVGKLRLDLDVFHAYQACMNMGTLSGAPKIRAMELISNAEKEKRGSYGGSIGYFTASGTLDMCIIIRSAYVENNIATIQVGAGIVLDSIPQLEVDESKNKAKAVLQAISESHSCHIELNIENERHTFAG

SEQ ID NO: 3677 - DNA, 3037 bp, Buchnera aphidicola
  CDS (1)..(1581)
atgtattatcgttcaataaaaagtgaaataattcaaacaatttgtacatatcatgaagaaccatccctaatttttaataaaatttgccgtacaaaaactgaaacgttattattggaatctgctacggtacatggtaaaaaaaatatagaaagtatgctaatcatagatacagcaattaaaataagttgttttaaaaatattgtagaaatagaagctatttcaaataatggtttatttctattgaatacaattgatttaaaaattttaaaaaaaaaatcaacgaaaataaaaaaaaaaaaatcaaatgtattagaaatacattttcctatttttaattattttactgacgaagataaaaaattgtttttaacatcggtttttgatgctttaagaattattaaaaaatcgattaaaaaccccgaaaagagcaaaatgggagtattttttggtggtattctatcctacgacctcatttcttcttttgagcctattcctagagtttttaattctaaatataatcatccagatttttgtttttatttatctgaaaatttattgatttttgatcataaaaaaaaaaaatgtaaattacaaacaaatatatttactgataatgaagaagaaaaattaaatatcttaaaaagaataaaaattatttataatcaaataaaagaaataaattcaaaaaaaaaaaataatagaattaatacttttaatgattttaaaacaaaaaataaaaaatgggttgattgtaaaaatgattcaaaagtctataagaataaagttaaaaaaatgaaacaaatgatactcaatggagaagtctttcagattgttatttctagaaaattttttttaccatgtccttacccattagaatcttatatatttcttaaaaaaaataatcctagtccatatatgttttttatgcaggatagacattttgttctttttggagcttcccccgaaagttctctaaaattttcgtctataactagaaaaatagaaattcatcctatagcaggaacaagacccagagctttttcttctattaaaaaaattgatataaacgaagacaataaaatggaattagctatgagaattaattcaaaagaattagctgaacattgtatgttggtcgatcttgctaggaatgatctttctcggatttgtttacctggttctcgtgttgtttctgatttaatgaaagtagttaaatattctcatgttatgcatttagtttctaaagttgaaggggtattaagaaatgatttagatatttttcatgcataccaatgttgtatgaatatgggtactttaacaggtgcgcctaaaatacgtgcaatgcaaattattgcagaagagggggagataagagaatgttacggaggagcaattggatattttacagggaagggggatttagatacatgtattgtaattagatctgcttatgtaagaaatggaatagcttgtgttcaagctggtgcaggaattgttttagattctatagctgacgaagaaaacgaagaatgtaaaaataaagcaatggctgtgattaatgctataaataaaactctttaattttttttatttacccttctttttaaaaattgaagggtaatatttttaaaaaaaatttttgataatttttatctgtggataacctgtggataagtaattaaatataaaaaaatattttggttaaaatatcttattattacaataagttacttaatgtataaaattctcaaaaaaataaattttaaaacctaaattaataaaaattttgaaaaatttaaaaaattattttttttaaaacaaattattttaaataagttattgttttgtaaagaaaaataaattttttcaaaaaaaaaaaatatataattttttattatttttttttaaattttattaatattttatttttttttattattcagtagtaaaatatgtgtataagttatgtataacctgtggataactttctttttcctgtggataaatctatatgtaaaaaatagatttttatattcaaaaaaattaataaaattaaatacttagaattatttatataattttttttatataataatttatttctatttcataaaatatatatattattattattattatttatttttttgtttttattatttattattatgtttttatttattattttaagattttttaatttatgtattttttattaaatttagttgattttttagattatttatatatattaaaaaactaaaaccttgaaataaaaagaacaaaaaagttaactatatgtctgaaattttacttattgataatttagattcattcacttacaatttagttgatatttttaaaaaaaataaatataaagtttttatttttagaaattacatatcaaaaaaaataattgaaaaaaaaattgtaaatatgaaaaacccaattttagttttttcacctggtccaggtttacctaaaaatgcaggttgtatgaattctttaattaaaacttttgaatcaaaaataccaataattggaatatgtttaggttttcaagcaataattgaaatttttgggggtagtataattcaatctaaaaaaatttatcatggtaaaatatctataataaatcacgatggtttagacatatataaaaatataaaaaatcctctacaagtaggtagatatcattcttttgtatgtaataaagttccaaataattttattgctaattctttttgtaaaaaaatagtaatgagtataaagaataaatctaaaaaaatattcggatttcaatatcacccagaatcaattttaacaccttatggagacaaaattttattaaacacaatttcatggattgaaaataaaatttaattcaaatctataaacctaaccttccaatattacctttttaaaaaaataaaaattaaatttaagacttcaataaaaataagaaaaaagtttttttttattagttatttttaaaatttttttcaattagattgctaaatttatttggggaaaataa

SEQ ID NO: 3678 - protein, 526 aa, Buchnera aphidicola
MYYRSIKSEIIQTICTYHEEPSLIFNKICRTKTETLLLESATVHGKKNIESMLIIDTAIKISCFKNIVEIEAISNNGLFLLNTIDLKILKKKSTKIKKKKSNVLEIHFPIFNYFTDEDKKLFLTSVFDALRIIKKSIKNPEKSKMGVFFGGILSYDLISSFEPIPRVFNSKYNHPDFCFYLSENLLIFDHKKKKCKLQTNIFTDNEEEKLNILKRIKIIYNQIKEINSKKKNNRINTFNDFKTKNKKWVDCKNDSKVYKNKVKKMKQMILNGEVFQIVISRKFFLPCPYPLESYIFLKKNNPSPYMFFMQDRHFVLFGASPESSLKFSSITRKIEIHPIAGTRPRAFSSIKKIDINEDNKMELAMRINSKELAEHCMLVDLARNDLSRICLPGSRVVSDLMKVVKYSHVMHLVSKVEGVLRNDLDIFHAYQCCMNMGTLTGAPKIRAMQIIAEEGEIRECYGGAIGYFTGKGDLDTCIVIRSAYVRNGIACVQAGAGIVLDSIADEENEECKNKAMAVINAINKTL

SEQ ID NO: 3679 - DNA, 1557 bp, Corynebacterium glutamicum
  CDS (1)..(1557)
atgagcacgaatccccatgttttctccctagatgtccgctatcacgaggatgcttctgcattgtttgcccacttgggtggcacaaccgcagatgatgcagccctgttggaaagcgctgatatcaccaccaagaatggtatttcttccctcgcggtgttgaagagttcggtgcgcattacgtgcacgggcaacacggtggtaacgcagccgctgacggactcgggtagggcagtggttgcgcgcctaacgcagcagcttggccagtacaacaccgcagagaacacctttagcttccccgcctcagatgcggttgatgagcgcgagcgcctcaccgcaccaagcaccatcgaagtgctgcgcaagttgcagttcgagtccggctacagcgacgcgtccctgccactgctcatgggcggtttcgcgtttgatttcttagaaacctttgaaacgctccccgctgtcgaggagagcgtcaacacttaccccgattaccagttcgtcctcgcggaaatcgtcctggacatcaatcaccaggaccagaccgccaaactcgccggcgtctccaacgccccaggcgagctcgaggccgagctcaacaagctttcattgcttatcgacgccgccctccccgcaaccgaacacgcctaccaaaccacccctcacgacggcgacactcttcgcgttgtggctgatattcccgatgctcagttccgcacccagatcaatgagctgaaagaaaacatttacaacggtgacatctaccaagttgtcccggcgcgcactttcaccgcaccatgtcctgatgcattcgctgcttatctgcagctgcgtgccaccaacccgtcgccgtacatgttctatatccgtggcctcaacgaaggccgctcctatgaactttttggcgcatcccctgagtccaacctcaagttcaccgctgctaaccgtgagctgcagctgtacccaatcgcaggtacccgcccccgtggactcaacccagatggctccatcaacgatgagctagatatccgcaatgagttggatatgcgcactgatgccaaagagatcgcggagcacaccatgcttgtcgatctcgcccgcaacgacctggcccgcgtctcggtcccagcgtcgcgccgggttgcggatcttttgcaggtggatcgctattcccgcgtgatgcacttggtgtcccgtgtgacggcgacgttggacccagagcttgatgctttggacgcctatcgggcgtgcatgaatatgggcacgttgaccggcgctccgaagttgcgcgctatggagctgttgcgcggcgtcgaaaagcgcaggcgtggttcttatggtggggcagtggggtacctgcgcggcaatggcgatatggataattgcattgttattcgttcggcgtttgtccaggatggtgtggctgctgtgcaggctggtgctggtgtggtccgcgattctaatcctcaatctgaagccgatgagacgttgcacaaggcgtatgccgtgttgaatgccattgcgcttgctgctggttccactttggaggtcatccgatag

SEQ ID NO: 3680 - protein, 518 aa, Corynebacterium glutamicum
MSTNPHVFSLDVRYHEDASALFAHLGGTTADDAALLESADITTKNGISSLAVLKSSVRITCTGNTVVTQPLTDSGRAVVARLTQQLGQYNTAENTFSFPASDAVDERERLTAPSTIEVLRKLQFESGYSDASLPLLMGGFAFDFLETFETLPAVEESVNTYPDYQFVLAEIVLDINHQDQTAKLAGVSNAPGELEAELNKLSLLIDAALPATEHAYQTTPHDGDTLRVVADIPDAQFRTQINELKENIYNGDIYQVVPARTFTAPCPDAFAAYLQLRATNPSPYMFYIRGLNEGRSYELFGASPESNLKFTAANRELQLYPIAGTRPRGLNPDGSINDELDIRNELDMRTDAKEIAEHTMLVDLARNDLARVSVPASRRVADLLQVDRYSRVMHLVSRVTATLDPELDALDAYRACMNMGTLTGAPKLRAMELLRGVEKRRRGSYGGAVGYLRGNGDMDNCIVIRSAFVQDGVAAVQAGAGVVRDSNPQSEADETLHKAYAVLNAIALAAGSTLEVIR

SEQ ID NO: 3681 - DNA, 1476 bp, Neisseria gonorrhoeae
  CDS (1)..(1476)
atgatcagcaaacaagaataccaagcccaagccgcccaaggctacaaccgcatcccgctcgtgcaagaactccttgccgacttggatacgccgctttccctctatctcaaactcgccaaccgcccctatacctacctgctcgaatccgttgtcggcggcgaacgtttcggccgctattcctttatcggcctgccttgcagccactatctcaaagccggcggcaaacacgtcgatgtttatcaaaacggcgaaatcgtcgaacaatacgacggcaatccgctaccctttatcgaagctttccacaaccgtttcaaaacacccgaaatcccaagcctgccgcgctttaccggcggcttggtcggctacttcggttacgaaaccgtctacaatttcgaacacttcgcccaccgcctgaaaaacaccgccaaagccaacccgctcggcacgcccgatattttgctgatgctgtcgcaagagttggcggtaatcgacaatttgagcggcaaaatccacctcatcgtttatgctgatccctcgcagcccgacagctacgaacgcgcccgcgaacgcctcgaagacatccgcacccagttgcgccaaagctgcgccatcccactttccctcggcagcaaacaaacccaagcagtcagcgagttcggcgaagaacctttcaaagcctgcgtcgataaaatcaaagactacattttcgcaggcgactgtatgcaggtcgtccccagccaacgcatgagcatggaatttaccgacaatccgcttgccctctaccgcgccctgcgcacgctcaacccttcgccttacctcttttactacgatttcggcgatttccacatcgtcggttcctcgcccgaaatcctcgtccgccgcgaacgcgacgacgtcatcgtccgccccatcgccggcacgcgcctgcgcggcaaaacccccgccgaagaccttgccaacgaacaagatttgttaagcgacgccaaagaaatcgccgaacacgttatgcttatcgatttggggcgcaacgatgtcggacgcatcagcaaaacaggcgaagtcaaagtcaccgacaaaatggtgattgaaaaatactcccatgtgatgcacatcgtttccaacgtcgaaggctgtttgaaagagggcgttaccaatatggacatcctcgccgccaccttccctgccggcacactctccggcgcgccaaaagtccgcgcgatggaaatcatcgaagaaatcgaaccggagaaacgcggcatctacggcggcgccgtcggcgtatggggcttcaacaacgatatggatttggcaatcgccatccgcaccgccgtgattaaaaacaataccctcttcatccaaagcggcgcgggcgtggttgccgactccgacccaacttccgaatggcaggaaactcaaaacaaagcccgcgcagtggttcgggcggcgcagatggtgcaggaagggttggataaatag

SEQ ID NO: 3682 - protein, 491 aa, Neisseria gonorrhoeae
MISKQEYQAQAAQGYNRIPLVQELLADLDTPLSLYLKLANRPYTYLLESVVGGERFGRYSFIGLPCSHYLKAGGKHVDVYQNGEIVEQYDGNPLPFIEAFHNRFKTPEIPSLPRFTGGLVGYFGYETVYNFEHFAHRLKNTAKANPLGTPDILLMLSQELAVIDNLSGKIHLIVYADPSQPDSYERARERLEDIRTQLRQSCAIPLSLGSKQTQAVSEFGEEPFKACVDKIKDYIFAGDCMQVVPSQRMSMEFTDNPLALYRALRTLNPSPYLFYYDFGDFHIVGSSPEILVRRERDDVIVRPIAGTRLRGKTPAEDLANEQDLLSDAKEIAEHVMLIDLGRNDVGRISKTGEVKVTDKMVIEKYSHVMHIVSNVEGCLKEGVTNMDILAATFPAGTLSGAPKVRAMEIIEEIEPEKRGIYGGAVGVWGFNNDMDLAIAIRTAVIKNNTLFIQSGAGVVADSDPTSEWQETQNKARAVVRAAQMVQEGLDK

SEQ ID NO: 3683 - DNA, 1476 bp, Neisseria meningitidis
  CDS (1)..(1476)
atgatcagcaaacaagaataccaagcccaagccgctcaaggctacaaccgcatcccgctcgtgcaagaactccttgccgatttggatacgccgctttccctctatctcaaactcgccaaccgcccctatacctacctgctcgaatccgttgtcggtggcgaacgtttcggccgctattcttttatcggcctgccttgcagccactatctcaaagccagcggcaaacacgtcgatgtttatcaaaacggcgaaattgtcgagcaacacgacggcaaccccctgccctttatcgaagccttccacaaccgcttcaaaacacccgaaatcccaagcctgccgcgctttaccggcggactggtcggctacttcggttacgaaaccatctacaattttgaacacttcgcccaccgcctgaaaaacaccaccaaagccgacccgctcggcacgcccgacatcctcctgatgctctcgcaagagcttgcagtagtggataacctaagcggtaaaatctacctgattgtttacgccgatccgtcgcagcccgacggctacgaacgcgcacgcgaacgcctcgaagacatccgtacacagttacgccaaagttgcgccatcccgctttcgctcggcagcaaacacaccgaagccgtcagcgaattcggcgaagagccgttcaaagcctgcgttaacaaaatcaaagactacatctttgcaggcgactgcatgcaggttgtccccagccagcgcatgagcatggaattcaccgacagctcgctcgccctctaccgcgccttgcgcacgctcaacccttcgccttatctcttctactacgatttcggcgatttccacatcgtcggctcctcgcccgaaatcctcgtccgccgcgaacgcgacgatgtcatcgtccgccccatcgccggcacgcgcctgcgcggcaaaacccccgccgaagaccttgccaacgaacaagatttgttaagcgatgccaaagaaatcgccgaacacgtcatgttgattgacttaggacgcaacgacgtcggccgcatcagtaaaaccggcgaagtcaaagttaccgacaaaatggtgattgaaaaatactcccatgtaatgcacatcgtttccaacgtcgaaggccgtctgaaagacggcatgaccaacatggacatcctcgccgctaccttccctgccggcacactctccggcgcacccaaagtccgcgccatggaaatcatcgaagaagtcgaaccaagcaaacgcggcatctacggcggtgccgtcggcgtatggggtttcaacaacgacatggatttggcaatcgccatccgcaccgccgtagtaaaaaacaacacgctatacgtccaaagcggcgcgggcgtggttgccgactccgatccggcctccgaatggcaggaaacacaaaacaaagcccgagccgtcatacacgccgcgcagatggtgcaggaagggttggataaatga

SEQ ID NO: 3684 - protein, 491 aa, Neisseria meningitidis
MISKQEYQAQAAQGYNRIPLVQELLADLDTPLSLYLKLANRPYTYLLESVVGGERFGRYSFIGLPCSHYLKASGKHVDVYQNGEIVEQHDGNPLPFIEAFHNRFKTPEIPSLPRFTGGLVGYFGYETIYNFEHFAHRLKNTTKADPLGTPDILLMLSQELAVVDNLSGKIYLIVYADPSQPDGYERARERLEDIRTQLRQSCAIPLSLGSKHTEAVSEFGEEPFKACVNKIKDYIFAGDCMQVVPSQRMSMEFTDSSLALYRALRTLNPSPYLFYYDFGDFHIVGSSPEILVRRERDDVIVRPIAGTRLRGKTPAEDLANEQDLLSDAKEIAEHVMLIDLGRNDVGRISKTGEVKVTDKMVIEKYSHVMHIVSNVEGRLKDGMTNMDILAATFPAGTLSGAPKVRAMEIIEEVEPSKRGIYGGAVGVWGFNNDMDLAIAIRTAVVKNNTLYVQSGAGVVADSDPASEWQETQNKARAVIHAAQMVQEGLDK

SEQ ID NO: 3685 - DNA, 1563 bp, Salmonella typhimurium
  CDS (1)..(1563)
atgcaaacaccaaaacccacgctcgaactgttgacctgcgatgccgcctatcgggaaaacccaacggcgctttttcaccaggtctgcggcgatcgcccggcaacgctgctgctggaatccgcggatatcgacagtaaagatgatttaaaaagcctgctgctggtagatagcgcgctgcgcattaccgctttaggtgacactgtcaccattcaggcgttatctgataatggcgcctcgttattgccgctactggataccgccctgcccgctggcgtggagaacgatgtcctgcctgccggtcgcgttctacgcttcccgcccgtcagcccattattagatgaagacgcccgtttatgctctctgtcggtatttgatgcgttccgtctgttacagggagtggtgaacataccgacgcaagagcgggaggctatgtttttcggcggtctgtttgcctacgacctggtcgctggctttgaagcgctgccacaccttgaggctggcaataactgcccggactactgcttttatttagcggaaacgctgatggttatagatcatcagaaaaaaagcacccgtattcaggccagtctgttcaccgccagcgaccgggaaaaacagcgcctcaacgcccgcctggcgtaccttagccaacagttaacccagcctgcgccgccgttgccggtgacgccggtgccggacatgcgctgtgaatgcaatcagagcgatgacgcgttcggcgcggtggtacgccagttgcaaaaagccatccgcgcgggcgagatatttcaggtggtgccgtcgcgccgcttttcactgccctgcccgtcgccgttggctgcctactacgtgctgaaaaagagcaaccccagcccgtatatgttctttatgcaggataatgatttcacgcttttcggcgcgtcgccggaaagctcgctgaaatatgacgcagccagccgtcagattgagatttatcccatcgcgggtacccgtccacgcggtcgccgcgccgatggtacgctggacagagatctcgacagccgtattgagctggacatgcgtaccgaccataaagagctttccgaacatctgatgctggtcgatctggcgcgcaatgacctggcgcgcatctgtacgccgggcagtcgctacgttgccgatctgacaaaagttgaccgctattcatacgtgatgcatctggtttcccgggtggtgggcgaactgcgtcacgatctcgacgcgctgcacgcctatcgcgcctgcatgaacatgggcaccctgagcggcgcgccgaaagtacgcgccatgcagttgattgccgatgcggaaggacagcgccgcggcagctatggcggcgcggtcggttacttcaccgcccacggcgatctggacacctgtattgttatccgttccgcgctggtggagaacggtatcgccaccgtacaggcgggtgccggaattgtgctggactctgttccgcagtctgaagccgatgaaacccgtaataaagcgcgcgccgtattgcgtgctatcgccaccgcgcatcatgcacaggagaccttctga

SEQ ID NO: 3686 - protein, 520 aa, Salmonella typhimurium
MQTPKPTLELLTCDAAYRENPTALFHQVCGDRPATLLLESADIDSKDDLKSLLLVDSALRITALGDTVTIQALSDNGASLLPLLDTALPAGVENDVLPAGRVLRFPPVSPLLDEDARLCSLSVFDAFRLLQGVVNIPTQEREAMFFGGLFAYDLVAGFEALPHLEAGNNCPDYCFYLAETLMVIDHQKKSTRIQASLFTASDREKQRLNARLAYLSQQLTQPAPPLPVTPVPDMRCECNQSDDAFGAVVRQLQKAIRAGEIFQVVPSRRFSLPCPSPLAAYYVLKKSNPSPYMFFMQDNDFTLFGASPESSLKYDAASRQIEIYPIAGTRPRGRRADGTLDRDLDSRIELDMRTDHKELSEHLMLVDLARNDLARICTPGSRYVADLTKVDRYSYVMHLVSRVVGELRHDLDALHAYRACMNMGTLSGAPKVRAMQLIADAEGQRRGSYGGAVGYFTAHGDLDTCIVIRSALVENGIATVQAGAGIVLDSVPQSEADETRNKARAVLRAIATAHHAQETF

SEQ ID NO: 3687 - DNA, 2502 bp, Serratia marcescens
  CDS (280)..(1839)
gaattcacgctgatcgctaaaacattgtgcaaaaagagggttgactttgccttcgcgaaccagttaactagtacacaagttcacggcaacggccgtgtcggatgagagttaacaaagagagtctgcaaatgaacacatacatttctcttcacggttggtggcgtacctccctcttgcgggcggtgtaatcgcgcatagctgtcatctgacaatgcagatttcctggcccgcacctgatgcgggcttttttatggacagaattcactggaaccaccgatgatgaacaccaaaccacaattgacactactgaaggtgcaagccagctaccggggcgatcccaccacccttttccaccagctgtgcggcgcccgtccggccaccctgctgctggagtcggcggaaatcaacgacaaacagaatctgcagagcctgctggtgatcgacagcgcgctgccgattaccgcactgggccacaccgttagcgtgcaggcgctgaccgccaacgggccggcgctgctgcccgtgctggacgaagcgctgccgcccgaggtgcgcaatcaggcacgccctaacggccgcgaactgaccttcccggcgatcgacgcggtgcaggacgaagacgcccgcctgcgttcactgtcggtgttcgacgcgctgcgcacgctgctgacgctggtggactctccggcggacgagcgcgaagccgtgatgctgggcggcctgttcgcctatgatttggtcgccggttttgaaaacctgccggccgtgcgccaggatcaacgctgcccggacttctgcttctatctggcggaaaccctgctggtgctcgatcaccaacgcggctcggcccgtctgcaggccagcgtcttcagtgagcaggcgagtgaagcgcagcgtttgcagcatcgcctggaacagctgcaggctgagttgcaacaacccccgcagccaatcccgcaccaaaagctggaaaacatgcagctgagctgtaaccagagtgacgaagagtacggcgcggtggtcagcgagctgcaggaagcgatccgccagggcgaaatcttccaggtggtgccgtcgcgccgcttttccctgccgtgcccggcgccgctggggccctaccaaaccttaaaagacaacaaccccagcccgtacatgttcttcatgcaggatgatgacttcaccctgttcggcgcttcgccggagagcgcgttgaaatacgacgcgggcaatcgccaaatcgaaatctacccgatcgccggcacccgcccgcgcggccgccgtgccgatgggtcgctggatttggatctcgacagccgcatcgagctggaaatgcgcaccgaccacaaagagctggccgagcacctgatgttggtcgatctggcgcgcaacgatctggcgcgcatctgccaggccggcagccgctacgtggccgacctgaccaaagtggatcgctattcgttcgtcatgcatctggtttcccgggtggtgggcaccctgcgcgccgatctcgacgtgctgcacgcctaccaggcctgcatgaacatgggcaccctcagcggcgcgccgaaagtgcgggcgatgcagctgatcgccgccctccgaagcacgcgccgcggcagctacggcggccgagtgggctacttcaccgcccaccggcatctggatacctgcatcgtcattcgctccgcctacgttgaagacgggcatcgcaccgtgcaggccggcgccggcgtggtgcaggactccatccgcaggcgggaagccgacgagacccgtaataaagcccgtgccgtgctgcgcgccatcgccactgcgcaccatgccaaggaggtgttctgatggccgatatcctgctgctcgacaacgtcgactcctttacctacaacctggtcgatcagctgcgcgccagcggccaccaggtggtgatttaccgtaatcagatcggcgccgaggtgatcatcgagcgtctgcaacatatggaacagccagtgctgatgctgtcgcccggccctggcaccccttccgaagcgggctgtatgccggaactgctgcagcgtctgcgcggccaactgccgatcatcggcatctgcctcggccaccaggcgatcgtcgaagcctatggcggccaggtcggccaggcgggcgagatcctgcacggcaaagcctcggcgatcgctcacgatggcgaaggcatgttcgccggtatggccaatccgctgccagtggcgcgctaccactcgctggtcggcagcaatatcccggccgatctcaccgtcaacgcccgttctggcgaaatggtgatggcggtgcgcgacgaccgccgccgcgtgtgcggcttccagttccacccggaatcgattctgaccacccacggcgcgcgcctgcttgagcagaccctggcctgggcgctggcgaagtaatataaggaacacgacgatgcaacctattcttcagaaactgtaccgcgccgagtcgatgagccagcaggaaagccaacagctg

SEQ ID NO: 3688 - protein, 519 aa, Serratia marcescens
MNTKPQLTLLKVQASYRGDPTTLFHQLCGARPATLLLESAEINDKQNLQSLLVIDSALPITALGHTVSVQALTANGPALLPVLDEALPPEVRNQARPNGRELTFPAIDAVQDEDARLRSLSVFDALRTLLTLVDSPADEREAVMLGGLFAYDLVAGFENLPAVRQDQRCPDFCFYLAETLLVLDHQRGSARLQASVFSEQASEAQRLQHRLEQLQAELQQPPQPIPHQKLENMQLSCNQSDEEYGAVVSELQEAIRQGEIFQVVPSRRFSLPCPAPLGPYQTLKDNNPSPYMFFMQDDDFTLFGASPESALKYDAGNRQIEIYPIAGTRPRGRRADGSLDLDLDSRIELEMRTDHKELAEHLMLVDLARNDLARICQAGSRYVADLTKVDRYSFVMHLVSRVVGTLRADLDVLHAYQACMNMGTLSGAPKVRAMQLIAALRSTRRGSYGGRVGYFTAHRHLDTCIVIRSAYVEDGHRTVQAGAGVVQDSIRRREADETRNKARAVLRAIATAHHAKEVF

SEQ ID NO: 3689 - DNA, 1626 bp, Vibrio parahaemolyticus
  CDS (1)..(1626)
atgcgactatgtactgcaggacgattaaaacagctacaaggaggtcttgtgaacaaggccattgaaattaagaaacttggacaactggaagtattaaaagcttctgttccttacactcaagacccaacccgtctgttccatactatttgtgagaacaaaacggatagcttgcttttagaatcggctgaaattgattctaaacagaatctcaaatcgctgttaatcgtcgattctgcggttcgcatcgtttgttatggacataccgtcagctttcatgctctaacggagaacggcaaaaacctactgacgcatgtgaatcaaaacgtacgtggtgaagtcgcaagccaatttgacggcgaaacactgactttagaattcatccaaccatgcgatacgattgatgaagattctcgtctacgagaagcttcttcttttgatgcgcttcgtttggtacagcacagttttgatctttcttcgcaagacaaacatgccattttccttggtggcctatttgcgtatgacttggtggcgaacttcgaaccattaggagacgcggtagcaacaaaccagtgtccagattacgtcttctatgttgcggaaacattgctggttgtagatcaccaaacagaatcctgccaactgcaagcaacattgttcgttgacggctcgcaaaaagcagcgttagaaagtcgaatcgaagatatccgagctcaatgcacatcgccaaagcgtcttccagacgcaacgcaagtggccaatatcacagctcaaccaagcgttccggatcaagacttctgtcaaatcgtccgtgatctaaaagaattcgtggtaaaaggcgatattttccaagtggttccttctcgtcgattcacattgccttgcccttctccgctagcagcttacaaagagctaaagcaaagcaacccaagcccttacatgttctacatgcaagatgagcttttcactttgtttggtgcgtctccagaaagtgccttgaagtatgaaaccgacaccaaccaaatagaaatctacccaattgcggggactcgccgtcgcggtaaacgtccaaatggcgaaatcgattttgatttagatagccgtattgaacttgaactgcgtagcgacaaaaaagagaacgctgaacatatgatgttggtagacctagctcgtaatgatgtagcgcgcatctcgcaagctggtactcgtcatgttgccgatctccttaaagtcgaccgctatagccatgttatgcacttggtgtctcgcgtggttggccagttgcgcgatgaccttgatgctttgcacgcttaccaagcttgtatgaacatgggcacgttaactggggcgccaaaaattcgtgcaatgcaactgattcgcgatgttgaaggtgctcgtcgtggcagctatggcggagcggtaggctatctgaccggagaaggcacgctcgacacttgtatcgtgattcgctcggcttacgtggaaaacggcattgctcaagtacaagcaggtgcaggcgtggtattcgattctgaccctcaagcggaagccgatgaaacacgcggaaaagctcaagcggttatctctgctattcaagcagcgcattctcaacctgctaacaaggagtag

SEQ ID NO: 3690 - protein, 541 aa, Vibrio parahaemolyticus
MRLCTAGRLKQLQGGLVNKAIEIKKLGQLEVLKASVPYTQDPTRLFHTICENKTDSLLLESAEIDSKQNLKSLLIVDSAVRIVCYGHTVSFHALTENGKNLLTHVNQNVRGEVASQFDGETLTLEFIQPCDTIDEDSRLREASSFDALRLVQHSFDLSSQDKHAIFLGGLFAYDLVANFEPLGDAVATNQCPDYVFYVAETLLVVDHQTESCQLQATLFVDGSQKAALESRIEDIRAQCTSPKRLPDATQVANITAQPSVPDQDFCQIVRDLKEFVVKGDIFQVVPSRRFTLPCPSPLAAYKELKQSNPSPYMFYMQDELFTLFGASPESALKYETDTNQIEIYPIAGTRRRGKRPNGEIDFDLDSRIELELRSDKKENAEHMMLVDLARNDVARISQAGTRHVADLLKVDRYSHVMHLVSRVVGQLRDDLDALHAYQACMNMGTLTGAPKIRAMQLIRDVEGARRGSYGGAVGYLTGEGTLDTCIVIRSAYVENGIAQVQAGAGVVFDSDPQAEADETRGKAQAVISAIQAAHSQPANKE

SEQ ID NO: 3691 - DNA, 24 bp, Artificial sequence
  Primer sequence
atgcaaacacaaaaaccgactctc

SEQ ID NO: 3692 - DNA, 25 bp, Artificial sequence
  Primer sequence
ttagaaagtctcctgtgcatgatgc

SEQ ID NO: 3693 - DNA, 785 bp, Escherichia coli K12
  CDS (86)..(781)
gaattcttgtcaacaattaactctgagcgcgcggcaacgctattcgactggtatcagacggatgaaatccctataattgccgcgtatggcgcttcgtcgcccccttcctaacatccaggttaatcaggtcgctaaatatatgactgatcagtctcatcagtgcgtcattatcggtatcgctggcgcatcggcttccggcaagagtcttattgccagtaccctttatcgtgaattgcgtgagcaagtcggtgatgaacacatcggcgtaattcccgaagactgctattacaaagatcaaagccatctgtcgatggaagaacgcgttaagaccaactacgaccatcccagcgcgatggatcacagtctgctgcttgagcatttacaagcgttgaaacgcggctcggcaattgacctgccggtttacagctatgttgaacatacgcgtatgaaagaaacggtgacggttgagccgaagaaggtcatcattctcgaaggcattttgttgctgacggatgcgcgtttgcgtgacgaacttaacttctccattttcgttgataccccgctggatatctgcctgatgcgccgcatcaagcgtgacgttaacgagcgtgggcgttcaatggattcagtgatggcgcaatatcaaaaaaccgtgcgcccgatgttcctgcaattcattgagccttctaaacaatatgcggacattatcgtgccgcgcggcgggaaaaaccgcatcgcgatcgatatattgaaagcgaaaataagtcagttctttgaataagctt

SEQ ID NO: 3694 - protein, 231 aa, Escherichia coli K12
MALRRPLPNIQVNQVAKYMTDQSHQCVIIGIAGASASGKSLIASTLYRELREQVGDEHIGVIPEDCYYKDQSHLSMEERVKTNYDHPSAMDHSLLLEHLQALKRGSAIDLPVYSYVEHTRMKETVTVEPKKVIILEGILLLTDARLRDELNFSIFVDTPLDICLMRRIKRDVNERGRSMDSVMAQYQKTVRPMFLQFIEPSKQYADIIVPRGGKNRIAIDILKAKISQFFE

SEQ ID NO: 3695 - DNA, 1005 bp, Nostoc sp. PCC 7120
  CDS (1)..(1005)
atgacaactaagccggaacgcgtggtactgattggagtagccggagactccgggtgcggtaaatctacgtttttgcgtcgtctgatagatttatttggtgaagagtttatgacggtcatctgtttagatgactaccattctttggatcgtaaacaacgtaaagaaactggaatcaccgcacttgaccccagggccaacaattttgacctgatgtatgagcagatcaaagcgctcaaagaagggcaaacgattaataagccgatttataaccacgaaaccggcctaattgatccacctgagatagtaaagccaaatcacattgtagtggttgagggtttacaccctctatatgatgaacgggtgagatcgctcctcgatttcagcgtctactttgacatcagcgatgaagtcaaaattgcttggaaaatccagcgtgatatggcagaaagaggtcatcgctacgaagacgttctagcggccatcaattctcgtaagccagattttcaaaaatatatcgaacctcaaagagaattcgccgatgtggtgctacaagtactacccaccaacttaatcaaggatgatacagaacgtaaagtcctacgggtgcggatgttacaacgggaaggaaaagaaggttttgaacccgcttacctgtttgatgaaggttcaacaattaactggactccttgcggacgtaagcttacctgttcttacccaggaatgcagttatactacggttccgatgtttactacggtcgctatgtctcagttctagaggtggatggtcaatttgacaacctcgaagaagtaatctacatcgaaacccacctcagcaatacatctactaagtatcaaggtgagttaactcagctgttactccaacaccgtgaatatcccggttcaaataacggaactggttttttccaagtattaacaggtttgaaaatgcgtgctgcttacgagcgcttgacaacaaaggaagccaaactagcagttcaggtttaa

SEQ ID NO: 3696 - protein, 334 aa, Nostoc sp. PCC 7120
MTTKPERVVLIGVAGDSGCGKSTFLRRLIDLFGEEFMTVICLDDYHSLDRKQRKETGITALDPRANNFDLMYEQIKALKEGQTINKPIYNHETGLIDPPEIVKPNHIVVVEGLHPLYDERVRSLLDFSVYFDISDEVKIAWKIQRDMAERGHRYEDVLAAINSRKPDFQKYIEPQREFADVVLQVLPTNLIKDDTERKVLRVRMLQREGKEGFEPAYLFDEGSTINWTPCGRKLTCSYPGMQLYYGSDVYYGRYVSVLEVDGQFDNLEEVIYIETHLSNTSTKYQGELTQLLLQHREYPGSNNGTGFFQVLTGLKMRAAYERLTTKEAKLAVQV

SEQ ID NO: 3697 - DNA, 642 bp, Salmonella enterica subsp. enterica serovar Typhi
  CDS (1)..(642)
atgactgatcagtctcatcagtgcgtcattatcggtatcgctggcgcatcggcttccggcaagagtcttattgccagtaccctttaccgcgaattgcgtgaacaagtgggtgacgaacatattggcgttattcccgaagacagttattacaaagatcaaagccatctgtcgatggaagaacgcgtaaaaactaactatgaccatccgaatgcgatggatcacagcctgctatttcagcatcttcaggcgctcaagcgcggttcggcgattgaattaccggtatacagttatgttgagcatacccgtatgcaggaaacggttcgcgtagaaccgaagaaagtgattattcttgaaggtattctgttactgaccgacgcgcgtttgcgtgaagagatgaacttctctatttttgtcgatacgccgctggatatctgtttgatgcgccgtatcaaacgcgatgtgaacgagcgtggtcgctcaatggattcggtgatggcgcaatatcagaaaacggtgcgtccgatgttcctgcaatttattgagccttccaaacaatatgcggatattatcgtgccgcgcggcggtaaaaaccgcatcgctattgatattctgaaagcgaaaatcagccagttctttgaataa

SEQ ID NO: 3698 - protein, 213 aa, Salmonella enterica subsp. enterica serovar Typhi
MTDQSHQCVIIGIAGASASGKSLIASTLYRELREQVGDEHIGVIPEDSYYKDQSHLSMEERVKTNYDHPNAMDHSLLFQHLQALKRGSAIELPVYSYVEHTRMQETVRVEPKKVIILEGILLLTDARLREEMNFSIFVDTPLDICLMRRIKRDVNERGRSMDSVMAQYQKTVRPMFLQFIEPSKQYADIIVPRGGKNRIAIDILKAKISQFFE

SEQ ID NO: 3699 - DNA, 942 bp, Nostoc sp. PCC 7120
  CDS (1)..(942)
atgatgagccgtccaataattcttggtattgttggtgatagtgctgctggcaaaactacactaactaggggcattgctcaggtactggggccagaaaatgtcacactcatctgcacagatgattatcatcggtacgatcgccaacaacgtgcagaaataggaattaccgctctccaccccgattgtaaccatttggatattatgcagcagcatctatcgctgctacgcacaggacaaccaattcttaaaccagtttatagtcacaaaaccggaagttttgagccgccccaatatataaaacccaacaaattcgttattatcgagggattacttggttattctactcgcgccgcccgtgactgttacgatgtgaaagtttacctcgctcctccagagaacctccgtgctaaatggaaagttaaacgcgacacgcaaaaacgcggctacactcccgaacaagttttagcagaactagagaagcgcgaaccagattcagaacaatttattcgtccccaaagacaatggtctgatattgttgtcagtttctatccacctcatgaggatggagatgaaaccaacggacatctcaacgtgcgtttagtattgcgtcctactattccccacccagactttacttccattattaatttgactaatggtagttctgtgtcagctattcgcctgggattggacagagatatgagtaaaccagttgatgtgttagaagttgacggtcacgccaccttagaacaggtaaacaaattagagcatattctctgttctgatatgccttacttgagtagtgtatgcgatcgcgaaagtaacccagaactcggcaagattgctgggacaactggcgaaacactacaaagttacccccttgccctgactcagttaatcatcacctaccatatgctcaaggcaacgcaaatttatcaataa

SEQ ID NO: 3700 - protein, 313 aa, Nostoc sp. PCC 7120
MMSRPIILGIVGDSAAGKTTLTRGIAQVLGPENVTLICTDDYHRYDRQQRAEIGITALHPDCNHLDIMQQHLSLLRTGQPILKPVYSHKTGSFEPPQYIKPNKFVIIEGLLGYSTRAARDCYDVKVYLAPPENLRAKWKVKRDTQKRGYTPEQVLAELEKREPDSEQFIRPQRQWSDIVVSFYPPHEDGDETNGHLNVRLVLRPTIPHPDFTSIINLTNGSSVSAIRLGLDRDMSKPVDVLEVDGHATLEQVNKLEHILCSDMPYLSSVCDRESNPELGKIAGTTGETLQSYPLALTQLIITYHMLKATQIYQ

SEQ ID NO: 3701 - DNA, 642 bp, Yersinia pestis
  CDS (1)..(642)
atgactgacaaagcacatcagtgcgtcattattgggatagcgggtgcttctgcctccggaaaaagtcttatcgccagcacgttgtatcgcgaattacgtgaacaagtaggcgaccaacatattggtgttattcctgaagatggttattacaaagaccagagccatctgtcaatggaagagcgggtcaaaacgaactacgaccacccaagcgccatggaccacaatttattgttggaacatttgcaggcgttgaaggcgggtaagcccgttgaattgcctctgtacagctatactgagcacacacgtaaaaaagaaacggttcatttagaacctaaaaaagtgatcattcttgaaggtatactgctgctgacggatatccgcttacggcaggaaatgaacttctcaatcttcgttgataccccattggatatctgcctgatgcgcagaatgaagcgtgatgtcaatgagcgtggccgttcgatggactctgttatggcccaatatcagaaaacagtccgtcctatgtttctgcaatttatagaaccatctaagcaatatgctgacattatcgttcctcgtggcggtaaaaatagaattgcgatcgatattctaaaagcgaaaatcagtcagttctttgagtaa

SEQ ID NO: 3702 - protein, 213 aa, Yersinia pestis
MTDKAHQCVIIGIAGASASGKSLIASTLYRELREQVGDQHIGVIPEDGYYKDQSHLSMEERVKTNYDHPSAMDHNLLLEHLQALKAGKPVELPLYSYTEHTRKKETVHLEPKKVIILEGILLLTDIRLRQEMNFSIFVDTPLDICLMRRMKRDVNERGRSMDSVMAQYQKTVRPMFLQFIEPSKQYADIIVPRGGKNRIAIDILKAKISQFFE

SEQ ID NO: 3703 - DNA, 1668 bp, Thermotoga maritima
  CDS (1)..(1668)
atgcgaaagatcacacttcgttcaaaactggacgggagagagatcgttttcgaggaaaatcaaaatctcttcgatatagccagagagtaccagaagtactacaggtacaaaatactggctgcgagggtgaacaacaggataatagaactcttcagaacacccgatagaagcggagaactcgaatttttagacctcacagatcccgacggactcagaatataccagagaggactcgtcttcctcgcaagtctcgccgtgagaaaactgaattcggaatggcgattgaaggtccttcactcactcgggaaggggatatactgcgaaatctataagggaaatgaattaatcgttcccgatcagaatcaggtgttcgccataaaagataagatgagagaactcgtcgagaaagatctgcctattgagaagagaacgttctacaaagacgaagcaagggagatattaatgaaggaaggacttgtgaaaacggtcaacctcttcaagtacagaaagaagagaaccgtgaagctttaccactgcgatggtttttgggcgtacttctacggatatcttccaccgagcaccggcaggattgacgttttcgatgttcagccctacaatcaggggctcgttcttgtccatccggatccaaaaacaagagagcttcccgtcatccacatgcccaaactctcccaggtgttcctcgaatacgcccgatggctgaacgttctggaactcgagtacgtatccgatctcaacgatatcatagcccgtggggaaaggcacgtggctgaccttatgcttctttccgaagcacttcatgaaaagaagatctcagacatagcggatgaaatcgcaaaagacaaaagaaaacggctcattctgattgcgggtccttcctcttcgggaaagaccaccttcgccaagagactctcactccagctcagagtgaacggtctaaaaccggttgccatttcccttgacgactactttgtggacagagaaaaaacaccgcgtgatgaaaacggaaactacgatttcgactcgatagaggccctcgacatagaactcttcaacaggaaccttcaggatcttttggctggaaaagaggtggtcctgccgaagttcaacttcaagaccggaaagagaatgagaggtcccacgctcaaattggagaaggacaacatcatcatcgtcgaaggaatacacggtctgaacgaacgtctgacggcctcaataccgaaagagcaaaagttcaagatatacgtgagtgcattgactcagctgaacatagacgatcacaacagagtcacaacaacggacacgcggctcatcagaagaatcgtgagggactacaagttccggggacacaccgcgtacgatacattgaagatgtggccaaacgtcagaaagggtgaagaaagaaacatcttcccgttccaggaagaggccgatgtgatgttcaactcggccctggtttacgaaataccagtgctcaggatattcgctgaaccgcttctcgttcaagttccggaagatgttccagagtactcggaagcgctgagacttctgaaacttctggacttcttccttccgatcacgaacatagaagatattcccgataaatcgatcctcagagagttcataggaaggagtatcttcaaatattga

SEQ ID NO: 3704 - protein, 555 aa, Thermotoga maritima
MRKITLRSKLDGREIVFEENQNLFDIAREYQKYYRYKILAARVNNRIIELFRTPDRSGELEFLDLTDPDGLRIYQRGLVFLASLAVRKLNSEWRLKVLHSLGKGIYCEIYKGNELIVPDQNQVFAIKDKMRELVEKDLPIEKRTFYKDEAREILMKEGLVKTVNLFKYRKKRTVKLYHCDGFWAYFYGYLPPSTGRIDVFDVQPYNQGLVLVHPDPKTRELPVIHMPKLSQVFLEYARWLNVLELEYVSDLNDIIARGERHVADLMLLSEALHEKKISDIADEIAKDKRKRLILIAGPSSSGKTTFAKRLSLQLRVNGLKPVAISLDDYFVDREKTPRDENGNYDFDSIEALDIELFNRNLQDLLAGKEVVLPKFNFKTGKRMRGPTLKLEKDNIIIVEGIHGLNERLTASIPKEQKFKIYVSALTQLNIDDHNRVTTTDTRLIRRIVRDYKFRGHTAYDTLKMWPNVRKGEERNIFPFQEEADVMFNSALVYEIPVLRIFAEPLLVQVPEDVPEYSEALRLLKLLDFFLPITNIEDIPDKSILREFIGRSIFKY

SEQ ID NO: 3705 - DNA, 2056 bp, Arabidopsis thaliana (mouse-ear cress)
  CDS (1)..(2025)
atgggtcaagacagcaatggaattgagtttcatcagaagagacatggtctcttgaaggatcaagtccaattggttaagagaagagactctattcggtatgaaattgtttctattcaagatcggttgtcatttgagaagggcttctttgcggttatccgtgcttgccaattgctttctcagaagaatgatgggatcatattggttggtgttgctggaccttctggtgctggaaagactgtattcactgagaagatactcaattttctgccaagtgttgctgtcatttcaatggacaattataatgattctagtcggattgttgatgggaactttgatgatccacggttaacggactatgacacattgctcaagaatcttgaagacttaaaggaaggaaagcaggttgaggttcctatttatgattttaagtccagctctcgtgttggatacaggacccttgatgtcccaccttctcggattgtgattattgaaggaatctatgctttgagtgaaaaactgcgacctttattggatcttcgtgtgtctgttactggtggagttcattttgaccttgttaaacgggttctccgtgatatacaacgtgcaggtcaacagccagaggagattatccatcagatatctgaaacagtatacccgatgtacaaagctttcattgagccagatctccagactgctcaaatcaaaatcattaataaattcaaccccttcactggttttcagagcccgacttacatcttgaagtcaagaaaggaggtatctgttgatcagatcaaggcggtcctttctgatggacatacagagactaaggaggagacctatgatatatatcttcttcctccgggtgaagatccagagtcgtgccaatcatatttgaggatgcggaataaagatggaaagtacagccttatgtttgaggaatgggttacggatactccttttgtcatatccccaaggattacatttgaagtcagtgttcgcctacttggtgggctcatggcattgggatacacaatagcaactatacttaaaaggaacagccatgtatttgctactgataaggtgtttgtgaaaatcgattggcttgagcaactgaatcgtcactacatgcaggtgcaaggtaaagatcggcaacttgtacagagtactgcagagcagctaggattggaaggatcgttcattccacgcacctatattgaacagatccaactcgaaaaactaataaatgaagtaatggccctaccagatgatctaaagaacaagcttagcttagatgaggatttggtgtctagttcaagccctaaggaagcactcttacgagcgtctgcagatagagtagccatgagaaataagaacctcaaaagaggcatgtcacactcatattcaacccaaagagataagaatctgtccaagcttgctggttattcttcaagcgataggaggtacgaagaaagaaatcacgactcgccagcgaacgaggggtttatgactctgctttcagaacaaatatcatctctcaacgagagaatggatgagttcacaagtcgaattgaagagctcaattcaaagttgagctgcaataaaaactctccaacacagcagagcttgtcaatccaaaccgaagtctgcaatgggtcagctcctacttcgtatttcatttctggtctggacaatggctgcttgacaaattccataatgccccattcatcatcctcctcccaactagccaaggattcacccttaatggaagagatatcgaccatatcacgaggacagcgtcaagttatgcatcagttggataatttgtgcaatctgatgagggaaagctcagcagaaaggtcacgcctagcaagaacagggagcagcaatagcggtaacagaggcagatcaagcaaaagctccttcttgtccaatgtggaatctaacaagctccctcttgtgttaaccgtggctatttgcagcataggtattatagtgatcaagagctacattaacaagcggcaataacatctattagccactatgggttttctcttct

SEQ ID NO: 3706 - protein, 674 aa, Arabidopsis thaliana (mouse-ear cress)
MGQDSNGIEFHQKRHGLLKDQVQLVKRRDSIRYEIVSIQDRLSFEKGFFAVIRACQLLSQKNDGIILVGVAGPSGAGKTVFTEKILNFLPSVAVISMDNYNDSSRIVDGNFDDPRLTDYDTLLKNLEDLKEGKQVEVPIYDFKSSSRVGYRTLDVPPSRIVIIEGIYALSEKLRPLLDLRVSVTGGVHFDLVKRVLRDIQRAGQQPEEIIHQISETVYPMYKAFIEPDLQTAQIKIINKFNPFTGFQSPTYILKSRKEVSVDQIKAVLSDGHTETKEETYDIYLLPPGEDPESCQSYLRMRNKDGKYSLMFEEWVTDTPFVISPRITFEVSVRLLGGLMALGYTIATILKRNSHVFATDKVFVKIDWLEQLNRHYMQVQGKDRQLVQSTAEQLGLEGSFIPRTYIEQIQLEKLINEVMALPDDLKNKLSLDEDLVSSSSPKEALLRASADRVAMRNKNLKRGMSHSYSTQRDKNLSKLAGYSSSDRRYEERNHDSPANEGFMTLLSEQISSLNERMDEFTSRIEELNSKLSCNKNSPTQQSLSIQTEVCNGSAPTSYFISGLDNGCLTNSIMPHSSSSSQLAKDSPLMEEISTISRGQRQVMHQLDNLCNLMRESSAERSRLARTGSSNSGNRGRSSKSSFLSNVESNKLPLVLTVAICSIGIIVIKSYINKRQ

SEQ ID NO: 3707 - DNA, 624 bp, Staphylococcus aureus
  CDS (1)..(624)
atgaaagctactacaatcattggcatagctggtggatctggctcaggaaaaacaactgtaactaacgaaattatgaaaaacttagaaggtcatagtgtcgctttacttgctcaagattactattataaagatcaaaagcacttgactttcgacgagcgcctagaaaccaattatgaccatccatttgcattcgataatgatttattaattgaaaatcttaaagacttgaaaaatggtaaagcagtagaagtaccgacatatgattatgctagtcatacaagaagtgacattaccattgattttaaacctaaagatgttattatcgtagaaggtattttcgctttagaaaataaggtattacgtgatatgatggatgttaaaatatatgttgatacagatgcagacttgagaatattacgccgtttaacacgagatactaaagagcgtgggcgttcaatggactctgttatcaatcaatatttaagtgttgttagacctatgcatgaccaatttattgaaccgactaagaaatatgctgatataattattcctgaaggtgggagcaataaagttgcaatagatattatgacaacaaaaattcagtctttagttagcaagcaatag

SEQ ID NO: 3708 - protein, 207 aa, Staphylococcus aureus
MKATTIIGIAGGSGSGKTTVTNEIMKNLEGHSVALLAQDYYYKDQKHLTFDERLETNYDHPFAFDNDLLIENLKDLKNGKAVEVPTYDYASHTRSDITIDFKPKDVIIVEGIFALENKVLRDMMDVKIYVDTDADLRILRRLTRDTKERGRSMDSVINQYLSVVRPMHDQFIEPTKKYADIIIPEGGSNKVAIDIMTTKIQSLVSKQ

SEQ ID NO: 3709 - DNA, 639 bp, Streptococcus pneumoniae
  CDS (1)..(639)
atgcaaaatagaccaatcattattggagtgacaggtggttctggtggtggtaaaaccagtgtttcaagagccattttatcgcattttcctgatgaaaagatttccatgattgagcatgattcatactacaaggatcagtctcatttgacctttgaagagcgtgtcaaaaccaactatgaccatccttttgcctttgatacagacttgatgatcgagcagattaaggaattgttggcagggcgtccggtggacatcccgacctacgactatacagagcatacacggagtagcaagacctatcgtcaggaacctcaagatgtctttatcgttgagggtattttggtcttggaggacaagcgtctgcgcgatttgatggatatcaagatttttgtggatacggatgacgatgtgcgcattattcgtcgtatcaagcgtgatatggaggagcgtggccgtagccttgatagcgttattaaccagtacttaggtgtggtcaaaccaatgtaccaccagtttatcgagtcaactaagcgttatgctgatatcgtcattcctgaaggggttagcaataccgtggctatcgacctgttgacgaccaagattgcaaagattttggaagaagctcgaaacagcaaataa

SEQ ID NO: 3710 - protein, 212 aa, Streptococcus pneumoniae
MQNRPIIIGVTGGSGGGKTSVSRAILSHFPDEKISMIEHDSYYKDQSHLTFEERVKTNYDHPFAFDTDLMIEQIKELLAGRPVDIPTYDYTEHTRSSKTYRQEPQDVFIVEGILVLEDKRLRDLMDIKIFVDTDDDVRIIRRIKRDMEERGRSLDSVINQYLGVVKPMYHQFIESTKRYADIVIPEGVSNTVAIDLLTTKIAKILEEARNSK

SEQ ID NO: 3711 - DNA, 642 bp, Mycoplasma genitalium
  CDS (1)..(642): transl_table=4
atggatgaaaaagggattttagttgcaattagtggtggtagttgctcaggaaaaactactgttgctgaaatgatttatcaacttttaagtaaaaaattaaaagttgcgatcatctgtcaagataactattacaagtcctataaaaataagccattattaaaaagaaaaacaataaactttgatcatcctgatgcttttgattgaaaacttttaagatcacacattgaagatcttctaaacggtagtatagttaatgttcctttatatgactacattaactataccagagctaaaaaaacagcaaaaattggtccaattgatgttgttattctagagggtttaatgccatgatttgatgaaaaattatcaagactttctaagctaaaaatatttatagaaacaaatggggaagaacgtttaattagaagaatagaaagagactgacaaaggggaagaaatattgattctattattaaacagtgacgcgaaatagtagcaccaatgtatgaaatatttgtagaaaaaatgaagcgaaatgctgatttaattctgccttgaagtcaacgcagagaagtaagtacaagtgtattggatgtcgcaattgaacacttatttcacaaaactgttgaaaaaaataattag

SEQ ID NO: 3712 - protein, 213 aa, Mycoplasma genitalium
MDEKGILVAISGGSCSGKTTVAEMIYQLLSKKLKVAIICQDNYYKSYKNKPLLKRKTINFDHPDAFDWKLLRSHIEDLLNGSIVNVPLYDYINYTRAKKTAKIGPIDVVILEGLMPWFDEKLSRLSKLKIFIETNGEERLIRRIERDWQRGRNIDSIIKQWREIVAPMYEIFVEKMKRNADLILPWSQRREVSTSVLDVAIEHLFHKTVEKNN

SEQ ID NO: 3713 - DNA, 636 bp, Bacillus halodurans
  CDS (1)..(636)
atggggaaaagaccaatcatcatcggcgtagccggagggactggctctggaaaaacaaccgtagcgaaggaaatattttatcaatttaatgaaaaatcgatcgtattaattgagcaagatgcatattataaagatcaatcacagttaagcttagaagaacgcttgcagacgaactatgaccatcctcttgcatttgacaatgatttgttaattgaacatctgcatagcttattaaacggtcaagcgattgaaaagccagtatatgactacaagctgcatacacgttcaaatgaagtgatcctagtggaaccgaaagacgtgatcattcttgaggggatcttactacttgaagatgaacggttacgcgagctaatggacattaaactgtttgttgatacagatgcagatatccgcatcattcgccgaatggtgcgcgatattcgtgagcgtgggcgaacgttggaatcggtcatcgaacagtatacaaaggtcgtccggccaatgcatatgcaatttatcgaaccgacaaagcgttatgcagatgtaatcatccctgaagggggacaaaatcgggtagccattgatttaatggtgacaaaaattcgcgcaattattgaagaaaaagccgttttataa

SEQ ID NO: 3714 - protein, 211 aa, Bacillus halodurans
MGKRPIIIGVAGGTGSGKTTVAKEIFYQFNEKSIVLIEQDAYYKDQSQLSLEERLQTNYDHPLAFDNDLLIEHLHSLLNGQAIEKPVYDYKLHTRSNEVILVEPKDVIILEGILLLEDERLRELMDIKLFVDTDADIRIIRRMVRDIRERGRTLESVIEQYTKVVRPMHMQFIEPTKRYADVIIPEGGQNRVAIDLMVTKIRAIIEEKAVL

SEQ ID NO: 3715 - DNA, 1668 bp, Treponema pallidum subsp. pallidum (syphilis spirochete)
  CDS (1)..(1668)
atgggagattggatgggcacgtttgtggtgtcactgcctggtgggcgccgagaaaagttttccgagtgcgttccagcgcgcgtcctctttgagcgattttttggcacagaatcgtctgtgtatggtttgatgtgtaacggtacaccggtactgccatgccaggtgataggcgccgacgcggtagttgagccggttcgtgaggatacggtgttaggggccgctctgtaccgtaggactgcgcgtttgctgtttgccacagcgtttcactcggtgtatccgcatgtgcgattgtttgcagggtatcgagtgcaggggggatattgctaccgtaccgagggtgcgtgcgcagatgacctggatgtttcgttggtagtgcgtaggatgaaggcgcttgtggcgcaggatgcgcccattcacatgcagtatatgacgcgtcgggaagccttgaatctgtttacgcagtggaattttccatattcacatcattatattctgggttcgtaccggactgtgtttttaacgcaggtactggacggtttttctgcgttgttttttcagccgctcatggcttctgtagggaggctcaccgtctttgaggtgcggatgtgtgctgagggttgtctgttgcgtttccctgaaggtggacaacgccacatcatttctcagcacaacgcgtcgccacagtttgtggtaatgtatcggaggcatcggcagcaagaagaacagacaaaaatatgctcagtaggacagttgaatgcgtgcattcagtctggtgatgttgcaacttgtgttgacatggctgaggcggcgcacaatcggcagattgagtgttgtgccacagaaattgcacgaagggacagcgtgcgcgtggtgtcgatagcaggaccgtcaggttctggaaagacaacgattgcaaaaaaactttcagtgcagctgcaagtacttggttacgatccgcatgtgattagtcttgatgattactatgtggggattgagcgcacgccgtgtgacgcggaaggtaatcctgattttgagtgcgtcgaagccttagatcttcccctgattaataagttgtttttggatctcttgcaggggaagcgtgttgcacttccttcgtataattttaaaacagggaaacgagagtaccgggggcgggaagtacagtttggtgagcgttcgctgcttattattgagggcatacatggcttgaacgatcggctcatctcgttgatgaaccggcgagttgtatttcggttgtacgtctctgtgttcatgcatttgtgcttggatgaacagcacagggtttcggcgtctgatggaaggttgttgcggagggttgtgcgcgacgcgcagtttcgcggtatttctgtcgaaaaaacacttgaaatgtggcaacgggtgcgtgcaggtgaagagcgctatattttcccttttcagcaccgtgcagacatgatgtttaacagtgcattggtttatgagtttgcagtgttaaagcgccgtgcacaggaagttttaagcacggtttcttctgcttgtaccacgtatagggaagtccgcaatttgcgtgccttgttggagcagttttgttcgttgtctgatgtgcatgttccgggtcagtcgatattaagagaatttattgggcaaagcgatttttgctattgtctgtag

SEQ ID NO: 3716 - protein, 555 aa, Treponema pallidum subsp. pallidum (syphilis spirochete)
MGDWMGTFVVSLPGGRREKFSECVPARVLFERFFGTESSVYGLMCNGTPVLPCQVIGADAVVEPVREDTVLGAALYRRTARLLFATAFHSVYPHVRLFAGYRVQGGYCYRTEGACADDLDVSLVVRRMKALVAQDAPIHMQYMTRREALNLFTQWNFPYSHHYILGSYRTVFLTQVLDGFSALFFQPLMASVGRLTVFEVRMCAEGCLLRFPEGGQRHIISQHNASPQFVVMYRRHRQQEEQTKICSVGQLNACIQSGDVATCVDMAEAAHNRQIECCATEIARRDSVRVVSIAGPSGSGKTTIAKKLSVQLQVLGYDPHVISLDDYYVGIERTPCDAEGNPDFECVEALDLPLINKLFLDLLQGKRVALPSYNFKTGKREYRGREVQFGERSLLIIEGIHGLNDRLISLMNRRVVFRLYVSVFMHLCLDEQHRVSASDGRLLRRVVRDAQFRGISVEKTLEMWQRVRAGEERYIFPFQHRADMMFNSALVYEFAVLKRRAQEVLSTVSSACTTYREVRNLRALLEQFCSLSDVHVPGQSILREFIGQSDFCYCL

SEQ ID NO: 3717 - DNA, 669 bp, Chlamydophila pneumoniae, Chlamydia pneumoniae
  CDS (1)..(669)
atgttgatgatgcttatgatgattattggaattacaggaggttctggagctgggaaaaccaccctaacccaaaacattaaagaaattttcggtgaggatgtgagtgttatctgccaagataattattacaaagatagatctcattatactcctgaagaacgtgccaatttaatttgggatcatccggacgcctttgataatgacttattaatttcagacataaaacgtctaaaaaataatgagattgtccaagccccagtttttgattttgttttaggtaatcgatctaaaacggagatagaaacgatctatccatctaaagttattcttgttgaaggtattctggtctttgaaaatcaagaacttagagatcttatggatattaggatctttgtagacaccgatgctgatgaaaggatactacgccgtatggttcgagatgttcaagaacaaggagatagcgtggactgcatcatgtctcgttatctttctatggtaaagcctatgcatgagaaatttatagagccgactcggaaatatgctgatatcattgtacatggaaattaccgacaaaacgtagtaacaaatattttgtcacagaaaattaaaaatcatttagagaatgccctggaaagcgatgagacgtattatatggtcaactctaagtaa

SEQ ID NO: 3718 - protein, 222 aa, Chlamydophila pneumoniae, Chlamydia pneumoniae
MLMMLMMIIGITGGSGAGKTTLTQNIKEIFGEDVSVICQDNYYKDRSHYTPEERANLIWDHPDAFDNDLLISDIKRLKNNEIVQAPVFDFVLGNRSKTEIETIYPSKVILVEGILVFENQELRDLMDIRIFVDTDADERILRRMVRDVQEQGDSVDCIMSRYLSMVKPMHEKFIEPTRKYADIIVHGNYRQNVVTNILSQKIKNHLENALESDETYYMVNSK

SEQ ID NO: 3719 - DNA, 621 bp, Lactococcus lactis subsp. lactis
  CDS (1)..(621)
atgaagaaaacgttgattattggtgtcactggtgggtcagcaagtggaaagacaagtgtttcacatgctattttagaaactttttcaaatgaacgaattgcaatgattgaacatgatagttactataaagatcaatcgcatttgacttttgaagaacggacaaaaacgaactacgaccatccattagcctttgatacagattatttaattgctcaattaaaagagcttcagtatggacgagcggttgatattccgatttatgattatgcaaaacatacgcgttcacaagaaacttaccgtcaagaacctgttgatgttttaatcgttgagggaattttggttttagaagatgaacgtttgcgtgatttaatggatatcaaaatatttgttgatacagatgacgatgtgcggattatccgtcgaattcgcagagatattgaagaaagaggaagaactcttgattcagtaattacacagtatttagatgctgttaagccaatgtatcatcaatttattgaaccaacaaagagatatgcagatgtgattattcctgaaggggtctcaaatactgttggggttgatattattacgacgaaaatcgctagcattttaaacgactaa

SEQ ID NO: 3720 - protein, 206 aa, Lactococcus lactis subsp. lactis
MKKTLIIGVTGGSASGKTSVSHAILETFSNERIAMIEHDSYYKDQSHLTFEERTKTNYDHPLAFDTDYLIAQLKELQYGRAVDIPIYDYAKHTRSQETYRQEPVDVLIVEGILVLEDERLRDLMDIKIFVDTDDDVRIIRRIRRDIEERGRTLDSVITQYLDAVKPMYHQFIEPTKRYADVIIPEGVSNTVGVDIITTKIASILND

SEQ ID NO: 3721 - DNA, 633 bp, Deinococcus radiodurans
  CDS (1)..(633)
atgagcggtcccggaacacccttcgtcatcggcgtggcgggcggctcggggtcgggcaagactaccgtgacccgccgggtcatcgagacggtgggccgcgagggggtggcggtcctcaatcaggacaactactaccgcgaccagtccgacatccccttcgagtcgcggctgcacaccaactacgaccaccccgccgctttcgactgggcgctgctgcgcgagcagctcgacgcgctgctggccggggtgccgatcgagatgcccgagtacgacttcacccagcacacccgcgccgcccacaccacccgcgtgctgccgggacgcgtggtggtgctcgaaggcttttttgccctctacgacgaggaactgcgctcgcgcatgggcctcaaggtcttcgtggacgccgacgccgacgtgcgcttcatccgtcgcctgctgcgcgatacccaggagcgcggacgcacgcccgaaagcgtcatcgagcagtacctcggcttcgtgcgccccatgcacctgagcttcgtggagccgaccaagcgctacgccgacgtgattattccccacggcggcatgaacgaaccggcgctcgacatgctcgccgcccgcattcgggtgatggctcagcgggattag

SEQ ID NO: 3722 - protein, 210 aa, Deinococcus radiodurans
MSGPGTPFVIGVAGGSGSGKTTVTRRVIETVGREGVAVLNQDNYYRDQSDIPFESRLHTNYDHPAAFDWALLREQLDALLAGVPIEMPEYDFTQHTRAAHTTRVLPGRVVVLEGFFALYDEELRSRMGLKVFVDADADVRFIRRLLRDTQERGRTPESVIEQYLGFVRPMHLSFVEPTKRYADVIIPHGGMNEPALDMLAARIRVMAQRD

SEQ ID NO: 3723 - DNA, 1932 bp, Arabidopsis thaliana (mouse-ear cress)
  CDS (1)..(1932)
atggcgctcgatagttctgttgctctgtcacctcgccggcggcatggcttgttgcgagatcaggttcagcttataaaaagaaaggactctggaagatatgagatagttccaatagaggatccattgtcttttgaaaaaggtttctacgctgttattcgtgcttgtcaattattggctcagaagaacgatgggctcattttggttgggttagctggtccttctggagctggcaaaaccattttcactgagaagattctcaattttatgcctagtattgctatcattaacatggacaactataatgatggtactcgtgttatcgatggaaactttgatgatccaaggttgactgactatgatacacttcttgacaatatacatggtctaagggatggaaaacctgttcaggttccaatatatgacttcaagtcgagttctcgaataggttacagaacgcttgaggtgcctagctctcgcattgttattctagaaggcatatatgctttgagtgagaagctacggcctttgctagatcttcgtgtctctgtcactggtggagtgcattttgatcttgttaagcgtgttttgcgggacattcaacgtgctggccaggaacctgaagaaataatccatcagatatctgagacggtttatcctatgtacaaggcgtttattgaacctgatctgaagacagctcagattaagatccttaataagttcaacccattcagtggctttcagaacccaacatatattttaaagtcatcaaaggctgtaacacccgaacaaatgaaggcagctctatctgaagatttcaaggaacgtacagaggaaacttatgacatctatctgttaccaccaggcgaggatcctgaagcatgccaatcatacctcagaatgaggaaccgagatggaaaatacaatctcatgtttgaggagtgggttacagatcgtccatttattatatcacccagaataacttttgaagttagtgttcgtcttcttggaggattaatggcactgggttataccattgcaacaatcctgaaaagaaagagtcatatctttgatgatgacaaggtaattgtgaaaactgattggttggaacaactgaatcggacatatgtacaggtacaaggtaaagaccgtacctttgtcaaaaatgtggcagaccaacttggactggaaggttcatatgttccacatacatatattgaacagatacagctggagaggcttgtgaatgatgttttggctttgccagatgacttaaaaacaaaacttagcttagatgatgatacagtttctagccctaaagaagccctctcaagagcttctgttgatagtagaatgaaatatcttcacggcggcgtatcaaagtcttacacaaacccaagacacaaagtcttgcctaacttgacaagacttgctgttaacaatagaatgttagatgccagagcccctgcttcaccggccactcttccaaatcagggttttatcactcaactttcagaccaaatatcaacactgaacgagaggatggatgaattcacatcccgcattgaagagttgaattccaagatcccgaacaggatagctccttcaggtagtcaacataacttggctttaccaatcgaaaacggtaatgggtctgtcttatcattctccgcatccgcatctcagctcgtaagggaatctcctctgatggaagaggtcgtactggttgctcgtggacagcgtcagataatgcatcaaatggacacactgagtaatcttcttcgggagtatgttggagaaaagactcgcatagagagactcgacagcagcagaacaaacagtacaacacaaaacctcgaatcctctactgtaccgattcttcttggtttggccattggctgtgtgggcatctttgcctacagtcgtctgaaatag

SEQ ID NO: 3724 - protein, 643 aa, Arabidopsis thaliana (mouse-ear cress)
MALDSSVALSPRRRHGLLRDQVQLIKRKDSGRYEIVPIEDPLSFEKGFYAVIRACQLLAQKNDGLILVGLAGPSGAGKTIFTEKILNFMPSIAIINMDNYNDGTRVIDGNFDDPRLTDYDTLLDNIHGLRDGKPVQVPIYDFKSSSRIGYRTLEVPSSRIVILEGIYALSEKLRPLLDLRVSVTGGVHFDLVKRVLRDIQRAGQEPEEIIHQISETVYPMYKAFIEPDLKTAQIKILNKFNPFSGFQNPTYILKSSKAVTPEQMKAALSEDFKERTEETYDIYLLPPGEDPEACQSYLRMRNRDGKYNLMFEEWVTDRPFIISPRITFEVSVRLLGGLMALGYTIATILKRKSHIFDDDKVIVKTDWLEQLNRTYVQVQGKDRTFVKNVADQLGLEGSYVPHTYIEQIQLERLVNDVLALPDDLKTKLSLDDDTVSSPKEALSRASVDSRMKYLHGGVSKSYTNPRHKVLPNLTRLAVNNRMLDARAPASPATLPNQGFITQLSDQISTLNERMDEFTSRIEELNSKIPNRIAPSGSQHNLALPIENGNGSVLSFSASASQLVRESPLMEEVVLVARGQRQIMHQMDTLSNLLREYVGEKTRIERLDSSRTNSTTQNLESSTVPILLGLAIGCVGIFAYSRLK

SEQ ID NO: 3725 - DNA, 636 bp, Bacillus subtilis
  CDS (1)..(636)
atgggtaagaatccagtagtcattggaatcgcaggaggttccggttcaggaaaaacgagtgtcacacggtccatttatgaacagtttaaaggacactcaattttaatgatccagcaggacctttattataaagaccaaagccatcttccgtttgaagaaaggctgaacacaaactatgatcatccgcttgcgtttgataatgactatttaatcgagcatattcaagatctattgaattaccgcccgattgaaaagccgatttatgactataagcttcacacacgttcagaagaaacggttcacgtagagccaaaggatgttattatccttgaaggcattcttgttcttgaagacaaaaggcttcgtgatctgatggatatcaagctttatgttgatacggacgctgacttgcgtatcatcagacggattatgagagatattaatgagcgcggacgctctattgattctgtcattgaacaatatgtgtcagtggtccgtccgatgcataaccaattcgtcgagccgacgaaacgatacgctgatattattatcccggaaggcggtcagaatcacgtcgcaattgatctgatggtcacaaaaattcaaaccattcttgaacaaaacgcgattttgtaa

SEQ ID NO: 3726 - protein, 211 aa, Bacillus subtilis
MGKNPVVIGIAGGSGSGKTSVTRSIYEQFKGHSILMIQQDLYYKDQSHLPFEERLNTNYDHPLAFDNDYLIEHIQDLLNYRPIEKPIYDYKLHTRSEETVHVEPKDVIILEGILVLEDKRLRDLMDIKLYVDTDADLRIIRRIMRDINERGRSIDSVIEQYVSVVRPMHNQFVEPTKRYADIIIPEGGQNHVAIDLMVTKIQTILEQNAIL

SEQ ID NO: 3727 - DNA, 624 bp, Borrelia burgdorferi (Lyme disease spirochete)
  CDS (1)..(624)
atgatggctaagattattgggatatctggtggttctggaagcggaaaaactacagttgtaagcaagattagtgagtttattccagaatttgtccttatttctcaagataattactataagagtgtaggcgattatgaacatgaattttctaaggtaaattttgatcatccggatgcttttgataataatttgttttatgaacatttaaaaaatttaaaaaaaaatagtccaatagatatgcctctttacgattttattaatcataaaagacaacttaaaacggttttggttgttccaactcctgttgttattgttgagggtattatgatttttgttgaagagagagtaagaaatttaatagatcttaaaatatatattgacaccccaaatgatattagatttattaggcgtttaagaagagatatttccaaaagaggacgtactgtagaatcggtgattgatcagtatttaaataccactagatggggttattatagatttattgagcctaccaaagaatatgctgatcttattattcccgagggaggtcataatgataaagcgctttatgtgctttcaacgtttcttaagtctttaagtaaggaagggttagattttacctaa

SEQ ID NO: 3728 - protein, 207 aa, Borrelia burgdorferi (Lyme disease spirochete)
MMAKIIGISGGSGSGKTTVVSKISEFIPEFVLISQDNYYKSVGDYEHEFSKVNFDHPDAFDNNLFYEHLKNLKKNSPIDMPLYDFINHKRQLKTVLVVPTPVVIVEGIMIFVEERVRNLIDLKIYIDTPNDIRFIRRLRRDISKRGRTVESVIDQYLNTTRWGYYRFIEPTKEYADLIIPEGGHNDKALYVLSTFLKSLSKEGLDFT

SEQ ID NO: 3729 - DNA, 624 bp, Ureaplasma urealyticum
  CDS (1)..(624): transl_table=4
atgaatactaaatccccaattcttatactaattgcaggagcttctggttctggaaaaacaacctttgctaatgaaattattgcaagaattcctaaaaatacaacaagtgttgttatttgtcaagattcttactatatttctaattcacaactaaataaaaaagaacgccgcttaattaattatgatcatccaagtagttttgaatgagagttaatgcgagagcaattaagtgacattaaaaaacgtaaaaaaattaaagtaccaatctatgattataaaactgagattcgtttagataaaacgattgatattagtgatgttgatgttatagttcttgaaggtatttatgcaatttatgatgatgtcattaatcaaatagctgatttgaaaatttttattgaaactccaaaagatgaatgtttaattcgacgaattcttcgagatgttaatgaacgtaatcgatcatttgaatctgtaattactcaatgacgtagcactgttagccctatgtatgatcaatttgttgaaccaagtaagaagaatgctaatgttagtgtgctatgaaatgaacacaatcgtgttgcattacatttaattcataaatgaataaataatatacattaa

SEQ ID NO: 3730 - protein, 207 aa, Ureaplasma urealyticum
MNTKSPILILIAGASGSGKTTFANEIIARIPKNTTSVVICQDSYYISNSQLNKKERRLINYDHPSSFEWELMREQLSDIKKRKKIKVPIYDYKTEIRLDKTIDISDVDVIVLEGIYAIYDDVINQIADLKIFIETPKDECLIRRILRDVNERNRSFESVITQWRSTVSPMYDQFVEPSKKNANVSVLWNEHNRVALHLIHKWINNIH

SEQ ID NO: 3731 - DNA, 642 bp, Haemophilus influenzae
  CDS (1)..(642)
atgtcaaatccctcttgtatcatcatcgccatcacaggtgcatctgcatcaggcaaaagttctatcgcttccactgttcacaaagagctctgtaatgaactaggctgccaagaaattggtatcattactgaagacagttactataaagatcaaagtcatttagaaatgactgagcgggtaaaaacgaattacgatcatccaaactctatggatcgcgatttacttatccaacatttaaaaaatctaaaaaatggcagtgcagtagatgtgcctgtttatagctatgtagaacatactcgcaccaacgaaacaacgcatttcacaccaaaacgaatcgtaattttagaagggattttattacttaccgatgaacgagtacgccaattagccgatatttctgtattcgtagacacaccacttgatatttgtttcatccgccgtttacaacgtgatatggaagaacgtggtcgctctctacaatcagtgattgatcaatatcgtgcaaccgtgcgtccaatgttcttacaatttattgagccgtctaaacaatatgcggatattgtcattcctcgtggtggtaaaaatcgcattgcgatcaatatgttaaaagctcaaatccttcatttattgaatcaaaaatag

SEQ ID NO: 3732 - protein, 213 aa, Haemophilus influenzae
MSNPSCIIIAITGASASGKSSIASTVHKELCNELGCQEIGIITEDSYYKDQSHLEMTERVKTNYDHPNSMDRDLLIQHLKNLKNGSAVDVPVYSYVEHTRTNETTHFTPKRIVILEGILLLTDERVRQLADISVFVDTPLDICFIRRLQRDMEERGRSLQSVIDQYRATVRPMFLQFIEPSKQYADIVIPRGGKNRIAINMLKAQILHLLNQK

SEQ ID NO: 3733 - DNA, 1470 bp, Spinacia oleracea (spinach)
  CDS (49)..(1257)
tttttttttttttaagagagagaaaatagtaaaaaaaaaacagaaaaaatggcagtgtgtacagtatacacaatcccaacaacaacccatttaggatcatcattcaaccaaaacaacaaacaagtttttttcaactacaaaagatcatcatcatcaaacaacactttatttacaacaagaccatcctatgtaataacatgttcacaacaacaaacaattgtgattggtttagcagcagattcaggttgtggtaagagtacattcatgaggaggttaacaagtgttttcggtggcgcggccgagccaccaaagggtggtaacccagattcaaacacattgattagtgacactactactgttatctgtttggatgattttcattcccttgatagaaatggcaggaaagtggaaaaagttactgctttagacccaaaagctaatgattttgatcttatgtatgaacaagttaaggctttgaaagaaggtaaagctgttgataaacctatttataatcatgtttctggtttgttggaccctcctgagcttattcaacctcctaagatcttggtcattgaagggttacaccccatgtatgacgcacgtgtgagggaattgctagacttcagcatctacttggacattagcaatgaagttaaatttgcctggaaaattcagagagacatgaaagaaagaggacacagtcttgaaagcatcaaagccagtattgaatccagaaagccagattttgatgcttacattgacccacaaaagcagcatgctgatgtagtgattgaagtattgccaactgaactcattcctgatgatgatgaaggcaaagtgttgagagtaaggatgattcagaaagaaggagtcaagtttttcaacccagtttacttgtttgatgaaggatctaccatttcatggattccatgtggtagaaaattaacatgttcttaccctggtatcaaattttcctatggcccagacaccttctatggcaacgaggtgacagtagtagagatggatgggatgtttgacagattagacgaactaatctacgtcgaaagccatttgagcaatctatcaaccaagttttatggtgaagtcactcaacaaatgttgaagcaccaaaatttcccaggaagcaacaatggaactggtttcttccaaaccataattggattgaagatcagagacttgttcgagcagctcgttgctagcaggtctacagcaactgcaacagctgctaaagcctagaaaaagctcgaattttacaacatatgataagatatggaatatgtcaatctaaattaaatctacttcatttgtaatttccactacctatattattattcttcttgtataagtttgtttttgtaggctactctgatattttctgctgttaatagacatgcaagagatggaaaatgcagttcaaaagatattcatagcatcaaaaaaaaaaaaaaa

SEQ ID NO: 3734 - protein, 402 aa, Spinacia oleracea (spinach)
MAVCTVYTIPTTTHLGSSFNQNNKQVFFNYKRSSSSNNTLFTTRPSYVITCSQQQTIVIGLAADSGCGKSTFMRRLTSVFGGAAEPPKGGNPDSNTLISDTTTVICLDDFHSLDRNGRKVEKVTALDPKANDFDLMYEQVKALKEGKAVDKPIYNHVSGLLDPPELIQPPKILVIEGLHPMYDARVRELLDFSIYLDISNEVKFAWKIQRDMKERGHSLESIKASIESRKPDFDAYIDPQKQHADVVIEVLPTELIPDDDEGKVLRVRMIQKEGVKFFNPVYLFDEGSTISWIPCGRKLTCSYPGIKFSYGPDTFYGNEVTVVEMDGMFDRLDELIYVESHLSNLSTKFYGEVTQQMLKHQNFPGSNNGTGFFQTIIGLKIRDLFEQLVASRSTATATAAKA

SEQ ID NO: 3735 - DNA, 1533 bp, Triticum sp. (wheat)
  CDS (65)..(1279)
ggcaagtctcagttacaagacttgaaggggagaagagcagctcccaagaggttgggcagcaaacatggcattctgcagcccacacaccaccacatccctgcgctccccatgcaccaccatcccaaactcaggcttcaggcagaaccaagtcatcttcttcacgaccagaagcagcaggaggagtaacacgaggcatggggcaaggaccttccaggtctcatgcgcagttgagcagccaatagtgattggcctggcagcagactcgggatgtgggaaatccaccttcatgcgccggctcaccagcgtgtttggaggtgccgcagagccacccaagggcggcaacccagactccaacacgctcatcagcgacacgacgacggtcatatgccttgatgactaccattccttggacagaaccgggaggaaggagaaaggtgtgaccgccctggaccccaaggcaaacgactttgatctcatgtatgagcaggtgaaggcaatcaaggaaggcaaggctattgagaagccaatctacaaccacgtcactggcctcctcgacccggcggagctcatccagccccccaagatcttcgtcatcgagggtttgcacccaatgtacgatgaacgtgtgagagagctccttgatttcagcatctacttagacatcagcaatgaggttaagttcgcatggaaaattcagagagacatggcagagcgtgggcacagtcttgaaagcatcaaggctagcatcgaagccaggaaacctgattttgatgcctttattgatccgcagaagcaatacgctgatgctgtgattgaagttctgccaacccagctgattcctgatgacaacgaaggaaaggtgctgcgagttaaattgatcatgaaagaaggcattaagttcttcaacccggtttacctcttcgatgaaggatcaaccatcaactggatcccttgtggaagaaagcttacatgctcttatcctggcatcaaattttcctatggcccagacacttactttggccaagaggtatcggtgctggagatggatgggcaatttgacagactagatgaactcatctatgttgagagccacctaagcaacctctcaaccaagttctacggggaggtgacacagcaaatgctaaagcatgcagacttcccaggcagcaacaatggaacaggtctcttccagaccattgtaggactgaagattagagatctctatgaacagatcatcgctgagagggccggcgttcctgctgaagcagcaaaagtttgatgagccccaaattcaagttcacgaatcatttcatcaccaactcaatgagaatgagcatcctcgcatttcttgtacctagtttgaatatattacagctagaagacggtagaaagttcactgcagaactcatgaaaacctgcattttgaacttctcgaaaatcctctccatgatgagggtctcttatgtctcttcttaacaaatttcgatgtacatcttctcccatgtttcaatgcagaaaatacatgtgcttgca

SEQ ID NO: 3736 - protein, 404 aa, Triticum sp. (wheat)
MAFCSPHTTTSLRSPCTTIPNSGFRQNQVIFFTTRSSRRSNTRHGARTFQVSCAVEQPIVIGLAADSGCGKSTFMRRLTSVFGGAAEPPKGGNPDSNTLISDTTTVICLDDYHSLDRTGRKEKGVTALDPKANDFDLMYEQVKAIKEGKAIEKPIYNHVTGLLDPAELIQPPKIFVIEGLHPMYDERVRELLDFSIYLDISNEVKFAWKIQRDMAERGHSLESIKASIEARKPDFDAFIDPQKQYADAVIEVLPTQLIPDDNEGKVLRVKLIMKEGIKFFNPVYLFDEGSTINWIPCGRKLTCSYPGIKFSYGPDTYFGQEVSVLEMDGQFDRLDELIYVESHLSNLSTKFYGEVTQQMLKHADFPGSNNGTGLFQTIVGLKIRDLYEQIIAERAGVPAEAAKV

SEQ ID NO: 3737 - DNA, 1240 bp, Arabidopsis thaliana (mouse-ear cress)
  CDS (1)..(1188)
atggctgtctcaactatctactcaacacaagctctcaattcaactcatttcttaacctcttcttcctcctccaaacaagtcttcctctaccgtcgtcaaccacaaaccaaccgtagattcaacacactcatcacttgcgcacaagaaaccatcgtgatcggactagctgctgactctggctgcggcaaaagtacctttatgcggaggctcaccagcgtctttggtggcgctgctaagccaccaaaaggcgggaaccctgattccaacacactcatcagcgacacgaccactgtgatctgtcttgatgattaccattctttggataggtacggtaggaaagagcagaaagtcaccgctttggacccacgcgccaatgactttgatctcatgtatgagcaagtcaaagctcttaagaatggtatagccgtcgagaaaccgatttataaccatgtcactggacttcttgaccctccggagcttattcagcctcctaagattcttgtcatcgaaggtcttcacccaatgtttgatgagcgagtaagagacttactagacttcagtatctacttggacattagcaacgaagtcaaattcgcttggaaaattcagagggacatggctgaaagaggtcacagtttggagagcatcaaagcgagtatcgaagcccgaaagcccgacttcgatgcattcatcgacccgcaaaagcagtacgcggatgcggtcatagaagtgcttcctacgactctgatcccagatgacaacgaagggaaagtgttgagagtgagattgataatgaaggaaggtgttaagtacttcagcccggtttacctgttcgatgaaggttcaaccatctcgtggattccttgcggccgcaaactcacttgctcgtaccctggcatcaagttcaactacgaacctgactcctacttcgaccatgaggtatcagttttggagatggatggacaatttgatagactggacgagctgatttacgtggaaagtcacttgagcaacctctcgaccaaattctacggagaagtcactcaacaaatgctcaaacatgctgatttcccgggtagcaacaacggtactggtcttttccaaaccattgttggattgaagatcagagatctctatgagcagctcattgccaacaaagccactgctcgtgcagaagctaaagcctaaaacaaacgaagcgaagccaaatagaacgcgtcgataaatacatccgcagttt

SEQ ID NO: 3738 - protein, 395 aa, Arabidopsis thaliana (mouse-ear cress)
MAVSTIYSTQALNSTHFLTSSSSSKQVFLYRRQPQTNRRFNTLITCAQETIVIGLAADSGCGKSTFMRRLTSVFGGAAKPPKGGNPDSNTLISDTTTVICLDDYHSLDRYGRKEQKVTALDPRANDFDLMYEQVKALKNGIAVEKPIYNHVTGLLDPPELIQPPKILVIEGLHPMFDERVRDLLDFSIYLDISNEVKFAWKIQRDMAERGHSLESIKASIEARKPDFDAFIDPQKQYADAVIEVLPTTLIPDDNEGKVLRVRLIMKEGVKYFSPVYLFDEGSTISWIPCGRKLTCSYPGIKFNYEPDSYFDHEVSVLEMDGQFDRLDELIYVESHLSNLSTKFYGEVTQQMLKHADFPGSNNGTGLFQTIVGLKIRDLYEQLIANKATARAEAKA

SEQ ID NO: 3739 - DNA, 2077 bp, Saccharomyces cerevisiae
  CDS (482)..(1987)
gtgttgctatacacgcttgttatctatatagatgccaattaaacatatagcagctatccgttattacttatacaattgattaatatcactttttaattgtccgggtaactaactgtcttccactttcagcacgttctcgtcatcaggttgtatgggctagtactgttttggctacatttgagatacgagcacttaaagaattcttgcatattttcgatgattagtctttaattttcccacttgttctcactatttcctctattgtcttaatacgctcacatatcgaagtttttttttcatgcgatgagcttcgagatgaaaaaaggaaactgaaaaatttagatcgataagataagagatgtgattttttttttttttcgtaaggctgtaggccttggataacgtcttatttactatttatatgcgacatcttcgataatttcatacgtttaatttcgaactcgcatttattttatttattatgtcccatcgtatagcaccttccaaagaacgatcttcatcatttatttcaattttagacgatgaaacaagagacacattgaaagctaatgcagtcatggatggtgaagtagatgtcaaaaaaacaaaaggaaaaagctctcggtatatcccaccatggacaactccatatataataggtataggtggtgcttcaggttcaggcaagacaagcgttgctgctaagattgtgtcgtcaattaatgttccctggacagtattaatatctttggataacttttacaatccattaggcccagaggacagagccagagcctttaaaaatgaatacgatttcgacgagccaaatgccatcaacttagatttggcatataagtgcattttgaacttaaaggagggcaaaaggacaaatatcccagtttatagcttcgtccaccacaatagagttcctgataaaaatatagtcatatacggggccagtgtggtagttatcgaagggatctacgccctttacgatcgccgattgctggatttgatggacttgaaaatttatgttgacgctgatttggatgtctgcttagcaagaagattgtcgagagatatagtttccagagggagagatttggatggttgtattcaacaatgggagaaatttgtgaaaccaaatgcggtaaagtttgtgaaaccaacaatgaagaatgcagatgctatcattccatcgatgagtgataatgctacagcggtaaatttaatcattaaccacatcaagtcaaaactggaactaaaatcaaatgaacacttaagagagctaatcaaattgggctcttctccttcacaagatgtgcttaatcgtaacataattcatgaattgccgcccaccaaccaagttctttcgctgcatactatgcttctaaataaaaatctaaattgcgcggactttgttttctactttgacaggttagcaacaattttgttatcatgggcacttgatgacattcctgtagcacatacgaacataattacacctggtgagcataccatggaaaacgttattgcctgtcaattcgatcaagttacagctgttaatattattcgatctggcgattgttttatgaagtctttgagaaagacgatccccaatatcacaattggtaaattgttgattcagtccgattcacaaactggggaacctcaactgcattgcgaatttttacccccaaatatagaaaagtttggcaaggttttcttaatggaaggtcaaatcataagtggtgcggccatgatcatggccatccaggtgcttttagatcatggtattgatttggaaaagattagcgtggtggtttatttggccactgaagttggtatccgacgtatattaaatgcatttgataacaaagtcaacatttttgctggtatgatcatctccagagaaaagttacaaaatcatcaatacaaatgggcattgaccagattttttgattcaaagtattttggttgtgattgagaataattagaggcaatataaagtaaaattaaataatagtgcacgtatacatactatattagtaacctttcattctctctatggataatc

SEQ ID NO: 3740 - protein, 501 aa, Saccharomyces cerevisiae
MSHRIAPSKERSSSFISILDDETRDTLKANAVMDGEVDVKKTKGKSSRYIPPWTTPYIIGIGGASGSGKTSVAAKIVSSINVPWTVLISLDNFYNPLGPEDRARAFKNEYDFDEPNAINLDLAYKCILNLKEGKRTNIPVYSFVHHNRVPDKNIVIYGASVVVIEGIYALYDRRLLDLMDLKIYVDADLDVCLARRLSRDIVSRGRDLDGCIQQWEKFVKPNAVKFVKPTMKNADAIIPSMSDNATAVNLIINHIKSKLELKSNEHLRELIKLGSSPSQDVLNRNIIHELPPTNQVLSLHTMLLNKNLNCADFVFYFDRLATILLSWALDDIPVAHTNIITPGEHTMENVIACQFDQVTAVNIIRSGDCFMKSLRKTIPNITIGKLLIQSDSQTGEPQLHCEFLPPNIEKFGKVFLMEGQIISGAAMIMAIQVLLDHGIDLEKISVVVYLATEVGIRRILNAFDNKVNIFAGMIISREKLQNHQYKWALTRFFDSKYFGCD

SEQ ID NO: 3741 - DNA, 642 bp, Mycoplasma pneumoniae
  CDS (1)..(642): transl_table=4
atggatagtaaaaaaggaattttagtggcaattggtggcgggagttgttctggtaaaactacgatcgctgacatgatttaccaacttttgcgtaaaaagcttaaagttgctattctgccccaggacaactattacaaaccatacaagaacaaatcaatggcgcaacgcaaagcgattaacttcgatcaccccgatgcctttgattgaaagctgttgtgaagtcacctcgataacttactaatgggtaaaacagtggctgtgccaatgtatgactatgttaattacacccgtaaaaaggaaaccatagaaataggtcctttaaatgtagtcatcttggaaggtttaatgccgtggtttgatgaacggattgctaaattgtgtaagctcaagatctttgtggaagcgactggagaggaacgcttaattcgccggattgaacgggactgggaacgcggtcgtgatgtcgcttctatcattaaacaatgacgcgaagcagttagtccaatgtacgaaatctttgtcgaaaagatgaaacagaaggcagatttaattattccctggagtgaaagacacgaagtgagtactaatgtgctcgactttgcaattgaacacctctttcgcaaacacgtggatcccaactag

SEQ ID NO: 3742 - protein, 213 aa, Mycoplasma pneumoniae
MDSKKGILVAIGGGSCSGKTTIADMIYQLLRKKLKVAILPQDNYYKPYKNKSMAQRKAINFDHPDAFDWKLLWSHLDNLLMGKTVAVPMYDYVNYTRKKETIEIGPLNVVILEGLMPWFDERIAKLCKLKIFVEATGEERLIRRIERDWERGRDVASIIKQWREAVSPMYEIFVEKMKQKADLIIPWSERHEVSTNVLDFAIEHLFRKHVDPN

SEQ ID NO: 3743 - DNA, 1245 bp, Chlamydomonas reinhardtii
  CDS (28)..(1155)
gaattccgcgtcgagctgttagcaaccatggctttcactatgcgcgcccccgccccccgggctacggcccagagccgcgtgactgccaaccgggctcgtcgcagcctggttgtgcgcgctgataaggacaagacagtggtgatcggtctggccgctgactccggctgcggcaagtccaccttcatgcgccgcatgacctccatcttcggcggtgtccccaagcccccggctggcggcaaccccgactccaacaccctgatctcggacatgaccaccgtgatctgcctggacgactaccactgcctggaccgcaacggccgcaaggtcaagggcgttaccgccctggcccccgaggcccagaacttcgacctgatgtacaaccaggtcaaggccctgaaggagggcaagtcggtggacaagcccatctacaaccacgtgtccggcctgatcgacgcgcccgagaagatcgagtcgcccccgatcctggtcattgagggcctgcaccccttctatgacaagcgcgtggctgagctgctggacttcaagatctacctggacatctccgacgacatcaagttcgcctggaagattcagcgcgacatggccgagcgcggccactcgctggagtcgatcaagagctcgatcgcggcgcgcaagcccgacttcgatgcctacattgacccccagaagaaggacgctgacatgatcatccaggtgctgcccacccagctggtgcctgacgacaagggccagtacctgcgcgtgcgcctgatcatgaaggagggctccaagatgttcgaccccgtctacctgttcgacgagggctcgaccatcagctggatcccctgcggccgcaagctgacctgctcgttccccggcatcaagatgttctacggccccgacacctggtacggccaggaggtgtctgtcctggagatggacggccagttcgacaagctggaggagctcatctacgtggagagccacctgtccaacaccagcgccaagttctacggcgagatcacccagcagatgctcaagaacagcggcttccccggctccaacaacggcactggcctgttccagaccattgtgggcctgaaggtgcgcgaggtgtacgagcgcatcgtcaagaaggacgttgtgcccgtgtaaatgggtcccttaaaccggcgtatatagcggcggcgggcgcagcgggaatgctggcggcagcgagcagaccccgccccttggaacgccacg

SEQ ID NO: 3744 - protein, 375 aa, Chlamydomonas reinhardtii
MAFTMRAPAPRATAQSRVTANRARRSLVVRADKDKTVVIGLAADSGCGKSTFMRRMTSIFGGVPKPPAGGNPDSNTLISDMTTVICLDDYHCLDRNGRKVKGVTALAPEAQNFDLMYNQVKALKEGKSVDKPIYNHVSGLIDAPEKIESPPILVIEGLHPFYDKRVAELLDFKIYLDISDDIKFAWKIQRDMAERGHSLESIKSSIAARKPDFDAYIDPQKKDADMIIQVLPTQLVPDDKGQYLRVRLIMKEGSKMFDPVYLFDEGSTISWIPCGRKLTCSFPGIKMFYGPDTWYGQEVSVLEMDGQFDKLEELIYVESHLSNTSAKFYGEITQQMLKNSGFPGSNNGTGLFQTIVGLKVREVYERIVKKDVVPV

SEQ ID NO: 3745 - DNA, 1520 bp, Mesembryanthemum crystallinum (common ice plant)
  CDS (127)..(1320)
cccaaatacccacctcccattcctctctcattcctccccattctctctcctcccctgttttaaaacagagagaggtagagtaaacagaggagctaaaacaggggaaaacagagcatacagaaaacaatggcagtatcagcatacacagttcccaccacatcccacttgggattcaaccaaaaaaagcaactattcttctgcaacaagagtgcatacaagagggtgagtttcagcagcagaccatgtgtgataacatgcttagcaggtgactcacagacaattgtgattggtctagcagcagactcagggtgtggtaagagtaccttcatgaggaggttaacaagtgtatttggaggtgcagcagagccaccaaggggaggaaaccctgattcaaataccttaattagtgacacaaccactgtgatttgtttggatgattaccattcccttgataggacagggaggaaagagaaaggagttactgctttggatccaagagccaatgattttgacctcatgtatgagcaagttaaggctttgaaagaaggtaaggctgttgagaagcctatttacaaccatgttactggcttgttggatgcacctgagctcatcaagccacctaagatcttggtcattgaaggtttgcaccctatgtttgactcacgtgtgagggacttgctggacttcagtatctatttggacatcagcaatgaagtgaaatttgcctggaaaattcagagagacatggctgagagaggacacagtcttgagagcatcaaagccagtattgaagccagaaagcctgactttgatgcttacattgatccacagaagcagtatgcagatgcagtgattgaggtgttgccaacccagctcatccctggtgacaatgaaggcaaagtgttgagagtgaggttgattcagaaggaaggggtgcaatatttcagcccagtttacttgtttgatgaaggatcttctattacctggatcccttgtggcagaaaattgacatgttcttaccctggtatcaaatttttctacggccccgacacttacttcggcaatgaggtgactgtgctagagatggatgggcaatttgacagattagatgaattgatctacgttgaaagccatttgagcaacctatcaaccaagttctatggtgaagtcacccaacaaatgttgaagcaccaagacttccctggaagcaacaacggaaccggtctcttccaaaccattgttgggttgaagatcagagacctgttcgagcagcttatcgccagcaagacagcagctcctgcagcagctactaaggcctgaagctccatttgataaataaaaagcatctgaatctcattttttctccactactttcctcatttgtaacttctattaccatttctcctctataagtcggttatgtacttatgttaggctactctgaaattctataattatatagatatgcacaaaagcagagataaaaaatgcagttcaaaaaaaaaaaaaaaaaaaaaaaa

SEQ ID NO: 3746 - protein, 397 aa, Mesembryanthemum crystallinum (common ice plant)
MAVSAYTVPTTSHLGFNQKKQLFFCNKSAYKRVSFSSRPCVITCLAGDSQTIVIGLAADSGCGKSTFMRRLTSVFGGAAEPPRGGNPDSNTLISDTTTVICLDDYHSLDRTGRKEKGVTALDPRANDFDLMYEQVKALKEGKAVEKPIYNHVTGLLDAPELIKPPKILVIEGLHPMFDSRVRDLLDFSIYLDISNEVKFAWKIQRDMAERGHSLESIKASIEARKPDFDAYIDPQKQYADAVIEVLPTQLIPGDNEGKVLRVRLIQKEGVQYFSPVYLFDEGSSITWIPCGRKLTCSYPGIKFFYGPDTYFGNEVTVLEMDGQFDRLDELIYVESHLSNLSTKFYGEVTQQMLKHQDFPGSNNGTGLFQTIVGLKIRDLFEQLIASKTAAPAAATKA

SEQ ID NO: 3747 - DNA, 690 bp, Caenorhabditis elegans
  CDS (1)..(690)
atgaaaaacactctgaaattgccgctcctcatcggtgtggctggaggaacatcttgtggaaagtcaacaattgtggagagaataatcgagaatctcaatgcaaacgcgaagcaaagtggaagacaaatcgacattgtccacttgtcacttcactcattctacagagaactgtcagcagaagagaagattcttgcgagagaaggaaaattcaatttcgatcatcctgatcagatcaactttgatcttctcgccgagactcttcaaaatatgattgatggaaaaactgtggaaattccaaagtacgatatgatcacaagctctatgaacggaacagtgactgtggagccagcaaaagtgatcataatcgaaggaatacttcttctttacgatgaacgtgttcgtaagctgctctccactaagcttttcgttgagaaaaacgctgaaagccgtctcagaaaccggctggccacttatattcgtgactatcatcgtgctccgctctcgatcatccggcaatacacggagttcgtgaagcctgctttcgaagaattctgccgaccaaccaagaagtacgctgacgtcattattccacgtggagccgacaatcacgtggcaactgatctcattgcaaagaatcttcaggttagattcaaacgacaaaacaatgcattgtttgatttcgaattgtag

SEQ ID NO: 3748 - protein, 229 aa, Caenorhabditis elegans
MKNTLKLPLLIGVAGGTSCGKSTIVERIIENLNANAKQSGRQIDIVHLSLHSFYRELSAEEKILAREGKFNFDHPDQINFDLLAETLQNMIDGKTVEIPKYDMITSSMNGTVTVEPAKVIIIEGILLLYDERVRKLLSTKLFVEKNAESRLRNRLATYIRDYHRAPLSIIRQYTEFVKPAFEEFCRPTKKYADVIIPRGADNHVATDLIAKNLQVRFKRQNNALFDFEL

SEQ ID NO: 3749 - DNA, 1668 bp, Caenorhabditis elegans
  CDS (1)..(1668)
atggtcgcagaaaagcgtgatgctaatgtggctgcttcgaaaggggatgccaaccgaaaaagcgtgaagatcgaggactgtcccacgtatagtcattcctcaggttcgtctgtcaacgagatggtcaaccaaagtggtggagattctgaggattcgacttcaccaagagccgctggatgtcgtacgagaagacgaacgatgagtggaggacgtgctgaacatcatcttcttaccactaagaccggcaagaaaatatatacgaaaggacgtccaccatggtatgacaagaagggaaagtcactgaaacatccgttcgtaattggagtttgtggaggatctgccagtgggaaaactactgtcgccgagaaaatcgtcgaacgactcggaataccatgggtcacgattctttcaatggacagcttttataaagttctgacgccggaagaaatcaaagcagcacatgaatcaagatataattttgatgggccaaatgcttttgactttgatttgctctacgaagttttgaaacgacttcgtgagggaaagagtgttgatgttccggtttatgattttaatactcattcaagagatccgaattcgaagatgatgtatggagctgacgttttgattttcgaaggaatcctcgcgttccatgatgagcgtatcaagaatttaatggacatgaaagtgttcgtcgacacggatggagatcttcgtctagctcgtcgtatcgttcgggatgtcactgatcgtgggcgtgacatcgacggcatcatggagcagtactttacatttgtaaaaccggcgttcgacaaatacattgcaccatgcatggattcggctgatctcatcgttccgcgcggtggagagaacgacgtcgccatcgacatgatcgtgcagaacgtgatggcacagctcgttgaacgcggatacgatcgcaatcagaacaaccgtgatcgtcacgatttggttcgcgacgatctaccggattgtttgccggaaaacctgttcattttaaaagaaactccacaggtcaaaggtcttgtcacgtttgttcgtgatcgagaaacgagtagagacaatcatattttctattctgatcgattaatgcgtattcttattgaagaatgcatgaatcatatgccttacaaagatgttgagattgagatggccggcggtagaaaaactattggcaaacgaaaggacgctcagatttgtggtcttccaatcatgcgagccggcgaatgtatggagactgctcttcgctcaatcgtcaaggactgcgtgatcggaaaaattttgattcaaaccaacgagacgacgtttgatccagaacttcattatatacgtttgccaccacacataactcgatacaaagttatcattatggacgccaccgtaactactgggagtgctgcgatgatggcaattcgtgtacttcttgatcatgatgttaaagaggaagacatatttgttgcatctctgcttatgggtcaacaaggtgcacatgcactggcttatgccttcccgaaggttaaattaatcaccaccgcaatggaccaccaaatgacggaaaattgctatctgattcccggaatgggcaattttggtgatcgatattacggaaccgggctcgaacaagacatggacgagccattcgatatgtga

SEQ ID NO: 3750 - protein, 555 aa, Caenorhabditis elegans
MVAEKRDANVAASKGDANRKSVKIEDCPTYSHSSGSSVNEMVNQSGGDSEDSTSPRAAGCRTRRRTMSGGRAEHHLLTTKTGKKIYTKGRPPWYDKKGKSLKHPFVIGVCGGSASGKTTVAEKIVERLGIPWVTILSMDSFYKVLTPEEIKAAHESRYNFDGPNAFDFDLLYEVLKRLREGKSVDVPVYDFNTHSRDPNSKMMYGADVLIFEGILAFHDERIKNLMDMKVFVDTDGDLRLARRIVRDVTDRGRDIDGIMEQYFTFVKPAFDKYIAPCMDSADLIVPRGGENDVAIDMIVQNVMAQLVERGYDRNQNNRDRHDLVRDDLPDCLPENLFILKETPQVKGLVTFVRDRETSRDNHIFYSDRLMRILIEECMNHMPYKDVEIEMAGGRKTIGKRKDAQICGLPIMRAGECMETALRSIVKDCVIGKILIQTNETTFDPELHYIRLPPHITRYKVIIMDATVTTGSAAMMAIRVLLDHDVKEEDIFVASLLMGQQGAHALAYAFPKVKLITTAMDHQMTENCYLIPGMGNFGDRYYGTGLEQDMDEPFDM

SEQ ID NO: 3751 - DNA, 1365 bp, Schizosaccharomyces pombe
  CDS (1)..(1365)
atgcctgaagcttttgagcgttattcaagcaacccaacttatgaacccccatggcgtaaagtgcgatttattggaattgcaggaccatcgggtagtgggaaaacctcggtggcccaattgattgtaaaggcgttaaatcttccacatgttgttattttatcccttgactcgttttacaaatctttgaatgcagagcagaagaagagagcatttaacaacgactatgactttgattcccccgaagccattgattgggacttgctcttcgtaaaactgctagaacttaaacaaggccgtaaagttgacattcctatatatagcttcaatgagcataatcggcttcctgagaccaacacgttattcggagcaagtatcattattctcgaagggatttttgctttatacgatgaaaagattcgctctctccttgacgtctcggtctttctagatacagattcggacgtgtgtctctctcgtcgactgaatcgcgatatcaactatcgaggaagggacatagttggcgttttggaacaatataataaatttgtcaagccaagttatgagaacttcgttaggcgtcaactatcttacactgatcttatcgttcctcgtggccgggacaataaattggcaattgatatggtgattaattttattcgtagaacactttctatacaaagtgaaactcatgttaagaacattgatagtttacagcaaattgtaccaaccattccccatttacccttaaatttagttcagcttaaaattacgcctgaaatatctgccatcaggactattcttataaacaaaaatacacaccctgatgatttacaattttttttgagcagaattggcaccatgttgatgaatttggcaggtgattcgcttgcatatgaaaagaaaacgattactttgcataacggaaaccagtgggaaggtctacaaatggcaaaagagctttgtggtgtttcagttttgcgatccggcggaactcttgaaacagctttatgtcgtcaatttccaacagtgtgtttgggtaagattttggtgcaaatcaataaagttactcaagaaccaactttacattaccataaattgccccgtggcattgctaccatgaatgttgttttgatggcttcacatttaactacacatgcagatgtcttaatggccacgcaaattttagtggatttcggggtcccagaggaaaacattataattgtggtctatgtttgttactctgaaagtattaaagcgctggcttatattttcccaaaggttaccattgttacagcatttctagaaagtgttgctgaacccgtagtcggtagattggatatcgaaaaagtgtattatggatgctga

SEQ ID NO: 3752 - protein, 454 aa, Schizosaccharomyces pombe
MPEAFERYSSNPTYEPPWRKVRFIGIAGPSGSGKTSVAQLIVKALNLPHVVILSLDSFYKSLNAEQKKRAFNNDYDFDSPEAIDWDLLFVKLLELKQGRKVDIPIYSFNEHNRLPETNTLFGASIIILEGIFALYDEKIRSLLDVSVFLDTDSDVCLSRRLNRDINYRGRDIVGVLEQYNKFVKPSYENFVRRQLSYTDLIVPRGRDNKLAIDMVINFIRRTLSIQSETHVKNIDSLQQIVPTIPHLPLNLVQLKITPEISAIRTILINKNTHPDDLQFFLSRIGTMLMNLAGDSLAYEKKTITLHNGNQWEGLQMAKELCGVSVLRSGGTLETALCRQFPTVCLGKILVQINKVTQEPTLHYHKLPRGIATMNVVLMASHLTTHADVLMATQILVDFGVPEENIIIVVYVCYSESIKALAYIFPKVTIVTAFLESVAEPVVGRLDIEKVYYGC

SEQ ID NO: 3753 - DNA, 1647 bp, Homo sapiens
  CDS (1)..(1647)
atggctgcgcccccggcccgcgcggacgctgatccttcgcccacgtcgccacctacggcccgagacacaccaggccggcaggctgagaaaagcgagaccgcgtgcgaggaccgcagcaatgcagagtccctggacaggctcctgccacctgtgggcactgggcgctctccccggaagcggaccaccagccagtgcaagtcagagcctcccctgctgcgtacaagcaagcgtaccatctacaccgccgggcggccgccctggtacaatgaacacggcacgcaatccaaagaggccttcgccatcggcttgggaggcggcagtgcctctgggaagaccactgtggccagaatgatcatcgaggccctggatgtgccctgggtggtcttgctgtccatggactccttctacaaggtgctgactgagcagcagcaggaacaggccgcacacaacaacttcaacttcgaccacccagatgcctttgacttcgacctcatcatttccaccctcaagaagctgaagcaggggaagagtgtcaaggtgcccatttatgacttcaccacgcacagccggaagaaggactggaaaacactgtatggtgcaaacgtcatcatctttgagggcatcatggcctttgctgacaagacactgttggagctcctggacatgaagatctttgtggacacagactccgacatccgcctggtacggcggctgcgccgggacatcagtgagcgcggccgggacatcgagggtgtcatcaagcagtacaacaagtttgtcaagccctccttcgaccagtacatccagcccaccatgcgcctggcagacatcgtggtccccagagggagcggcaacacggtggccatcgacctgattgtgcagcacgtgcacagccagctggaggagcgtgaactcagcgtcagggctgcgctggcctcggcacaccagtgccacccgctgccccggacgctgagcgtcctgaagagcacgccgcaggtacggggcatgcacaccatcatcagggacaaggagaccagtcgcgacgagttcatcttctactccaagagactgatgcggctgctcatcgagcacgcgctctccttcctgccctttcaggactgcgtcgtacagaccccgcaggggcaggactatgcgggcaagtgctatgcggggaagcagatcaccggtgtgtccattctgcgcgccggtgaaaccatggagcccgcgctgcgcgctgtgtgcaaagacgtgcgcatcggcaccatcctcatccagaccaaccagcttaccggggagcccgagctccactacctgaggctgcccaaggacatcagcgatgaccacgtgatcctcatggactgcaccgtgtccacgggcgcggcggccatgatggcagtgcgcgtgctcctggaccacgacgtgcctgaggacaagatctttttgctgtcgctgctcatggcagagatgggcgtgcactcagtggcctatgcatttccgcgagtgagaatcatcaccacggcggtggacaagcgggtcaatgaccttttccgcatcatcccaggcattgggaactttggcgaccgctactttgggacagacgcggtccccgatggcagtgacgaggaggaagtggcctacacgggttag

SEQ ID NO: 3754 - protein, 548 aa, Homo sapiens
MAAPPARADADPSPTSPPTARDTPGRQAEKSETACEDRSNAESLDRLLPPVGTGRSPRKRTTSQCKSEPPLLRTSKRTIYTAGRPPWYNEHGTQSKEAFAIGLGGGSASGKTTVARMIIEALDVPWVVLLSMDSFYKVLTEQQQEQAAHNNFNFDHPDAFDFDLIISTLKKLKQGKSVKVPIYDFTTHSRKKDWKTLYGANVIIFEGIMAFADKTLLELLDMKIFVDTDSDIRLVRRLRRDISERGRDIEGVIKQYNKFVKPSFDQYIQPTMRLADIVVPRGSGNTVAIDLIVQHVHSQLEERELSVRAALASAHQCHPLPRTLSVLKSTPQVRGMHTIIRDKETSRDEFIFYSKRLMRLLIEHALSFLPFQDCVVQTPQGQDYAGKCYAGKQITGVSILRAGETMEPALRAVCKDVRIGTILIQTNQLTGEPELHYLRLPKDISDDHVILMDCTVSTGAAAMMAVRVLLDHDVPEDKIFLLSLLMAEMGVHSVAYAFPRVRIITTAVDKRVNDLFRIIPGIGNFGDRYFGTDAVPDGSDEEEVAYTG

SEQ ID NO: 3755 - DNA, 738 bp, Debaryomyces hansenii
  CDS (1)..(738)
atgtctgaaggaggacccattattatattaattggaggtggacatgctgccggtaagaaaaccactgccaatttattgaaagaagaacttcgtttttctcttccagatgttgatcttaatatagaaataattgatctagatgactataaggaggatgaagctaaacgagaatattccacttcaaagtcagcagctatcacgctaccagataattctgatgttaactatcctcctttaaaaccttctcggttcaattttgacaaattaagggaatatttgttaagtggtgctaaggttactctgaagtcacaacaaaagattcttattgttcatgggttatacgctttgtatgataagcaagtacgtgatatatcacacataaaggtttttcttacaagtgatcctgatacaaggttaattcgttggattagaagagatgttttggacctaaacaaaaataaatcactagaatcggtcatcaatgcttaccttcagggtgctagggcagagatgagtgacttcatctttccaactaaggaatttgccgatgttattatgccaaaaggagcagaaaaaaatgctattgggctaatagttgatggcgtaatgctgttattgccagaagaagatcaacctcagaatatattcttacctcgtaccaataaccttagacccacagtcagttttgatagtgaaaaatttgatggtcagaaaggaaagttctacgagataagctaa

SEQ ID NO: 3756 - protein, 245 aa, Debaryomyces hansenii
MSEGGPIIILIGGGHAAGKKTTANLLKEELRFSLPDVDLNIEIIDLDDYKEDEAKREYSTSKSAAITLPDNSDVNYPPLKPSRFNFDKLREYLLSGAKVTLKSQQKILIVHGLYALYDKQVRDISHIKVFLTSDPDTRLIRWIRRDVLDLNKNKSLESVINAYLQGARAEMSDFIFPTKEFADVIMPKGAEKNAIGLIVDGVMLLLPEEDQPQNIFLPRTNNLRPTVSFDSEKFDGQKGKFYEIS

SEQ ID NO: 3757 - DNA, 1521 bp, Debaryomyces hansenii
  CDS (1)..(1521)
atgccaaacgaaacaaccaaggcaagaaggtcatcaagaatatcaccatatcatgaagactcatcgtctttttttaacattgcttctgtattagataaacaaaaagatacccaacagataaatacagatctggaaaaatgttcatatattccaccctggacggagccatatattattggtatagctggtaattcaggatccgggaagacttctttatctcaaaagattatacaagaaatcaatcaaccttggacagtcttattatcatttgataatttttataatccgttgagtcaagaagaaagacagaaagcatttagtaatgaatttgattttgatacaccagattcacttgatttagatctattatataatgtggtgaaatctttgaaaagtggtgaaaagactgaaattccaatctattcatttactaagcatgatagaacagacaaaacgactacaatatacggagctaatgttattgtaatagagggaatttatgctttgtatgatcaaagactactcgacttaatggatattaagatctatgtcgatacagatcttgatatttgtcttgccagacgattaacaagagatattttatatagaggaagagacttatctggtgctatgaagcagtgggaaacatttgtgaagccaaatgcagtaaggtatgttaatcctaccatggataatgcgaatttagttattcctagaggtttggacaattctattgcaatcaacttaatgatcaaacacattcaaaagcaattagcgttaaaatcatcattacatttacaaagtttgaagagtttgggtgtgaatgaatttaatattggaaattatggaaaccttaatttgttaccgaataataaccatacaagagggatcaattccgccttattcaatatgtccactgagagatcagattttatattttattttgatagaattgcaattttaattatagagaatgctattgaaacatttgaaaattacaggtcgaagatagtaaataccgcaggcaattaccagtatcaaggattggaccacgttgatgaaatttttgcaattaatattattagatctggggattgttttatgaattctattaagaaaacatttcctgagatatctattggtaaattattgatccaatctgcagcattgacaggagaacctcagttacatttcgagaccttaccaccaaatttggacaagatcgaacataagacgatattgttatttgacgcacaaattataagtggagcagcagcgataatggcaattcaagtattacttgatcataaggtaaggatggaagatatagtattttgcacgtatttgtcaacagaaattggattgaggagaattttaaacgtgtttcctagggttaggattgtgattgggaaattaagtactattgatgacagtactaaatcgtataacccagaaaatttcaaagacaccgattggtgtttcagaaatagattcattgattctctctactttggtacataa

SEQ ID NO: 3758 - protein, 506 aa, Debaryomyces hansenii
MPNETTKARRSSRISPYHEDSSSFFNIASVLDKQKDTQQINTDLEKCSYIPPWTEPYIIGIAGNSGSGKTSLSQKIIQEINQPWTVLLSFDNFYNPLSQEERQKAFSNEFDFDTPDSLDLDLLYNVVKSLKSGEKTEIPIYSFTKHDRTDKTTTIYGANVIVIEGIYALYDQRLLDLMDIKIYVDTDLDICLARRLTRDILYRGRDLSGAMKQWETFVKPNAVRYVNPTMDNANLVIPRGLDNSIAINLMIKHIQKQLALKSSLHLQSLKSLGVNEFNIGNYGNLNLLPNNNHTRGINSALFNMSTERSDFIFYFDRIAILIIENAIETFENYRSKIVNTAGNYQYQGLDHVDEIFAINIIRSGDCFMNSIKKTFPEISIGKLLIQSAALTGEPQLHFETLPPNLDKIEHKTILLFDAQIISGAAAIMAIQVLLDHKVRMEDIVFCTYLSTEIGLRRILNVFPRVRIVIGKLSTIDDSTKSYNPENFKDTDWCFRNRFIDSLYFGT

SEQ ID NO: 3759 - DNA, 1353 bp, Yarrowia lipolytica
  CDS (1)..(1353)
atgaaagccaaacagtacgtcccgccatggaaacagccctacattattgccgtggcggggtcttcgggatcgggaaagacttcggtggctcaactcatcatcaagcagttgaatgtgccttggaccgttcttttgtccatggacaacttctacaagacgctgacacctgaggaatctgctgctgcccatcgaaacgagcacgacttcgacacgcctaccgcatacgataccgacgatctggtcaagtgtcttcgagatatcaaggcaggtcatcgagtcaacattcctacgtactcctttgtcgagcacgctcgaaccgacaaaactgtcagcatttacggcgccaacattgtgatccttgagggaatctatgtgctctatgaccaccccggcttactggatctcatcgacatgaagatctttgtcgacactgatctggatacttgtctggctcgacgactcacgagagatatgcttcatcgaggacgagaaatgtccggtattataaaccagtggcgtaagacggtcaagcccaactttgagcgatacgtgcgacctacaatggccaatgctgatgttctgattcctcgaggacgggacaatgtcgtagcgattgatatggtggcccaacatatcactaaaattcttacagacaagagtgaacgacacttggccgatctgtgctcgttgatcgacgacgacgagctggctgccgaggaagctacctggaacaaacagattcatgaactgaaacagtcgccccagcttatcggcattcacacaattctatgttcagatgataccaagcgagctgatttcgtgttctactttgatagaatcgccactctactggtcgagaatgcactgcagcactccaagtttgaaaacattaacgtcgagactcccacaggaaacacctttgagggagtccgacgtctgggaattgacaatacctgtgctgtagctataatccgagcaggtgagtgtttcgaccgttctgtcaagcgaaccatcccttcagtccgaatgggaaagctgctgatccagagtgacatttctaccggagagcccaaattgcatcatctgaaccttccttcccgcatttcagagcctgacgcctttgttctactatgtgacgctcagctctcgtctggagctgccgctatcatggctaccacagtcctggttgaccacggcgtcaaggaggagaacattgtcttcgtttgctatcttgcatctaaacgaggtcttcagcggtacctcaacgcctatcctaatgtgcatactgtggtcggtaagattctcgacggcagtcatggcagattcatcgacaccaagtactacggtacctag

SEQ ID NO: 3760 - protein, 450 aa, Yarrowia lipolytica
MKAKQYVPPWKQPYIIAVAGSSGSGKTSVAQLIIKQLNVPWTVLLSMDNFYKTLTPEESAAAHRNEHDFDTPTAYDTDDLVKCLRDIKAGHRVNIPTYSFVEHARTDKTVSIYGANIVILEGIYVLYDHPGLLDLIDMKIFVDTDLDTCLARRLTRDMLHRGREMSGIINQWRKTVKPNFERYVRPTMANADVLIPRGRDNVVAIDMVAQHITKILTDKSERHLADLCSLIDDDELAAEEATWNKQIHELKQSPQLIGIHTILCSDDTKRADFVFYFDRIATLLVENALQHSKFENINVETPTGNTFEGVRRLGIDNTCAVAIIRAGECFDRSVKRTIPSVRMGKLLIQSDISTGEPKLHHLNLPSRISEPDAFVLLCDAQLSSGAAAIMATTVLVDHGVKEENIVFVCYLASKRGLQRYLNAYPNVHTVVGKILDGSHGRFIDTKYYGT

SEQ ID NO: 3761 - DNA, 1380 bp, Kluyveromyces lactis
  CDS (1)..(1380)
atgaactcttctggctatataccaccttggacaacaccgtatgttattggtattggagggagttcaggttctggaaagacgagtgttgctaccaaactcgtgacaagaatcaacactccatggacagtattaatatcgttggacaatttctataaaccgttaaccgtcgaagaacgaaagcaggctttcgaaaataactacgatttcgataaaccggattcaatagatttggatctagcttatcaatgtatcctgtctttgaaagaaggtaagaaggtgaaaatcccaacctattcgttcacagatcatgatagaattccaaataagtttttaaccatctatggtgcgagtgttattgttattgaaggaatttacgcattatatgaccaaagacttcttgatttaatggatttgaaggtttacgtggatgcagatttagatatatgtttagctagaagattgacaagggatatcatctctcgtgggagagacttgcatggttgcataagacaatgggagaagtttgttaaaccaaatgcggataggttcgtgaaaccaaccatgaaggcagcagatgcaatcatcccatccatgtcagataacagcattgcgactgagatgttacttaatcacattcagtctaaattgcagctcaaatcgcagcagcatttagcagaacttcaaaagctcgagtcatacgctgtgtcgattgattctttaaatataattcataagttgagacaaactaatcaggtgaaggctctacagactatattgttagacaaaagcgtttcaagagatgactgggtattctattttgacaggttagcaacaatacttttatcctttgcattggacgatatacctacgaaattgaaaacgactaaagttattacgccgacaggaaaacagttggataatccagtttttgttgactttgaccgtgtcacagctataaatattgttagatctggcgactgtttcatgagatctctaagaaagacaattcctagcgtcgcagttggtaagctacttattcaatccgattccagaacaggggaaccacaattgcacagtttatttattccaccaatgatcgaaaattataaccaagtgctactgatggatgcgcagataatttcaggtgcagcgataatcatggcaatccaagttcttactgaccacaatgttgatctcaagaagattaaggttgtagtttatctagcgacagaaaccggtattagaaggatagttaatgctactaataatcaagttgaaatatacgctggagaaattatttccgatgacaaaatcagaactaatcaatgtaattgggccagaaagcggttcgttgcctcaaattactttgggtgcaagtag

SEQ ID NO: 3762 - protein, 459 aa, Kluyveromyces lactis
MNSSGYIPPWTTPYVIGIGGSSGSGKTSVATKLVTRINTPWTVLISLDNFYKPLTVEERKQAFENNYDFDKPDSIDLDLAYQCILSLKEGKKVKIPTYSFTDHDRIPNKFLTIYGASVIVIEGIYALYDQRLLDLMDLKVYVDADLDICLARRLTRDIISRGRDLHGCIRQWEKFVKPNADRFVKPTMKAADAIIPSMSDNSIATEMLLNHIQSKLQLKSQQHLAELQKLESYAVSIDSLNIIHKLRQTNQVKALQTILLDKSVSRDDWVFYFDRLATILLSFALDDIPTKLKTTKVITPTGKQLDNPVFVDFDRVTAINIVRSGDCFMRSLRKTIPSVAVGKLLIQSDSRTGEPQLHSLFIPPMIENYNQVLLMDAQIISGAAIIMAIQVLTDHNVDLKKIKVVVYLATETGIRRIVNATNNQVEIYAGEIISDDKIRTNQCNWARKRFVASNYFGCK

SEQ ID NO: 3763 - DNA, 642 bp, Erwinia carotovora subsp
  CDS (1)..(642)
atgactgatcagtctcaccagtgcgtcatcatcgggatctcaggagcgtccgcttcgggtaaaagtcttatttccagcaccttgtatcgtgaattgcgcgatcaggttggtgatcagcatatcggggtgatatctgaggacagttattataaagaccaaagccacctgaccatggaagagcgggtaaaaactaactatgaccacccaagctcgatggatcacagcctgctaatcaaacatttgcagatgctgaaatccggtcaggccatcgaagtcccgcagtacagctatgtcgagcacacccgtaaacaggaaacagtgcatattgaactgaaaaaggtcattatcctggaaggtattctgctgctgacggatgcgcgcctgcgcaatgagatgaatttctctatttttgtcgatactccactggatatttgcctgctgcgccgtatgcgtcgcgacgttaatgagcgtggccgttcaatggactccgtgatggaacagtatcaaaagaccgtgcgcccgatgttcctgcaattcattgaaccctctaagcagtatgccgatattatcgtgccgcgtggcgggaaaaaccgcattgcgattgatattttgaaagcgaagataagccagttttttgagtag

SEQ ID NO: 3764 - protein, 213 aa, Erwinia carotovora subsp
MTDQSHQCVIIGISGASASGKSLISSTLYRELRDQVGDQHIGVISEDSYYKDQSHLTMEERVKTNYDHPSSMDHSLLIKHLQMLKSGQAIEVPQYSYVEHTRKQETVHIELKKVIILEGILLLTDARLRNEMNFSIFVDTPLDICLLRRMRRDVNERGRSMDSVMEQYQKTVRPMFLQFIEPSKQYADIIVPRGGKNRIAIDILKAKISQFFE

SEQ ID NO: 3765 - DNA, 627 bp, Mesoplasma florum L1
  CDS (1)..(627)
atgtcaaaaaatgtaactttaatacttatagctggtggaacagcatcaggaaaaacaactgttgctgatagaatagctaatgaaattttaaaaggtaaatcggtaactcatatttcaatggataattattataaagattttggtgaattgactttagaagaaagaaggaaaataaactttgatcatccaaatagtgtggatactgaactacttttaaatgacttgcaagctttaaaagactatcaaccaatcaaggtgccggtttatgattttaaaacttcttcaagaaccaaagaaacaattacagttaaacctagtgatgttgtaatacttgatggaatttttgcactagctattaaagagattagaaaacttggagatatcaaaatttttataaaaacagctaatgatttaaggtttattagacgtttacaaagagatgtaaatgaaagagggagaactttagaaagtgttgttgaacaatacttaaatgaagttaaaccaatgcatgatgcatttattgggccaagtattgaatacgctgatttaataattccttataaagaggggaatgaagttgcagttgatttagtagcaactaaaatattaacattgttaacagagtaa

SEQ ID NO: 3766 - protein, 208 aa, Mesoplasma florum L1
MSKNVTLILIAGGTASGKTTVADRIANEILKGKSVTHISMDNYYKDFGELTLEERRKINFDHPNSVDTELLLNDLQALKDYQPIKVPVYDFKTSSRTKETITVKPSDVVILDGIFALAIKEIRKLGDIKIFIKTANDLRFIRRLQRDVNERGRTLESVVEQYLNEVKPMHDAFIGPSIEYADLIIPYKEGNEVAVDLVATKILTLLTE

SEQ ID NO: 3767 - DNA, 1431 bp, Candida glabrata
  CDS (1)..(1431)
atgcatgatatgaccgggaactctactgaggctagacgtagtagtgttcatttgaatgaccaacacaaatatattccgccatggactactccttatatcatcggtgttggtggtacgtctgggtcaggtaagaccagtgtggccaataagattgtctcatctattaatgttccatggactgtgctaatctccttggataatttctataaaccactcaatgaagcagaacgggagcgtgcgtttaataacgagtacgactttgatgaacctaatgcaatcgatttggatttggcatatgactgtattttgagcttgaaagaaggtaagaaaacctctattcccgtctatagttttacccaccataatagagatccacacaagcagatccctatatatggtgccagtgttatcgtcttagaaggtatttatgcattatatgatcaaagattacttgatttgatggatttaaaggtgtatgttgacgctgatttagacatttgtttggctagaagattatcgagagatattgttgcaagaggaagagatttgcaaggctgtttattacaatgggaaagatatgtcaaacccgatgctgtcaagtacgttaagccaacaatggcgaaagctgatgctattataccttcaatgtctgataacacagttgctgtaaagctgctaattaagcacatagaatcaaaactagaactgaaatctgaagagcacatgacagaacttgtcaaattaggccaatctggaactggtccattatcagattataagaatttggaggttcttccacagacaaatcaaattaaggccatacacactattttattggacagaaatgtcgatagggatgagttctccttccaatttgataggattgcaactttgttactagccaatacactcaatgatatccctgttcagaaaccagaaactattatcactccagatggattcagtgtaccaggccaacgtaggtgctgctttgatgaagttacagctatcagcacaattagatcaggcgattgttttatgaaagctgttaaaaaggctttcccagccatggcaattggtaagctattaattcaatctgattccctgacaggtgagccacaactgcactgtgagtttatccccgaggacatctcaaaatacaggaaaatactaataatggattctcagatcattagtggtgctgctatgattatggccgtacaagttcttctagaccacaaagtcgatatagaaaacatccatattttagtatacatggccacagaactaggtattagaagaattataaacgcgtttggcaataggatcaaaattacagcaggtattgtcgtcgagagaaatgaaataaaaaacaagaaggcaagttgggccctaacaagatttgtcgacaacaaatattttggttgctaa

SEQ ID NO: 3768 - protein, 476 aa, Candida glabrata
MHDMTGNSTEARRSSVHLNDQHKYIPPWTTPYIIGVGGTSGSGKTSVANKIVSSINVPWTVLISLDNFYKPLNEAERERAFNNEYDFDEPNAIDLDLAYDCILSLKEGKKTSIPVYSFTHHNRDPHKQIPIYGASVIVLEGIYALYDQRLLDLMDLKVYVDADLDICLARRLSRDIVARGRDLQGCLLQWERYVKPDAVKYVKPTMAKADAIIPSMSDNTVAVKLLIKHIESKLELKSEEHMTELVKLGQSGTGPLSDYKNLEVLPQTNQIKAIHTILLDRNVDRDEFSFQFDRIATLLLANTLNDIPVQKPETIITPDGFSVPGQRRCCFDEVTAISTIRSGDCFMKAVKKAFPAMAIGKLLIQSDSLTGEPQLHCEFIPEDISKYRKILIMDSQIISGAAMIMAVQVLLDHKVDIENIHILVYMATELGIRRIINAFGNRIKITAGIVVERNEIKNKKASWALTRFVDNKYFGC

SEQ ID NO: 3769 - DNA, 639 bp, Bacillus thuringiensis serovar konkukian str
  CDS (1)..(639)
atggggacgaataagcctgttgtaattggaattgctggtggttcagggtcaggtaagacaagtgtaacgaaagcgatttttgaccattttaaaggtcattccattttaatcttagagcaagattattattacaaagatcaaagccatttaccaatggaagaacgtttaaaaacaaattatgatcatccattagcgtttgataatgatttgttaattgaacatttgcagcagttgcttgcatataaacaagtagataaacctgtatatgactatacattgcatacgcgttcagaagaaattattccagttgagccgaaagatgtaatcattttagaaggaattcttattttagaagacccacgtctttgtgagttaatggacattaagctattcgttgatacagatgcggaccttcgtatcctgcgccgcatgcagcgtgatattaaagaacgcggtcgtacgatggattcagttattgatcaatatgtaaatgttgtacgtccaatgcacaatcaatttattgagccttctaagaagtttgcggatattattatccctgaaggtggacaaaaccacgttgcaattgatattatggttacaaaaattgcaacaattcttgaacaaaaagtaaatttgtaa

SEQ ID NO: 3770 - protein, 212 aa, Bacillus thuringiensis serovar konkukian str
MGTNKPVVIGIAGGSGSGKTSVTKAIFDHFKGHSILILEQDYYYKDQSHLPMEERLKTNYDHPLAFDNDLLIEHLQQLLAYKQVDKPVYDYTLHTRSEEIIPVEPKDVIILEGILILEDPRLCELMDIKLFVDTDADLRILRRMQRDIKERGRTMDSVIDQYVNVVRPMHNQFIEPSKKFADIIIPEGGQNHVAIDIMVTKIATILEQKVNL

SEQ ID NO: 3771 - DNA, 834 bp, Homo sapiens
  CDS (1)..(834)
atggcttcggcgggaggcgaagactgcgagagccccgcgccggaggccgaccgtccgcaccagcggcccttcctgataggggtgagcggcggcactgccagcgggaagtcgaccgtgtgtgagaagatcatggagttgctgggacagaacgaggtggaacagcggcagcggaaggtggtcatcctgagccaggacaggttctacaaggtcctgacggcagagcagaaggccaaggccttgaaaggacagtacaattttgaccatccagatgcctttgataatgatttgatgcacaggactctgaagaacatcgtggagggcaaaacggtggaggtgccgacctatgattttgtgacacactcaaggttaccagagaccacggtggtctaccctgcggacgtggttctgtttgagggcatcttggtgttctacagccaggagatccgggacatgttccacctgcgcctcttcgtggacaccgactccgacgtcaggctgtctcgaagagttctccgggacgtgcaccgagggagggacctggagcagattctgacgcagtacaccaccttcgtgaagccggccttcgaggagttctgcctgccgacaaagaagtatgccgatgtgatcatcccgcgaggagtggacaatatggttgccatcaacctgatcgtgcagcacatccaggacattctgaatggtgacatctgcaaatggcaccgaggagggtccaatgggcggagctacaagcggaccttttctgagccaggggaccaccctgggatgctgacctctggcaaacggtcacatttggagtccagcagcagaccccattaa

SEQ ID NO: 3772 - protein, 277 aa, Homo sapiens [sequence omitted]

SEQ ID NO: 3773 - DNA, 1965 bp, Oryza sativa
  CDS (257)..(1726)
gggcttcttcctccacctctcccccccactctctctctctcctctctcttctctctctcctccaccgactcgccaacccctctctctctccctcctctcccatttcgtccccctcccgctcccctccccgtccgtcccccgtatctgccgccaccggggctgggcacggttctggttgatctcccccggccaacttcttgcggcggcggcgatctccgtgcgtggcttcgcgccccgcaggttcttggaacaatatatgggttcaagaccagttgatgaggttcttgatgctgccgcggctggggtccactactccacgctccgtttggatgagcttaacatcaatggctccatgacaggggaggaacaaccaacgacctcaggggtggagaatgggcaccaggagccatttgtcattggtgttgccgggggtgcatcttcaggcaaaagtactgtatgcaaaatgataatcgatcagctacgtgatcagcgtgtagttgttgttactcaggagtctttttattatgggttgtctgatgaggaattggtccatgttcatgattataactttgatcatccagatgcatttgatacggagttactactctcttgtatggagaacttgaaacatggcaaggctgtggacattcctaattacaacttcaaaacatataagagtgttgcaagtgcaagaaaggtcaatccttcagatgtaattattttggaaggaattctggttttccatgattcacgtgtccgggatttgatgaacatgaagatctttgttgacacagatgctgatgtgcgattaacaaggaggattcgacgtgacaccattgagaagggtagagatatcaaaactgtgctagatcagtactcaaagtttgttaagcctgcttttgaagacttcatcctcccaaccaagaagtatgctgatattatcatcccacgaggtggcgataatgatgttgcaattgacttaatagttcagcatattcgtactaagcttggtcaacatgatctctgtaaagtacaccccaatttgtatgtcattcagactacttatcagatacgaggtatgcacacaataatacgggatgctgccacaacaacacatgatttcatattctatgctgatcggttgattcgattggttgttgagcatggtcttggtcatcttccattcaaggaaaagcaggtcataactccaactggatcggtttacactggggtagagttctccaaaagattgtgtggtatctcagtgattagaagtggtgagagtatggagaatgcattgcgggcatgctgcaaaggtataaaaattgggaagattcttattcacagggaaggagacaatggcaaacagctaatctatcacaatttaccgaaagatattgcaaacaggcatgtgctgttgttggatcccatactgggaacaggaaattcagctgttcaagctatatctctactcttgaaaaagggtgtacaggaaacaaatattatttttctgaatcttatatcagctccccaaggagtgcatgtggtcagcaagagatttccaagagtgaagatcgtgacatcagaaatcgagtttggtctgaatgatgatttccgcgtcatccctgggatgggtgagtttggggataggtactttgggacagatgattatcagtcatcaacaccattcttttgtgatgagaaaaatcgtgtcaggcttttgtgagcatttaaatagacaaagtcctggcggcggcggcggcatcatctccatttttgagaaacttaaattttacatttggaaattcagatgcccatattgatgtattcattaccagaaactgtgtatcggttgaacattacaggccgatcttgcctaatgacataaacggagcaaattcctttatgttttttcttatgtcttctccagctttttagtcaggaagatgctgtgatctcatttcg

SEQ ID NO: 3774 - protein, 489 aa, Oryza sativa
MGSRPVDEVLDAAAAGVHYSTLRLDELNINGSMTGEEQPTTSGVENGHQEPFVIGVAGGASSGKSTVCKMIIDQLRDQRVVVVTQESFYYGLSDEELVHVHDYNFDHPDAFDTELLLSCMENLKHGKAVDIPNYNFKTYKSVASARKVNPSDVIILEGILVFHDSRVRDLMNMKIFVDTDADVRLTRRIRRDTIEKGRDIKTVLDQYSKFVKPAFEDFILPTKKYADIIIPRGGDNDVAIDLIVQHIRTKLGQHDLCKVHPNLYVIQTTYQIRGMHTIIRDAATTTHDFIFYADRLIRLVVEHGLGHLPFKEKQVITPTGSVYTGVEFSKRLCGISVIRSGESMENALRACCKGIKIGKILIHREGDNGKQLIYHNLPKDIANRHVLLLDPILGTGNSAVQAISLLLKKGVQETNIIFLNLISAPQGVHVVSKRFPRVKIVTSEIEFGLNDDFRVIPGMGEFGDRYFGTDDYQSSTPFFCDEKNRVRLL

SEQ ID NO: 3775 - DNA, 747 bp, Photobacterium profundum
  CDS (1)..(747)
atgctggaagtcacgttttctctggcttctggcgctgcaagtgcctataataatgcggttaatttttcgcctcgtcacgttgtcttacaggtgctttctgatatgtctgaaaactcacaccaatgcgtcattattggtatcgcaggtgcttctgcgtccggtaaaagcttgattgccagtactgtttataaagaattaaaagaaaaagtaggcgatcatcagatcggtgttatcacggaagattgttactacaataatcaaagccacctgaccatggatgagcgggttaaaacgaattatgatcaccctaatgcgcttgaccacaatttactttgtgaccatctgcaacggttgatcgaaggcaaagcggttgaagtgcctcaatacagctacagcgaacacacacgtttaaaagaaaccacaccaatgacacctaaaaaagtgatcattcttgaaggtatccttttattaaccgatccacgtttacgtgaactcatgcatgcaagtgtgttcatggatacgccattagatatttgtttacttcgccgtttgcagcgtgatgttgctgaacgtggtcgtacaatggaatctgtgcttgtgcagtatcaaaagacggtacgtcctatgttcatgcagtttattgaaccgtctaaacaatatgccgatatcattgtaccgcgagggggtaaaaaccgaatcgcgattgatgtactgaaggcgcatattgccaagttgctaaaatcataa

SEQ ID NO: 3776 - protein, 248 aa, Photobacterium profundum
MLEVTFSLASGAASAYNNAVNFSPRHVVLQVLSDMSENSHQCVIIGIAGASASGKSLIASTVYKELKEKVGDHQIGVITEDCYYNNQSHLTMDERVKTNYDHPNALDHNLLCDHLQRLIEGKAVEVPQYSYSEHTRLKETTPMTPKKVIILEGILLLTDPRLRELMHASVFMDTPLDICLLRRLQRDVAERGRTMESVLVQYQKTVRPMFMQFIEPSKQYADIIVPRGGKNRIAIDVLKAHIAKLLKS

SEQ ID NO: 3777 - DNA, 621 bp, Bdellovibrio bacteriovorus
  CDS (1)..(621)
atgcaaagacctcacatcatcggtgttgctggtggcagtggctccggcaaaacacacttcgccaaagagctgcaacaactgctgggcgaagacaactgctccatcatctaccaggacaactactacatcgaccaatccgcaaaatttgacggcgatggcggttcggtgaactttgatcatccctccagtcttgatttcactttgctcgcacagggcttgcgtgccctgaagtccggccaaagcctgaacatcccgatttatgattttgtcactcattcccgcaaaaaagagacccttccaggcgaacccaaaaaagtcattatcatcgacggaatcctgatcctacactctgaagaagtccgccaggaactggatgaggccatcttctttgacacccccgaatccctgcgctttgagcgccgtctgaaacgtgatgttcacgaacgcggcagaacgccagagggagtgcgcaagcagtttgaactgcaagtgcgccccatgcacaatcagtttgtcgagccctccaaagaccacgctcacaccatcatcaaggatctgggcgactacagccaggccctgaaacagtatcagcagaaactttcaaaagccttcctgcagtaa

SEQ ID NO: 3778 - protein, 206 aa, Bdellovibrio bacteriovorus
MQRPHIIGVAGGSGSGKTHFAKELQQLLGEDNCSIIYQDNYYIDQSAKFDGDGGSVNFDHPSSLDFTLLAQGLRALKSGQSLNIPIYDFVTHSRKKETLPGEPKKVIIIDGILILHSEEVRQELDEAIFFDTPESLRFERRLKRDVHERGRTPEGVRKQFELQVRPMHNQFVEPSKDHAHTIIKDLGDYSQALKQYQQKLSKAFLQ

SEQ ID NO: 3779 - DNA, 624 bp, Bdellovibrio bacteriovorus
  CDS (1)..(624)
atgagccgtccccacattatcggagtcgctggcggcagcggctctggcaaaacatacttcgccaaagaactgcaaaagatgctgggttcagaaaactgcagcatcctttatcaggacaattactatatcgaccagtccgctcgctttgatggagatgggggctcggtgaactttgatcatccccaggccttggatttcacgctactcgcacgcgggcttcagacccttaaaatgggtcagccgctgcaggtgccaatttacgactttgtcacccactcgcgtaaaacggaaacccttctggaaaaccctaaaaaagtcattatcgtggatgggatcttgatcctgcattcaaaagaagttcgagccgagctggatgaagccgtcttttttgacacccccgaagacctgcgctttcaacgccgtctgcaccgcgatgtgcatgaacgcgggcgcaccccagagggagtaaaaaagcagtttgaacttcaggttcgtcccatgcatgacgaatttgtggagccttcaaaacgtcatgcccaaaccatagtgacggactcaggggactatcatgcggtactttcacaattcacccatcgcctgcaaaacaccctgcccgtgcggtaa

SEQ ID NO: 3780 - protein, 207 aa, Bdellovibrio bacteriovorus
MSRPHIIGVAGGSGSGKTYFAKELQKMLGSENCSILYQDNYYIDQSARFDGDGGSVNFDHPQALDFTLLARGLQTLKMGQPLQVPIYDFVTHSRKTETLLENPKKVIIVDGILILHSKEVRAELDEAVFFDTPEDLRFQRRLHRDVHERGRTPEGVKKQFELQVRPMHDEFVEPSKRHAQTIVTDSGDYHAVLSQFTHRLQNTLPVR

SEQ ID NO: 3781 - DNA, 618 bp, Mycoplasma mycoides
  CDS (1)..(618)
atgagtaaaaaagttagcattattttaatagctggcggtagtgctagtggaaaaacaactattgctagtaaaatagctaatgagattttaaaagataaatctgtagaacatatttcaatggataattactataaagattttactaatttatctttagagcagagaaaccatattaattttgatcacccaaattcaattgatattgatcttttaattaaagatttaaaacaacttttaaaaagacatgatatttttgttccaacttatgattataaaaaacatattagaacaaataaagaaaaactaattaaagctagtgatgttattatagttgatggcatcttttcattacattttgaaaaattacgcgaacttggagatattaaaatatttgtaaaaactcctgatgatttaagatttattagaagattagtcagagatataaaagaacgtaatagaactattgaaagtgttattgatcaatacttaactgatgttaaacctatgcatgatctttttatagaacaaactattgattatgcagatattgtatttaaaaaaggaaatgatgtagctattgatatagttgcttcaaaaattaaagacttattaaattaa

SEQ ID NO: 3782 - protein, 205 aa, Mycoplasma mycoides
MSKKVSIILIAGGSASGKTTIASKIANEILKDKSVEHISMDNYYKDFTNLSLEQRNHINFDHPNSIDIDLLIKDLKQLLKRHDIFVPTYDYKKHIRTNKEKLIKASDVIIVDGIFSLHFEKLRELGDIKIFVKTPDDLRFIRRLVRDIKERNRTIESVIDQYLTDVKPMHDLFIEQTIDYADIVFKKGNDVAIDIVASKIKDLLN

SEQ ID NO: 3783 - DNA, 2638 bp, Oryza sativa
  CDS (248)..(2206)
ggctttttggatcgacggcgacgccgccctctccatctccagagagagccctcttctccgtttcttcctactaggctactactactcctcctcggctcaaccctcccgtcccctcacccccacgcgcgccgccttctccccagaacgcgccgcggcgaagcgccgccgaagcagcccccactcctccgcgcgcggcggcggcggcgcagtctccagacgcttcctcctccggggatctcgcctttgaatggaccgaagtgattccatggctgattcgccaaggaggcgtaatggccttctgcgggaccaggtccagttggtgaaaaggaaggacacaaatcgctacgaaatcgtccgctttcctgatccattgtcatttgagaaaggcttctttgttatgatccgtgcctgccagcttctggtgcagcacaatgaagggatgatttttgttggcgttgctggaccctctggggccgggaagactgtgtttactgagaaggtgctcaatttcatgcccggtgttgctgtgatatcaatggataactacaatgatgcaagtcgcatagttgatggcaattttgatgatccacgcctaacagactacgacacactgttggaaaatattcatggtctgaaggagggaagatcagttcaggttccaatatatgatttcaagatgagctgccggactggatacagaacagttgatgtccctagctctaggattgttatcattgaaggcatctatgcattgagtgaaaagttacgatctgtattggacctacgtgtttctgtcactggtggtgttcattttgacctggtgaagagggtcctgagggacatacagagagctggccaggagcctgaggaaataattcatcagatatctgaaacggtttatccgatgtataaggctttcattgagccagacttgcagacagcacatataaaaataatcaacaagttcaacccattctcagggttccaaaatcctatgtacattctaaagtctccacgaactataacacctactgacatcaaagttgctcttggtgaagatcatacagaaagcattgaagaaacttatgatatatatttgcttcctccaggcgaagatccagaatcatgccaatcttatttgagaatgaggaatagggaagggaaatataatctgatgtttgaggagtgggtgaccgataatccttttatcatatcaccaaggattacgtttgaagtcagtgttcgtcttcttggaggtttgatggcattgggatatactatagcagctatactgaagagaaagagtcgtgtgttttctgatggcaaggcaactgttaaaattgattggttggagcaacttaaccgaaattatatacaggtgcaaggaagagatagaaatcatgtcaaatttgtagcggagaagttaggtctggatggctcttatattccacgcacatatattgaacaaattcagctggagaaactgataaacgatgttatggcattaccagaagatctcaagacaaagctcagcattgatgatgagctggtttcaagtccaaaagaggccctttctcgggtttctgctgataagagaaacaaacacctgaaaagtggtctatctcattcatattcaactcatggagataaaaatattgtgaaattgagtaaattgacagaaaccaacagaaggtttggaagtgggcgagcccctgaacctcctgcaattaatcagggtgctatcactcagctatccgaacagatttcaacgttgaatgagaggatggacgagttcacctctcgagttgaagaactcaactgtaaatttgcaataaagaaatcatcgaccagtcagcaaaatttagctcttccaaatgaaacttgcaatggttctgcacctacaaatctctttgtttctcatttgggcaatggtaccctgatacctcattcgtcatcatcgaaccaacttttgaaggagtcccccattgtggatgagattaatgccatatcaagaggtcagcgccaagtgatacatcagcttgacaatctgaccagcttgcttcatgagcatttggccttgacccgccaaggaaatgcagtccgcagaaacgggatcctggaaatggacatgtccatctgcccactcattgccctgacaattggcggtttcggctatttggtgttcaagagcctcaaccggagctaaccgaagcgaatcaggcagcgacatgctgctttaaaaagctcaccaccaagttcaaccaagaaccagagaaagccaagaagtctcaaaacggatcttcactcttcagtactcagtccagacaccaaaccgatgttctcctgcgagctatagacggtcctcactcagatcattggtctcatggggaccatatctgatagattttacaatttcaagatagataaactcatataccagcacaagcaacagagcagtcttgatactcgggccaagttacttggaagcttaaaaactgtgtactaaagagcgtagagttatacaatatcgtctgtaatggatactggaaagcccccagtatcaataaattttggagacgctagtaatcccgatataatgtcgaacaagtcgtgggaaaagagcatagtcattttaccg

SEQ ID NO: 3784 - protein, 652 aa, Oryza sativa
MDRSDSMADSPRRRNGLLRDQVQLVKRKDTNRYEIVRFPDPLSFEKGFFVMIRACQLLVQHNEGMIFVGVAGPSGAGKTVFTEKVLNFMPGVAVISMDNYNDASRIVDGNFDDPRLTDYDTLLENIHGLKEGRSVQVPIYDFKMSCRTGYRTVDVPSSRIVIIEGIYALSEKLRSVLDLRVSVTGGVHFDLVKRVLRDIQRAGQEPEEIIHQISETVYPMYKAFIEPDLQTAHIKIINKFNPFSGFQNPMYILKSPRTITPTDIKVALGEDHTESIEETYDIYLLPPGEDPESCQSYLRMRNREGKYNLMFEEWVTDNPFIISPRITFEVSVRLLGGLMALGYTIAAILKRKSRVFSDGKATVKIDWLEQLNRNYIQVQGRDRNHVKFVAEKLGLDGSYIPRTYIEQIQLEKLINDVMALPEDLKTKLSIDDELVSSPKEALSRVSADKRNKHLKSGLSHSYSTHGDKNIVKLSKLTETNRRFGSGRAPEPPAINQGAITQLSEQISTLNERMDEFTSRVEELNCKFAIKKSSTSQQNLALPNETCNGSAPTNLFVSHLGNGTLIPHSSSSNQLLKESPIVDEINAISRGQRQVIHQLDNLTSLLHEHLALTRQGNAVRRNGILEMDMSICPLIALTIGGFGYLVFKSLNRS

SEQ ID NO: 3785 - DNA, 1494 bp, Oryza sativa
  CDS (20)..(1231)
agaaaggccagaagcaaagatggcgatctccagcctacatgccaccacctccctgcactccccatgcaccaccaacacaagcttcaggcagaatcaggtcatcttcttcaccaccagaagcaacaggaggggtagcacaaggtacggaggagcaagaacctttcaggtttcatgctcagtcgacaagccagtggtgattggccttgcagcagactcaggatgcgggaagagcacctttatgcgccggctcaccagtgtgtttggcggtgctgcagagccacccaagggtggcaacccagactcaaacacactcatcagtgacacgacaacggtgatatgcctcgatgactaccattccttggacaggactggcaggaaggagaaaggtgtgactgccctggaccctagggcaaacgattttgatctcatgtatgagcaggtgaaggcaatcaaagaaggcaaggcaattgagaagccaatctacaaccatgttactggtctcctagacccaccggagcttatccagccccccaagatttttgtcattgagggcttacatcccatgtttgatgaacgtgtgagggacctcctagatttcagcatctacctggacatcagtgacgaggttaaatttgcatggaaaattcagagggatatggcagagcgcggtcacagccttgaaagcatcaaggctagtatcgaagccaggaaaccagattttgatgccttcattgatccccagaagcaatatgctgatgcagtgattgaagttctgccaacccagcttattcctgatgacaatgaaggaaaggtgctacgtgttaaattgatcatgaaagaaggtgtaaagaacttcaacccagtttacctcttcgacgaaggatcaagcatcacctgggtcccttgtggaagaaaactcacatgttcttatcctggcatcaaatttgcctatggcccagacacttactttgggcatgaggtatcagtgctggagatggatggccaatttgacagactagatgagcttatctatgttgagagccatttaagcaacctctcaaccaaattttatggagaggtgacacagcaaatgctaaagcatgcagacttccccggcagcaacaatggaacaggtctcttccaaactatcgtaggactgaagattagagatctctatgagcagattattgctgagagggccggtgcacctactgaagcggcaaaagtttaatgagctccacattcatatttcgtgaatctcttcatcaccataccatatcaatgacaatgggcatcctcgcattccttgtaactagttttggaaatattacagctagaagaaagtaggatggtcattgcataacttgtgaaaccatgcaatggaacttctaaaaatccctctccatgagggtgctcctacatctcttcttgacacatttcaatgtacatcttctatatttcaatgtagaaagaaatacggttgctttctactat

SEQ ID NO: 3786 - protein, 403 aa, Oryza sativa
MAISSLHATTSLHSPCTTNTSFRQNQVIFFTTRSNRRGSTRYGGARTFQVSCSVDKPVVIGLAADSGCGKSTFMRRLTSVFGGAAEPPKGGNPDSNTLISDTTTVICLDDYHSLDRTGRKEKGVTALDPRANDFDLMYEQVKAIKEGKAIEKPIYNHVTGLLDPPELIQPPKIFVIEGLHPMFDERVRDLLDFSIYLDISDEVKFAWKIQRDMAERGHSLESIKASIEARKPDFDAFIDPQKQYADAVIEVLPTQLIPDDNEGKVLRVKLIMKEGVKNFNPVYLFDEGSSITWVPCGRKLTCSYPGIKFAYGPDTYFGHEVSVLEMDGQFDRLDELIYVESHLSNLSTKFYGEVTQQMLKHADFPGSNNGTGLFQTIVGLKIRDLYEQIIAERAGAPTEAAKV

SEQ ID NO: 3787 - DNA, 1824 bp, Homo sapiens
  CDS (45)..(1232)
ttgcgcgccgcccggccaggcccgcaaagaggcctccgagcgccatggctgcgcccccggcccgcgcggacgctgatccttcgcccacgtcgccacctacggcccgagacacaccaggccggcaggctgagaaaagcgagaccgcgtgcgaggaccgcagcaatgcagagtccctggacaggctcctgccacctgtgggcactgggcgctctccccggaagcggaccaccagccagtgcaagtcagagcctcccctgctgcgtacaagcaagcgtaccatctacaccgccgggcggccgccctggtacaatgaacacggcacgcaatccaaagaggccttcgccatcggcttgggaggcggcagtgcctctgggaagaccactgtggccagaatgatcatcgaggccctggatgtgccctgggtggtcttgctgtccatggactccttctacaaggtgctgactgagcagcagcaggaacaggccgcacacaacaacttcaacttcgaccacccagatgcctttgacttcgacctcatcatttccaccctcaagaagctgaagcaggggaagagtgtcaaggtgcccatttatgacttcaccacgcacagccggaagaaggactggaaaacactgtatggtgcaaacgtcatcatctttgagggcatcatggcctttgctgacaagacactgttggagctcctggacatgaagatctttgtggacacagactccgacatccgcctggtacggcggctgcgccgggacatcagtgagcgcggccgggacatcgagggtgtcatcaagcagtacaacaagtttgtcaagccctccttcgaccagtacatccagcccaccatgcgcctggcagacatcgtggtccccagagggagcggcaacacggtggccatcaacctgattgtgcagcacgtgcacagccagctggaggagcgtgaactcagcgtcagggctgcgctggcctcggcacaccagtgccacccgctgccccggacgctgagcgtcctgaagagcacgccgcaggtacggggcatgcacaccatcatcagggacaaggagaccagtcgcgacgagttcatcttctactccaagagactgatgcggctgctcatcgagcacgcgctctccttcctgccctttcaggactgcgtcgtacagaccccgcaggggcaggactatgcggatcaccggtgtgtccattctgcgcgccggtgaaaccatggagcccgcgctgcgcgctgtgtgcaaagacgtgcgcatcggcaccatcctcatccagaccaaccagcttaccggggagcccgagctccactacctgaggctgcccaaggacatcagcgatgaccacgtgatcctcatggactgcaccgtgtccacgggcgcggcggccatgatggcagtgcgcgtgctcctggaccacgacgtgcctgaggacaagatctttttgctgtcgctgctcatggcagagatgggcgtgcactcagtggcctatgcatttccgcgagtgagaatcatcaccacggcggtggacaagcgggtcaatgaccttttccgcatcatcccaggcattgggaactttggcgaccgctactttgggacagacgcggtccccgatggcagtgacgaggaggaagtggcctacacgggttagctgcccagtgagccatcccgtccccaccaccctcctcctgcctcctgacccaggactgttgaatacaaagatgttaatttttaaaatgttactagtataatttattctatgcattttataaaataaataaagctttagaaaaaaaaaaaaaaaaaa

SEQ ID NO: 3788 - protein, 395 aa, Homo sapiens [sequence omitted]

SEQ ID NO: 3789 - DNA, 630 bp, Listeria monocytogenes
  CDS (1)..(630)
atgacaaaaaaaccaatcgtagtcggcgtaactggcggttcaggttctggtaaaactagtgtaacgaaagccatttgtgatcattttagcggacactcgattttgatgattgctcaagatgtctattatcacgatcaagccaatattagttttgaagatagattaaaagtaaattatgatcatccactagcttttgatacggacttactcatttcacatattgccgcactgcgtcgctatgaaaccatagaaaagccgatttatgattatgccaaatatacgcgaaaaaaagaagtagaaatccaagaacctagagaggttattattttagaaggaattttaattttagaagataaacgccttagggatttgatggatattaaagtatatgtggataccgatgatgatattcgttttattcgcagacttttacgcgatatgaaagaacgtggtcggacaatggattctgttatcgagcaatatctttctgttgttaaaccaatgcacaatgaatttatagaaccaacgaaaaaatttgccgatattattattccagaaggcggagagaatcacgttgcaatcgacttaatgacaacaaaaattgaatccattttgcaaaaacatgtataa

SEQ ID NO: 3790 - protein, 209 aa, Listeria monocytogenes
MTKKPIVVGVTGGSGSGKTSVTKAICDHFSGHSILMIAQDVYYHDQANISFEDRLKVNYDHPLAFDTDLLISHIAALRRYETIEKPIYDYAKYTRKKEVEIQEPREVIILEGILILEDKRLRDLMDIKVYVDTDDDIRFIRRLLRDMKERGRTMDSVIEQYLSVVKPMHNEFIEPTKKFADIIIPEGGENHVAIDLMTTKIESILQKHV

SEQ ID NO: 3791 - DNA, 636 bp, Thermus thermophilus
  CDS (1)..(636)
atgagcgcgcccaagcccttcgtcatcgggatcgccgggggaacggcgagcggcaagaccaccctcgcccaggccctggcccggaccctgggggagcgggtcgccctcctccccatggaccactactacaaggacctgggccacctccccctggaggagcgcctccgggtaaactacgaccacccggacgcctttgacctcgccctctacctggagcacgcccaggccctcctccggggccttcccgtggagatgcccgtctacgacttccgggcctacacccgaagccccagaagaacgccggtccggcccgcccccgtggtgatcctggaaggcatcctggtcctctaccccaaggagctccgggacctcatggacctcaaggtcttcgtggacgccgacgccgacgagcgcttcatccgcaggctcaagcgagacgtcctggaaaggggcaggagcctggaaggggtggtggcccagtacctggagcaggtcaagcccatgcacctccacttcgtggagcccaccaagcggtacgccgacgtgatcgtgcccaggggcggccagaaccccgtggccctggagatgctcgcggccaaggccctcgcccgcctggcccggatgggggcagcgtga

SEQ ID NO: 3792 - protein, 211 aa, Thermus thermophilus
MSAPKPFVIGIAGGTASGKTTLAQALARTLGERVALLPMDHYYKDLGHLPLEERLRVNYDHPDAFDLALYLEHAQALLRGLPVEMPVYDFRAYTRSPRRTPVRPAPVVILEGILVLYPKELRDLMDLKVFVDADADERFIRRLKRDVLERGRSLEGVVAQYLEQVKPMHLHFVEPTKRYADVIVPRGGQNPVALEMLAAKALARLARMGAA

SEQ ID NO: 3793 - DNA, 1653 bp, Treponema denticola
  CDS (1)..(1653)
atggcttcatttaaaataacttttcctgacggaactcaaaaagaatttgttaatccggtgtcggcgcgtgagctggtacaatattttccggcctgccctgctcctatagtaggcataaaggtaaacaatttggtagtacccttaaataaaaccatcgatgtacaatccaatatagaaccggtaaccttagccgaccgagaaggctcaaatttttaccgaagaactctctgcctgattttagctgctgcagcaaaagaactctaccccggcttaaggcttttaatgggacacagcctggattacggctattattacacccttgaaggaaaaaattcaagtaaggtggattttaaggctataaaggcaaaaatggatgaaatggtagctcaagacatgcctatcgatacccgctggctttcctacgaggaagccttggaaaaattcgaacactcaaatcaacccgaaacccatagacttttaaactacacgagtaaaccccgaattttaataaaccgtttaggcagctatgaagatctctattttcaaccccttatggatagaataggtgaagtcaaggtctttgatgtaatgccctatgaagacggctttttactcaggtttccgaggacatcatctcctacaaagctctcggaatttaaagacattccccatctttttgaaatttataaagaatataaacaatggggaaaacttgtaggcgtttcatcggtgggtcagttgaacgacttaattacctcaagaaaaataaaagactatgtagaaattaccgagatacttcaaaacaataaacttgccgaaatagcaaaaaaaataacggctaaaaaaaccgcaagggtaatactgatagcaggcccttcaagttccggaaaaaccacttcggctaaaaaactttcaatgcagcttaaggttcttgggtatgtacctaaggttataagccttgacgatttttatctgggtattgctaaagcaccgaaaaaagaagacggaaggcccgactttgaatgtgttgaggctctggacattgagctcttaaacgatgtccttctccgtctattcaatggtgaaacagtcgaaatgccttcctacgattttaaggtaagtgcccgcagacctgaaggtaagatgtttacccctgaacaaaacacaatctttatacttgaaggaatccatgctctgaacaataagcttacggcaaaaatagacgagtcattaaaatttaaggtctacctttcggctctcacccagcttaatttggatgaccataaccgcatccctacatcggataacagacttataagacgcatagtccgagatgcccagtttagaggaagccctgcagcaagaacaataggaatgtggggcgacgtaagaagcggagaatcaaaatatattttcccattccaaggaaatgccgatgctgtctttaacacggccctggactatgagctttcagtcttaaaggtttatgcagaaccgcttttaaaggcggtaaagccgaaccaaaaggaatacaacgaagcgtcgaggctgttaacctttttaggaaactttctaccgcttccggccagctttgtacacggacaatccatattgcgcgaatttatcggagacagcgacttttcgtacagctaa

SEQ ID NO: 3794 - protein, 550 aa, Treponema denticola
MASFKITFPDGTQKEFVNPVSARELVQYFPACPAPIVGIKVNNLVVPLNKTIDVQSNIEPVTLADREGSNFYRRTLCLILAAAAKELYPGLRLLMGHSLDYGYYYTLEGKNSSKVDFKAIKAKMDEMVAQDMPIDTRWLSYEEALEKFEHSNQPETHRLLNYTSKPRILINRLGSYEDLYFQPLMDRIGEVKVFDVMPYEDGFLLRFPRTSSPTKLSEFKDIPHLFEIYKEYKQWGKLVGVSSVGQLNDLITSRKIKDYVEITEILQNNKLAEIAKKITAKKTARVILIAGPSSSGKTTSAKKLSMQLKVLGYVPKVISLDDFYLGIAKAPKKEDGRPDFECVEALDIELLNDVLLRLFNGETVEMPSYDFKVSARRPEGKMFTPEQNTIFILEGIHALNNKLTAKIDESLKFKVYLSALTQLNLDDHNRIPTSDNRLIRRIVRDAQFRGSPAARTIGMWGDVRSGESKYIFPFQGNADAVFNTALDYELSVLKVYAEPLLKAVKPNQKEYNEASRLLTFLGNFLPLPASFVHGQSILREFIGDSDFSYS

SEQ ID NO: 3795 - DNA, 636 bp, Lactobacillus johnsonii
  CDS (1)..(636)
atgcaaagtaaacgccctattatcattggaattgctggtggttctggtagtggtaaaacaaccatcgctcatgaaatttatgaccaattacaacaagacgaccatatcttaattatgacgcaagattcttactacaagaacaacgacaacttatcaatggcagaccgtaaaaaaatcaactacgaccatcctgatgcctttgacatgccccttcttgttgaacaattacgtcaattaatggactataaggcagttgaaatgccagtttatgactttaccgctcatacaagaagtgaaaagacaattcacactgaaccggctgatattattatcttagaaggtatcctagttttaggcgaagaaaatttacgtgatttaatgagtattaaagtctttgtagatactgatgatgatattcgttttatcagaagattagagcgtgatacacaagaacgtggacgttctgtagaatcagtaattaatcaatacttagcaacggttaagcccatgtataatcaattcattgaaccaactaagcgttatgctgatatcattgttccagaaggtggagaaaatgatgttgctatcgatatgcttactacgaagattcgttcagttttaagtacagtcaaataa

SEQ ID NO: 3796 - protein, 211 aa, Lactobacillus johnsonii
MQSKRPIIIGIAGGSGSGKTTIAHEIYDQLQQDDHILIMTQDSYYKNNDNLSMADRKKINYDHPDAFDMPLLVEQLRQLMDYKAVEMPVYDFTAHTRSEKTIHTEPADIIILEGILVLGEENLRDLMSIKVFVDTDDDIRFIRRLERDTQERGRSVESVINQYLATVKPMYNQFIEPTKRYADIIVPEGGENDVAIDMLTTKIRSVLSTVK

SEQ ID NO: 3797 - DNA, 1497 bp, Ashbya gossypii
  CDS (1)..(1497)
atgaaacgggaagatagtacggaagaagagatacgtcctcgtagcgttggcccaccgttgaaacagcgcaatgctcggagctccagcaatatgcacttagtggcggacgaggaggaaagcacgccatcgtacatgccaccttggactacgccatacatcattggagttgggggcacgtcgggttccggtaaaaccagtgtggcgtcgaagattgttgcgtcgattaacacgccatggacagtattgatctcactggacaacttctacaagccactgtcggcggaggagcgcgcgagggcgtttaggaatgagtacgacttcgacgagccgcaagcactggacctggaccttgcataccagtgtctgttggcgctcaaggagggcaagaagatgacaatgccggtgtatagcttcgtgcaccacaaccgggtccctgacaagagcataacaatctacggtgcgtccgtagtggttctggagggcatatatgcgttacatgacaagagaattacagacctgatggacttgaaagtgtacgtggacgcggacctcgacatctgcttggcgcgcaggctatcgcgcgacataatctcgcgtggacgcaatctggaaagctgcatcagccagtgggagaagtttgtgaaaccaaacgcagacaagttcgtgaaaccgaccatgaagaatgcagatgccatcttcccatcgatgtcggataacagtattgcgactaagatgctgatcaaccacataaagtccaaattgcagaggaagtcccaggaccacattgataagcttgttcagcttggccatgaaaccatcccattggagactttggacactattcatcaactggagcgtaccaaccaggcctgttcgctgaagactatgattttggatagttcgttggatcgtgacgactttgtgttttacttcaaccgtattgcaacgatcttggtttcgcgggctttggatgacattgctatcgtgcgggatgaactgccattggtgactgcatccggatatcaactggagaagcctgttcatgtgaattttgacaagattacggctgtgaatattgtgcgctctggcgactgtttcatggcttccctacgcaaaacagtgccaaatatatccatcggtaaattgctcattcagtctgactctcaaacaggtgagccgcagttacattgcgagttcttaccagtgaacattggcggctctttcgaccaggtcctattgatggatgcacaaataatctcaggcgcagcaattatcatggctattcaagtgctagttgaccatggtgttgaactatcaaaaataaaggttattgtctacttagccactgaaattggaataagaaggataataaatgcctttaacaacaaagtagtcatatatgcgggcgaaattatatcagacgaaagtatgacagatggccaatgtaactgggcgaggttgagattcatcgactccagatactttggctgtgactga

SEQ ID NO: 3798 - protein, 498 aa, Ashbya gossypii
MKREDSTEEEIRPRSVGPPLKQRNARSSSNMHLVADEEESTPSYMPPWTTPYIIGVGGTSGSGKTSVASKIVASINTPWTVLISLDNFYKPLSAEERARAFRNEYDFDEPQALDLDLAYQCLLALKEGKKMTMPVYSFVHHNRVPDKSITIYGASVVVLEGIYALHDKRITDLMDLKVYVDADLDICLARRLSRDIISRGRNLESCISQWEKFVKPNADKFVKPTMKNADAIFPSMSDNSIATKMLINHIKSKLQRKSQDHIDKLVQLGHETIPLETLDTIHQLERTNQACSLKTMILDSSLDRDDFVFYFNRIATILVSRALDDIAIVRDELPLVTASGYQLEKPVHVNFDKITAVNIVRSGDCFMASLRKTVPNISIGKLLIQSDSQTGEPQLHCEFLPVNIGGSFDQVLLMDAQIISGAAIIMAIQVLVDHGVELSKIKVIVYLATEIGIRRIINAFNNKVVIYAGEIISDESMTDGQCNWARLRFIDSRYFGCD

SEQ ID NO: 3799 - DNA, 651 bp, Vibrio vulnificus
  CDS (1)..(651)
atgcaactaatgtctgaaaaaagtcaatgcgtcatcgtcggtattgctggcgcttctgcttctggtaaaagcctcatcgccagtacgatttataacgaactacgtgcaaaggtgggagaccatcaaatcggtgtgattacggaagattgctactataacgaccaaagccatctgagtatggaagagcgcgttaaaacgaactatgaccacccaaatgcacttgatcacgatcttctttgtgaacacttagaaaagttaatgaaaggcgagtcggttgaagtacctgaatacagctacacggagcacactcgtactgaaaacaccaccactatgacaccaaagaaggtgatcattcttgaaggcatcctgcttctgacggatcctcgtctgcgtgatttgatgcatgcgacagtgtttatggacacgccactggatatctgtctacttcgccgtgtgaaacgcgatgtggaagagcgtggtcgtacgatggaatcggtactcaaacagtatcaaaaaacagttcgcccaatgtttatgcagtttattgaaccgtctaaacagtacgcagatatcatcgttcctcgtggtggtaaaaaccgcatcgcgattgacgtactgaaagcgcacattgcaaaactattgaaagcttaa

SEQ ID NO: 3800 - protein, 216 aa, Vibrio vulnificus
MQLMSEKSQCVIVGIAGASASGKSLIASTIYNELRAKVGDHQIGVITEDCYYNDQSHLSMEERVKTNYDHPNALDHDLLCEHLEKLMKGESVEVPEYSYTEHTRTENTTTMTPKKVIILEGILLLTDPRLRDLMHATVFMDTPLDICLLRRVKRDVEERGRTMESVLKQYQKTVRPMFMQFIEPSKQYADIIVPRGGKNRIAIDVLKAHIAKLLKA

SEQ ID NO: 3801 - DNA, 630 bp, Porphyromonas gingivalis
  CDS (1)..(630)
atggtaatgaatacaacgataataggagtagcaggcggaagtgcttccggcaagagtacattggtgaaaaagctctgtgaggctttcgtcgaagaagatgtgcttgtactctgtcacgattactattacaaggccaatgaccacctctcccttgaggaaagaaagaagctgaactacgaccatcccaatgctttcgacacggatatgttcgtcagggatattctctctctgaaggcaggcaaaacgatagagcgtccggtctattctttcgtagagcacaatcgtttgcaagaaaaagtaaccgttcgtcctgccaaagtgatcgtactggatggaatcctgatattcgagaacaaagagctgcgggatctgatgaatgtgaaagtattcgtcgataccgatgcggatattcgattggcgcgccgccttgtgcgcgatgtccaggaacggggacgcaatatggattcggtattggcacaatacttcagtacggttcggcctatgcacgaggattttgtggaaccatccaagcggtacgccgatctgatcattccggaaggtggattcaattcggtggcgctctcactccttgtcgaaaaaatccgatcggtgattcgtaaggaagaataa

SEQ ID NO: 3802 - protein, 209 aa, Porphyromonas gingivalis
MVMNTTIIGVAGGSASGKSTLVKKLCEAFVEEDVLVLCHDYYYKANDHLSLEERKKLNYDHPNAFDTDMFVRDILSLKAGKTIERPVYSFVEHNRLQEKVTVRPAKVIVLDGILIFENKELRDLMNVKVFVDTDADIRLARRLVRDVQERGRNMDSVLAQYFSTVRPMHEDFVEPSKRYADLIIPEGGFNSVALSLLVEKIRSVIRKEE

SEQ ID NO: 3803 - DNA, 642 bp, Photorhabdus luminescens
  CDS (1)..(642)
atggctgacgaagcatatcagtgcacaattgtaggaatttctggtgcatctgcctcaggtaaaagtctcattgctaatacactttatcgtgaattacgcgctcaggttggtgatcacaatatcggtattatacccgaggattgctattataaagatcagagcgatctatcaatggaagagcgttataagactaattatgaccatccaagctcaatggatcacaatctgctcttttctcacctacaagcgctgaaaatgggtgaatcaattgaattaccacaatacgattatgttgctcatactcgtaaaccagaagcgattcattttgcaccgaaaagggttattattctggaaggtattctattattgaccgataagcgcttgcgccaggagatggacttctctatttttgttgatacgccactggatatttgccttatgcgtcgtattaagcgggatgtgcatgaacgggggcgttctctggattcggtgattgagcaatatcataaaactgtgcgtccaatgttcctgcaatttattgaaccatcaaagcaatatgcagatattattgtgccgcgcgggggtaaaaaccgagtagcaattgatatattgaaagccaaaattggtcagttctgcgaataa

SEQ ID NO: 3804 - protein, 213 aa, Photorhabdus luminescens
MADEAYQCTIVGISGASASGKSLIANTLYRELRAQVGDHNIGIIPEDCYYKDQSDLSMEERYKTNYDHPSSMDHNLLFSHLQALKMGESIELPQYDYVAHTRKPEAIHFAPKRVIILEGILLLTDKRLRQEMDFSIFVDTPLDICLMRRIKRDVHERGRSLDSVIEQYHKTVRPMFLQFIEPSKQYADIIVPRGGKNRVAIDILKAKIGQFCE

SEQ ID NO: 3805 - DNA, 645 bp, Mycoplasma gallisepticum
  CDS (1)..(645): transl_table=4
atgaaaaacgtgcagccaatgatcattgcaatagctggtggtagcggttctggtaaaacaacaatcacccaatcaattattgccaagattaaaagtgataccaacctaaaagtggcaactgtttgtttagataattattataaaccgtttagtgatctaaatcttgaagctagaaaaaagctgaactatgatgatcccaatagttttgactttgatcaagtttattatgatctgttagctttaagcaataaccaaacaatcaagatgccaatctatgattataaaaactacactagatcagatcagtttactgagattgatccatctgatgtaatcttatatgaagggatcttatctttatatgattcaaggatcttggatctatcaaaatttaagttatttattgataccccttcagatgaacgattagctagacggatcgaacgtgactgtttagagcgtgctagagatatcaaacaagtcttaaaccaatgacgttcacaagtcagagtaatgcatcgtaaatacgtgcaaaaacaaaaagagggcgctaatctcatcttaccttggtacaccttaaaccacgaggggatgagtattattcaaaacgcaattattaagatcgcacaaggcaatgaattttaa

SEQ ID NO: 3806 - protein, 214 aa, Mycoplasma gallisepticum
MKNVQPMIIAIAGGSGSGKTTITQSIIAKIKSDTNLKVATVCLDNYYKPFSDLNLEARKKLNYDDPNSFDFDQVYYDLLALSNNQTIKMPIYDYKNYTRSDQFTEIDPSDVILYEGILSLYDSRILDLSKFKLFIDTPSDERLARRIERDCLERARDIKQVLNQWRSQVRVMHRKYVQKQKEGANLILPWYTLNHEGMSIIQNAIIKIAQGNEF

SEQ ID NO: 3807 - DNA, 930 bp, Gloeobacter violaceus
  CDS (1)..(930)
atggcacaacgtccgatcattctcggcatcgtcggcgacagcgcggcgggcaagaccaccctgacgcgaggcctcgcccagatcctcggccccgacaatgtcacgatcatctgcaccgacgattaccatcgctacgaccgcaagcagcgcgccgaactggggatcactgccctgcaccccgattgcaactacctcgacatcatccagcagcacctcgctttgctgcgcaccggccagccgatcttaaagcccatctacaaccacaaaaccggtaccttcgatccgcccgagtacatcaaaccgcgcaattttgtggtggtcgaggggctattgggtttctcgacgcgggggatgcgcgattgctacgacgtcaaagcctacctggctcccccggagtcgctgcgtacccgctggaaaatcaggcgtgacaccgccaagcgcgggtactccgaggagcaggtgctgggcgaaatggccaagcgcgaacccgactcggagcagtttatccggccccagcgcagcacagcggacctggtggtgagcttctacccgggccagaacggccccgatacccagctcaacgtgcggctggtgctcagaccgaccattccccacccggacttcgtggatgtcatcgagcgcagcggcgcccacacccgctcggcggtgcgcgtcgaactggaccgcgacatgggcaagcccgtcgatgtgctcgaagtggacggccatgccaccgacgagcaggtcaaagaactccaggatgtgctctgcgaagagatggccaacggctcgcagctgtgcaatatccccgcggacctgggcaaggtgaccggcaccaccggcgaaacgctgcagagccatccactcgccatctcgcagttgctgatcacctaccacatgctcaaagcctcgcggggcgtctacgtttag

SEQ ID NO: 3808 - protein, 309 aa, Gloeobacter violaceus
MAQRPIILGIVGDSAAGKTTLTRGLAQILGPDNVTIICTDDYHRYDRKQRAELGITALHPDCNYLDIIQQHLALLRTGQPILKPIYNHKTGTFDPPEYIKPRNFVVVEGLLGFSTRGMRDCYDVKAYLAPPESLRTRWKIRRDTAKRGYSEEQVLGEMAKREPDSEQFIRPQRSTADLVVSFYPGQNGPDTQLNVRLVLRPTIPHPDFVDVIERSGAHTRSAVRVELDRDMGKPVDVLEVDGHATDEQVKELQDVLCEEMANGSQLCNIPADLGKVTGTTGETLQSHPLAISQLLITYHMLKASRGVYV

SEQ ID NO: 3809 - DNA, 996 bp, Gloeobacter violaceus
  CDS (1)..(996)
atggtcagtacgttggaccgagtggtcctgatcggtgtcggtggggattcgggttgcggcaagtcgacattcctcaggcggcttaaagatctgttcagcaaggagcttgtcacggtcatctgcctcgatgactaccactcgctcgaccgcaagcagcgcaaagaaacgggtattaccgccctcgacccgcgcgccaacaattttgatctaatggccgagcaggcgaccgccctcaaggtcggccagtcgatcatgaagcccatctacaaccacgagacgggcaaaatcgacccgcccgagctgatcgagcccactccgatcgtcattctcgaagggctgcatcctttttacgacgcgcgcgtgcgcaacctatttgacttcaagatctacttcgacctatccgatccgatcaagattcagtggaagatccagcgcgacatggccgagcgcggccacacctacgaagatgtcctcaagcagatcgaatcgcgccgcccggacttttcggcctacatcgacccgcagaagcagtacgccgatgtggtgctgcagattctgcccagtgagcttcctgaaaaagcaggcggtatcaagcgcgtcaaagcctgcatggtgcaggtggacggcatccccaactacgacgcgccctacctgttcgaccgggccatttccgatgtgtgctggaagcccaattttcccaactcggatgaagagctgaccttctgctacggcacccaggattacttcggccgcccggcgtcctacctgtcgatcgacggcgagtttgctccggaggattctcccgaactggaggagaagctgcgcaacaccagcgagacgcgctacggcgaactcgcctcgctcatcctcaagcacaccgattaccccggctcccgcgacggcaccggctttttccaggtgctcatgagcctcaagttccgcgccatctacgaagcgcttaccgcccaattgctgacggcttccaaggccaagtag

SEQ ID NO: 3810 - protein, 331 aa, Gloeobacter violaceus
MVSTLDRVVLIGVGGDSGCGKSTFLRRLKDLFSKELVTVICLDDYHSLDRKQRKETGITALDPRANNFDLMAEQATALKVGQSIMKPIYNHETGKIDPPELIEPTPIVILEGLHPFYDARVRNLFDFKIYFDLSDPIKIQWKIQRDMAERGHTYEDVLKQIESRRPDFSAYIDPQKQYADVVLQILPSELPEKAGGIKRVKACMVQVDGIPNYDAPYLFDRAISDVCWKPNFPNSDEELTFCYGTQDYFGRPASYLSIDGEFAPEDSPELEEKLRNTSETRYGELASLILKHTDYPGSRDGTGFFQVLMSLKFRAIYEALTAQLLTASKAK

SEQ ID NO: 3811 - DNA, 1038 bp, Gloeobacter violaceus
  CDS (1)..(1038)
atggaaacccttaccgcaacagagacgcagcctatgaccaactctgtgcaatttgtctgcgccacggcgcgtcaacaactcaaacagttgcgatctccgattattgttggtgttgcaggcgacagcggcagcggcaaaaccacctacagcaacggcattcgtcgcctgctgggaagcgatctggtttcgacgctctgcacggacggctaccacaaagaggaccgcgaacagcgccagatcagcggccgtctgcccctggacccggcggccaaccacctggaccggttggccgagcacctcaaagccctcaaacagggaaaggccgtgcccatccccgtctataaccacggctcgggcaagtttgagcagcccgagaattttgtgccgacgccgattgtcgtcgtggaaggcttgcatacgctgtacccggaattgatcccgtacctcgatttcagcctctacgtcgatccggatcatcccgtcaagtggcagtggaaatgggagcgcgacctcaagcgccgcggtcacaaagccgaacagctcgagcaggagatgctgcagcgcgaagccgccttcaagcgttggatcgattttcaaaagattgacgccaacgtggtgatcaaaatttttcatagccaactgcagtgccttgccccccaccagttcaccggcatcctgcccaacccgtgctacaaagtggaactgatcctgcagccggctcctgtgccgctgccgacgttgcccctgccatttgatctcgcggcgatgctcgccgtcgaccagcccccttttatgctggcggcggtcccctaccgctactgggggcgctcggcgattgccattcacctcgacggtgtgctgtcgcaaaagaccatcgccgggctcgaagactatatcgttaactacacaggcattcccacggatgaggccattccggaggagcagtacgagctgacatcggctacccgcttcgcccaactgttgattacctggcgctttttggagcaaatcaactatttgcttcaaaaaaaccgatag

SEQ ID NO: 3812 - protein, 345 aa, Gloeobacter violaceus
METLTATETQPMTNSVQFVCATARQQLKQLRSPIIVGVAGDSGSGKTTYSNGIRRLLGSDLVSTLCTDGYHKEDREQRQISGRLPLDPAANHLDRLAEHLKALKQGKAVPIPVYNHGSGKFEQPENFVPTPIVVVEGLHTLYPELIPYLDFSLYVDPDHPVKWQWKWERDLKRRGHKAEQLEQEMLQREAAFKRWIDFQKIDANVVIKIFHSQLQCLAPHQFTGILPNPCYKVELILQPAPVPLPTLPLPFDLAAMLAVDQPPFMLAAVPYRYWGRSAIAIHLDGVLSQKTIAGLEDYIVNYTGIPTDEAIPEEQYELTSATRFAQLLITWRFLEQINYLLQKNR

SEQ ID NO: 3813 - DNA, 615 bp, Chromobacterium violaceum
  CDS (1)..(615)
atgagcaccccgttcatcattggcgttgccggcggcagcggcagcggtaaaaccacggtaaccaacaaggtgctggaaaccattggttccgagatggcggcggtgatcatccaggactactactatcgcgaccagagccacctgaccttcgagcagcgcctgggcaccaactacgaccacccgcaggccttcgactggccgctcttgatctcccacatcgacgacctgcgcaacggccgcgcgatcgagatgccggtgtacgacttcgccaaccacacccgttccgaccagaccgtcaccgtgcagcccgcgccggtgatcgtgatcgagggcctgttcccgctgtacgacgccgccttgcgcgagatgatgtcgctgaagatcttcgtcgacactgactccgacgtccgcttcatccgccgcctcaagcgcgacatcgccgagcgcggccgcacgatggagagcgtgatcgagcaatacctgtccaccgtgcgcccgatgcacaaccagttcatcgagccgaccaagcgcttcgccgacgtgatcctgccgcacggcgccaacgatccggcggtggacatcatcaccaccaaggtcgccagtctgatggtgtga

SEQ ID NO: 3814 - protein, 204 aa, Chromobacterium violaceum
MSTPFIIGVAGGSGSGKTTVTNKVLETIGSEMAAVIIQDYYYRDQSHLTFEQRLGTNYDHPQAFDWPLLISHIDDLRNGRAIEMPVYDFANHTRSDQTVTVQPAPVIVIEGLFPLYDAALREMMSLKIFVDTDSDVRFIRRLKRDIAERGRTMESVIEQYLSTVRPMHNQFIEPTKRFADVILPHGANDPAVDIITTKVASLMV

SEQ ID NO: 3815 - DNA, 2049 bp, Giardia lamblia ATCC 50803
  CDS (1)..(2049)
atgcgcacggttcaggtcaccactcccaccgggcataccattacggtccttgcgcgcatgcatatctacgacatcatacgcatgtacccagacgaattccctagtgatgggcatccgttcatcgtctgcacggtcaacaacgaacttacctcgctttccgaaaaggtgggcgttaattgcacccttgtcccatactctgtggccacaacggatggcgcggagtgctatcgcaggtcgctgatcttcgctttgggcaaggtctggtctgagttgttcccccaagactcacttcagatttctcactcgcagggccactcctactatctatacgttgataatagctccaagaatcttcagatggaggatataaagaccacggacatctgtgcacatggcccaaaggaagatgctaatcacgacgtctgcataacaaatgcttcatcgatgtttttcagcaatgacaaacatattacggaagagatcgttaccaatttgcgacaggagctgaacttgttgatcaaggctaaccgccctatctctagcaacattcccatgaatgctaatgacttggagacagccttggagagcgtctcggactataactctgtcgccctcctcaagtccctcaatgaggttcgtgtgatgaccgtaaggtgcgacgactatgtgcaaatttatcacactcctctggcacctgtcacaggtcttcttaagtactacgatcttcatacttacaaagatgggtttgtcataagcttcccatctaaacgctcccctactgagctcattcccttcaagcccaatgaactgttacacgacgtatatagcgaatacacgcagtggatccgcgtcttgaaagttcggactatcgggcacttgaacaatttgtgctacaagggcatgattaagagtttcatccaaatctgcgaaaccatgcagaacaagaagcttgctgagctttgtgacgtaattgccaacaatagagagtatcttcagcaataccagaaggctacgcgagccgccaactacactctcgggatgagtctccgaatcgacggagacagtggtgtgaactcccgtagcatcaaggtagactctaaaacgatgtcacaggagctagtggacgcaagggtgtctactagctctactggcacatcggattctgaagtggagcccggtatgctgacctctgccgaagtgtctaattgctatgcacccgtctctaacattgaggacaaggagatcaaggttgtattcatatcaggtccaagctctagcggcaagacgaccttcgccaagaagctcgcatataatctcaaggttatgggccgcgaacctcttatcatttcgcttgacaactatttcgttgaccgggagaagaccccactggcagaggatgggagctatgacttcgaacatgttaacgccctggatcttgatctctttaacgatcatctcgaggcacttatcagcggaaagaagattctcagcccaatctttgatttcaggacaggtacaagaaagcaatccaccatagaaatgataatgcctttcagggggatcatcatcatcgagggcatccacgctctcaatcctctcctcagcaggagaatccctctgcctaacaagatcttggtctttattgctcccttcactgccatcaacatggacgaccgcatgcggatctcctccagggattgtcgccttatcagacgcattgtgcgcgacaacaatttccgcggtttcacggctgaaaagacaatcgagctactgaagaatttgcgtgtaggagaagataggtggatctatccccatcagcacagggccgatatcatgttcaatacggcgttggactatgagctatgtgtccttaacacgcatgcctacccattgctttgtgagatcaagcccgacagctctgcatacaaggaggcacgacaacttatcgccctcctagaaaaagttgcttccattaatagcgagtttgttcctaaattcagcctattaagagagtttatcggcggaagcggcatgccagataaggactag

SEQ ID NO: 3816 - protein, 682 aa, Giardia lamblia ATCC 50803
MRTVQVTTPTGHTITVLARMHIYDIIRMYPDEFPSDGHPFIVCTVNNELTSLSEKVGVNCTLVPYSVATTDGAECYRRSLIFALGKVWSELFPQDSLQISHSQGHSYYLYVDNSSKNLQMEDIKTTDICAHGPKEDANHDVCITNASSMFFSNDKHITEEIVTNLRQELNLLIKANRPISSNIPMNANDLETALESVSDYNSVALLKSLNEVRVMTVRCDDYVQIYHTPLAPVTGLLKYYDLHTYKDGFVISFPSKRSPTELIPFKPNELLHDVYSEYTQWIRVLKVRTIGHLNNLCYKGMIKSFIQICETMQNKKLAELCDVIANNREYLQQYQKATRAANYTLGMSLRIDGDSGVNSRSIKVDSKTMSQELVDARVSTSSTGTSDSEVEPGMLTSAEVSNCYAPVSNIEDKEIKVVFISGPSSSGKTTFAKKLAYNLKVMGREPLIISLDNYFVDREKTPLAEDGSYDFEHVNALDLDLFNDHLEALISGKKILSPIFDFRTGTRKQSTIEMIMPFRGIIIIEGIHALNPLLSRRIPLPNKILVFIAPFTAINMDDRMRISSRDCRLIRRIVRDNNFRGFTAEKTIELLKNLRVGEDRWIYPHQHRADIMFNTALDYELCVLNTHAYPLLCEIKPDSSAYKEARQLIALLEKVASINSEFVPKFSLLREFIGGSGMPDKD

SEQ ID NO: 3817 - DNA, 1425 bp, Neurospora crassa
  CDS (1)..(1425)
atgcgcggcgacaccccccgcgacctcgtcgacagcctcacagacggcatcaagggcctcgacgtgcgcgtggtcgagaacccggacagcaccattgccaagcgggcgcactacgcgcctccgtgggccgatgtcagcatcatcggcatcgctggtagttcggggtcgggcaagtcgacgctgtcgcaggcgattgtgaagaagctgaacctgccgtgggtggtgattttgtccatcgactcgttctacaagagtttggatgccgagtcgagcaggaaggcgtttatgaatgagtatgattttgattcgcccgaggcactggattttgatgtcctggtagatcggttgcaggacctcaaggctggcaagcgtgcagagattccggtttactcgtttgagaaacatgctcgtctcgaccggactaccgccatttactcgccacacgtcctcattcttgagggtatctttgctctctacgatcctcgagttcttgaactgctggatatgaagatcttctgtgaggctgatgccgacacttgcctttcccgaagaattttgcgtgatgtgaaggatcgtggtcgcgacgttgatggcatcatcaagcaatggttcaactatgtcaagcccaactttgaaaagtttgtcgacccccaaagaaaggtggccgacattatcgtcccccgcggtgtcgagaaccacgtggctatgaccatggtaacccaattcatccaacaaaaactgctcgaaaagtccaaacgccaccgcgccgccctgacccggttggaatcgcaagcgcgccaccagcccttatccaacaaggtcgtccagctcgaccagaccccgcagctgcgcggcatgaacacgctcatccacgacatcgacacgtccaaggaggactttatcttttacttcaaccgcttcacgaccttactgatcgaaaaggccatggacaacatcccctttgcatccaccaccatcacgaccccgctcaaccgcgaatacgccggtctgcgaccgcgaggccaagtctcggccgtggtcgtgctgcgcggcggcgccgctctggaggccggactgaaacgggtgttgcccgactgcaagacgggccgggtgctgatccagagtaacatgcgcacgggcgaaccggaactgcattacctggcgctgcccaaggacattgaccagcacgaggcggtgttgctgctggatgcgcagatgagcagtggcggatcggcgctgatggcggtgcaggtcctggtggatcacggcgtcaagatggaccggattgtgctggcgacgtatagcgcgggcaggttggggctgcataggctgacgacggtgtttccggaggtgacggtggtggtggggaatgtgattcaggatgtggaggagcggtgggtggaaaagaggtatttcaggtgttaa

SEQ ID NO: 3818 - protein, 474 aa, Neurospora crassa
MRGDTPRDLVDSLTDGIKGLDVRVVENPDSTIAKRAHYAPPWADVSIIGIAGSSGSGKSTLSQAIVKKLNLPWVVILSIDSFYKSLDAESSRKAFMNEYDFDSPEALDFDVLVDRLQDLKAGKRAEIPVYSFEKHARLDRTTAIYSPHVLILEGIFALYDPRVLELLDMKIFCEADADTCLSRRILRDVKDRGRDVDGIIKQWFNYVKPNFEKFVDPQRKVADIIVPRGVENHVAMTMVTQFIQQKLLEKSKRHRAALTRLESQARHQPLSNKVVQLDQTPQLRGMNTLIHDIDTSKEDFIFYFNRFTTLLIEKAMDNIPFASTTITTPLNREYAGLRPRGQVSAVVVLRGGAALEAGLKRVLPDCKTGRVLIQSNMRTGEPELHYLALPKDIDQHEAVLLLDAQMSSGGSALMAVQVLVDHGVKMDRIVLATYSAGRLGLHRLTTVFPEVTVVVGNVIQDVEERWVEKRYFRC

SEQ ID NO: 3819 - DNA, 612 bp, Synechococcus sp
  CDS (1)..(612)
atgaccccgctatggcctgttctttgcatctgtgggccttccgcggccggcaaaaccacctttgcggcgtccctttcgcaagccctgcaggcccgcggtcgtcagcctctgcagatcgcctgcgacgactactaccgccaggattggagtccccatccgctgttcggcttcgacaccgccgatgccatcgatgatcaggccctgcgcgttgatctttcagcggcacgtcaggggcaggcccagaccttgcgcacgtacgacatgcgcacccgccgcgttcagcgtcggtcgatcacaactccctacgacgtgatccttctggaaggtgcctacggacctcagcacctggtgagcgatttccctttctttttggtgatttacctggaggagtccgtgccccggcgactgtggcgtcgtttgcggcgggacgtccgcgatcgccatcgttccccccgctatgtgatccgtcagatgtttcgagagatgctgcctggggaacggcatttcatcgaacccctcaaacagaacgccagtgttgtgatccgcgatcagtccaaggggcttgaccaggttctggctctgttgggatctgttgcttcagacgacgtctga

SEQ ID NO: 3820 - protein, 203 aa, Synechococcus sp
MTPLWPVLCICGPSAAGKTTFAASLSQALQARGRQPLQIACDDYYRQDWSPHPLFGFDTADAIDDQALRVDLSAARQGQAQTLRTYDMRTRRVQRRSITTPYDVILLEGAYGPQHLVSDFPFFLVIYLEESVPRRLWRRLRRDVRDRHRSPRYVIRQMFREMLPGERHFIEPLKQNASVVIRDQSKGLDQVLALLGSVASDDV

SEQ ID NO: 3821 - DNA, 654 bp, Haemophilus ducreyi
  CDS (1)..(654)
atgccagaaaccattgaaaatcaagcttgtatcgttattgctattgcaggtgcttctgcttcaggtaaaagccttattgcttctaccatttataaagaactgaaagaagaattagattccaatgatatcgatattatttctgaagatgcttattataaagatcaaacgcatttaacgatggatgaacgtgagcaaaccaattacgatcatcccgattcaatggttcactatctattagttgaacaccttcgccaactaaagcaaggaaagcccattcaaattcctgaatatgattatgctaagcacaatcgaaaaacatctagtaagcattttgaacccaaaaaaattattattttagaaggcattttattgttaacgcatgaaacaatccgcaatgaaattaatgtttcaatctttgttgacgcgccattagatatttgtttcattcgccgtttacagcgtgatttaatcgaacgtggtcgctcaatggattcggtcatatcgcaatgccgaaaaactgtccgcccaatgtttttaaaatttattgagccatctaaacaatatgccgatattattatacccaaaggcggtaaaaaccggattgcgatcgatatattaaaagcccaaatcaaacaattattatcaaaaaaatag

SEQ ID NO: 3822 - protein, 217 aa, Haemophilus ducreyi
MPETIENQACIVIAIAGASASGKSLIASTIYKELKEELDSNDIDIISEDAYYKDQTHLTMDEREQTNYDHPDSMVHYLLVEHLRQLKQGKPIQIPEYDYAKHNRKTSSKHFEPKKIIILEGILLLTHETIRNEINVSIFVDAPLDICFIRRLQRDLIERGRSMDSVISQCRKTVRPMFLKFIEPSKQYADIIIPKGGKNRIAIDILKAQIKQLLSKK

SEQ ID NO: 3823 - DNA, 1609 bp, Chlorarachnion sp
  CDS (10)..(1464)
tcatacggcatgctgcctgagactgcgagggtcgttcagccaaagaagaccaatgtctacgcaatcgcttccgtcgttgccaacgttgctctagtcggagctctcctctacacccaaacgggcgaagttggagcttcagttgcagcatcgtctcgcgtacacgttgctcctcgcatggttgctcctaagttttccatgtctggacttcgccctgctcaacgcgaagctcgcgttgctgcacacggaaagggagttgtttcaactgtagcccttgatgctcctgtcgcaacttctgaggatagcatgacctggagctcagcaaagggtaatgaagttgacgctggaatgggacaagttcacatcgaggctgctatctccaacgaagtctctcctgtcatggctcagaagaacatccagcgccctgttatcttcggtgttgctgctgactctggatgcggaaaatccaccttccttcgtcgtgtgaatgcaatcttcggaaccaccacctccaaggctcacactcctactggagatcttattactaccatttgcctcgatgacttccacactctcgaccgtaccggaagagccgacactggtatctccgcgcttgatgttcgcgctaacaacttcgcgcttatggccgaccagttgaaggctttgaagcaaggacgtgctatcaagaagccaatctacaaccacgacaccggagctatcgatcctgttgaaactatccaccctaaccacatcatcattgttgagggtcttcaccctatgcttgacaaggatgtgattgaatcccttgacttcaccttctacatcgatgtttccgatcctgtcaagaaggcttggaagatcgaacgtgatatggtcgagcgcggacacaagaaggaggacatcattgcttccatcgaatctcgcaagcctgacttcgagaagtttgttgagcctcaaaaggcaaacgctgatgtcattatttccattgagcctaccaagctggatgttgctcctggcgaggagactaaatacctcaacacccgtctcattcagagggagaaccagcacggtatccgccctgtgtacatgttcgaggaggaaggatccaccgtcgactgggacccatgtgcgggccctggtgctatggcttgcccttaccctggaacacgcgttcgttactacaacgagatgtctggtgagaagcacgctcacgtccttgaggttgatggagttttcggagaaaccgaggagctcttcttcatcgaggaacgcctctcgaatactaacacgaagtacttcggagagcttactaagcagatgcttaagaacaaggctgcccctggttccggtgatggatccggtcttatacaggccctcgttgctcttaaaatgcgtgaatcttacgagagattcactggacgtaccatccagattccaaagtggggacttttcctcgatgattattagatcatcaaggtagtctcagtcgcaaccccagtgatcctgctttcttttaagctttactctgcttctaggcaaatatgcatttgttgaaaagttgacgaaattcctaaatgaaaacaaaataacaggaaagctatttacttttaaa

SEQ ID NO: 3824 - protein, 484 aa, Chlorarachnion sp
MLPETARVVQPKKTNVYAIASVVANVALVGALLYTQTGEVGASVAASSRVHVAPRMVAPKFSMSGLRPAQREARVAAHGKGVVSTVALDAPVATSEDSMTWSSAKGNEVDAGMGQVHIEAAISNEVSPVMAQKNIQRPVIFGVAADSGCGKSTFLRRVNAIFGTTTSKAHTPTGDLITTICLDDFHTLDRTGRADTGISALDVRANNFALMADQLKALKQGRAIKKPIYNHDTGAIDPVETIHPNHIIIVEGLHPMLDKDVIESLDFTFYIDVSDPVKKAWKIERDMVERGHKKEDIIASIESRKPDFEKFVEPQKANADVIISIEPTKLDVAPGEETKYLNTRLIQRENQHGIRPVYMFEEEGSTVDWDPCAGPGAMACPYPGTRVRYYNEMSGEKHAHVLEVDGVFGETEELFFIEERLSNTNTKYFGELTKQMLKNKAAPGSGDGSGLIQALVALKMRESYERFTGRTIQIPKWGLFLDDY

SEQ ID NO: 3825 - DNA, 630 bp, Enterococcus faecalis
  CDS (1)..(630)
atgaaagatagtcagccaattatcattggtgttactggcggatcaggaagcggaaaaaccagtgttagccgtgcgatttttaataattttcccgatcattcaattatgatgttagaacaggattcttattataaagatcagagccatttgagttttgaagaacgtttaaataccaattatgatcatccttttgcgtttgatacagatttattgattcaacatgttgaacaactgttaaattatcaagccattgaaaagccagtttatgactacgttgcgcatacaagaagtacagaaacggtgatacaagaaccgaaagaagtaattattcttgaagggattttaattttagaagatcgccgcttaagggatttaatggatattaaagtgtatgtggatacagatgatgacatccgtattattcgtcgaatcaagcgtgatatggaagaacgtggccgtacgttggattctgtgattgaacaatatttgacagtcgtcaagcccatgtatcaccaatttattgaacctacgaaacgttatgcagatatcattgtgccagaaggtggcgaaaaccacgtcgctattgatttaattaatacaaaagtggatagtattttaacaaaaatgtaa

SEQ ID NO: 3826 - protein, 209 aa, Enterococcus faecalis
MKDSQPIIIGVTGGSGSGKTSVSRAIFNNFPDHSIMMLEQDSYYKDQSHLSFEERLNTNYDHPFAFDTDLLIQHVEQLLNYQAIEKPVYDYVAHTRSTETVIQEPKEVIILEGILILEDRRLRDLMDIKVYVDTDDDIRIIRRIKRDMEERGRTLDSVIEQYLTVVKPMYHQFIEPTKRYADIIVPEGGENHVAIDLINTKVDSILTKM

SEQ ID NO: 3827 - DNA, 648 bp, Coxiella burnetii
  CDS (1)..(648)
atgaaaaataatgtcattattattggtatctctggaccttctgcttcggggaaaagcttgttagcgaataccatcgttaatgaactcggctctgatcaagtcgtcgttatttcagaagattcttattataaagatttaggagatatgccttttgaagagcgagcaaaaatcaattacgaccaccccgactctcttgaccatgaactattgtatcaacatttattacaactgcagcaaggcaatgccatcgcggtgccttgttacgatcacagccggcacaggcgattggaaaaaacaaaaaccgtaggtcggcatcgcattattgttttggaaggtattttattattcgtagaggctcaattgcgtgaaattatggatattcgaatattcatggacactccattagatatttgtctattgcggcgattgcaaagggatatcgtcgagcgagaacgctcgttggaaggcgtgctcacccaataccaagaaacggttcgacccatgtatttgcaatttacggaaccttccaaacgctacgccgatattatcgtgccgcggggcggcgagaaccgaattgctatcgaaatgattcaagccaaaatgcgggagctgttaggcgtcaatggggccttgaaaaggcacgcctga

SEQ ID NO: 3828 - protein, 215 aa, Coxiella burnetii
MKNNVIIIGISGPSASGKSLLANTIVNELGSDQVVVISEDSYYKDLGDMPFEERAKINYDHPDSLDHELLYQHLLQLQQGNAIAVPCYDHSRHRRLEKTKTVGRHRIIVLEGILLFVEAQLREIMDIRIFMDTPLDICLLRRLQRDIVERERSLEGVLTQYQETVRPMYLQFTEPSKRYADIIVPRGGENRIAIEMIQAKMRELLGVNGALKRHA

SEQ ID NO: 3829 - DNA, 1659 bp, Clostridium tetani
  CDS (1)..(1659)
atggaaaaattaaaaataaacttagaggggaaaaaagaagttttaatagaaaaaggaaaaactttgagggatatattagaaaatattcatgttgaaaataagtttcctatagtgttaggagaaatgaatggaaaagtatacgaattaaattcaccaattgtcgaagagggacaattagaatttatagacttaggtagtgatactgggaatagagcatatataagaacacttcaatttatacttataaaagctactttagaagagttccctggagcaaatatttcaatacaacattcattaagtaagggattatattgtgaaataagcaaagggaagattttaactgaaaaagagcttgagaaaataaaagcaagaatgaaagaaataatatataaggatatgcctataaaagaagaatactttacaaaagaagaaactatggaaatgcttaaaaaatacaatatgaatgatagaataaaacttcttagcaatttgcagttagataaaataaaattgtatgaactagatggagtatatgagtatttttatggacctatgggagaaagtactggtattataagagaatttgatttaatgtattatgaaccaggatttatattaagatatcctactaaagaagaaccagatagattacctgttttcctagaacatagaaaacttgctaatatatttagagaaacagagatatggggagatatattagaggtgccaaatgtaggatcattaaacgaaaaggtaaacagtggagagataattgacataatcagggtatctgaagcattacatgagaaaaaagctgctaatatagcggatataataaaagatagagagaatataaggttaatattaatagctggtccatcctcatcaggaaaaactacttttgcaagaagacttgcaatacaacttagagtaaacggtctaatacccattcctataggtttagatgattattttgtggaaagggacgatactccaaaggatgaaaatggggagtatgattttgaatccatacatgctgtggacttagaacttttcaatgaacatttaactaggatattaaaaggagaagaagtgcacatacctaaatacaattttataacaggaaaaagagactggaatggtacaaaagtaaaattaccgttaaacggaatattaattgtagaaggaatacatggattaaataatttattaacttcttctatagctgatgaaaataaatttaaagtatatataagtgctttaacacagttaaatttagataatcacaacaggatagctactacagatgtaagaatgattaggagaatagtaagggataatatgtcaaggggatatagtgcagaagaaactttaaaaatgtggccttctataagaagaggtgaggaaaaaaatatatttgtatttcaagagaatgcagatattatgtttaactctactttagtttatgagttgtgtgtattaaagaaatttgccctaagagaactacaaaaaatagagcctacaagtccagtatatttagaagcttacagattaaaaagtattttaaatttctttaaggaagttgatacgtcgcacatacctgaaaattcaatattgagagagtttataggtggaagttggtttcatgatcattaa

SEQ ID NO: 3830 - protein, 552 aa, Clostridium tetani
MEKLKINLEGKKEVLIEKGKTLRDILENIHVENKFPIVLGEMNGKVYELNSPIVEEGQLEFIDLGSDTGNRAYIRTLQFILIKATLEEFPGANISIQHSLSKGLYCEISKGKILTEKELEKIKARMKEIIYKDMPIKEEYFTKEETMEMLKKYNMNDRIKLLSNLQLDKIKLYELDGVYEYFYGPMGESTGIIREFDLMYYEPGFILRYPTKEEPDRLPVFLEHRKLANIFRETEIWGDILEVPNVGSLNEKVNSGEIIDIIRVSEALHEKKAANIADIIKDRENIRLILIAGPSSSGKTTFARRLAIQLRVNGLIPIPIGLDDYFVERDDTPKDENGEYDFESIHAVDLELFNEHLTRILKGEEVHIPKYNFITGKRDWNGTKVKLPLNGILIVEGIHGLNNLLTSSIADENKFKVYISALTQLNLDNHNRIATTDVRMIRRIVRDNMSRGYSAEETLKMWPSIRRGEEKNIFVFQENADIMFNSTLVYELCVLKKFALRELQKIEPTSPVYLEAYRLKSILNFFKEVDTSHIPENSILREFIGGSWFHDH

SEQ ID NO: 3831 - DNA, 1674 bp, Bacteroides thetaiotaomicron
  CDS (1)..(1674)
atgaaacagatgttacaaatatgttgcaaaaataataatatttataaagaattccctatcggaagctcacttttggatatttattacggttttaatcttaattttccttatcaggtagtcagtgccaaggtgaataaccgttccgaaggtctcaatttcaaagtatataataacaaggatatagagtttctggatgtgcgcgattcatccggtatgcgtacgtatgtgcggtcactctgctttgtcttgttcaaggctgtcagtgaactttttcccgaagggaagctgtttgtggaacacccggtatccaaaggttatttctgtaatctgcggatcggccgccccattacattggaagatgtgacgcgtatcaaacagcgtatgcaggagattatcgcagaaaatatctcttatcaccgcatcgaatgccatacggctgaggccgtgcgtgtgttcagcgaacgcgggatgaatgataaggtgaggctgctcgaaacttccggttcgctatatacctattattatacgctgggcgatacggtcgattattattatggcaatctgctccccagtaccggatatatcaagttgttcgacatcgtgaaatactatgatggcctgctgctgcgcattcccaataaagagaatccggatgtgctggaggaagtggtgaagcaggagaagatgctggatgtatttaaggagtatctcaactggagttatatcatgggacttaataacgccggcgactttaacctcgcctgcgaagaagggcacgctacggatttaatcaatgtagcggaagcgttgcaggaaaagaaaatagcccagattgccgatacgatcttccatcgtggggaaaacggtgaccgggtgaaactgattttgatttccggtccgtcctcttcgggtaagaccactttcagcaaacgtctttccatccagttgatgacgaacgggctcaaacccttcccgatctccttggacaattatttcgtagaccgtgaagagacacctctggatgaaaacggtaactatgattatgagtctctgtatgcgctcgatctggaattgtttaaccagcagttgcaggctttgctgcgcggtgaggaagtggagcttccgcgctttaacttctctctggggaagaaggaatataaaggtgataaactgaaaattgaagataatacgattctcattctggaaggtattcatgcgttgaatccggaactgacaccgcatatcccggatgaaaagaagttcaagatttatgtctcggcattgaccactatttctttggacgatcataactggattcctacgacagacaatcgtttgcttcgccgcattatccgcgactttaattaccggggatattcggcccgcgagactatctcccgctggcctagtgtgcgtgccggcgaagataaatggatattcccttatcaggagaatgcggatgtgatgttcaactcggcgctgttgtttgaatttgcagtccttcgcctgcacgcggaacctattttgatgggcgttccgcgcaattgtccggaatattgtgaggcgtaccggttgctgaaatttattaaatatttcgttccggtgcaggataaggaaattcccccgacgtctttactcagggagtttttgggaggaagtagcttcaaatattag

SEQ ID NO: 3832 - protein, 557 aa, Bacteroides thetaiotaomicron
MKQMLQICCKNNNIYKEFPIGSSLLDIYYGFNLNFPYQVVSAKVNNRSEGLNFKVYNNKDIEFLDVRDSSGMRTYVRSLCFVLFKAVSELFPEGKLFVEHPVSKGYFCNLRIGRPITLEDVTRIKQRMQEIIAENISYHRIECHTAEAVRVFSERGMNDKVRLLETSGSLYTYYYTLGDTVDYYYGNLLPSTGYIKLFDIVKYYDGLLLRIPNKENPDVLEEVVKQEKMLDVFKEYLNWSYIMGLNNAGDFNLACEEGHATDLINVAEALQEKKIAQIADTIFHRGENGDRVKLILISGPSSSGKTTFSKRLSIQLMTNGLKPFPISLDNYFVDREETPLDENGNYDYESLYALDLELFNQQLQALLRGEEVELPRFNFSLGKKEYKGDKLKIEDNTILILEGIHALNPELTPHIPDEKKFKIYVSALTTISLDDHNWIPTTDNRLLRRIIRDFNYRGYSARETISRWPSVRAGEDKWIFPYQENADVMFNSALLFEFAVLRLHAEPILMGVPRNCPEYCEAYRLLKFIKYFVPVQDKEIPPTSLLREFLGGSSFKY

SEQ ID NO: 3833 - DNA, 618 bp, Bacteroides thetaiotaomicron
  CDS (1)..(618)
atgttaataataggaatagcaggtggaacgggctccggaaaaaccaccgtcgtacgaaaaatgatagaaagcctccccgttggagaagtagtactattacctcaggattcatactacaaagacagtagtcacgtgccggttgaagaacgtcagaatatcaactttgaccatccggatgcttttgaatggagcttgctttccaaacatgtgatgatgctgaaagaaggaaaaagcatcgagcagccgacctattcttatctgacttgtacccgccaaccggaaaccatccacatcgagcctcgtgaagtcgtcattattgaaggtatccttgccttgtgcgacaagaagctacgcaatatgatggatctaaagatatttgtagatgccgatcccgatgaacgcctgatacgtgtcatccaaagggatgtcatcgaaagaggacggacagcggaagctgtcatggaacgctatacccgtgttctgaaaccgatgcacctgcaattcatagaaccctgcaaacgctatgcggaccttatcgttccagaaggcggcagcaatgcagtagctatcgatatattaacaatgtatatcaagaaacatttgaaaaatgaagaatga

SEQ ID NO: 3834 - protein, 205 aa, Bacteroides thetaiotaomicron
MLIIGIAGGTGSGKTTVVRKMIESLPVGEVVLLPQDSYYKDSSHVPVEERQNINFDHPDAFEWSLLSKHVMMLKEGKSIEQPTYSYLTCTRQPETIHIEPREVVIIEGILALCDKKLRNMMDLKIFVDADPDERLIRVIQRDVIERGRTAEAVMERYTRVLKPMHLQFIEPCKRYADLIVPEGGSNAVAIDILTMYIKKHLKNEE

SEQ ID NO: 3835 - DNA, 630 bp, Streptococcus agalactiae
  CDS (1)..(630)
atgcgtaaaaaacctattattattggtgttacaggtggatctggtggtggtaaaaccagtgtttctcgggcgattttatcaaatttcccagatcaaaaaattaccatgattgaacatgattcttactataaagatcaaagtcatttgacttttgaagaacgtgtaaaaaccaattatgatcatccccttgcttttgataccaatttgatgattgagcaattgaacgaattgattgagggacgtccggtcgatattccggtttatgattacacaaaacatacccgtagtgatagaactatccgccaagacccccaggatgtcattattgttgagggaattttagtattagaagatcagcgtttgcgtgatttaatggatatcaaattatttgttgatacagatgatgatattcgtattattcgtcgtattaagcgtgatatggaagagcgcgatagaagtttagatagtattattgaacagtatacagaagttgtaaaacctatgtatcatcaatttatcgaaccaacaaagcgttatgcggatattgtaattccagaaggagtaagtaatattgtcgctattgatttaatcaataccaaagtggctagcatcttaaatgaagcaaaataa

SEQ ID NO: 3836 - protein, 209 aa, Streptococcus agalactiae
MRKKPIIIGVTGGSGGGKTSVSRAILSNFPDQKITMIEHDSYYKDQSHLTFEERVKTNYDHPLAFDTNLMIEQLNELIEGRPVDIPVYDYTKHTRSDRTIRQDPQDVIIVEGILVLEDQRLRDLMDIKLFVDTDDDIRIIRRIKRDMEERDRSLDSIIEQYTEVVKPMYHQFIEPTKRYADIVIPEGVSNIVAIDLINTKVASILNEAK

SEQ ID NO: 3837 - DNA, 1524 bp, Galdieria sulphuraria
  CDS (77)..(1423)
gcggccgctctagaactagtggatcccccgggctgcaggaattcggcacgaggagctcagagattcactttctactatggggtttgttcttccttccaccacatcatacgttgtttataaatcttcttcaacgataaaaagcaaaaagtacaacaaaagaaactatagttcagtttcaagagttcaagttggaggcagcaaaatatcctcctggttatccaatcgtctattattccaaggaaaggaaataaatacgacaagaaaaacaaccacaaagtattggattataactgtttcttctcaaactgctctagaggaatttgtcaactgcagtggatccaaaggtgttcatgaaagtgctggtatctcaagatcaaaatcgaaagtacttagaaacaaaggaatagagcgaccagttattatcggagttgctgcagactcaggttgtggcaagtcaacatttctccgcagagtaaatgagatattcggtactaaagtttctcagtcacatacacctcaaggggaactggtgacagttatctgtctcgatgactttcataccttggatagaaaaggaagagctgaaaaaaaggtgactgctctcaatcccgaagcaaacaactttgagttgatgtatcaacaaatagcagcattaaaagaaggatatgatattatgaagccaatttataatcatcaaactggtttgatagatccaccagagcttattcaacccaaccatattattgtaatagaaggactgcatccttggtatgatgcaagaatgaagcaactcctagattttactgtttatcttgatataagtgacgaagttaaagttgcctggaaaattcagagggacatggcagaaagaggtcataaactcgaaaatattttggcttctatcgagtctcgtaagccagacttccaacaatacattgatcctcaaaaaaaagatgctgtagccgtcattcaagtacttcctactcgattgattcccgatgacacggaaaagaaagtcttgagggttcgtcttatacaacgagagggtatccagggctttcaatctgtctatctttatgatgaaggttcaacaatagactggattccttgtggaagaaaacttacttgcagctatccgggcatcaaattccactatggaccagataactggtacaatcatgatgtttctgttctagaagttgacggaaactttgagaaactagaggaacttatctatatagagtcccatcttaataatacttccaccaaattttatggagaaataacccaacaactcttgcgaaattcttctgctccaggttcaaataatggaactggactctttcaagttctaacggcactcaaaatgagacaactttatgaggagcttacgggaaagagtattgcacctgtcctagtttagccgaaaattaagttttgctccactggctagctggttttctcttccagtatattagtaaactctatgtgcgtatctttgtgtaaaaaaaaaaaaaaaaaaaa

SEQ ID NO: 3838 - protein, 448 aa, Galdieria sulphuraria
MGFVLPSTTSYVVYKSSSTIKSKKYNKRNYSSVSRVQVGGSKISSWLSNRLLFQGKEINTTRKTTTKYWIITVSSQTALEEFVNCSGSKGVHESAGISRSKSKVLRNKGIERPVIIGVAADSGCGKSTFLRRVNEIFGTKVSQSHTPQGELVTVICLDDFHTLDRKGRAEKKVTALNPEANNFELMYQQIAALKEGYDIMKPIYNHQTGLIDPPELIQPNHIIVIEGLHPWYDARMKQLLDFTVYLDISDEVKVAWKIQRDMAERGHKLENILASIESRKPDFQQYIDPQKKDAVAVIQVLPTRLIPDDTEKKVLRVRLIQREGIQGFQSVYLYDEGSTIDWIPCGRKLTCSYPGIKFHYGPDNWYNHDVSVLEVDGNFEKLEELIYIESHLNNTSTKFYGEITQQLLRNSSAPGSNNGTGLFQVLTALKMRQLYEELTGKSIAPVLV

SEQ ID NO: 3839 - DNA, 1005 bp, Synechococcus vulcanus
  CDS (1)..(1005)
atgagcagtaagccagaccgtgtggttctcatcggcgttgctggagactccggctgtggtaaatcaacgtttttgcgccgactggccgatctgtttggcgaagactttatgactgtgatttgtttggatgactatcacagtctggatcgcaagcagcggaaagaaatggggattacagcgcttgatccccgcgccaacaactttgatctgatgtatgagcagatcaaggctctcaaaaatggcgaatcaatcatgaaacccatctacaaccacgaaacggggacgattgatccgccggagaaggtggatcccaaccacgtgattgtgattgaaggcctgcatcccctctatgatgaacgggtgcgatcgctcattgatttcagtgtttatctcgacatcagtgacgatgtaaaaattgcttggaagatcaagcgcgacatggctgagcggggccatagctatgaagacgtcattgcctccatcaacgcccgtcgccctgacttcatggcctatatcgatccccaaaagcagtacgctgacgtggttttgcagattctgccaagccagttggccaaagaggaaaaagtcggcaatatcctgcgggtacggatgctgcaacgggaaggcatccccggctttgagccagtctatctctttgatgaaggctcaacgattacttggattccctgcggtcgtaagctcacctgctcctatccgggcatccgcctcagctacggacctgatgaatactatggtcaccccgtttcggtcttagaagtggacggtcgctttgaaaaactcgatgaactcatctacattgaaagccacctgagtaatacctccaccaagcactacggcgaagtgacggaactcctgctgaagcaccgtgactatccgggttccgataatgggtcgggcctattccaagtgctaacggggctgaaaatgcgggctacctatgagcgcttgacctcgcgggacgcggccactgtcaccaaccgctaa

SEQ ID NO: 3840 - protein, 334 aa, Synechococcus vulcanus
MSSKPDRVVLIGVAGDSGCGKSTFLRRLADLFGEDFMTVICLDDYHSLDRKQRKEMGITALDPRANNFDLMYEQIKALKNGESIMKPIYNHETGTIDPPEKVDPNHVIVIEGLHPLYDERVRSLIDFSVYLDISDDVKIAWKIKRDMAERGHSYEDVIASINARRPDFMAYIDPQKQYADVVLQILPSQLAKEEKVGNILRVRMLQREGIPGFEPVYLFDEGSTITWIPCGRKLTCSYPGIRLSYGPDEYYGHPVSVLEVDGRFEKLDELIYIESHLSNTSTKHYGEVTELLLKHRDYPGSDNGSGLFQVLTGLKMRATYERLTSRDAATVTNR

SEQ ID NO: 3841 - DNA, 1831 bp, Arabidopsis thaliana
  CDS (116)..(1525)
gatttgaggctttccttagatccttgagagcaaaactgaatctgggtaattttaaaaatctcatttttacgacttatctcttttgaacgatctttttttcataattgtcgtcgggatgggttctaagtccgttgttgacatgatcgaagctgcctcgcgggcacatttttctggtttacacgtgaatgggcacatgaatgggttggaaccaagtgcacttaaggaaaccacttctgcatcagaagatatccaaagacagccttttgtaataggtgttgctggaggcgcagcatcgggaaagactactgtttgtgatatgataatccagcaactgcacgatcagcgtgttgtacttattaacctggactcgttctatcataatctgactgaagaagaacttgctagagttcatgaatacaactttgatcatccagacgcatttgacacagagcatttattgtcttgtatggagaaattgaggcaagggcaagctgtagatattccaaaatatgattttaaaacttacaggagcagtgttttcagaagggtaaatcctacagatgtaataattcttgaagggatacttttgttccatgatccacgcgtccgaaagttgatgaacatgaagatttttgtttgcacagatgctgacgttcgtttggcaagaaggataaaaagagatactgtcgagaatggtagagatatcggcacagtacttgaccagtactcaaagtttgtgaagcctgcttttgatgacttcattcttccaacgaagaaatatgcagatattataatccctcgtggtggggataatcatgtagctattgacttaattgtgcaacatatttgcaccaagctgggtcaacatgatctctgtaaaatatatcctaatctctacgttatacactcgacatttcagataagagggatgcacacccttatacgagattctcagacaaccaaacatgattttgtcttctattctgatcgattgattaggctggttgtagaacatggtcttggacatctgccttttactgaaaagcaagtgattactccaaccggatgtgtgtattctggtgtggatttctgtaaacggttatgtggtgtctcggtgattaggagtggtgagagcatggagaatgcgttacgagcatgttgcaaaggtatcaagatcgggaagatcctaattcacagagaaggtgacaatggtcaacagcttgtttatgagaaattgccaaatgatatctcagagaggcatgtcctattgttggatcctattctcgggacaggaaactcagcggttgaagctatcaacctccttataagcaagggcgtacctgagggaaacatcatatttctaaaccttatctcagcacctcaaggtgttcatgtggtctgcaaaaaattcccaagaataaagatagtgacatctgaaatcgataatgggttaaacgaagagtttcgtgttattcctggtatgggggagtttggggacagatattttggcacagacgatgactaggccactgtgttcctgcagcattagttgtcccatccatgtcctgcatagcagtttactgatgcattcaccatcctattctctacaacggctacacaaactatcaaaggaatcacctttaactttgttggttttcccatttaaaccccctcaaggtgttgggaacagttttgtttacttataaatgcccaagtgaggggttgatcgatcccgggacttgggattcggtgtaccatatataattacccttggaactcttgataattcatctacaactcttgtgtaccatatataaatatccttggaacc

SEQ ID NO: 3842 - protein, 469 aa, Arabidopsis thaliana
MGSKSVVDMIEAASRAHFSGLHVNGHMNGLEPSALKETTSASEDIQRQPFVIGVAGGAASGKTTVCDMIIQQLHDQRVVLINLDSFYHNLTEEELARVHEYNFDHPDAFDTEHLLSCMEKLRQGQAVDIPKYDFKTYRSSVFRRVNPTDVIILEGILLFHDPRVRKLMNMKIFVCTDADVRLARRIKRDTVENGRDIGTVLDQYSKFVKPAFDDFILPTKKYADIIIPRGGDNHVAIDLIVQHICTKLGQHDLCKIYPNLYVIHSTFQIRGMHTLIRDSQTTKHDFVFYSDRLIRLVVEHGLGHLPFTEKQVITPTGCVYSGVDFCKRLCGVSVIRSGESMENALRACCKGIKIGKILIHREGDNGQQLVYEKLPNDISERHVLLLDPILGTGNSAVEAINLLISKGVPEGNIIFLNLISAPQGVHVVCKKFPRIKIVTSEIDNGLNEEFRVIPGMGEFGDRYFGTDDD

SEQ ID NO: 3843 - DNA, 1875 bp, Homo sapiens
  CDS (14)..(1273)
gcctccgagcgccatggctgcgcccccggcccgcgcggacgctgatccttcgcccacgtcgccacctacggcccgagacacaccaggccggcaggctgagaaaagcgagaccgcgtgcgaggaccgcagcaatgcagagtccctggacaggctcctgccacctgtgggcactgggcgctctccccggaagcggaccaccagccagtgcaagtcagagcctcccctgctgcgtacaagcaagcgtaccatctacaccgccgggcggccgccctggtacaatgaacacggcacgcaatccaaagaggccttcgccatcggcttgggaggcggcagtgcctctgggaagaccactgtggccagaatgatcatcgaggccctggatgtgccctgggtggtcttgctgtccatggactccttctacaaggtgctgactgagcagcagcaggaacaggccgcacacaacaacttcaacttcgaccacccagatgcctttgacttcgacctcatcatttccaccctcaagaagctgaagcaggggaagagtgtcaaggtgcccatttatgacttcaccacgcacagccggaagaaggactggaaaacactgtatggtgcaaacgtcatcatctttgagggcatcatggcctttgctgacaagacactgttggagctcctggacatgaagatctttgtggacacagactccgacatccgcctggtacggcggctgcgccgggacatcagtgagcgcggccgggacatcgagggtgtcatcaagcagtacaacaagtttgtcaagccctccttcgaccagtacatccagcccaccatgcgcctggcagacatcgtggtccccagagggagcggcaacacggtcgccatcgacctgattgtgcagcacgtgcacagccagctggaggagggctgcgctggcctcggcacaccagtgccacccgctgccccggacgctgagcgtcctgaagagcacgccgcaggtacggggcatgcacaccatcatcaggtgagggcccacctggggacggggcggccccgggcgcgtgctcccgctcaactgttggccccacagggacaaggagaccagtcgcgacgagttcatcttctactccaagagactgatgcggctgctcatcgagcacgcgctctccttcctgccctttcaggactgcgtcgtacagaccccgcaggggcaggactatgcgggcaagtgctatgcggggaagcagatcaccggtgtgtccattctgcgcgccggtgaaaccatggagcccgcgctgcgcgctgtgtgcaaagacgtgcgcatcggcaccatcctcatccagaccaaccagcttaccggggagcccgagctccactacctgaggctgcccaaggacatcagcgatgaccacgtgatcctcatggactgcaccgtgtccacgggcgcggcggccatgatggcagtgcgcgtgctcctggaccacgacgtgcctgaggacaagatctttttgctgtcgctgctcatggcagagatgggcgtgcactcagtggcctatgcatttccgcgagtgagaatcatcaccacggcggtggacaagcgggtcaatgaccttttccgcatcatcccaggcattgggaactttggcgaccgctactttgggacagacgcggtccccgatggcagtgacgaggaggaagtggcctacacgggttagctgcccagtgagccatcccgtccccaccaccctcctcctgcctcctgacccaggactgctgaatacaaagatgttaatttttaaaatgttactagtataatttattctatgcattttataaaataaataaagctttagaaaaatgaaaaaaaaaaaaaaaaaaaaa

SEQ ID NO: 3844 - protein, 419 aa, Homo sapiens
MAAPPARADADPSPTSPPTARDTPGRQAEKSETACEDRSNAESLDRLLPPVGTGRSPRKRTTSQCKSEPPLLRTSKRTIYTAGRPPWYNEHGTQSKEAFAIGLGGGSASGKTTVARMIIEALDVPWVVLLSMDSFYKVLTEQQQEQAAHNNFNFDHPDAFDFDLIISTLKKLKQGKSVKVPIYDFTTHSRKKDWKTLYGANVIIFEGIMAFADKTLLELLDMKIFVDTDSDIRLVRRLRRDISERGRDIEGVIKQYNKFVKPSFDQYIQPTMRLADIVVPRGSGNTVAIDLIVQHVHSQLEEGCAGLGTPVPPAAPDAERPEEHAAGTGHAHHHQVRAHLGTGRPRARAPAQLLAPQGQGDQSRRVHLLLQETDAAAHRARALLPALSGLRRTDPAGAGLCGQVLCGEADHRCVHSARR

SEQ ID NO: 3845 - DNA, 1644 bp, Thermoanaerobacter tengcongensis
  CDS (1)..(1644)
atgaaaattatcgtcaaagacagggaatacgaataccctgaaaatactaggttagaagatattgctagagattttgaacacctttataacggaataatagtggcagcgaaagtgaataacgaattgagggatttgaattgtacaatttctgaggatagtgtagtagaatttgtggatactactgtagaagaagggacaagaatatataggagaagtcttacttttgtgtttataaaggctgtaaaagagcttctaccaggtgctactgttacaatagaacattccctcgggaaaggcttgtactgtgaaattcacggttattccataaacaataagatagtagcatcgattaaggataaaatgaaggaaataatagataagaatttgaaaatagagagaaaaatgcttcctagagaagaagccataaggctttttgaaaaagaaggtttaatggaaaaagttaggctttttaaagatactgataaagagaaagtacctgtttattactgtgatggcacagttgactttttctacagtccttgcgttccatcaacagggtatttaaaagtatttgacataagattttatttccctggagtcattttgattgcaccagatatctacaatccacgttctcttcctgtatttgtggatgttccaaaacttgcttctatatttaaagaggcagaagaatgggctcatatattggatataaattatgtggcttctttaaatgacctcataaaaagagggggagcaagagatttaatcctggtttccgaggcttttcatgagaagaaaatttcaaaaatagctgattacatcgcttcaaataaaatgataaaagtagtccttattgctggaccttcttcttcagggaaaacttctttcattcataggcttagcgtacagctcagggtaaacgggttaaagccttttgctatttctctggacaattattttgttccaagagagcttactcctcgggatgagtttggcaattacgacttcgaatctatcgatgccctagatttgccgctttttaatgaacatttgataaaacttatacagggtgaagaagtagaaatccctatttttaattttaaaacaggggagagagagcctgtagggagaaaagttaaacttgagaaaaatcagattatcctcatggagggaattcatggacttaatgaaaagcttactatccaaattccgaaagacaataagtataaaatatatgtaagcgcaataactcagcttaatttagatgaacacaatagaattccaacttctcagacaaggcttataaggcgaatagttagggacagtcaatttaggtctacagatgcggcggagactataaatatgtggcctagggtgaggaaaggagaagaacgctggattttcccatatcaggagcaagcggatgtcatgttcaactccttcttgccctatgaacttcctgtattaaaaaaatacgctgaaccccttttaaagaaggtttccaaagatgaccctgcttactctattgcaaaagagatgctggaatttttaagctatttttatccaatagaagatgaacttgctattccgcctaattcaatcataagagaatttataggtggaagctgtctggatgtgtga

SEQ ID NO: 3846 - protein, 547 aa, Thermoanaerobacter tengcongensis
MKIIVKDREYEYPENTRLEDIARDFEHLYNGIIVAAKVNNELRDLNCTISEDSVVEFVDTTVEEGTRIYRRSLTFVFIKAVKELLPGATVTIEHSLGKGLYCEIHGYSINNKIVASIKDKMKEIIDKNLKIERKMLPREEAIRLFEKEGLMEKVRLFKDTDKEKVPVYYCDGTVDFFYSPCVPSTGYLKVFDIRFYFPGVILIAPDIYNPRSLPVFVDVPKLASIFKEAEEWAHILDINYVASLNDLIKRGGARDLILVSEAFHEKKISKIADYIASNKMIKVVLIAGPSSSGKTSFIHRLSVQLRVNGLKPFAISLDNYFVPRELTPRDEFGNYDFESIDALDLPLFNEHLIKLIQGEEVEIPIFNFKTGEREPVGRKVKLEKNQIILMEGIHGLNEKLTIQIPKDNKYKIYVSAITQLNLDEHNRIPTSQTRLIRRIVRDSQFRSTDAAETINMWPRVRKGEERWIFPYQEQADVMFNSFLPYELPVLKKYAEPLLKKVSKDDPAYSIAKEMLEFLSYFYPIEDELAIPPNSIIREFIGGSCLDV

SEQ ID NO: 3847 - DNA, 1665 bp, Clostridium perfringens
  CDS (1)..(1665)
atggtgtttatgaaaagctttagggttagtgtaaatggggaaagtttactctttaatgagggagaaaaatattcagtaattttaaaaaaggactatataaatgaaaaaatacctattactttagttaaacagaggaataagtattatgagtttactgatttaataaataatgatggggatatagaacttataaatataagtgatccacatggaaaaatagcttatagtagaactttacagtttgtatttataaaagcaactttagacttatttaaggatgctagaataaatatagagcattctataagcaagggaacttttggggaaattcacaaagaaaaggccttagatgaagaggatatactaaaaataaagaaaaaaatgcaagagataataaataaaaatattataatagaaaaaataaagatgcctaagaaagaggctattgatatatttaaatcttataagatgcaggataaagttgatttattacattgggttcaagaagagtatgtaaacttatataaattagaagataggtatgattatttttatggagatatggcatactctacaggagttttaaaatattttgatttattatattataatccaggttttatacttatggtaccaagccataaggagccaacagttgtacctgtctttaaggaacaaaaaaagttatttaatgtatttagagagaatgaaacatggttaaatatattaggaactccagatgtaggttctttagattataaattagagggagaagaatcctcagacataataagggtttctgaggctttacatgagaagaaaatagcacaaattgcagatatgataagtgatagaaaagaggttaaaattgttttagtagcagggccttcctcttcaggtaaaacaacattttcaaaaagactttctatacagcttagagttaatggctatataccaatagctatatccttagatgattattttataaatagaattcatactcctttagatgaagagggaaaacctgattttgaatctataaatgctttagatttagaattatttaataagaatctttatgatattttagaaggggaagaagtagaaataccttcttataattttaaaataggagaaagagaatggctaggcaacaagattaaacttcctgataatggagtgcttgttatagagggaatacatggactaaatccaaaactgacagaaaaaattccttcaaagaataagtttaaggtttatatttctgctttaacacaattaaatttagataatcacaatagaattccaactacagatgtcagaaaaataagacgtatagttagggattctttatcaagaggatatggagcagagcaaactttagaaatgtggagttctataaaaagaggagaggaaaagaacatatttgtttatcaggaagaagcagatgttatgtttaactccactttagtttatgaattagcagctttaaaggaatatgccttaagagagttagaaaaagtagataaaaacagcagtgtttactatgaagctaaaagaataataaatacattaaagttttttgtggaagttaagccagagagagtacctgaaaattcgattttaagagaatttataggtggaagttgcttctataagtattaa

SEQ ID NO: 3848 - protein, 554 aa, Clostridium perfringens
MVFMKSFRVSVNGESLLFNEGEKYSVILKKDYINEKIPITLVKQRNKYYEFTDLINNDGDIELINISDPHGKIAYSRTLQFVFIKATLDLFKDARINIEHSISKGTFGEIHKEKALDEEDILKIKKKMQEIINKNIIIEKIKMPKKEAIDIFKSYKMQDKVDLLHWVQEEYVNLYKLEDRYDYFYGDMAYSTGVLKYFDLLYYNPGFILMVPSHKEPTVVPVFKEQKKLFNVFRENETWLNILGTPDVGSLDYKLEGEESSDIIRVSEALHEKKIAQIADMISDRKEVKIVLVAGPSSSGKTTFSKRLSIQLRVNGYIPIAISLDDYFINRIHTPLDEEGKPDFESINALDLELFNKNLYDILEGEEVEIPSYNFKIGEREWLGNKIKLPDNGVLVIEGIHGLNPKLTEKIPSKNKFKVYISALTQLNLDNHNRIPTTDVRKIRRIVRDSLSRGYGAEQTLEMWSSIKRGEEKNIFVYQEEADVMFNSTLVYELAALKEYALRELEKVDKNSSVYYEAKRIINTLKFFVEVKPERVPENSILREFIGGSCFYKY

SEQ ID NO: 3849 - DNA, 1258 bp, Odontella sinensis
  CDS (23)..(1213)
caagaattacccaagtgaaaccatgaagctgtcccttggcatcgtcgccctcatggccgcctcggcctccgccttcgcccccacggccttcatgccggcgaacaccctccgcgccgccgcccccgcctccccctccgccctcaacatggccctgaaggagggagagaagcccatcgtgatcggcgtcgccgccgattctggctgcggaaagtccaccttcatgcgccgcctcacctccatcttcggcggtgagggcgtcggccccctcggcggcggctttgacaacggcggctgggagaccaactccctcgtgtccgacctcaccaccgtcctgtgcctcgatgactaccacctcaacgaccgcaatggccgcaaggtcacccagcgcactgccctcgacccccttgagaacaacttcgacctcatgtacgagcagatcgccgccctcaagaacggagagagcatcgagaagcccatctacaaccacgtcaacggaaccctcgacactcctgagaccattgtgcccaccccgattgtcatcattgagggtcttcaccccatgtacgatgagcgcgtccgtgaccttctcgacttctccctttaccttgacatctctgacgaggtgaagctcaactggaagatccagcgtgacatggaggagcgtggccactctctcgagtccatccttgcctccatcgaggcccgtaagcccgatttcgatgcctacattgccccccagaaggagttcgccgacctcaccatcgaggtgctccccacccagcttgacgaggaggacaagaagaccctccgcgtgaggtgcatccagaaggagggcgtctccgacttctccccctgctacctcttcgacgagggctccaccatcgcctggactcccgccccctccaagctctccagctccggccccggcctcaccatggcctacggaaccgaggattactacggcaagcccgcccaggtcgtcgagatggatggcaccttcgacaacatccaggagctcgtctacgtcgagtcccagctttccaacacctccaccaagttctacggtgagctcacccaggccatgctcaagctcgctgacgcccccggaagcaacaacggaactggactcatgcagacccttgccgccttcgccatccgggagctttacgagaagaaggccgccgccgccaagcttgccgtgatcgaggcctaagcccgcttttattcttcataataattaaaatgccaatggaaatct

SEQ ID NO: 3850 - protein, 396 aa, Odontella sinensis
MKLSLGIVALMAASASAFAPTAFMPANTLRAAAPASPSALNMALKEGEKPIVIGVAADSGCGKSTFMRRLTSIFGGEGVGPLGGGFDNGGWETNSLVSDLTTVLCLDDYHLNDRNGRKVTQRTALDPLENNFDLMYEQIAALKNGESIEKPIYNHVNGTLDTPETIVPTPIVIIEGLHPMYDERVRDLLDFSLYLDISDEVKLNWKIQRDMEERGHSLESILASIEARKPDFDAYIAPQKEFADLTIEVLPTQLDEEDKKTLRVRCIQKEGVSDFSPCYLFDEGSTIAWTPAPSKLSSSGPGLTMAYGTEDYYGKPAQVVEMDGTFDNIQELVYVESQLSNTSTKFYGELTQAMLKLADAPGSNNGTGLMQTLAAFAIRELYEKKAAAAKLAVIEA

SEQ ID NO: 3851 - DNA, 606 bp, Homo sapiens
  CDS (1)..(606)
atggcttcggcgggaggcgaagactgcgagagccccgcgccggaggccgaccgtccgcaccagcggcccttcctgataggggtgagcggcggcactgccagcgggaagtcgaccgtgtgtgagaagatcatggagttgctgggacagaacgaggtggaacagcggcagcggaaggtggtcatcctgagccaggacaggttctacaaggtcctgacggcagagcagaaggccaaggccttgaaaggacagtacaattttgaccatccagatgcctttgataatgatttgatgcacaggactctgaagaacatcgtggagggcaaaacggtggaggtgccgacctatgattttgtgacacactcaaggttaccagagaccacggtggtctaccctgcggacgtggttctgtttgagggcatcttggtgttctacagccaggagatccgggacatgttccacctgcgcctcttcgtggacaccgactccgacgtcaggctgtctcgaagagacaaagaagtatgccgatgtgatcatcccacgaggagtggacaatatggttgccatcaacctgatcgtgcagcacatccaggacattctgaatggtag

SEQ ID NO: 3852 - protein, 201 aa, Homo sapiens [sequence omitted]

SEQ ID NO: 3853 - DNA, 1299 bp, Vaucheria litorea
  CDS (8)..(1225)
caacaaaatgctcgtacatagtctaattctactccttgccgccggcgcactgcacgtggagtcatttgtctctacccactcagcgctcagaacttcaacattcacaaataatgcccaaagtcttaacaaagcggcctcgaaattacaggccctggagatgaagctcggcgatcccgatgaaccagtcgtcatcattggcgttgctgctgactctggctgcggtaagtcgacattcatgcgtcggttgactaacattttcggtggttcgagcgtcggaccgctcggcgggggattcggaaacggcggttgggaaacaaatacgctcgtgtcagacctcacgactgtcatttgtttggacgattatcatttgaacgaccgaaacggcagaaaggtgtcgggacgcactgctttgcacaccgacgagcagaaattcgatctgatgactgagcaactttcggctctgaagagaggagagagcgtgatgaagcccatctacaatcacgtgaacggcacactggacacccccgaggaagtcaaacccaccccaatcgtcatcatcgaagggctgcaccccttcgtggacgaaagggtcagggatttgttggacttcaccatttacttggacatctccgacgaaatcaaatttgcttggaagatccaaagggacatgatggagcggggccactccttggaaagcatccaagcttccattgaagccaggaagccggatttcgatgcttacattgccccgcaacgagcacaggctgacgttgtcttgcaggttttgcctacgaagcttgtgccagaagacaaagaggggaagattctccgcactaggctgattcagaaggaaaatgtcaaaaacttcgaaacggcttatttgttcgatgaagggagcaccatcaactggatcccgtgcgggagaaagttgacctgctccttcccaggaatcaagttcgcctacggacctgacacttatttcgacaacgaagtttccgtccttgaaatggatggacagtttgacaatctccaggagcttatttatgtggaggggttcttgagcaatactggaactaaattttacggagagttgacccaaaatattcttaaactgtcggacagtcctggcagtaacaacggaactggcttcttgcagaccgtaattgctttgaaattgcgagaaatctacgaaaaaatcacaacgagccaagccgaggctgcataagcccattttttcctgccaacatttagagaagggaaataatgatgacactgccaattaaaaaaaaaaaaaaaaaa

SEQ ID NO: 3854 - protein, 405 aa, Vaucheria litorea
MLVHSLILLLAAGALHVESFVSTHSALRTSTFTNNAQSLNKAASKLQALEMKLGDPDEPVVIIGVAADSGCGKSTFMRRLTNIFGGSSVGPLGGGFGNGGWETNTLVSDLTTVICLDDYHLNDRNGRKVSGRTALHTDEQKFDLMTEQLSALKRGESVMKPIYNHVNGTLDTPEEVKPTPIVIIEGLHPFVDERVRDLLDFTIYLDISDEIKFAWKIQRDMMERGHSLESIQASIEARKPDFDAYIAPQRAQADVVLQVLPTKLVPEDKEGKILRTRLIQKENVKNFETAYLFDEGSTINWIPCGRKLTCSFPGIKFAYGPDTYFDNEVSVLEMDGQFDNLQELIYVEGFLSNTGTKFYGELTQNILKLSDSPGSNNGTGFLQTVIALKLREIYEKITTSQAEAA

SEQ ID NO: 3855 - DNA, 1711 bp, Cryptosporidium parvum
  CDS (290)..(1549)
ttttatatacaacaacggaccaagttagaatagttattgattgcttttaattgtttcaaattttcaatccaaacctagcaaaactatttttaatcaatgtttaactttcattttcaaaactgttaccgccgatactgttattgatcataattgtttaaaaatttcgacgtcaaatattttgaaacgtttataataagacaataacttctaatttgtttatattaatagctataaatattgccgtagatttacttcattactattttttggttattaatttgaatatataatgtctaatatcagtcttgaaaaattaatttctaaagacatatattatggcgatcaagctttaacgcctagcagcaattcaaatgtttttgttattgcagttgcaggaggaagtgcaagcggaaaaacaagcgtatgtaccagaattttttcagagttaggagataaacgagttacggtaattgagactgatagtttttataaaactcctgtcttagaagaggggcaaactatggcagactacaactttgatcatcctaattctgtggactttgaacttctatacaatgttttactaagtttgaaaaacggggaaggggttcacatccctaactactgttttaaacaacataagagattggaaacaggaaggaaggtttctccagcatctattattattgttgaaggcatatttattcttttccatccaaaaattagacatcttataaatatgtcaatttttgtcgatacggacgatgatattcgtcttgtacgtagaataagaagagatactattgagagaggcagacaaattgacgatattcttaatcaatatgagaaaacggttaagccatcctatgatgaattcatttatccgactagaagatatgcagatatcgtaattccgcattatccaaatgaagttgctgttgaccttgttgtacaacatcttagatacaagttaaaaatggatgatttaagaaaaatttactctaatttgcatattattccttctaattgtcaaatacgccatatgcactctattataaggaataaggatacatcagtggtggactttgtcttttggtcagatagattaattcgactggtcgtcgaaaatgctcttagccatttgtcttttactggtcaaacaattgaaacacctattggagaactttacgacggagtgcaatttaattacaaggataaactctgcgcggtctcaatagttagaggaggagaaagtatggaaataggtttatctgctgtttgtaaagatatcccaataggaaaaattctactggagttccaaaatcctaaaacggaacttgatgcccagtttgataaacctaagattatctattgcaaattacccgatgatattgcctcaaggaatgtatttattttggatcctattcttgggaatggatttggggtattttctgcaattaaatatttgttatcaaagggggttttgcagcgtaaaattattgttcttagtcttattgttgctgcacaatgcaatacacagaatatgtaaagagttcccggaggtaactctaattacgactgaaattgaccgtgatgttaactctgatggttttgtaattccaggattaggttgttttgctgatcgatactttggaactgaataacaaagaactttaattaaggggaataaattaaataatataaaattaaa

SEQ ID NO: 3856 - protein, 419 aa, Cryptosporidium parvum
MSNISLEKLISKDIYYGDQALTPSSNSNVFVIAVAGGSASGKTSVCTRIFSELGDKRVTVIETDSFYKTPVLEEGQTMADYNFDHPNSVDFELLYNVLLSLKNGEGVHIPNYCFKQHKRLETGRKVSPASIIIVEGIFILFHPKIRHLINMSIFVDTDDDIRLVRRIRRDTIERGRQIDDILNQYEKTVKPSYDEFIYPTRRYADIVIPHYPNEVAVDLVVQHLRYKLKMDDLRKIYSNLHIIPSNCQIRHMHSIIRNKDTSVVDFVFWSDRLIRLVVENALSHLSFTGQTIETPIGELYDGVQFNYKDKLCAVSIVRGGESMEIGLSAVCKDIPIGKILLEFQNPKTELDAQFDKPKIIYCKLPDDIASRNVFILDPILGNGFGVFSAIKYLLSKGVLQRKIIVLSLIVAAQCNTQNM

SEQ ID NO: 3857 - DNA, 1492 bp, Arabidopsis thaliana
  CDS (1)..(1461)
atgccggaagattcttcttctttagactacgcgatggagaaggcatcagggcctcacttctccggtcttcgcttcgacggccttctctcttcttctccacccaattcctccgtcgtctcttcactccgatcagctgtttcttcttcttctccgtcttcttccgatcccgaagcgcctaagcagcccttcattatcggggtttctggtggtacggcttctggtaagaccacggtctgtgacatgataatccagcaacttcatgaccatcgtgtcgttttagttaatcaggattccttttatcgtggtttgacatctgaggagttgcagcgtgtgcaagagtataactttgatcatcctgatgcgtttgacactgagcagcttttgcattgtgctgagactctcaagagcgggcaaccctatcaagttccaatctatgactttaagactcatcaacgtagatctgatactttccgccaggtcaatgcttctgatgtaataatattggaagggattctagttttccatgactcacgagttcggaatctgatgaatatgaagatctttgttgatacagatgctgatgtaaggcttgcccgcagaattaggcgtgacacagttgagaggggtagggatgtcaattctgtgcttgaacagtatgcaaagtttgtgaagccggcatttgatgacttcgtgctcccttcaaagaaatatgctgacgtgatcattcctcgaggaggtgataatcacgttgcagtcgatttgattacgcaacatatccacacaaaacttgggcagcatgatctctgcaaaatctacccaaatgtttatgttatccagtcaacatttcagataagaggcatgcatacacttattcgggaaaaggacatatcaaagcatgactttgtgttttattcagatagactcattcgtctggtcgtggagcatggtcttggtcatttgccattcactgagaaacaagtagttactccaacaggagctgtatataccggtgttgatttctgcaagaaactttgtggggtctcaattattagaagtggtgaaagcatggaaaatgcattacgcgcttgctgcaaaggaattaaaatagggaagattctcatccaccgtgatggcgataatggaaaacagcttatttatgagaagcttcctcacgacatatctgaacgccatgtcctgcttctagatcctgtcttagccacaggtaactcggctaatcaagccattgaactactcatacagaaaggtgttcctgaagctcacattatattcctcaaccttatatcggcgccggagggaatccactgtgtctgcaaacgttttccagcattgaaaattgtgacgtctgaaatagaccaatgtctgaaccaagaattcagagttataccgggcttaggcgagtttggcgatcgttacttcggcaccgacgaggaagaccagtagccaccactcaacactgtgactggtttcaaag

SEQ ID NO: 3858 - protein, 486 aa, Arabidopsis thaliana
MPEDSSSLDYAMEKASGPHFSGLRFDGLLSSSPPNSSVVSSLRSAVSSSSPSSSDPEAPKQPFIIGVSGGTASGKTTVCDMIIQQLHDHRVVLVNQDSFYRGLTSEELQRVQEYNFDHPDAFDTEQLLHCAETLKSGQPYQVPIYDFKTHQRRSDTFRQVNASDVIILEGILVFHDSRVRNLMNMKIFVDTDADVRLARRIRRDTVERGRDVNSVLEQYAKFVKPAFDDFVLPSKKYADVIIPRGGDNHVAVDLITQHIHTKLGQHDLCKIYPNVYVIQSTFQIRGMHTLIREKDISKHDFVFYSDRLIRLVVEHGLGHLPFTEKQVVTPTGAVYTGVDFCKKLCGVSIIRSGESMENALRACCKGIKIGKILIHRDGDNGKQLIYEKLPHDISERHVLLLDPVLATGNSANQAIELLIQKGVPEAHIIFLNLISAPEGIHCVCKRFPALKIVTSEIDQCLNQEFRVIPGLGEFGDRYFGTDEEDQ

SEQ ID NO: 3859 - DNA, 1480 bp, Dictyostelium discoideum
  CDS (1)..(1479)
atggaaaatagatacatttccagaatcgaaaccatttcttctcatttgttatcaacaaatgatgtctcctcacaaaatgaaagtgaatcaattacctttgtaaaaccattaccaaagaataaaaaagatcacgaccagtccatcgaatccgattcatcatttacaagagaaaaacaatttgaagaagaattagatattttaggagagattaattcaaagacaggtttatttgaaattaaacaagtaccatatcaattatcatttgatcaaggattttttcatgcatgtagggcaattgaaatattaacagaaaaagatccaaaaagaattatatgtttaggtattgctggcccagttggtgctggaaaaacaacattagctaataaaatcggtagtcttgttaatggtgttataatttcacttcaagatttcgttaaacttgaaaatgttaaagataataattatgatgatcctgtattaattgattttgataaagttatttcaacattaaatgaattaaaagaaaataaaacagttataattccaaagattgtaaatagaaagatggaaagtagaagtatatcattatcaacatcaaaagttattatattagagggtgcatatgcattgagtgcacgtattagaccactattggatattagtgttgcaattacaggtggtgtacatttggatctaataaagagtataatgagaggtattgttacgagtggtaagaattcaagtaaggatgtattggcacaaattaccaatgttgtatttccaatgtttaaagcatttgttgaaccagatttagatcaagcaaagattaaaattcatagtagtttcaatccaatgagtcaagtggttgaaccagtttacgtttgtaaagccaaatacgataataataaacagtttttcgatcaattcctctcatcactcaatgttgtaccagttaaaaagaactttagcgatatgtatctctatccaccaaaatatggtgtcgatggtatctctcaagccgataaaagaaattggattagaattcgtcgttctgagcatggtcaattcaatatcaccttctacaatgaaatgatggatggtgccgtcaatactcgtccatctttaaatttcgaaatctctgtcaaaactttgggtggtctactctctttaggttatcaaattggtgctatcctcaatcgtaccgttgaggtttggtatgataaaaatggtgttgtcatcactaaagaatatatcaaagaattggagaaacatttcattcaaattaaaggtcactctcgtagagaagtattagatagtgctgaaaaattaaaaatcactggtaatcatgtccctcaaacttttctttatctttattttaaaaaattaaaaaaaagtaaaaatccaaattattcaaaattaaaaccaaataatacaaattcaaaaattttaaaaaataataaagataaaaaaaatttataaa

SEQ ID NO: 3860 - protein, 492 aa, Dictyostelium discoideum
MENRYISRIETISSHLLSTNDVSSQNESESITFVKPLPKNKKDHDQSIESDSSFTREKQFEEELDILGEINSKTGLFEIKQVPYQLSFDQGFFHACRAIEILTEKDPKRIICLGIAGPVGAGKTTLANKIGSLVNGVIISLQDFVKLENVKDNNYDDPVLIDFDKVISTLNELKENKTVIIPKIVNRKMESRSISLSTSKVIILEGAYALSARIRPLLDISVAITGGVHLDLIKSIMRGIVTSGKNSSKDVLAQITNVVFPMFKAFVEPDLDQAKIKIHSSFNPMSQVVEPVYVCKAKYDNNKQFFDQFLSSLNVVPVKKNFSDMYLYPPKYGVDGISQADKRNWIRIRRSEHGQFNITFYNEMMDGAVNTRPSLNFEISVKTLGGLLSLGYQIGAILNRTVEVWYDKNGVVITKEYIKELEKHFIQIKGHSRREVLDSAEKLKITGNHVPQTFLYLYFKKLKKSKNPNYSKLKPNNTNSKILKNNKDKKNL

SEQ ID NO: 3861 - DNA, 1545 bp, Synechococcus sp
  CDS (267)..(1268)
aagcttaccctgagccgcgatcgccggttgtagcgatttcagcgtttcttgttagactcctcagcctgtctggtaagattccgcataaacggatacagtccgcttcgactcgccggtatcgatctcaacccgatagtgactactgacttgggaggtcaatgtcggtccgccgtagcgatgctgtcttagaacagcaagcgggcgtccagacgtggccttgtgccggatgctgaccccattatctcgtcactgtctcgagggatcctatgagcaagccagatcgtgttgttctgatcggcgttgccggtgactccggttgcggcaaatcaaccttcctaaatcgccttgccgacttgtttggtacggaattgatgacggtcatctgcttggatgactatcacagtctcgatcgcaagggccggaaggaagcaggcgtaacggctttggatccccgcgccaacaactttgacttgatgtatgaacaggtcaaggcgttgaagaacggcgaaacgatcatgaagccgatctacaaccatgaaaccggcttgatcgatccgcccgaaaaaatcgaacccaatcgcatcattgtgatcgagggtctgcatccgctttacgacgagcgcgtgcgtgaactgctcgatttcagcgtttacctcgacatcgatgacgaagtcaaaatcgcttggaagatccaacgcgatatggcagaacgcggccactcctacgaagatgtcctcgcctcgatcgaagcgcgccgccctgacttcaaggcctacattgagccccagcgtggccatgcggacatcgtcatccgcgtcatgccgacccagctaatccccaatgacaccgagcgcaaggtgctgcgggtgcagttgatccaacgggaaggccgcgatggttttgagccggcttacctgttcgacgaaggttcgaccatccagtggacgccctgcggtcgtaagctgacctgctcctatccgggcattcgcttagcctacggccctggcacctactacggtcacggagtctcagtgcttgaggtcgacggtcagttcgagaacctcgaagagatgatctacgtcgagggccacctcagcaagaccgacacgcagtactacggtgagttgacccacctgctgccgcagcacaaagattacccgggttcgaacaacggcacgggtctgttccaagtgctgaccggcctgaaaatgcgggcggcctatgagcgtttgacctcccaagcagcacccgtcgccgctagcgtctaggttgctcaggtttcacttgttttcagcttgttgactctaagctgctctcctagcgagagcagcttttttgttgctcaggactgactgatggctgaggtctgcaatcgctcattaagggtggggatagcgatcgcgcaaccaatgcagtgcttgctggcgagcagtgtcgtcggttccggccagcaattgcccatctacacccgaaccctgcagagcttcagaatctgcggaattgcggccaggtcatagccaacttttaagatcgtgaccgtcagcg

SEQ ID NO: 3862 - protein, 333 aa, Synechococcus sp
MSKPDRVVLIGVAGDSGCGKSTFLNRLADLFGTELMTVICLDDYHSLDRKGRKEAGVTALDPRANNFDLMYEQVKALKNGETIMKPIYNHETGLIDPPEKIEPNRIIVIEGLHPLYDERVRELLDFSVYLDIDDEVKIAWKIQRDMAERGHSYEDVLASIEARRPDFKAYIEPQRGHADIVIRVMPTQLIPNDTERKVLRVQLIQREGRDGFEPAYLFDEGSTIQWTPCGRKLTCSYPGIRLAYGPGTYYGHGVSVLEVDGQFENLEEMIYVEGHLSKTDTQYYGELTHLLPQHKDYPGSNNGTGLFQVLTGLKMRAAYERLTSQAAPVAASV

SEQ ID NO: 3863 - DNA, 1452 bp, Arabidopsis thaliana
  CDS (1)..(1452)
atgccagaagattcaacggcgattgactatgtcatggagaaggcatcggggcctcacttctccggtcttcgccttgacggtcttctttcttctccgtcgaaatcctccgtctcttctccttctcacttccgtttgagtaattcttctttttcggctaccgacgatcccgccgctcctcatcagcccttcgttatcggagttactggtggtacagcttctggtaagacgacggtatgtgacatgataatccagcaacttcatgatcatcgcattgttttagttaaccaggattcgttttaccgtggtttgacatctgaagaacttgagcatgtacaagaatacaattttgatcatcctgatgcctttgacactgagcagcttttgcattgcgttgacatactcaagagtgggcaaccctatcaaattccaatttatgacttcaagacccatcaacgtaaagtagatgcttttcgccaggtcaatgcttgtgatgtcatcattttggaagggattctagtttttcatgactcacgagttcgggacctaatgaatatgaagatcttcgttgacacagatgctgatgtgaggcttgctcgcagaatcaggcgtgacacggttgagaggggtagggatgttgactctgtgcttgaacagtatgcaaagtttgtgaagcctgcgtttgatgattttgtgctcccctcaaagaaatatgctgatgtgatcattccacgaggaggtgacaatcacgttgcagttgatttgattgtgcaacatatccacacaaaacttgggcaacatgatctctgcaaaatctacccaaatgtttttgttattgaaacaacatttcagataagaggcatgcacactctcattcgagagaaggacatatcaaaacatgacttcgtgttttactcagatcgcctcattcgtttggttgtggagcatggtcttggccatttgcctttcactgagaaacaagtagttactccgacaggatctgtgtatagcggtgttgatttctgcaagaaactctgtggggtctcagtcattcgaagtggtgaaagcatggaaaacgcattgcgcgcatgttgcaaagggattaagatagggaagattctcatccatcgtgacggagacaatggaatgcagcttatatacgagaagcttccaagtgatatctccgagcgtcatgtcctgctattagatcctgttttaggcacaggtaactctgcaaatcaggcgatagaactactcatacagaaaggagtacctgaagcccacattatattcctcaatcttatctcagcgccagaaggaatccattgcgtctgcaaacggttcccaaagttgaagattgtgacgtcagaaatcgatcagtgtctgaacgaagagttcagggttataccaggcttgggtgagtttggtgatcgctactttggtaccgacgagtag

SEQ ID NO: 3864 - protein, 483 aa, Arabidopsis thaliana
MPEDSTAIDYVMEKASGPHFSGLRLDGLLSSPSKSSVSSPSHFRLSNSSFSATDDPAAPHQPFVIGVTGGTASGKTTVCDMIIQQLHDHRIVLVNQDSFYRGLTSEELEHVQEYNFDHPDAFDTEQLLHCVDILKSGQPYQIPIYDFKTHQRKVDAFRQVNACDVIILEGILVFHDSRVRDLMNMKIFVDTDADVRLARRIRRDTVERGRDVDSVLEQYAKFVKPAFDDFVLPSKKYADVIIPRGGDNHVAVDLIVQHIHTKLGQHDLCKIYPNVFVIETTFQIRGMHTLIREKDISKHDFVFYSDRLIRLVVEHGLGHLPFTEKQVVTPTGSVYSGVDFCKKLCGVSVIRSGESMENALRACCKGIKIGKILIHRDGDNGMQLIYEKLPSDISERHVLLLDPVLGTGNSANQAIELLIQKGVPEAHIIFLNLISAPEGIHCVCKRFPKLKIVTSEIDQCLNEEFRVIPGLGEFGDRYFGTDE

SEQ ID NO: 3865 - DNA, 1398 bp, Arabidopsis thaliana
  CDS (1)..(1398)
atggagaaattatctaatggcgttagagatcactgtttgatcagtgactatgtttctccttcagctcctgctcctcttaaacaacctttcgtgatcggtgttgccggaggaaccgcctccgggaagacgacggtttgcaatatgatcatgtctcagttacatgatcaacgtgttgtccttgttaaccaagattcgttttaccactcgcttactaaggagaaattgaacaaggttcatgaatataacttcgatcatcctgatgcattcaacactgaggttttactttcatgtatggagaagttacgatctggacaaccagtgaacattccgagttacgatttcaaaatccatcagagcattgaatcatcaagtccggttaatcctggtgatgtaatcatcttagagggaatcctagttcttaatgatcctcgagttcgtgatctcatgaacatgaagatctttgtcgatacagatgctgatgtacgactctcgagaagaatacagcgtgacaccgtcgagagaggaagaaacatacagaatgtgcttgaacagtatactaagtttgtgaagccgagcttcgatgaatacattcagccgtcgatgaagtatgctgatataatcattccacgaggaggagataatgatgttgcaattgatctcattgtacaacatattcgtacaaagctgtgccaacacaatctctgtaagatatactcaaacatcttcatcatatcttcaacattccagatcaaaggaatgcatactcttatccgtgatatcaacacaaccaagcatgatttcgtcttctacgctgaccgattgattcgactggtcgtggaacatggacttggtcatcttcctttcacagagaaacagatcacaactccaacagggtcagtgtacactggagtcgacttctgcaagagattgtgcggtgtctcagtgatcagaagtggagaaagcatggaaaacgctctaagagcttgctgcaatgggattaagattggtaaaatcctcattcacagagagaataacgatggtcgtcagttaatatatgagaagttgccaaaagatatctcaagcagacatgtcttcctccttgaccctgttctagcatcaggctactctgcagttaaagctataactttgcttctaagcaagggagttccagaatcacatatcatctttctcaatcttatagcagcacctcaaggcatccacgcgctttgcaagaaattcccgatgctaaagattgtgacatcggaaatcgattcatctctcaatgaggactcacgtgtgattccaggcttgggagaatttgcagaccgttactttgggacaaacaacattaattcaaaagtatcaagcttgtctacaaatctcaagttaagaagctaa

SEQ ID NO: 3866 - protein, 465 aa, Arabidopsis thaliana
MEKLSNGVRDHCLISDYVSPSAPAPLKQPFVIGVAGGTASGKTTVCNMIMSQLHDQRVVLVNQDSFYHSLTKEKLNKVHEYNFDHPDAFNTEVLLSCMEKLRSGQPVNIPSYDFKIHQSIESSSPVNPGDVIILEGILVLNDPRVRDLMNMKIFVDTDADVRLSRRIQRDTVERGRNIQNVLEQYTKFVKPSFDEYIQPSMKYADIIIPRGGDNDVAIDLIVQHIRTKLCQHNLCKIYSNIFIISSTFQIKGMHTLIRDINTTKHDFVFYADRLIRLVVEHGLGHLPFTEKQITTPTGSVYTGVDFCKRLCGVSVIRSGESMENALRACCNGIKIGKILIHRENNDGRQLIYEKLPKDISSRHVFLLDPVLASGYSAVKAITLLLSKGVPESHIIFLNLIAAPQGIHALCKKFPMLKIVTSEIDSSLNEDSRVIPGLGEFADRYFGTNNINSKVSSLSTNLKLRS

SEQ ID NO: 3867 - DNA, 1856 bp, Drosophila melanogaster
  CDS (77)..(1762)
cacgacgaagtaaatcaccgcgtgtttttttctaatcgctgcaactggctgctgcaatcactattctcttgtcgaaatgtctgtgacccagacgaaacaaatcaagttctacaacccatcgagttccgctagctccgacagcgatgaccgttcactctcggatgtcacagagcaactctatgtggatccgtatgccgacctaagcaatggcttgcccggggatctcaactgctgtccggcctcgcccaccacagtgcctgctaaagcatcgttggattcgcctcttaaacgttccggtaggagacagcgaaccacatccattggcaaccagaccaccacagcgaatccgtccgaatgcatcatacgcgcaaataaccgcacgatctacacggccggacgaccgccgtggtacaattgtgctgggcaacaggtggagcccttcgtcataggaatctgcggcggtagtgcctctggcaagaccacagtggctgagaaaatcatcgaaagcctagacgttccatgggtaacactgttgtccatggactgtttctacaagatccttaatgagaaacagcatgagcaggccctgatcaacgaatataacttcgatcacccggatgccttcgacatcgagctgctgctggacgtgctcaccaagctgaaggagggccgaaaggtggaagttcctgtctataattttgtgacacatggtcgtgagagccaaacgaaaaccatgtacggggccaatgtgatcatcttcgagggtattcttacctttcatagtcctgaagtacttaaattgctagacatgaagatatttgtggacacagatcccgatattcgtctggccaggcggttaagaagggacatctctcagcgcggacgagacctcaagggcgtgctgaagcaataccttaatatggttaagccctcctattgcaattacatagctccaacaatggcccatgcagatatcattgttcctcgtggaggcgacaacaaggtggccatccatctcattgttcagcacgtgcacacacagctgcaactgcgcggatttaagctgcgcgaaactctggccaactcctacaaggaccagccaatgccacattctctgcacttgctgcatcccacgccccaaataaagggcctgcacacgttcatccgttgccgaaatacgtcccgcgatgagtttattttttactcaaagcgcctgatacggctagtcattgaatatgcgctaagcttatttccctttaagaaaacaacagtggagactccacaaggtgtcctttacgagggcaagcgtatggaatcgcgaaaaatatgcggcgtctcaattctccgagctggtgaaacaatggaacaagccgtttgtgatgtgtgcaaggacattcgcatcggaaagatcctcatccagaccaatcttaagaccggcgagccggagctttactacctgaggctgcctaaagacataaaagactacaaggtgatactaatggatgccaccgtggccacaggagcagcggccatgatggccattcgggtgctgctggatcacgatgtacccgaggacaacattatcttggcctcgcttttgatggctgagatcggtgtgcactccattgcctatgccttcccaaaggtgaaaattgttacttccgctctggatccggagattaatagtaagttttatgttatacccggcattggtaactttggcgatcgctactttggcacggaaccctctgatgagtactaaggagatctgggccaatccatacctatatggaaccatcaagtttctaatgtatcttaggttaagttcaaaacgttacttaaattatgaatttgga

SEQ ID NO: 3868 - protein, 561 aa, Drosophila melanogaster
MSVTQTKQIKFYNPSSSASSDSDDRSLSDVTEQLYVDPYADLSNGLPGDLNCCPASPTTVPAKASLDSPLKRSGRRQRTTSIGNQTTTANPSECIIRANNRTIYTAGRPPWYNCAGQQVEPFVIGICGGSASGKTTVAEKIIESLDVPWVTLLSMDCFYKILNEKQHEQALINEYNFDHPDAFDIELLLDVLTKLKEGRKVEVPVYNFVTHGRESQTKTMYGANVIIFEGILTFHSPEVLKLLDMKIFVDTDPDIRLARRLRRDISQRGRDLKGVLKQYLNMVKPSYCNYIAPTMAHADIIVPRGGDNKVAIHLIVQHVHTQLQLRGFKLRETLANSYKDQPMPHSLHLLHPTPQIKGLHTFIRCRNTSRDEFIFYSKRLIRLVIEYALSLFPFKKTTVETPQGVLYEGKRMESRKICGVSILRAGETMEQAVCDVCKDIRIGKILIQTNLKTGEPELYYLRLPKDIKDYKVILMDATVATGAAAMMAIRVLLDHDVPEDNIILASLLMAEIGVHSIAYAFPKVKIVTSALDPEINSKFYVIPGIGNFGDRYFGTEPSDEY

SEQ ID NO: 3869 - DNA, 1869 bp, Synechocystis sp
  CDS (233)..(1231)
gaattcatactcagtattcagagggtcaggctatatctctggctagaaccgaagagcgttatctggggttgaccaggatgactagatctcaggattagttttccttcggcccttgacagggggttaacaagcccataggctctggtttgtctctccaacacgccatctggggtgaggagaaattttctaggaaaccgggttaacaatcagttttgcatttttgagggatgttatgaccacacagctagaccgcgtggttcttattggtgttgccggggattccggttgcggtaagtctactttcttacgtcgtttaacggatttattcggcgaagagttcatgacggtaatttgtttggacgattaccatagtttggatcgccagggtagaaaagccgctggggtcaccgccctggatcccagagccaacaattttgacctcatgtatgagcagattaaaacgctcaaaagtggtcaatccattatgaaacccatttacaaccacgaaacggggctgctggatccaccggaaaaagttgaacccaacaaagtggtggttattgagggtttgcatcccctctacgatgaacgggtgcgggaactggtggatttcggggtctacctggacatcagcgaagaagtgaaaattaactggaaaattcaacgggacatggccgaacggggccacacctatgaagatattttggcttccatcaacgcccgtaagcctgacttcactgcctatatcgagccccaaaagcaatatgcggacgtggtgatccaggtgttgcccacccgcttgattgaggacaaggaaagtaaactcctgcgggttcgtcttgtgcaaaaagaaggggttaaattcttcgagccagcctacctgtttgacgaaggttccaccattgattggcgtccctgtggtcggaagctgacctgtacctatcctggcatcaagatgtactacggccccgataattttatgggcaacgaagtatctttgctggaagtggacggcaggtttgaaaacctagaggaaatggtttatgtggaaaaccacctcagcaagactggtactaagtactacggtgaaatgaccgagttgttgctcaagcataaggattacccaggcactgacaatggtactggcctgttccaggtgttagtgggtctgaaaatgcggaaagtttacgaacagttaacggcggaagctaaggtcccggcctctgtgtaactgcggtaccaataattacctgacctgctggtctgcataacctaatttactatttcgtggtggccatggctgtggttccgccacgatttttgttggggtttgatttaagggagaaatcttctaatatctaaggcggagtcgttgtttgatatcttcacaacatccgggttgagcttatttctggggaggataatgatgccatttttactggtggtggtggtggttttatttgccggagtgcaacttttccaatggctatggggggtaattttgcccctgcctatttacgttatggccggtgcttttttggcgatcgccagcaattatgacaagggcatggcggctttgattaaccggggtcaggagttattaccccatcaccaaaccccaggggcaaccatgacggcggagttggaatcccctagggttagcattgatggagttattaatccgtcagagttgacggaacagaagtccctaaacgatgactaaatccccccttaaactggtaaaactgaggcgttcgtcggtttcatccaccacaatggtctcaccaggtttgtaatccccccgtaaaattcccttggcgatcgccgtttctaggtatttttggacggctcgttttaaaggtcgggccc

SEQ ID NO: 3870 - protein, 332 aa, Synechocystis sp
MTTQLDRVVLIGVAGDSGCGKSTFLRRLTDLFGEEFMTVICLDDYHSLDRQGRKAAGVTALDPRANNFDLMYEQIKTLKSGQSIMKPIYNHETGLLDPPEKVEPNKVVVIEGLHPLYDERVRELVDFGVYLDISEEVKINWKIQRDMAERGHTYEDILASINARKPDFTAYIEPQKQYADVVIQVLPTRLIEDKESKLLRVRLVQKEGVKFFEPAYLFDEGSTIDWRPCGRKLTCTYPGIKMYYGPDNFMGNEVSLLEVDGRFENLEEMVYVENHLSKTGTKYYGEMTELLLKHKDYPGTDNGTGLFQVLVGLKMRKVYEQLTAEAKVPASV

SEQ ID NO: 3871 - DNA, 834 bp, Mus musculus
  CDS (1)..(834)
atggcttcggcgggaggcggcggctcggagagcgccgcgcccgaggccgatcgtccccagccgcggccgttcctcatcggcgtgagcggcggcaccgctagtggcaagtcaacagtgtgtgagaagatcatggagctgctgggacagaacgaagtggaccgccggcagcgcaagttggtcatcctgagccaggactgcttctacaaggttctgacggccgagcagaaggccaaggctttgaagggacagtacaattttgaccacccagatgcttttgataatgatctgatgcacaagaccctgaaaaacattgttgaaggcaaaactgtcgaggtccctacctatgattttgtgacccactcaaggttaccagagaccactgtggtctacccagctgatgtggttctgttcgagggcatcttggtattctacacccaggagatccgggacatgttccacctgcgcctctttgtggacacagactctgatgttaggctgtctcgaagagttctccgggatgtgcaacgaggaagggacctggagcagatcctgactcagtacaccgcctttgtgaaaccagcctttgaggagttctgcctgccgactaagaagtacgctgacgtgatcatccctcgaggagttgataatatggtggccatcaacctgatcgtgcaacacatccaggacatcctcaacggggacctgtgcaagcggcaccgaggcgggcccaacgggcgcaaccacaagaggaccttccccgagccaggagatcaccctggggtgttggccactggcaagcgctcacacctggagtctagcagcagaccccattga

SEQ ID NO: 3872 - protein, 277 aa, Mus musculus
MASAGGGGSESAAPEADRPQPRPFLIGVSGGTASGKSTVCEKIMELLGQNEVDRRQRKLVILSQDCFYKVLTAEQKAKALKGQYNFDHPDAFDNDLMHKTLKNIVEGKTVEVPTYDFVTHSRLPETTVVYPADVVLFEGILVFYTQEIRDMFHLRLFVDTDSDVRLSRRVLRDVQRGRDLEQILTQYTAFVKPAFEEFCLPTKKYADVIIPRGVDNMVAINLIVQHIQDILNGDLCKRHRGGPNGRNHKRTFPEPGDHPGVLATGKRSHLESSSRPH

SEQ ID NO: 3873 - DNA, 1200 bp, Homo sapiens
  CDS (180)..(965)
ctccttcgggaaacccagccccgtcaccgggctccgagcggctcgcaggcgagcgacagcggcctcagccccggcagcgcccagcggcggctgcggaaagcggagggagtccgacgcgggcgcgggcggggagcgtgcgtccgttcgcacaggcagcgggaggaggggcggcgcgaaccatggccggggacagcgagcagaccctgcagaaccaccagcagcccaacggcggcgagcccttccttataggcgtcagcgggggaacagctagcggcaagtcttccgtgtgtgctaagatcgtgcagctcctggggcagaatgaggtggactatcgccagaagcaggtggtcatcctgagccaggatagcttctaccgtgtccttacctcggagcagaaggccaaagccctgaagggccagttcaactttgaccacccggatgcctttgacaatgaactcattctcaaaacactcaaagaaatcactgaagggaaaacagtccagatccccgtgtatgactttgtctcccattcccggaaggaggagacagttactgtctatcccgcagacgtggtgctctttgaagggatcctggccttctactcccaggaggtacgagacctgttccagatgaagctttttgtggatacagatgcggacacccggctctcacgcagagtattaagggacatcagcgagagaggcagggatcttgagcagattttatctcagtacattacgttcgtcaagcctgcctttgaggaattctgcttgccaacaaagaagtatgctgatgtgatcatccctagaggtgcagataatctggtggccatcaacctcatcgtgcagcacatccaggacatcctgaatggagggccctccaaacggcagaccaatggctgtctcaacggctacaccccttcacgcaagaggcaggcatcggagtccagcagcaggccgcattgacccgtctccatcggaccccagcccctatctccaagagacagaggaggggtcaggaggcactgctcatctgtacatactgtttcctatgacattactgtatttaagaaaacaccatggagatgaaatgcctttgattttttttttctttttgtactttggaacgacaaaatgaaacagaacttgaccctgagcttaaataacaaaactgtgccaactaaaaaaaaaaaaaaaaaaa

SEQ ID NO: 3874 - protein, 261 aa, Homo sapiens
MAGDSEQTLQNHQQPNGGEPFLIGVSGGTASGKSSVCAKIVQLLGQNEVDYRQKQVVILSQDSFYRVLTSEQKAKALKGQFNFDHPDAFDNELILKTLKEITEGKTVQIPVYDFVSHSRKEETVTVYPADVVLFEGILAFYSQEVRDLFQMKLFVDTDADTRLSRRVLRDISERGRDLEQILSQYITFVKPAFEEFCLPTKKYADVIIPRGADNLVAINLIVQHIQDILNGGPSKRQTNGCLNGYTPSRKRQASESSSRPH

SEQ ID NO: 3875 - DNA, 822 bp, Drosophila melanogaster
  CDS (40)..(822)
tgaagtagaagcatttgattttactagtgtaagagaaaaatgcaagatttgaggaacgccgacacgctgcgactgccaaatggcgacggagcagcagccaacgacgaggtcaagtcgccgtttctaatcggcgtcgccggcggaacggccagcggcaagtccaccgtgtgcaaaaagatcatggagcaacttgggcaggcggaaatggatcacacgcagcgccaggtggtgtccatcagtcaggacagcttctaccgcgaactgacgcccgccgagaaggccaaggcccagaagggcctcttcaacttcgatcatccggatgccttcaacgaggagctcatgtacagcacgcttcagaacatcttaaagggccacaaagtggagatacccagctatgactaccgcaccaactctctcgactttgaaaacgttctggttatctacccagccgacgtggtcttgttcgagggcatcttggtattttacttccccaagatacgagaactgttccacatgaagctgttcgtggacacagactccgataccaggttggccaggagagtgccacgtgatatcaatgagcgtggtcgggacttggatgcggtgctcacccagtatatgaccttcgtaaagccggctttcgaggagttctgctcgcccacgaaaaagtttgctgacgttattataccacgaggcgccgacaacacagttgccattgatcttattgtacaccatatcggggagattctcgccactaccaacagcgcacagcacagcaacacagtcagggtagcggcgtctagcatgaagcgagatcactaa

SEQ ID NO: 3876 - protein, 260 aa, Drosophila melanogaster
MQDLRNADTLRLPNGDGAAANDEVKSPFLIGVAGGTASGKSTVCKKIMEQLGQAEMDHTQRQVVSISQDSFYRELTPAEKAKAQKGLFNFDHPDAFNEELMYSTLQNILKGHKVEIPSYDYRTNSLDFENVLVIYPADVVLFEGILVFYFPKIRELFHMKLFVDTDSDTRLARRVPRDINERGRDLDAVLTQYMTFVKPAFEEFCSPTKKFADVIIPRGADNTVAIDLIVHHIGEILATTNSAQHSNTVRVAASSMKRDH

SEQ ID NO: 3877 - DNA, 1823 bp, Mus musculus
  CDS (6)..(1652)
acgccatggctgcgccgccggcctcaatgagcgccgccccttcgcccctgcagtctgctgtggccccagacgtgcctggccgccaggccgagcagaatgaaacggcgtgcgaggaccgcagcaatgcagggaccttggacagacttctcccaccagtgggtactgggcgctcaccccggaagcgcaccaccagccagtgcaagtcagaaccacccctgcttcgcacaagcaaacgtaccatctacacagctgggcggccaccatggtacaatgaacatggtacacagtccaaggaggcctttgctattggcttaggaggtggcagtgcatctgggaagaccactgtggccagaatgatcattgaggcactagatgtgccctgggtggtcctgttgtccatggactccttctataaggttctgacgcagcagcagcaggaacaggctgcctgtaacaatttcaactttgaccaccctgatgcctttgacttcgatctcatcatttccacccttaagaagctaaaacagggcaggagtgtccaagtgcccatctatgatttcactacccatagccggaaaaaggactggaaaaccctgtatggtgcgaatgtcatcatctttgagggtatcatggcctttgctgataagacactgctggagctcctggacatgaagatctttgtggacacggactctgatatccgactggttcggcgtctgcgcagggacatcagcgaacgaggccgggacattgagggtgtcattaagcagtacaacaagtttgtcaaacctgcatttgatcagtatatccagcctaccatgcggctggcagatattgtggtgcccagagggagcgggaacacagtagccattgacctgattgtgcagcatgttcacagccagctggaagagcgcgaactcagcgtcagggccgcgttggcctccgctcaccagtgccatcccctcccccagacactgagtgtcctcaagagtacaccgcaggtccgaggcatgcacaccatcatcagggacaaggagactagccgggatgaattcatcttctactccaaaagactgatgcggctgcttattgaacatgcactgtccttcctaccctttcaggactgcactgtacagactccacaggggcaggactacgtgggaaagtgctacgctggaaaacagatcaccggcgtgtcaattctgcgtgcaggagaaaccatggagcctgcactgcgtgccgtgtgcaaggatgtgcgcatcggcactatcctcatccagaccaaccagctcacaggggagcctgagctccattacctgaggcttcccaaggatatcagtgatgaccatgtgatcctgatggactgcacagtatccacaggtgctgcggccatgatggctgtacgtgtactcctggaccatgatgtgcctgaggacaagatctttttgctgtccctgctcatggcagagatgggtgtgcattctgtggcctacgctttcccacgcgtgagaatcatcaccacagctgtggacaagcgtgtcaatgaccttttccgtatcatcccaggcattgggaactttggtgatcgctactttgggacagatgcagtccctgatggcagtgatgatgatgaggcagccactgtgggttagtgcaatgaccgagctactcttatttctacccagccttctgtcttctggtctggaattgcagggacaacacattaacttattttgagtttaaaaatgttaccgaaataaaaataatcagtttacacattttataaaataaataaagctttatttagaaaaaaaaaaaaaaaa

SEQ ID NO: 3878 - protein, 548 aa, Mus musculus
MAAPPASMSAAPSPLQSAVAPDVPGRQAEQNETACEDRSNAGTLDRLLPPVGTGRSPRKRTTSQCKSEPPLLRTSKRTIYTAGRPPWYNEHGTQSKEAFAIGLGGGSASGKTTVARMIIEALDVPWVVLLSMDSFYKVLTQQQQEQAACNNFNFDHPDAFDFDLIISTLKKLKQGRSVQVPIYDFTTHSRKKDWKTLYGANVIIFEGIMAFADKTLLELLDMKIFVDTDSDIRLVRRLRRDISERGRDIEGVIKQYNKFVKPAFDQYIQPTMRLADIVVPRGSGNTVAIDLIVQHVHSQLEERELSVRAALASAHQCHPLPQTLSVLKSTPQVRGMHTIIRDKETSRDEFIFYSKRLMRLLIEHALSFLPFQDCTVQTPQGQDYVGKCYAGKQITGVSILRAGETMEPALRAVCKDVRIGTILIQTNQLTGEPELHYLRLPKDISDDHVILMDCTVSTGAAAMMAVRVLLDHDVPEDKIFLLSLLMAEMGVHSVAYAFPRVRIITTAVDKRVNDLFRIIPGIGNFGDRYFGTDAVPDGSDDDEAATVG

SEQ ID NO: 3879 - DNA, 627 bp, Clostridium perfringens
  CDS (1)..(627)
atgaagagaccaatttttataggaataacaggaggcactggctcaggtaaaagtacaatagctaaggagatatatagacaatttggtgaagattgtatagcaatgatagagcaagattcatattataaggatcaaagccatttatcaatggaggatagagttaaaactaactacgatcatccaaatgcttttgataacaatcttttagtttcacatttagaatcacttttaaatggacattctatacaaaaacctagttatgacttctctatacataatagaattgaagatacaactaaggttgagccaaaagaaattgttattgtagaaggaatattaatactagaagatccaagaataagagaacttctagatataaagatttacgttgatacagatgctgatgttagaatcataagaagaatggtcagagacataaatgaaagaggaagaactatggagtctgttataaatcagtacttaaatgtagtaaagcctatgcataatcaatttacagaacctacaaagaaatttgctgatataataataccagaaggtggacataataaagttgctatagatattattgttgcaaaaataaaagaggttttaggaaaatacgaataa

SEQ ID NO: 3880 - protein, 208 aa, Clostridium perfringens
MKRPIFIGITGGTGSGKSTIAKEIYRQFGEDCIAMIEQDSYYKDQSHLSMEDRVKTNYDHPNAFDNNLLVSHLESLLNGHSIQKPSYDFSIHNRIEDTTKVEPKEIVIVEGILILEDPRIRELLDIKIYVDTDADVRIIRRMVRDINERGRTMESVINQYLNVVKPMHNQFTEPTKKFADIIIPEGGHNKVAIDIIVAKIKEVLGKYE

SEQ ID NO: 3881 - DNA, 630 bp, Clostridium tetani
  CDS (1)..(630)
atgagtaaaagaccgatattaataggtataactggtggaacgggctcaggaaagagcactgtaagtaaagaaatttgtagaagatttgataaagagcttatagttatgatagagcaagattcctattacaaggaccaaagtcatttatccattgaagaaagagttaaaactaattatgatcaccctaatgcttttgatacagagcttttagtaaagcatttaaaagagctttcatattggagtaaagtggaaaaacctatatatgattttgaattacataatagaaaaaatgaaacagaaattgtagaacctactgaaattataatagtagaaggaatattagtattagaagaaaaagaaataagagatctattagatataaagatttatgtggatacagatgcagatgtaagaataataagaagacttgttagagatataaaggaaagaggaaggtctttagattccgtaataaatcaatatttaaatgttgtaagacctatgcatatgcaatttatagaaccaagtaaaagatatgcagatataataatccctgagggaggacataataaagtcgccatagatataatcgtaggaaatataaaacagatggttcaaaaatcagaataa

SEQ ID NO: 3882 - protein, 209 aa, Clostridium tetani
MSKRPILIGITGGTGSGKSTVSKEICRRFDKELIVMIEQDSYYKDQSHLSIEERVKTNYDHPNAFDTELLVKHLKELSYWSKVEKPIYDFELHNRKNETEIVEPTEIIIVEGILVLEEKEIRDLLDIKIYVDTDADVRIIRRLVRDIKERGRSLDSVINQYLNVVRPMHMQFIEPSKRYADIIIPEGGHNKVAIDIIVGNIKQMVQKSE

SEQ ID NO: 3883 - DNA, 678 bp, Halobacterium sp
  CDS (1)..(678)
atgaccatcccgtcgttcgcgatcggcatcgccggaggcacgggtgccggcaaaaccacggtcgcccgcgagatcaccgacaacgtgggcgagtcggcgacgctgattccgctggacaactactacgaggacctctcggaccgccccttcgaggagcgcgcgaacgccaactacgaccacccgtcggcgttcgagtgggagctgcttcgcacacacatcgacgccttgctgtccgggcagtcgatcgagatgccccagtacgacttcgagagacacgtccggaaggccgaccgggttgttgtcgaacccacggacgtgatcgtgctggaggggattctggcgctctccgacgagacggtcaacgacatgcttgatctccacatctacgtggaaacggacgccgacgttcgcatcctgcgccgcatcgagcgcgacgtcgtcgagcgcggccgcgaactggaaggcgtgatggaccagtatctctcgacggtgaagccgatgcacgagcagttcatcgaaccgacgaaacgacacgccgacatcatcatcccggagggcgcaaactcggtcgcggtgaacctgctcgaagagaaagtgcaggccgaaacctccgagatgacggcgtgggccgcccgcgacgacaccgccttcgaagacgccacctacaatccacagtag

SEQ ID NO: 3884 - protein, 225 aa, Halobacterium sp
MTIPSFAIGIAGGTGAGKTTVAREITDNVGESATLIPLDNYYEDLSDRPFEERANANYDHPSAFEWELLRTHIDALLSGQSIEMPQYDFERHVRKADRVVVEPTDVIVLEGILALSDETVNDMLDLHIYVETDADVRILRRIERDVVERGRELEGVMDQYLSTVKPMHEQFIEPTKRHADIIIPEGANSVAVNLLEEKVQAETSEMTAWAARDDTAFEDATYNPQ

SEQ ID NO: 3885 - DNA, 630 bp, Lactobacillus plantarum
  CDS (1)..(630)
atgactgaaaataaacatcgccgaccagtagtcatcggggtaactggtggttccggtagtggtaaaactacggtcagcaatgcaatttacaaccaattatctggtcaatcattgttgatcttacaacaggattcctattacaatgatcaaagtgaaatgacaatggctgagcgccatgccgttaattacgaccacccactggctttcgatacagatttgatgattaagcaaatcaagcagttgctggcctatcaaccaattgaaaagccggtctatgattacgagcagtatacgcgtagcgacaagaccattcatcaagaaccgcgtgatgtgatcattgtcgaaggggtattgatcctagatgatcagcgtttacgcgacctgatggatattaaggtgttcgtcgataccgacgatgatattcgaatcattcggcgcattcagcgtgatatcaaagagcggggccggacactagactctgtgattggtcaatatttggcgacggtcaaaccaatgtatcatcagtttgtggaaccaacgaaacgttatgccgatctaattgtgccagaaggtggcgaaaatgaagttgccattgatttattgacaactaaagttcgttcaattttataa

SEQ ID NO: 3886 - protein, 209 aa, Lactobacillus plantarum
MTENKHRRPVVIGVTGGSGSGKTTVSNAIYNQLSGQSLLILQQDSYYNDQSEMTMAERHAVNYDHPLAFDTDLMIKQIKQLLAYQPIEKPVYDYEQYTRSDKTIHQEPRDVIIVEGVLILDDQRLRDLMDIKVFVDTDDDIRIIRRIQRDIKERGRTLDSVIGQYLATVKPMYHQFVEPTKRYADLIVPEGGENEVAIDLLTTKVRSIL

SEQ ID NO: 3887 - DNA, 633 bp, Oceanobacillus iheyensis
  CDS (1)..(633)
atgacaaagcaaaaaccagttgtaattggagtagcaggaggaagtggatcaggaaaaacatctgtgactcgctccatttgtcaacgatttacagaaacatcgattttggtaatcgagcaggattattattataaagatcaaagtcacttaccattcgaggaaagattaaataccaattatgatcatccattggcgtttgataatgatttattaatagaacatttacagcaattaatgcataatgaaccaattgaaaaacctgtatatgattataaaattcatactcggtcaaaagacgttattcatgtagaaccaaaagaagttattattgtagaaggtatattaatacttgaagatccacgcttagttgatttaatggatattaaggtttatgttgatacggatgcagatttacgaataattcgccgcttaatgcgagatatcaaagagcgcggtaggacgttagattctgtaatcgatcaatatatccagaatgttcgcccatcacacctgcaatttattgaaccaacaaagcgttatgccgatataatcatacctgaaggtggacaaaatcatgtcgcaattgatatcatggcttctaaaatagaaaaaatattatctagagggttataa

SEQ ID NO: 3888 - protein, 210 aa, Oceanobacillus iheyensis
MTKQKPVVIGVAGGSGSGKTSVTRSICQRFTETSILVIEQDYYYKDQSHLPFEERLNTNYDHPLAFDNDLLIEHLQQLMHNEPIEKPVYDYKIHTRSKDVIHVEPKEVIIVEGILILEDPRLVDLMDIKVYVDTDADLRIIRRLMRDIKERGRTLDSVIDQYIQNVRPSHLQFIEPTKRYADIIIPEGGQNHVAIDIMASKIEKILSRGL

SEQ ID NO: 3889 - DNA, 651 bp, Pasteurella multocida
  CDS (1)..(651)
atgtcaaactcatcaacaccatcttgtattattattgccatcgctggggcttcagcatcaggaaaaagcttaattgcctcaactgttcatcgagagttgtgtgatgagctaggttgcgaagaaattggcattatttccgaagactcttattataaagatcaaagtcatttggatatggaagatcgaattaaaaccaactatgatcatcctaattctatggatagacaccttttaattgaacacctcaaagcactcaaatctggtcaaccggttgatattcccgtctatagctacgttgagcatactcgaaccaatcaagtccaacactttgaacctaaaaaagtgatcattctggaagggattttattgcttactgatgaaaaattgcgtgatgaagtcagtgtctctgtttttgtcgatacaccactggatatttgttttattcgtcgcttacaacgtgacatgaaagaacgtggtcgaagtttagaatcggtagtggagcagtatcgtaaaacagtgcgtcccatgtttttacagtttattgagccctctaaacaatatgctgatatcgtgatcccgcgaggtggtaaaaatcgaattgccattaatatgttaaaagcacagattagacaacttttgggaaaacgttaa

SEQ ID NO: 3890 - protein, 216 aa, Pasteurella multocida
MSNSSTPSCIIIAIAGASASGKSLIASTVHRELCDELGCEEIGIISEDSYYKDQSHLDMEDRIKTNYDHPNSMDRHLLIEHLKALKSGQPVDIPVYSYVEHTRTNQVQHFEPKKVIILEGILLLTDEKLRDEVSVSVFVDTPLDICFIRRLQRDMKERGRSLESVVEQYRKTVRPMFLQFIEPSKQYADIVIPRGGKNRIAINMLKAQIRQLLGKR

SEQ ID NO: 3891 - DNA, 639 bp, Shewanella oneidensis
  CDS (1)..(639)
atgaattctcagcagtgtgtcattatagcaattgctggcgcgtcagcatctggcaagagtttaattgccaagacgatttttgacgaacttcgccgcgatttaggcacagatcagattggggtaattaacgaagacgcgtactatcgcgatcagagtcatttatccatggatgagcgggtgttaacaaactacgaccatcccaaagcgttagaccatcaactgttatgcacgcacttgcagttacttaagtctggcgaagctgttgatattccttgctatagctataccgaacatacgcgtatggccgaaaccgttaaaatgacaccgaaaaaagtgatcattttagagggcattctgctgttaactgatcctaaattgcgtgaattgatggatgccagcgtgtttatggatacgccgctggacatttgtttcctgcgccgtttaacccgcgatgtggctgaacgtggccgtacgatggaatcggtgatttcacagtacaagaaaaccgtccgtcctatgttcctgcaatttattgaaccttcaaaacaatacgctgatattatcgtgccccgcggtggcaaaaaccgtatcgcgaccgatattttgaagactcgaatccaacatctactggcaaaataa

SEQ ID NO: 3892 - protein, 212 aa, Shewanella oneidensis
MNSQQCVIIAIAGASASGKSLIAKTIFDELRRDLGTDQIGVINEDAYYRDQSHLSMDERVLTNYDHPKALDHQLLCTHLQLLKSGEAVDIPCYSYTEHTRMAETVKMTPKKVIILEGILLLTDPKLRELMDASVFMDTPLDICFLRRLTRDVAERGRTMESVISQYKKTVRPMFLQFIEPSKQYADIIVPRGGKNRIATDILKTRIQHLLAK

SEQ ID NO: 3893 - DNA, 624 bp, Staphylococcus epidermidis
  CDS (1)..(624)
atgaatcagacaacgattattggcattgcagggggttcaggctctgggaaaaccacagttactaatgcaatcatgaagaatttagaaggtcatagtgtcgcactcttagcacaagattattactataaagatcaatcacatttaacttttgaagaacggcttgaaacaaattatgaccacccatttgcatttgataatgatttacttattcataatttaaaagatttaagaaatggaaaaccagtagaggtacctacgtacgattattctcaacatacacgtagtaaagaaacaattgcatttgatccaaaagatgttattatcgtagaaggtatctttgctttagaaaacaacacattacgagacatgatggatgtgaaaatttatgtcgatactgatgctgatttacgaattttacgtaggcttacaagagatactaaagagcgtggtcgtacaatggaatcagtaattaatcaatatcttaatgtagtaagacctatgcatgagcaatttattgaacctacaaaaaagcatgctgacatcataattcctgaaggaggcagcaataaagttgccatagatattatgactactaaaatccagtcactcgtaagcaaaaaatag

SEQ ID NO: 3894 - protein, 207 aa, Staphylococcus epidermidis
MNQTTIIGIAGGSGSGKTTVTNAIMKNLEGHSVALLAQDYYYKDQSHLTFEERLETNYDHPFAFDNDLLIHNLKDLRNGKPVEVPTYDYSQHTRSKETIAFDPKDVIIVEGIFALENNTLRDMMDVKIYVDTDADLRILRRLTRDTKERGRTMESVINQYLNVVRPMHEQFIEPTKKHADIIIPEGGSNKVAIDIMTTKIQSLVSKK

SEQ ID NO: 3895 - DNA, 627 bp, Streptococcus pyogenes
  CDS (1)..(627)
atgcttaaaaaaccgattattattggtgtaactggtggttcaggtggcggtaaaacaagtgtgtcacgcgctattttggacagttttccaaatgctcgtattgcaatgattcaacacgattcttactataaagatcagtctcacatgagttttgaagaaagggtcaagaccaattatgaccatcctctagcttttgatacagattttatgattcagcaactaaaagaattattagctggtagacctgtagatattcctatctatgattacaaaaagcatacccgcagtaatacgacctttcgtcaggatcctcaggatgttattattgttgaaggtattcttgtcctagaagatgagcgtttgcgagatttgatggatatcaagctctttgtagacacagatgacgatattcgtattattcgtcgtattaagcgtgacatgatggaacgtggcagaagcttagaaagtattattgatcagtacacaagcgtggtaaagcctatgtatcatcagtttattgagccaagtaaacgctatgctgatattgttattccagagggagttagtaatgtcgttgctattgatgttattaatagtaaaattgcgagtattcttggagaagtatag

SEQ ID NO: 3896 - protein, 208 aa, Streptococcus pyogenes
MLKKPIIIGVTGGSGGGKTSVSRAILDSFPNARIAMIQHDSYYKDQSHMSFEERVKTNYDHPLAFDTDFMIQQLKELLAGRPVDIPIYDYKKHTRSNTTFRQDPQDVIIVEGILVLEDERLRDLMDIKLFVDTDDDIRIIRRIKRDMMERGRSLESIIDQYTSVVKPMYHQFIEPSKRYADIVIPEGVSNVVAIDVINSKIASILGEV

SEQ ID NO: 3897 - DNA, 642 bp, Vibrio cholerae
  CDS (1)..(642)
atgtctgagaataatcaatgtgtcatcgtcggtattgctggcgcttctgcttctggtaagagtctcattgcgagcacgatttataatgagctacgcgccaaagtgggtgaccatcaaatcggtgtgattacggaagattgctactacaaagatcagagccatctgagcatggaagaacgtgttaaaaccaactacgaccacccaagtgcgctagaccacgatctcctttgccaacatttgcaaatgctggcgcgtggcgaagcggttgaagtgccagaatacagctacactgagcacacgcgtaccgagcaaaccaccaccatgacgccgaagaaagtgatcattctggaaggcatcctgcttctgactgacccacgtctacgtgatttgatgcacgcgaccgtatttatggatacgccgctggatatctgcttgctgcgccgtgtgaagcgtgatgttcaagagcgtggtcgcaccatggaatctgtactgaagcagtaccaagagacggtgcgccctatgtttatgcaatttattgagccgtctaaacagtacgcagacatcattgtgccgcgtggtggtaaaaaccgtatcgcgattgatgttctcaaagcgcatatcgcaaaattgctcaaatcgtaa

SEQ ID NO: 3898 - protein, 213 aa, Vibrio cholerae
MSENNQCVIVGIAGASASGKSLIASTIYNELRAKVGDHQIGVITEDCYYKDQSHLSMEERVKTNYDHPSALDHDLLCQHLQMLARGEAVEVPEYSYTEHTRTEQTTTMTPKKVIILEGILLLTDPRLRDLMHATVFMDTPLDICLLRRVKRDVQERGRTMESVLKQYQETVRPMFMQFIEPSKQYADIIVPRGGKNRIAIDVLKAHIAKLLKS

SEQ ID NO: 3899 - DNA, 642 bp, Vibrio parahaemolyticus
  CDS (1)..(642)
atgtctgataataatcaatgcgtcatcgtaggtattgctggcgcttctgcttctggaaaaagtctgatcgcgagcacaatttacaatgagcttcgcgcgaaagtaggcgatcatcaaatcggtgtcatcacggaagattgctactacaacgaccaaagccacctaagcatggaagagcgagtaaagacgaactacgatcacccgagtgcgttggaccacgacctattgtgcgagcacctagagaagcttgtacgtggtgaggccgtggaagtgcctgagtacagctacacagagcacacaagaacaagtaacaccaccacaatgacccctaaaaaggtaatcattttagaaggtatccttcttcttactgaccctcgtcttcgtgacctgatgcacgcgactgtatttatggatacgcctctggatatctgcctacttcgccgtgttaagcgtgacgttgaagagcgtggccgtacaatggaatccgttcttaagcaatatcagcaaactgttcgtccgatgttcatgcagtttatcgaaccttctaagcaatatgcggacatcatcgtacctcgtggcggtaagaaccgtatcgcgatcgatgtactaaaagctcacattgcaaaacttttgaaagcttaa

SEQ ID NO: 3900 - protein, 213 aa, Vibrio parahaemolyticus
MSDNNQCVIVGIAGASASGKSLIASTIYNELRAKVGDHQIGVITEDCYYNDQSHLSMEERVKTNYDHPSALDHDLLCEHLEKLVRGEAVEVPEYSYTEHTRTSNTTTMTPKKVIILEGILLLTDPRLRDLMHATVFMDTPLDICLLRRVKRDVEERGRTMESVLKQYQQTVRPMFMQFIEPSKQYADIIVPRGGKNRIAIDVLKAHIAKLLKA

SEQ ID NO: 3901 - DNA, 816 bp, Xenopus laevis
  CDS (1)..(816)
atggcttccgcggggagcctggatgtaccagagcggggacaccagcggcctttccttatcggagtgagcggcggcactgccagcggcaagtctacagtatgtgagaagatcatggagctgctggggcagaatgaggtggatcaccggcagaggaaagtggtcatcctgagccaggaccggttttacaaggtgctcacccccgagcagaaaaccagagctctgaaaggccagtataacttcgaccaccctgatgcctttgataatgagctgatgcacaggactctgacccagatcttggaggggcagatagtggatgtgcctatgtacgacttcatcactcattcaaggcttccggagaccacaactgtgtatcctgcagacgtgttgctgtttgaggggatcctggcattttataaccaggagataagagacatgttccagctgaagctcttcgtggatacggactccgatgtcaggctctcccggcgagttctgcgtgacatgaagcgcggccgagacctggaacagatcctcactcaatacaccacctttgtgaaacctgcatttgaggagttctccctgccgaccaagaaatacgctgacgtcattattccgcggggggtggataatatggtggcaattaacctgatcgtgcagcacatccaggacatcctgaacggcgacatctgcaagtggcagcgaggggtactgaatggccgcagtcagaagaggacgttcccagggcaaggagaatctggagggctcatcctaccagggaaacgtacccaccttgagtccagcagtcggccccactga

SEQ ID NO: 3902 - protein, 271 aa, Xenopus laevis
MASAGSLDVPERGHQRPFLIGVSGGTASGKSTVCEKIMELLGQNEVDHRQRKVVILSQDRFYKVLTPEQKTRALKGQYNFDHPDAFDNELMHRTLTQILEGQIVDVPMYDFITHSRLPETTTVYPADVLLFEGILAFYNQEIRDMFQLKLFVDTDSDVRLSRRVLRDMKRGRDLEQILTQYTTFVKPAFEEFSLPTKKYADVIIPRGVDNMVAINLIVQHIQDILNGDICKWQRGVLNGRSQKRTFPGQGESGGLILPGKRTHLESSSRPH

SEQ ID NO: 3903 - DNA, 21 bp, Artificial sequence
  Primer sequence
atggcgcttcgtcgccccctt

SEQ ID NO: 3904 - DNA, 27 bp, Artificial sequence
  Primer sequence
ttattcaaagaactgacttattttcgc

SEQ ID NO: 3905 - DNA, 1299 bp, Escherichia coli K12
  CDS (1)..(1299)
atgtccaaaatcgtaaaaatcatcggtcgtgaaatcatcgactcccgtggtaacccgactgttgaagccgaagtacatctggagggtggtttcgtcggtatggcagctgctccgtcaggtgcttctactggttcccgtgaagctctggaactgcgcgatggcgacaaatcccgtttcctgggtaaaggcgtaaccaaagctgttgctgcggtaaacggcccgatcgctcaggcgctgattggcaaagatgctaaagatcaggctggcattgacaagatcatgatcgacctggacggcaccgaaaacaaatccaaattcggcgcgaacgcaatcctggctgtatctctggctaacgccaaagctgctgcagctgctaaaggtatgccgctgtacgagcacatcgctgaactgaacggtactccgggcaaatactctatgccggttccgatgatgaacatcatcaacggtggtgagcacgctgacaacaacgttgatatccaggaattcatgattcagccggttggcgcgaaaactgtgaaagaagccatccgcatgggttctgaagttttccatcacctggcaaaagttctgaaagcgaaaggcatgaacactgctgttggtgacgaaggtggctatgcgccgaacctgggttccaacgctgaagctctggctgttatcgctgaagctgttaaagctgctggttatgaactgggcaaagacatcactttggcgatggactgcgcagcttctgaattctacaaagatggtaaatacgttctggctggcgaaggcaacaaagcgttcacctctgaagaattcactcacttcctggaagaactgaccaaacagtacccgatcgtttctatcgaagacggtctggacgaatctgactgggacggtttcgcataccagaccaaagttctgggcgacaaaatccagctggttggtgacgacctgttcgtaaccaacaccaagatcctgaaagaaggtatcgaaaaaggtatcgctaactccatcctgatcaaattcaaccagatcggttctctgaccgaaactctggctgcaatcaagatggcgaaagatgctggctacactgcagttatctctcaccgttctggcgaaactgaagacgctaccatcgctgacctggctgttggtactgctgcaggccagatcaaaactggttctatgagccgttctgaccgtgttgctaaatacaaccagctgattcgtatcgaagaagctctgggcgaaaaagcaccgtacaacggtcgtaaagagatcaaaggccaggcataa

SEQ ID NO: 3906 - protein, 432 aa, Escherichia coli K12
MSKIVKIIGREIIDSRGNPTVEAEVHLEGGFVGMAAAPSGASTGSREALELRDGDKSRFLGKGVTKAVAAVNGPIAQALIGKDAKDQAGIDKIMIDLDGTENKSKFGANAILAVSLANAKAAAAAKGMPLYEHIAELNGTPGKYSMPVPMMNIINGGEHADNNVDIQEFMIQPVGAKTVKEAIRMGSEVFHHLAKVLKAKGMNTAVGDEGGYAPNLGSNAEALAVIAEAVKAAGYELGKDITLAMDCAASEFYKDGKYVLAGEGNKAFTSEEFTHFLEELTKQYPIVSIEDGLDESDWDGFAYQTKVLGDKIQLVGDDLFVTNTKILKEGIEKGIANSILIKFNQIGSLTETLAAIKMAKDAGYTAVISHRSGETEDATIADLAVGTAAGQIKTGSMSRSDRVAKYNQLIRIEEALGEKAPYNGRKEIKGQA

SEQ ID NO: 3907 - DNA, 1458 bp, Oryza sativa
  CDS (1)..(1458)
atgtcggtgcaggagtacctggagaagcacctgctgtcgcgcaagatcgaggaggccgtgaacgcggcggtccgcgccaaggcccccgacccggtgctcttcatctccaaccacatgcgccgggcggcgccggccgtgatcacgagcgtgcgggcgcgccagatcctcgacggccgcggggagcccgccgtggaggtcagcctccacaccaacaaggccgtgcaccgcgcctccgcggccgccgcggacgcccccgagggcgccgccgccgacgccgtcagggacgccgagaagcggaagctgctcgccagggcggtcgccgatgcggtgcgggtgatcaacgacaaggtgtcggaggcgcttgtgggaatggatccgcagcagcagtcgcagatcgaccaggccatcatggacttggacaaggcgcatcacaaggctgagattggagtgaattctatgttggctgtatcaattgcagcttgtaaagcaggtgctgctgaaaaagaggttccattgtacaagcatatagcagaacttgttgggaaaagcgctacgacacttcccatccctgcaattacagtcattaatggaggaacacatgctggaaacagtctccctattcaagaaattatgatccttcctgttggtgccaaaaactttgaagaagcaatgcagatgggttctgagacatatcatcatctgaaggatatcatcttggagaaatatggttcaaacagctgcaacataggtgatgatggtggatttgctccaaatatttccaggcaatggaattatgccattcagtattgctggtcagccgtcaacctaatggcttatattaaccgtacaactttgaaccatagaagcagagaacttgaacagcaattagaatgtgttgtatgctatggaaataagtatgacatggagttcaagtttgcagagaaatcagggcagggcttcaaaactgcagatgatttgattgagatttatagccagctttgttcagagtacccacttgtctcaatcgaacagccctttgataaagatgactgggagcattcgaagaagtttaccaccctagagctgtgccaggttgtaggtgatgacttattgatgtcagatcccgaacgcattaagcgggcagtaaatgagtatacctgcaatgctcttgttctcaaggctaatcaagtaggcactgtcacggaagccatagaggttgtgagacaggcaaaggatgctcattggggcgtaatggtgtcacataggtccggggacactgatgattctttcattgctgacttggctgttggtgctgctgctggacagatcaaagcgggtgctccttgccgtggagaatgtctcagtaaatacaatcagctgcttagaatagaggaagaacttggaagtgacggtgtttatgcaggggaaaattggagaaccaccgcaagcacaagctga

SEQ ID NO: 3908 - protein, 485 aa, Oryza sativa
MSVQEYLEKHLLSRKIEEAVNAAVRAKAPDPVLFISNHMRRAAPAVITSVRARQILDGRGEPAVEVSLHTNKAVHRASAAAADAPEGAAADAVRDAEKRKLLARAVADAVRVINDKVSEALVGMDPQQQSQIDQAIMDLDKAHHKAEIGVNSMLAVSIAACKAGAAEKEVPLYKHIAELVGKSATTLPIPAITVINGGTHAGNSLPIQEIMILPVGAKNFEEAMQMGSETYHHLKDIILEKYGSNSCNIGDDGGFAPNISRQWNYAIQYCWSAVNLMAYINRTTLNHRSRELEQQLECVVCYGNKYDMEFKFAEKSGQGFKTADDLIEIYSQLCSEYPLVSIEQPFDKDDWEHSKKFTTLELCQVVGDDLLMSDPERIKRAVNEYTCNALVLKANQVGTVTEAIEVVRQAKDAHWGVMVSHRSGDTDDSFIADLAVGAAAGQIKAGAPCRGECLSKYNQLLRIEEELGSDGVYAGENWRTTASTS

SEQ ID NO: 3909 - DNA, 1287 bp, Oryza sativa
  CDS (1)..(1287)
atggcggcgacgatcgtgtccgtcaaggcgcgccagatcttcgacagcaggggcaaccccaccgtcgaggtcgatgtgtgctgctcagatggaacctttgcaagggctgcagttcccagtggtgcatcaactggtgtctatgaagctctcgaattgagggacggtggatctgattacttgggaaagggtgtttccaaggctgtcgacaatgtgaactcggttattgccccagctctgattggcaaggaccctacgtcacaggctgagcttgataacttcatggttcagcagcttgatggaaccaaaaatgagtgggggtggtgcaagcagaagcttggtgctaatgcaatcctggctgtgtcactggccatttgcaaagctggagctatcatcaagaagattcctctgtaccagcacattgccaaccttgctggaaacaagcaactggttttgcccgtacctgcattcaacgtcattaacggtggatcacatgctggaaacaagcttgccatgcaggcagagttcatgatccttcctactggggccgcttcattcaaggaggccatgaagatgggtgttgaagtgtaccacaacctgaagtctgttatcaagaagaagtatggtcaggatgccaccaatgttggtgatgaaggtggttttgctcctaacattcaggaaaacaaggagggtcttgagctcttgaagactgcaattgaaaaggctggatacactggcaaggttgtcattggaatggatgttgctgcttcggaattctacaatgacaaggacaaaacctatgaccttaacttcaaggaggagaacaatgatggttcacaaaagatatctggtgatagcctgaagaatgtatacaagtcatttgtcagtgaataccccattgtctcgattgaggatccgtttgaccaggatgactgggaacactatgctaagatgaccgctgaaattggagagcaagtgcagattgtcggtgatgacctccttgtcaccaacccaacaagggtggcaaaggcaatccaggagaagtcatgcaatgctcttctgctgaaggttaaccaaattggatctgtcactgagagtattgaggccgtgaagatgtcaaagcgtgctggctggggtgtgatgaccagccacaggagtggtgagactgaggataccttcattgctgatttggctgttggtttggccacgcttcttaggattgaggaggagcttggtgcggctgctgtctacgctggtgccaagttccgcgcacccgtggagccctactaa

SEQ ID NO: 3910 - protein, 428 aa, Oryza sativa
MAATIVSVKARQIFDSRGNPTVEVDVCCSDGTFARAAVPSGASTGVYEALELRDGGSDYLGKGVSKAVDNVNSVIAPALIGKDPTSQAELDNFMVQQLDGTKNEWGWCKQKLGANAILAVSLAICKAGAIIKKIPLYQHIANLAGNKQLVLPVPAFNVINGGSHAGNKLAMQAEFMILPTGAASFKEAMKMGVEVYHNLKSVIKKKYGQDATNVGDEGGFAPNIQENKEGLELLKTAIEKAGYTGKVVIGMDVAASEFYNDKDKTYDLNFKEENNDGSQKISGDSLKNVYKSFVSEYPIVSIEDPFDQDDWEHYAKMTAEIGEQVQIVGDDLLVTNPTRVAKAIQEKSCNALLLKVNQIGSVTESIEAVKMSKRAGWGVMTSHRSGETEDTFIADLAVGLATLLRIEEELGAAAVYAGAKFRAPVEPY

SEQ ID NO: 3911 - DNA, 1725 bp, Rattus norvegicus (Norway rat)
  CDS (111)..(1415)
agtgctgctccggtaccgagtcgcgctcacgtttgtccttaagactcccttcggtgtctccaggaccctctttccttcctccgcagcgatcctactgccagaacttcaccatgtccattctcaagatccatgccagagagatctttgactcccgcgggaatcccaccgttgaggtggatctctacaccgcaaaaggtctcttccgtgctgcggtgcccagcggtgcgtccactggcatctacgaggccctagaactccgagacaatgataagacccgcttcatggggaagggtgtctcaaaggctgttgagcacatcaataaaactattgcacctgctctggttagcaagaaactgaatgttgtggagcaggagaagattgaccagctgatgatcgagatggacggcacagagaataaatctaagtttggtgcaaatgccatcctgggagtgtccctggctgtctgcaaggctggtgccgtggggaagggggtgcccctttaccgtcacattgccgacttggccggcaaccctgaagtcactctgccggtcccagctttcaatgtgatcaacggcggttctcatgctggcaacaagttggccatgcaagagttcatgatcctgcctgtgggggcatcctctttccgggaagccatgcgcattggagcagaggtttaccacaacctgaagaacgtcatcaaagagaagtacgggaaagacgccaccaatgtgggtgatgagggtggattcgcacctaacatcctggagaacaaagaagcactggagctgctcaagtctgccattgcaaaggccggctacactgaccaggttgtcatcggcatggatgtggctgcctccgagttctacagggctggcaagtatgacctggacttcaagtctccagatgatgccagccggtacatcacacccgaccagctggccgacctgtacaagtccttcatcaaggactacccagtggtgtccattgaagatccctttgaccaggacgactgggatgcttggcagaagttcacagctactgcaggcatccaggtggtgggggatgacctcacagtgaccaaccctaagcggatcgccaaggctgcaggcgaaaagtcctgcaactgcctcctgctcaaagtgaaccagattggctctgtgaccgagtctctgcaggcgtgtaagctggcccagtccaatggctggggtgtcatggtgtcccatcgatctgaggagactgaggacactttcattgccgacctggtggtggggctctgcactgggcagatcaagactggtgccccctgccgatctgagcgcctggccaagtacaatcagatccttagaatcgaggaggaactgggcagcaaagccaagtttgccggcaggtccttcaggaaccccctggccaagtaaggcatggaccggagatccctggagctaccagatcctctgtctccgtcatccaggcggctcaaggctggcccagtgcttgcccctcccatgtcactgcttccttagatgtccaccccgaccacctggagccctgctggagcccccagctttgtaatcatgtgatcagtctgaatcattgtttctgtcacctgactttccagctagtgtctggagccctctgaactccagcgtaatctctagagtgcccacaccatcaagactccccccagtggtttacttgcaaaaataaaagctgcagaagctcaaaaaa

SEQ ID NO: 3912 - protein, 434 aa, Rattus norvegicus (Norway rat)
MSILKIHAREIFDSRGNPTVEVDLYTAKGLFRAAVPSGASTGIYEALELRDNDKTRFMGKGVSKAVEHINKTIAPALVSKKLNVVEQEKIDQLMIEMDGTENKSKFGANAILGVSLAVCKAGAVGKGVPLYRHIADLAGNPEVTLPVPAFNVINGGSHAGNKLAMQEFMILPVGASSFREAMRIGAEVYHNLKNVIKEKYGKDATNVGDEGGFAPNILENKEALELLKSAIAKAGYTDQVVIGMDVAASEFYRAGKYDLDFKSPDDASRYITPDQLADLYKSFIKDYPVVSIEDPFDQDDWDAWQKFTATAGIQVVGDDLTVTNPKRIAKAAGEKSCNCLLLKVNQIGSVTESLQACKLAQSNGWGVMVSHRSEETEDTFIADLVVGLCTGQIKTGAPCRSERLAKYNQILRIEEELGSKAKFAGRSFRNPLAK

SEQ ID NO: 3913 - DNA, 1636 bp, Rattus norvegicus (Norway rat)
  CDS (60)..(1364)
ggggaccaccgccaccgccaccggctgagtctgcagtcctcgaggagatcccagccatcatgtctatacagaagatctgggcccgagagatcttggactcccgtgggaatcccaccgtggaggtggatctccatactgccaaaggtcttttccgggctgcagtccccagtggggcctccactggcatctatgaggccctggagctaagggatggggacaaacagcgttacttaggcaaaggtgtcctgaaggctgtggaccacatcaacagcaccatcgcaccggccctcatcagctcaggcctctctgtggtggagcaggagaagctggacaacctgatgctggagttggatgggactgagaacaaatccaagtttggggccaatgccatcctgggtgtgtccctggccgtgtgcaaggctggggcagccgagaaggacttgcccctctatcgccacattgctcaactggctgggaactccgacctcatcctgcccgtgccggcctttaatgtgatcaacggtggctctcatgctgggaacaagttggccatgcaggagttcatgatcctcccagtgggtgctgagagctttcgggatgccatgcgacttggggccgaggtgtaccacacactcaagggggtcatcaaggacaagtacggcaaggatgccactaatgtgggggatgaaggcggctttgcccccaatatcctggagaacagcgaagctttggagctggtgaaggaagccattgacaaggctggctacacggaaaagatggtgattggtatggatgtggctgcctctgagttttaccgcgatggcaaatacgacttggatttcaagtctcctgctgacccttcccgatgcatcactggggaccagcttggggcactctaccaggactttgtccggaactatcctgtggtctccattgaagacccattcgaccaggatgactgggcagcttggtccaagttcacagccaatgtcggcatccagatagtgggtgatgacctgacggtgaccaaccccaagcgcatcgagcgggcagtggaggagaaggcctgcaactgtttgctgctcaaggtcaaccagatcggctcagtcacagaagccatccaagcgtgcaagctggcccaggagaacggctggggggttatggtgagtcatcgctctggagaaaccgaggacacgttcattgcagacctcgtagtgggactgtgtacaggtcagatcaagactggtgccccatgcagatctgaacgtctggcgaagtacaaccagctcatgaggattgaagaggagctgggggaggaggctcgcttcgcgggacacaacttccggaatcccagtgtgctgtgaccccctgcttgcctgaacaccggaacatcatctcattctcctggagcctctttcttgctgtcccgacctgccatagttaccttgataccttgagccccaagtcacccagaacacctcgactcacctgctctggctgttcttggcttccacaaccccttgctgtctctactcttcctcctctctgggccccatttttggggggattccagtctgcccactttcccttctattctctctaatcgaaaaaaaaaaaaaaaaaaaaaaaaaaaaaa

SEQ ID NO: 3914 - protein, 434 aa, Rattus norvegicus (Norway rat)
MSIQKIWAREILDSRGNPTVEVDLHTAKGLFRAAVPSGASTGIYEALELRDGDKQRYLGKGVLKAVDHINSTIAPALISSGLSVVEQEKLDNLMLELDGTENKSKFGANAILGVSLAVCKAGAAEKDLPLYRHIAQLAGNSDLILPVPAFNVINGGSHAGNKLAMQEFMILPVGAESFRDAMRLGAEVYHTLKGVIKDKYGKDATNVGDEGGFAPNILENSEALELVKEAIDKAGYTEKMVIGMDVAASEFYRDGKYDLDFKSPADPSRCITGDQLGALYQDFVRNYPVVSIEDPFDQDDWAAWSKFTANVGIQIVGDDLTVTNPKRIERAVEEKACNCLLLKVNQIGSVTEAIQACKLAQENGWGVMVSHRSGETEDTFIADLVVGLCTGQIKTGAPCRSERLAKYNQLMRIEEELGEEARFAGHNFRNPSVL

SEQ ID NO: 3915 - DNA, 1898 bp, Homo sapiens (man)
  CDS (166)..(1470)
ctgggttcaagcagttctcctgcctcagcctcccaagtggctgggcatggtggcggacgccggacgcgtgggcggagatctcgccggctttacgttcacctcggtgtctgcagcaccctccgcttcctctcctaggcgacgagacccagtggctagaagttcaccatgtctattctcaagatccatgccagggagatctttgactctcgcgggaatcccactgttgaggttgatctcttcacctcaaaaggtctcttcagagctgctgtgcccagtggtgcttcaactggtatctatgaggccctagagctccgggacaatgataagactcgctatatggggaagggtgtctcaaaggctgttgagcacatcaataaaactattgcgcctgccctggttagcaagaaactgaacgtcacagaacaagagaagattgacaaactgatgatcgagatggatggaacagaaaataaatctaagtttggtgcgaacgccattctgggggtgtcccttgccgtctgcaaagctggtgccgttgagaagggggtccccctgtaccgccacatcgctgacttggctggcaactctgaagtcatcctgccagtcccggcgttcaatgtcatcaatggcggttctcatgctggcaacaagctggccatgcaggagttcatgatcctcccagtcggtgcagcaaacttcagggaagccatgcgcattggagcagaggtttaccacaacctgaagaatgtcatcaaggagaaatatgggaaagatgccaccaatgtgggggatgaaggcgggtttgctcccaacatcctggagaataaagaaggcctggagctgctgaagactgctattgggaaagctggctacactgataaggtggtcatcggcatggacgtagcggcctccgagttcttcaggtctgggaagtatgacctggacttcaagtctcccgatgaccccagcaggtacatctcgcctgaccagctggctgacctgtacaagtccttcatcaaggactacccagtggtgtctatcgaagatccctttgaccaggatgactggggagcttggcagaagttcacagccagtgcaggaatccaggtagtgggggatgatctcacagtgaccaacccaaagaggatcgccaaggccgtgaacgagaagtcctgcaactgcctcctgctcaaagtcaaccagattggctccgtgaccgagtctcttcaggcgtgcaagctggcccaggccaatggttggggcgtcatggtgtctcatcgttcgggggagactgaagataccttcatcgctgacctggttgtggggctgtgcactgggcagatcaagactggtgccccttgccgatctgagcgcttggccaagtacaaccagctcctcagaattgaagaggagctgggcagcaaggctaagtttgccggcaggaacttcagaaaccccttggccaagtaagctgtgggcaggcaagcccttcggtcacctgttggctacacagacccctcccctcgtgtcagctcaggcagctcgaggcccccgaccaacacttgcaggggtccctgctagttagcgccccaccgccgtggagttcgtaccgcttccttagaacttctacagaagccaagctccctggagccctgttggcagctctagctttgcagtcgtgtaattggcccaagtcattgtttttctcgcctcactttccaccaagtgtctagagtcatgtgagcctcgtgtcatctccggggtggccacaggctagatccccggtggttttgtgctcaaaataaaaagcctcagtgacccatgagaaaaaaaaaaaaaaaaaaaaaaaaaaaaaaaaaaaaaaaaaaaaaaaaaaaaaaaaaaaaaaaaaaaaaaaa

SEQ ID NO: 3916 - protein, 434 aa, Homo sapiens (man)
MSILKIHAREIFDSRGNPTVEVDLFTSKGLFRAAVPSGASTGIYEALELRDNDKTRYMGKGVSKAVEHINKTIAPALVSKKLNVTEQEKIDKLMIEMDGTENKSKFGANAILGVSLAVCKAGAVEKGVPLYRHIADLAGNSEVILPVPAFNVINGGSHAGNKLAMQEFMILPVGAANFREAMRIGAEVYHNLKNVIKEKYGKDATNVGDEGGFAPNILENKEGLELLKTAIGKAGYTDKVVIGMDVAASEFFRSGKYDLDFKSPDDPSRYISPDQLADLYKSFIKDYPVVSIEDPFDQDDWGAWQKFTASAGIQVVGDDLTVTNPKRIAKAVNEKSCNCLLLKVNQIGSVTESLQACKLAQANGWGVMVSHRSGETEDTFIADLVVGLCTGQIKTGAPCRSERLAKYNQLLRIEEELGSKAKFAGRNFRNPLAK

SEQ ID NO: 3917 - DNA, 1441 bp, Oryctolagus cuniculus (domestic rabbit)
  CDS (53)..(1357)
aattcccctagactcagagctccatccaaactccagcgaagacatcccagccatggccatgcagaaaatcttcgcccgggaaatcctggactccaggggcaaccccacggtggaggtggacctgcacacagccaagggccgattccgagcagcggtgcccagcggagcttccacggggatctatgaagctctggagctgagagatggagacaaatcccgctacctggggaaaggtgtcctgaaggctgtggaacacatcaacaagaccctaggccctgctctgctggaaaagaaactaagcgttgtggatcaagaaaaagtggacaagtttatgattgagctggatgggaccgagaataagtccaagtttggggccaatgccatcctgggcgtgtccttggccgtgtgtaaggctggagcggcagagaagggggtcccgctctaccgacacatcgcagacctcgctgggaaccatgacctcgtgctcccagtgcctgccttcaacgtgatcaacgggggctcccacgcaggcaacaagctggccatgcaggagttcatgatcctgcccgtgggggccagctccttcagggaggccatgcgcatcggcgccgaggtctaccaccacctcaagggggtcatcaaagccaagtacggaaaggacgccaccaatgtgggggacgagggtggcttcgcgcccaacatcctggagaacaatgaggccctggagctgctgaagaccgccatccaggcggccggctacccagacaaggtggtgatcggcatggacgtggcggcctccgagttccaccgcaacgggaagtacgacctggacttcaagtcgccggatgatcccgcgcggcacatcactgggcagaagcttggggagctgtacaagagcttcatcaagaactaccctgtggtctccatcgaggacccctttgaccaggatgactgggccacctggacttcattcctttcgggggtggacatccagatcgtgggggatgacctcacagtcactaaccccaagaggatcgcccaggccgtggagaagaaggcctgcaactgcctgctgctgaaggtcaaccagatcggctcagtgacggaatccatccaggcttgcaaactggcccagtctaacggctggggggtgatggtgagccaccgctccggggagacggaggacaccttcatcgccgacctcgtggtggggctctgcacgggacagatcaagactggcgccccctgccgctcggagcggctggccaagtacaaccaactcatgaggatcgaggaggctcttggggacaaggctgtcttcgctggacgcaagttccgtaacccgaaggccaagtgagaagcaggaggccctgggactccacttgacacaccctggcctttgagccttttcccctgaaataaacactggtgccagtcacgg

SEQ ID NO: 3918 - protein, 434 aa, Oryctolagus cuniculus (domestic rabbit)
MAMQKIFAREILDSRGNPTVEVDLHTAKGRFRAAVPSGASTGIYEALELRDGDKSRYLGKGVLKAVEHINKTLGPALLEKKLSVVDQEKVDKFMIELDGTENKSKFGANAILGVSLAVCKAGAAEKGVPLYRHIADLAGNHDLVLPVPAFNVINGGSHAGNKLAMQEFMILPVGASSFREAMRIGAEVYHHLKGVIKAKYGKDATNVGDEGGFAPNILENNEALELLKTAIQAAGYPDKVVIGMDVAASEFHRNGKYDLDFKSPDDPARHITGQKLGELYKSFIKNYPVVSIEDPFDQDDWATWTSFLSGVDIQIVGDDLTVTNPKRIAQAVEKKACNCLLLKVNQIGSVTESIQACKLAQSNGWGVMVSHRSGETEDTFIADLVVGLCTGQIKTGAPCRSERLAKYNQLMRIEEALGDKAVFAGRKFRNPKAK

SEQ ID NO: 3919 - DNA, 1323 bp, Candida albicans
  CDS (1)..(1323)
atgtcttacgccactaaaatccacgccagatacgtctacgactccagaggtaacccaaccgttgaagttgatttcaccaccgacaaaggtttattcagatcaattgtcccatctggtgcctctactggtgtccacgaagctttggaattgagagatggtgacaaatccaaatggttaggtaaaggtgttttgaaagccgttgccaatgttaatgacatcattgccccagctttaataaaagccaagatcgatgttgtcgaccaagctaagattgatgaattcttgttgtccttggacggtactccaaacaaatccaaattgggtgccaatgctatcttgggtgtttctttggctgctgccaatgctgccgctgctgctcaaggcattccattgtacaaacacattgccaacatttccaatgccaagaaaggtaaattcgttttgccagttccattccaaaacgttttgaacggtggttcccatgctggtggtgctttagctttccaagaatttatgattgccccaactggtgtctccactttctctgaagctttgagaattggttcagaagtttaccacaacttgaaatctttgaccaagaagaaatacggtcaatccgctggtaacgtcggtgacgaaggtggtgttgctccagatatcaaaactccaaaggaagctttggacttgatcatggatgccattgacaaagccggttacaaaggtaaggttggtattgccatggatgttgcttcatctgaattctacaaggacggtaaatacgacttggactttaaaaacccagaatccgacccatctaaatggttgtctggcccacaattggctgacttatatgaacaattgatttccgaatacccaattgtttctattgaagatccattcgctgaagatgactgggatgcttgggtccacttctttgaaagagttggtgacaagatccaaattgtcggtgatgatttgactgtcactaaccctaccagaatcaagactgccattgaaaagaaagccgctaatgctttgttgttgaaggttaaccaaattggtactttgactgaatctatacaagctgctaacgattcttacgctgctggttggggtgtcatggtttcccacagatccggtgaaaccgaagatactttcattgctgacttgtcagttggtttaagatctggtcaaatcaagactggtgctccagctagatctgaaagattggccaaattgaaccaaatcttgagaatcgaagaagaattaggttctgaagctatctacgctggtaaagatttccaaaaggcttctcaattgtaa

SEQ ID NO: 3920 - protein, 440 aa, Candida albicans [sequence omitted]

SEQ ID NO: 3921 - DNA, 1287 bp, Zymomonas mobilis
  CDS (1)..(1287)
atgacagctattgtcagtatccatggccgtcaggttgtcgacagccgcggtaacccgaccgttgaagttgatgttacgcttgaagatggcagcttcggccgcgctgcagtgccgtcaggtgcttctaccggcgttcatgaagctgttgaacttcgtgatggcgacaaaacccgttggggtggtaaaggcgtcaccaaagctgttcacgctgtaaacaacgaaattgctaacgcaattattggtctggaagccgaagatcaggaactgatcgaccagacgatgatcaagctcgatggcaccccgaacaagggtaaattcggtgctaacgctatcctcggtgtcagcttggctgttgctaaagctgctgctgaagctcgcggtctcccgctttaccgttatgttggtggtacggcagctcacgttcttccggttccgatgatgaacatcgttaacggtggtatgcacgctgacaaccccatcgatttccaggaattcatgattgctccggttggcgccagctccatcaatgaagctgtccgcatcggtaccgaagttttccataccctgaaaaaagaactgtctgctaaaggcatgaacaccaacgtcggtgacgaaggtggtttcgctcctagccttgacagtgcttcttctgctctggacttcatcgtcgattccatctccaaagccggttacaagccgggcgaagatgtgttcatcgctctcgatgcagcttcctccgagttctacaacaaagatcagaacatctacgatcttaagggtgaaggccgtaaactgacctccgctcagctcgttgattactatgtcgaactctgcggcaaatatccgatctattccatcgaagatctggccgaagatgacttcgaattctggaagatccttaccgaaaagctcggtgacaaagttcagttggtcggtgacgatctgttcgtgaccaacgtgaagcgtctttctgatggtatcgaacgcggtatcgccaactcgctgctcgtgaagttcaaccagatcggttctttgtctgaaacgctcgcagccgttaacatggctaacgacgcttcttacacgcctgttatgtctcaccgttccgtggaaaccgaagacaccacgattgctgacctcgctgttgccaccaactgcggtcagatcaagaccggtagcctttgccgttccgaacgtatcgctaaatacaatcagctgatgcgcatcgaagaagaactgggttcggttgctaaatatgctggccgttcggttcttagaaaagccaaataa

SEQ ID NO: 3922 - protein, 428 aa, Zymomonas mobilis [sequence omitted]

SEQ ID NO: 3923 - DNA, 1296 bp, Fasciola hepatica (liver fluke)
  CDS (1)..(1296): Xaa of translated CDS can stand for any naturally occuring amino acid which can be translated from respective CDS-codon
atggcaataaaagcgatccacgcccgacaaatatttgacagccgcggaaatcccaccgttgaagttgatgtcacgaccgcgaaaggtttattccgwgcggcagttccaagcggtgcttccactggtgttcatgaagctctggaattgcgtgatggccctcccggctatatgggcaaaggtgttctaaaagcggttgcaaacgtgaacagccaaatcgctcccaacctcatcaaaagcggaataaatgttactgatcaagctgcggttgacaaattcatgcttgacctggacggaactcccaacaaagaaaaactcggtgcgaatgcaatccttggtgtgtctctcgctrtctgtaaagcgggtgccgctgaaaagggtctccctttgtacaagtacatcgccactcttgcgggaaataaagaggttataatgccggtgccgtctttcaacgtcatcaatggcggtagtcacgctggaaacaaactagcgatgcaggagtttatgataatgccaacgggtgctagttctttcactgaagctatgaagatcggaagtgaggtttaccataacctcagagctgttatcaaaagcaagtacggtttggacgcctgcaatgtgggtgacgagggtggtttcgctccaagtattcaagataatttggaaggacttgagctgcttcgtaccgcaatagacaaagctggatatacgggaaaagtcwagattgccatggattgcgctgcttcggaattttacaaggaagggaaatacgatttggatttcaaaaaccccaagtctcaggccagttcttggatcacttcggatgccatggctgatgtctacaagaaaatgatgtctacttacccgatcgttagcatcgaggacccgttcgaccaagacgattggccagcttggactaaactgacgggtgaatgtaaaatccagatcgttggtgatgacttaactgtcaccaacccccttcgtgtgcaaaaagctatcgaccaaaaggcatgcaattgcctgttgctaaaagtcaaccagattggttcggtgtcagagtccattaaggcttgcaagatggcccaagaagctggttggggtgtgatggtatcacatcgttcaggagaaactgaagataacttcatcgctgatttggtggttggactgcgtactggccagattaaaacaggtgcaccttgtcgttcagaacgtcttgcgaaatacaaccagttgctgcgtattgaagaggatctgggaggtgccgcaaagtatgctggggagaacttccgccgaccataa

SEQ ID NO: 3924 - protein, 431 aa, Fasciola hepatica (liver fluke) [sequence omitted]

SEQ ID NO: 3925 - DNA, 1377 bp, Mycoplasma genitalium
  CDS (1)..(1377): trans_table=4
atgggaagttcaaatctaaacatcaattcaaaaataaccgatatttttgcttatcaagtttttgattctcggggtgttccaacagtagcttgtgttgttaaattggcatctggtcatgtaggtgaagcgatggttccatcaggtgcttctacaggtgagaaagaagcaattgaattacgtgataatgatccaaaaaattattttggtaaaggcgttaacgaagccgttgataacgttaataaagttattgcccctaagcttattggcttaaatgcatttgatcaattaacagtggatcaagcaatgattaaactagacaatactcccaacaaagcaaaattaggagcaaatgctatattatctgtttcacttgcagtatcaaaagcagcagcaaaagcacaaaacagctcattatttcaatacatttcaaataaattaattggattaaatacaacaaattttgttttacctgtgccaatgttaaatgtaattaatggtggtgctcatgctgataactatattgattttcaagagttcatgatcatgcctttaggtgctaaaaagatgcatgaagctttaaaaatggctagtgaaacttttcatgctttacaaaatcttttaaaaaagcgtggattaaacacaaataaaggagatgaaggtggatttgcgcctaacttaaaacttgcagaagatgcacttgacatcatggttgaagccattaaattagctggatataagccttgagatgatattgctattgccattgatgttgctgctagtgagttttatgacgaagataaaaaactttatgttttcaagaaaggaataaaagctaatatccttaatgcaaaggattggagtttaacaagcaaagaaatgattgcttacttagaaaaattaacaaaaaaatatccaattatttcaatagaagatggtttgagtgaaaatgattgagaagggatgaaccaattaactaaaaccataggtagccatattcaaattgttggtgatgacacttactgtactaatgcagaacttgctaaaaaaggtgttgcacaaaatacaacaaactcgatattgattaaattaaatcaaattggttctattagtgaaacgattcaaacaattgaagttgcaaaaaaagctaactggagtcaagtaatttcacatcgcagtggtgaaacagaagatacaactattgctgatttggcagttgctgcccaaactggtcaaattaaaaccggttcaatgtcacgctcagaaagaatagctaaatacaatcgtttgttgtacatagaaattgaacttggtgataaaggaaaatacttaggttgaaatacctttacaaacattaaacctaaaaactttaacatctaa

SEQ ID NO: 3926 - protein, 458 aa, Mycoplasma genitalium [sequence omitted]

SEQ ID NO: 3927 - DNA, 1287 bp, Neisseria meningitidis
  CDS (1)..(1287)
atgagcgcaatcgttgatattttcgcccgcgaaattttggactcacgcggcaaccccacagtcgagtgtgatgtattgctcgaatccggcgtaatgggacgcgcagccgtaccgagcggcgcgtccaccggtcaaaaagaggctttggaacttcgcgacggcgacaaatcccgttattcgggcaagggcgtattgaaggcggtcgaacacgtcaacaaccaaatcgcccaagccctcattggtatcgatgccaacgagcaatcttatatcgaccaaatcatgatcgaattggacggtactgaaaacaaaggcaatttgggtgcgaatgcgactttggcggtttctatggcggttgcacgcgccgctgccgaagactcaggcctgccgctttaccgctacttgggcggcgcaggcccgatgtccctgcccgtaccgatgatgaacgtcatcaacggcggcgaacacgccaacaacagcctgaacatccaagagtttatgattatgcccgtcggcgcaaaatctttccgcgaagcgttgcgctgcggtgcggaaattttccacgccttgaaaaaactgtgcgacagcaaaggcttcccgaccacagtcggcgacgaaggcggtttcgcccccaacctgaacagccacaaagaagccctgcaactgatggtcgaggcgaccgaagccgccggctacaaagcgggcgaagacgtattattcgcattggactgcgcgtccagcgagttctacaaagacggcaaataccacttggaagccgaaggccgctcctacaccaacgcggaatttgccgaatatctggaaggcctggtcaacgagttccccatcatctccatcgaagacgggatggatgaaaacgactgggaaggctggaaactgctgaccgaaaaactgggcggcaaagtccaactcgttggcgacgacctcttcgttaccaacccgaaaatccttgccgaaggcattgaaaaaggcgtggcaaacgcactattggtcaaagtcaaccaaatcggtactttgagtgaaaccctgaaagccgtcgacttagccaaacgcaaccgctacgccagcgtaatgagccaccgctccggcgaaaccgaagacagcaccattgccgacttggcagtcgccaccaactgtatgcagatcaaaaccggttctttgagccgttccgaccgcatggcgaaatacaaccaactgctgcgtatcgaggaagaattggcggaagccgccgactaccccagcaaagccgcattctaccaactgggcaaataa

SEQ ID NO: 3928 - protein, 428 aa, Neisseria meningitidis [sequence omitted]

SEQ ID NO: 3929 - DNA, 1305 bp, Staphylococcus aureus
  CDS (1)..(1305)
atgccaattattacagatgtttacgctcgcgaagtcttagactctcgtggtaacccaactgttgaagtagaagtattaactgaaagtggcgcatttggtcgtgcattagtaccatcaggtgcttcaactggtgaacacgaagctgttgaattacgtgatggagacaaatcacgttatttaggtaaaggtgttactaaagcagttgaaaacgttaatgaaatcatcgcaccagaaattattgaaggtgaattttcagtattagatcaagtatctattgataaaatgatgatcgcattagacggtactccaaacaaaggtaaattaggtgcaaatgctattttaggtgtatctatcgcagtagcacgtgcagcagctgacttattaggtcaaccactttacaaatatttaggtggatttaatggtaagcagttaccagtaccaatgatgaacatcgttaatggtggttctcactcagatgctccaattgcattccaagaattcatgattttacctgtaggtgctacaacgttcaaagaatcattacgttggggtactgaaattttccacaacttaaaatcaattttaagcaaacgtggtttagaaactgcagtaggtgacgaaggtggtttcgctcctaaatttgaaggtactgaagatgctgttgaaacaattatccaagcaatcgaagcagctggttacaaaccaggtgaagaagtattcttaggatttgactgtgcatcatcagaattctatgaaaatggtgtatatgactacagtaagttcgaaggcgaacacggtgcaaaacgtacagctgcagaacaagttgactacttagaacaattagtagacaaatatcctatcattacaattgaagacggtatggacgaaaacgactgggatggttggaaacaacttacagaacgtatcggtgaccgtgtacaattagtaggtgacgatttattcgtaacaaacactgaaattttagcaaaaggtattgaaaacggaattggtaactcaatcttaattaaagttaaccaaatcggtacattaactgaaacatttgatgcaatcgaaatggctcaaaaagctggttacacagcagtagtttctcaccgttcaggtgaaacagaagatacaacaattgctgatattgctgttgctacaaacgctggtcaaattaaaactggttcattatcacgtactgaccgtattgctaaatacaatcaattattacgtatcgaagatgaattatttgaaactgctaaatatgacggtatcaaatcattctataacttagataaataa

SEQ ID NO: 3930 - protein, 434 aa, Staphylococcus aureus [sequence omitted]

SEQ ID NO: 3931 - DNA, 1275 bp, Agrobacterium tumefaciens
  CDS (1)..(1275)
atgactgccattaccgatatcatcgcgcgcgaaattctcgacagccgcggcaatccgaccgttgaagtcgatgtttacctcgaagacggctccatgggccgtgcggccgttccgtccggcgcctccactggcgcgcatgaggcggttgagctgcgcgatggcggcaagcgttatctcggcaagggcgtggaaaaggcggtcgaagccgtcaataccgaaatcttcgacgccatcggcggtttcgacgctgaaaaccagatccagatcgatcagatgatgatcgcgcttgacggcacgccgaacaagtcgcgcctcggcgccaacgccatcctcggcgtctcgcttgccatcgccaaggctgcggctgaagcctccggcctgccgctttaccgttatgttggcggtccgaacgcccatctgcttccggttccgatgatgaacatcatcaacggcggcgcgcatgccgataaccccatcgacttccaggaattcatgatcctgccggttggcgcggaaaacatccgcgaagccgtgcgtatgggttcggaagtgttccacacgctgaaaaaagaactgtccgcacagggccacaacaccaatgtcggtgatgagggcggttttgcaccgggcctcgagagcgcgccggcagccctcgatttcatcatgaagtcgatcgaaaaggctggctaccgtccgggcgaagacatgtatgtcggcctcgactgcgcatcgaccgagttctttaaggacggtaagtacgttctggaaggtgaaggccgcacgctggagcccggcgccatggccgaatatctggccgagcttgtcaataaatacccgatcatctcggttgaagacggcatggccgaagatgactgggaaggctggaagacgctgactgatctcgtcggcaacaaatgccagctcgtcggcgacgatctcttcgtcaccaactccgcgcgtcttcgcgacggcatcaagatgggcgtcgccaactccattctcgtcaaggttaaccagatcggttcgctttccgagacgctggatgcagtcgaaacggcacacaaggccggttacaccgccgtcatgtcgcaccgctctggcgagacggaagattctaccatcgccgatctcgctgtcgccaccaactgcggtcagatcaagaccggttcgcttgcccgttctgaccggctcgcaaagtacaaccagctgatccgcattgaggaaatgctgggtccgcaggctgcctacgccggccgttcgatcctgcgcgggtaa

SEQ ID NO: 3932 - protein, 424 aa, Agrobacterium tumefaciens [sequence omitted]

SEQ ID NO: 3933 - DNA, 1296 bp, Yersinia pestis
  CDS (1)..(1296)
atgtccaaaattgttaaagtcatcggtcgtgaaatcatcgactcccgtggtaatccaactgtagaagccgaagttcatttagaaggcggtttcgttggtttggctgcggcaccatcaggtgcttctactggttcccgtgaagcactggaactgcgtgacggtgacaaatcccgtttcttgggcaaaggcgtactgaaagccgttgctgcagtaaatggcccaattgctcaggcagttatcggtaaagatgccaaagatcaggccaacatcgataaaatcatgatcgatctggacggtactgagaacaaatcccagtttggtgctaacgccattctggctgtttctttggcagcagcgaaagcagcagcagcgtctaaaggcatgcctttgtacgagcacattgctgaattgaacggcaccccaggcaaattctctatgccactgccaatgatgaacatcatcaacggcggcgaacatgctgacaacaacgttgatattcaagagtttatgattcagccagtcggcgctaaaacgttgaaagaagcggttcgcatcggttctgaagtgttccaccacctggctaaagtactgaaagccaaaggcctgaacacggctgttggtgatgaaggcggctatgcaccaaacctgggttctaacgctgaagcactggctgttatcgctgaagcagtaaaagcagcaggctacgagctgggcaaagacattactctggctatggactgtgcggcttctgagttctacaaagacggcaaatatgttctggctggcgaaggtaacaaagccttcacttccgaagaatttactcacttcctggaagacttgaccaagcagtatccaattgtctccattgaagatggtctggacgaatctgactgggctggcttcaaataccagactgaagtcctgggtgacaaaatccagttggtgggtgatgacctgttcgtaaccaacaccaagatcctgaaagaaggtatcgagaaaggtgttgctaactctatcttgatcaaattcaaccagatcggttctctgaccgaaactctggctgcgattaagatggcaaaagacgcaggttacaccgcggttatctctcaccgttcaggtgaaaccgaagatgcgactatcgctgacttggcagtcggtaccgcagcaggccaaatcaaaaccggttctatgagccgttctgaccgtgttgctaaatacaaccaactgatccgtattgaagaagcgctgggcgaccgcgcaccattcaacggtctgaaagaagttaaaggccagtaa

SEQ ID NO: 3934 - protein, 431 aa, Yersinia pestis
MSKIVKVIGREIIDSRGNPTVEAEVHLEGGFVGLAAAPSGASTGSREALELRDGDKSRFLGKGVLKAVAAVNGPIAQAVIGKDAKDQANIDKIMIDLDGTENKSQFGANAILAVSLAAAKAAAASKGMPLYEHIAELNGTPGKFSMPLPMMNIINGGEHADNNVDIQEFMIQPVGAKTLKEAVRIGSEVFHHLAKVLKAKGLNTAVGDEGGYAPNLGSNAEALAVIAEAVKAAGYELGKDITLAMDCAASEFYKDGKYVLAGEGNKAFTSEEFTHFLEDLTKQYPIVSIEDGLDESDWAGFKYQTEVLGDKIQLVGDDLFVTNTKILKEGIEKGVANSILIKFNQIGSLTETLAAIKMAKDAGYTAVISHRSGETEDATIADLAVGTAAGQIKTGSMSRSDRVAKYNQLIRIEEALGDRAPFNGLKEVKGQ

SEQ ID NO: 3935 - DNA, 1290 bp, Nostoc sp. PCC 7120
  CDS (1)..(1290)
atgaataatattgtcgatacagccattgaggcgattgtcgcccgcgaaattctcgactcacgcggtagaccaacaatagaagcggaagtacatttattaagcggtgcggtaggcttggcacaagttcctagcggcgcttctacaggcacatttgaagcccatgaactgagagacaaggataaaagccgttacggcggtaaaggggtactcaaggctgtacacaacgttaatgagatactagccccaaagttaatagatttggatgctctcaaccaagaactcatcgaccggacgatgattgcccttgatggttctggtaacaaatcaaatttgggtgcaaatgcgattttagctgtttctttggcagccgctagagccggggctgagtctttggggattcccctatatcgttacttaggcggccctttggcgaatttgttgcctgtgcctttaatgaacgtaattaatggtggggcgcacgcttctaataacgtggatttccaagagtttatgatcgttcctgtgggtgcaacttccttccgtgaagccctgcgctggggtgcggaggtatttgctaccctcagtgaagtgctgcatgacaaaggcttgctgactggtgtaggcgatgaaggtggttttgcacctaacttggaatctaatcaggtagccttggaattgctagttgcagccattgaaaaagcaggatacaaaccaggggaacaagtagcactggcgctagatgtggcggctagtgaattttacaaggaagggcagtatgtctatgatggtagacctcatgcaccgacggagtttatcgattacttagggcagttagttgatcaatacccaattgtgtccattgaagatggtttacacgaagaagattggcaacattggcaattactcacccaaaaagttggttcacgggtgcagttggttggtgatgacttgtttgtaacaaacgctactcgcttacaaaaaggcatccaagaaaaagcaggtaacgccattctgattaaactcaatcaaattggttccctgactgaaaccctagaaaccatcgacttaggaactcgtaatggtttccgttcagtcattagccatcgttctggtgaaacagaagacaccaccattgctgatttagccgttgctacccgtgcaggtcaaatcaaaactggttccctctgtcgtagtgaacgggtagccaaatacaaccgcttgctacgtattgaagatgaattaggcgatcgcgccgtttatgctggggctgtgggtttagggccgaaatag

SEQ ID NO: 3936 - protein, 429 aa, Nostoc sp. PCC 7120 [sequence omitted]

SEQ ID NO: 3937 - DNA, 1278 bp, Brucella melitensis
  CDS (1)..(1278)
atgactgcaatcatcgacatcgtcggccgcgaaattctcgacagccgcggcaacccgaccgtcgaagtggatgtcgtgcttgaagatggctctttcggacgcgcggctgttccgtccggcgcatcgactggcgcgcatgaagccgttgaactgcgtgatggcggcagccgttatcttggcaagggcgtggaaaaggcagttgaagtagtcaatggcaagattttcgacgccattgcaggcatggacgcggagagccagcttctcatcgaccagacgctgatcgatcttgatggctcggccaacaagggcaacctcggcgccaatgctattctcggcgtttccctggcggttgccaaggcggctgcgcaagccagcggcctgccgctttatcgctatgtgggcggcaccaatgcgcatgtgcttcccgttccgatgatgaacatcatcaatggcggcgcccatgccgataatccgatcgattttcaggaattcatgatccttccggttggcgcgacttccattcgcgaagctgtgcgctatggctcggaagtcttccacacactgaagaagcgcctcaaggatgccggacataacaccaatgtcggcgacgaaggcggctttgcgccaaacctcaagaatgcacaggccgcactcgatttcatcatggaatcgattgagaaggctggtttcaagccgggcgaagatattgctcttggcctggactgcgcggcgaccgagttcttcaaggacggcaactacgtctatgaaggcgagcgcaagacccgcgatccgaaggcgcaggccaagtatctcgccaagcttgccagcgactatcctatcgtcaccattgaagacggtatggctgaagacgattgggaaggctggaaatatctgaccgatctgatcggcaataagtgccagcttgtcggcgacgatctgttcgtgacgaattcggctcgtctgcgtgacggtatccgtctgggcgtcgccaactcaattctcgtcaaggtgaaccagatcggttcgctgtcggaaacgctggacgcggtcgaaaccgcccacaaggctggttacaccgccgttatgtcgcatcgctcgggcgaaacggaagattccaccattgccgatcttgccgtggctaccaattgcggccagatcaaaaccggctcgctcgcgcgttcggatcgcacggcgaagtacaaccagctcatccgcattgaggaagagctggacaagcaggcccgctatgctggtcgcagtgcactgaagttgctctaa

SEQ ID NO: 3938 - protein, 425 aa, Brucella melitensis
MTAIIDIVGREILDSRGNPTVEVDVVLEDGSFGRAAVPSGASTGAHEAVELRDGGSRYLGKGVEKAVEVVNGKIFDAIAGMDAESQLLIDQTLIDLDGSANKGNLGANAILGVSLAVAKAAAQASGLPLYRYVGGTNAHVLPVPMMNIINGGAHADNPIDFQEFMILPVGATSIREAVRYGSEVFHTLKKRLKDAGHNTNVGDEGGFAPNLKNAQAALDFIMESIEKAGFKPGEDIALGLDCAATEFFKDGNYVYEGERKTRDPKAQAKYLAKLASDYPIVTIEDGMAEDDWEGWKYLTDLIGNKCQLVGDDLFVTNSARLRDGIRLGVANSILVKVNQIGSLSETLDAVETAHKAGYTAVMSHRSGETEDSTIADLAVATNCGQIKTGSLARSDRTAKYNQLIRIEEELDKQARYAGRSALKLL

SEQ ID NO: 3939 - DNA, 1293 bp, Bacillus subtilis
  CDS (1)..(1293)
atgccatacattgttgatgtttatgcacgcgaagtattagactcccgcggcaacccaacagttgaagttgaagtatatacagaaacaggagctttcggccgcgcattagtgccaagcggagcttctacaggtgaatacgaagcggttgagcttcgtgacggcgacaaagaccgttaccttggaaaaggcgtgttaacagctgttaacaacgtaaacgaaatcattgctccagagcttcttggctttgatgtaactgaacaaaacgcaatcgatcagcttttaatcgagcttgacggtactgaaaacaaaggcaaacttggtgcgaacgcaatccttggcgtatctatggcttgtgcgcgtgctgctgctgatttcttacagattcctctttaccaataccttggaggattcaactcaaaaacgcttcctgtaccgatgatgaacatcgtaaacggcggagagcatgctgataacaacgtggatattcaagaattcatgatcatgcctgtaggtgctcctaacttccgtgaagcacttcgcatgggcgctcaaatcttccacagcctgaaatcagtattaagcgcaaaaggcttaaacactgctgtaggtgacgaaggcggattcgctccaaaccttggttctaacgaagaagcgcttcaaacaatcgttgaagcaatcgaaaaagccggcttcaaacctggcgaagaagttaaacttgctatggatgctgcatcttctgagttctacaacaaagaagacggcaaataccatctgtctggcgaaggcgttgtgaaaacatctgctgaaatggttgactggtatgaagagcttgtttctaaatacccaatcatctcgatcgaagacggacttgacgaaaacgactgggaaggccacaagcttcttactgagcgtcttggcaaaaaagttcagcttgttggtgacgacctcttcgttacaaacacgaaaaaactttctgaaggtattaaaaacggcgtaggcaactctatcctgatcaaagtaaaccaaatcggtacattgactgaaacattcgatgcgatcgaaatggcgaaacgcgcaggctacacagctgttatctctcaccgttctggtgaaactgaagacagcacaatcgctgacatcgctgtggcaacaaacgcaggacaaatcaaaacaggtgctccgtctcgtacggaccgtgttgcgaaatacaaccagcttcttcgcatcgaagatcagttggctgaaactgctcaataccacggtatcaactctttctacaacttaaacaagtaa

SEQ ID NO: 3940 - protein, 430 aa, Bacillus subtilis
MPYIVDVYAREVLDSRGNPTVEVEVYTETGAFGRALVPSGASTGEYEAVELRDGDKDRYLGKGVLTAVNNVNEIIAPELLGFDVTEQNAIDQLLIELDGTENKGKLGANAILGVSMACARAAADFLQIPLYQYLGGFNSKTLPVPMMNIVNGGEHADNNVDIQEFMIMPVGAPNFREALRMGAQIFHSLKSVLSAKGLNTAVGDEGGFAPNLGSNEEALQTIVEAIEKAGFKPGEEVKLAMDAASSEFYNKEDGKYHLSGEGVVKTSAEMVDWYEELVSKYPIISIEDGLDENDWEGHKLLTERLGKKVQLVGDDLFVTNTKKLSEGIKNGVGNSILIKVNQIGTLTETFDAIEMAKRAGYTAVISHRSGETEDSTIADIAVATNAGQIKTGAPSRTDRVAKYNQLLRIEDQLAETAQYHGINSFYNLNK

SEQ ID NO: 3941 - DNA, 1465 bp, Arabidopsis thaliana (mouse-ear cress)
  CDS (1)..(1434)
atggctttgactacaaaacctcaccatcttcagagatctttcctctctccgtcgcgtgtttccggcgaacgatatttggaatctgcgccatcatgtctgagattccgtcgcagcggtgtccaatgctcggtggtggctaaggagtgcagagtgaaaggagtgaaagcgagacagattattgatagtagagggaatccgacggtggaggttgatctgattaccgatgatctgtatcgttcggctgttccaagtggtgcatctaccgggatctacgaagcgcttgagcttagagatggagacaagagcgtctatggtggtaaaggtgtattacaggctattaaaaacatcaatgaacttgtggctccaaaactcattggagttgacgttaggaaccaagctgatgtcgatgctcttatgctggaactggatgggaccccaaacaagtcgaaactcggggctaatgcgatattaggagtgtcattgagcgtttgcagggcaggtgctggagctaaaggagtgcctttgtacaaacacatccaggaaacatcaggaacaaaggagcttgtcatgccagttcctgcattcaatgtgatcaatggaggcagtcatgctgggaatagtttggctatgcaagagtttatgatactacctgtaggagctacctcattctcggaggccttccagatgggaagtgaagtttatcatacattgaaggggataatcaaaactaagtatggtcaagatgcttgtaatgtcggagatgaaggagggtttgcgccgaatgttcaagataacagagagggactagttctgctcatagatgcaattgaaaaggccggttacactggaaagatcaaaataggaatggatgttgctgcatcagaatttttcatgaaagatggtagatacgatttgaacttcaagaaacagccaaacgatggagctcacgtactgtcagccgagagtcttgctgacctctacagagaattcatcaaggatttcccaattgtctctatcgaagatccttttgaccaggatgattggagctcatgggcttcattgcaatcctctgtggatatccaactcgtgggagatgacttgttagtcactaacccgaagaggatagctgaagctattaagaaacagtcttgcaatgctctactcttgaaggttaaccagattgggacagtcactgagtcaattcaagcagcacttgactcaaaagctgcaggctggggtgtgatggttagtcacaggagtggcgagacagaggataacttcatcgcagatctctctgttggtttagcaagcggacagatcaaaactggtgctccatgccgaagtgaacgattgtcaaaatacaaccagcttctccgtatcgaagaggaactcggcaatgtgcgctacgccggtgaagctttccgatcaccatgagaaattcgagaaaggcactcattggcggctt

SEQ ID NO: 3942 - protein, 477 aa, Arabidopsis thaliana (mouse-ear cress)
MALTTKPHHLQRSFLSPSRVSGERYLESAPSCLRFRRSGVQCSVVAKECRVKGVKARQIIDSRGNPTVEVDLITDDLYRSAVPSGASTGIYEALELRDGDKSVYGGKGVLQAIKNINELVAPKLIGVDVRNQADVDALMLELDGTPNKSKLGANAILGVSLSVCRAGAGAKGVPLYKHIQETSGTKELVMPVPAFNVINGGSHAGNSLAMQEFMILPVGATSFSEAFQMGSEVYHTLKGIIKTKYGQDACNVGDEGGFAPNVQDNREGLVLLIDAIEKAGYTGKIKIGMDVAASEFFMKDGRYDLNFKKQPNDGAHVLSAESLADLYREFIKDFPIVSIEDPFDQDDWSSWASLQSSVDIQLVGDDLLVTNPKRIAEAIKKQSCNALLLKVNQIGTVTESIQAALDSKAAGWGVMVSHRSGETEDNFIADLSVGLASGQIKTGAPCRSERLSKYNQLLRIEEELGNVRYAGEAFRSP

SEQ ID NO: 3943 - DNA, 1305 bp, Buchnera sp
  CDS (1)..(1305)
atgtctaaaattacaaaaatcatagctcgtgaaattatagattcacgaggcaatcctactgttgaatctgaagttcatttagaaggcggatttgtcggactagcttcttctccttccggagcctctaccggttctttagaagctttagaattaagggatgaaaataaagacagattcatggggaaaggagtggaaaaagctgtttcgttaataaacgaaaaaatatctattgcattaaaaaataaaaatgctagaaatcaaagtgatattgatcatattatgattgatttagacggaacaatcaataaatccaaattaggtgctaatgcgattttatctgtatctttagctgttgctaaagcagctgctgcatctaagagaatgcctttatatgcgcatattgcagaaataaatgagactcctggtgttttttctatgccattgcctatgataaatattattaatggtggaaaacatgctaataataatatagatattcaggagtttatgattcaaccaatcagcgcaaaaacagtaaaagaatctatacgtataggatgtgaaatatttcatgcattaggtgaattattaaaagaaaaaggaatgagtacaactgtaggagatgaaggaggttatgcaccaaacttgaagtctaatgaagaagcattaaatattattcaagatgcaatacaaaaaactaaatataaattaggacaagatatacgattagcaatagattgtgctgcttcagaattatataataaaaacgaaaaaaaatataatcttaaaggagaaaatattagtttttcttcaaaggaattcactcattatttagaaaaattatctcaaaaatatccgatagtttcaatcgaagatggacaagatgagtcagattgggaaggatttttatatcaaacacatgtactaggtaataaaatacagttagtaggagatgatttatttgttacaaataaaaatattttaaaaaaaggtataaaaaaaggaattgcaaattcaatattaataaagttaaatcaaattggaacattaactgaaactctagaagcaataaaaacagcaaaacaagcaaactatggagtaattatttctcatcgttcaggtgaaacagaagacgcttctatagcagatttatctgtaggaacatcatcaggacaaattaaaacaggttctatgagtcgttctgatagaacttcaaagtataatcaattgattagaattgaagaaaatttaggaacaaaatacgctccgtttcatggtttacgagaaattaaatcagcattttaa

SEQ ID NO: 3944 - protein, 434 aa, Buchnera sp [sequence omitted]

SEQ ID NO: 3945 - DNA, 1275 bp, Chlamydia trachomatis
  CDS (1)..(1275)
atgtttgatgtcgtcatctccgatatagaagcgagagaaattttagattctcgaggctatcccacattatgtgttaaagtcatcactaatacaggaacctttggtgaagcgtgcgttccttctggagcatctacaggcatcaaggaagctttggaactgcgtgacaaagatcctaaacgttaccaagggaaaggggtcttacaagccatttctaatgtcgaaaaagtgctgatgcccgctttacaaggattcagcgtatttgaccaaattacagctgatgcgattatgattgatgctgatggaactccgaacaaagaaaagttaggagctaatgcgattcttggagtctccctagcattagcaaaagctgctgcaaatactttacagagacctttatatcggtatcttggtggatctttctcgcatgtgcttccttgccctatgatgaatcttatcaatggcggtatgcatgctacaaatggtctccaattccaagaatttatgattcgtccaattagcgctccttctctaacagaggctgtgcggatgggagcagaagtcttcaacgccttaaaaaaaatcttacagaatcgacagctggctacaggtgttggtgatgaaggcggatttgctcctaatcttgcctctaatgccgaagctctggatctactcttaacagcaatcgaaactgcaggattcacacctagagaagatatttctttagctctcgactgcgctgcttcttctttctataatacccaagataaaacctatgatgggaaatcgtatgcagatcaagtgggtatacttgcagaactctgtgagcactatcctatagattctatcgaagatgggctagccgaagaagattttgagggctggaaactcctatccgagactttaggagatcgtgtgcaactagttggagacgacctatttgtgacgaattctgcattgattgctgaaggaatcgctcaaggacttgccaatgccgttctcatcaaaccaaaccaaattggaacacttacagaaactgcagaagctattcgtttagcaactatacaaggctacgctaccattctttcgcatagatcaggagaaacagaagatactaccatagcagaccttgctgtcgcttttaatacaggtcagattaaaacagggtctctttcccgttctgagcgtatcgctaagtataaccgtctaatggcaattgaagaagagatgggtccagaagctctattccaagattcaaatcccttttctaaagcatag

SEQ ID NO: 3946 - protein, 424 aa, Chlamydia trachomatis [sequence omitted]

SEQ ID NO: 3947 - DNA, 1269 bp, Deinococcus radiodurans
  CDS (1)..(1269)
atgaacatcgagaaagtcatcgcccgtgaagtgctggattcgcgtgggaaccccaccgtcgaagccgaagtccacctcgacagcggtttttcgggccgggccatcgtgccttcgggagcgagtaccggcagccacgaggcgctcgaactgcgtgacggcggcgagcggtacatgggcaagggcgtggaacgtgccgtgcagaacgtgcgtgaggccctcggcccggccctcatcggcatggacgccagtgagcaggccgccatcgacaaggcgctgatggacgtggacggcacctccaacaagggcaacatgggcggcaacgcgattctggcggtgagcctcgcgactgcccgcgccgccgctgccgagctcgacatcccgctctaccgctacctcggcggctccaacgccaagaccctgcctgtgcccatgatgaacgtcatcaacggcggcgcccacgccgacaacagcgtggattttcaggagttcatggtgatgccggtcggcgctccgagcttccgtgaagcactgcgctacggcgccgagacctttcaccacctgaaaaaagtcctcagcgggcgcggctacaacaccaacgtcggcgacgaaggcggttttgcgccggacctcaagagcaacgaggaagccctcgaagtgctgcttgaagccattcagcaggcgggctacgaacccggcaaggacatctgcatcgcgctcgaccccgccgtgaccgagctgtacaaggacggccagtaccacctggagagcgagggccgcgtgctgagcagcgacgagatgatcgacttctgggccgactggaccagccgctacccgattgtcagcatcgaagacggcctcgctgaagacgactgggacggctgggaacgcctgaccgccaaggtgggcgccaagacccagctggtgggcgacgacctgttcgtgaccaaccccgagcgcttgcagcagggcatcgaccgcaaggtgggcaacgcgattctggtcaaggtgaaccagatcggctccctcaccgagagcatggacgccatcgaactcgccaagcgccaccactacggcaccatcatcagccaccgctcgggcgagtccgaagacgcctttatcgccgacctcgctgtggcgaccaacgccgggcagatcaagaccggctcggccagccgctcggaccgtatcgccaagtacaaccagctgctgcgcatcgaagaccagctcggcgaccgagccgtgttcccgggccgcaaggcgctgcgctaa

SEQ ID NO: 3948 - protein, 422 aa, Deinococcus radiodurans [sequence omitted]

SEQ ID NO: 3949 - DNA, 1290 bp, Bacillus halodurans
  CDS (1)..(1290)
atgacaatcattactgatgtatacgctcgtgaagtattagattcacgtggaaacccgacggttgaagtggaggtttacttagaatctggtgcaatgggacgtgcccttgtcccaagtggtgcttcgactggtgaatatgaagccgttgagcttcgcgatggtggcgagcgctttttaggaaaaggtgtcttgaaagccgttgagaacgtgaacgaagtcattgcccctgagcttattggcttcgacgctcttgatcaaatcgggatcgatcaacatatgattgagcttgatggaacagaaaataaaggaaaacttggcgcgaatgccattcttggagtatccatggcggttgctcgtgcggcagcgaatgctcttgaccttccgctttatgtatacctcggcggatttaacgcaaaacagcttcctgtgccaatgatgaacatcatcaatggtggagagcacgcagataacaacgtcgatattcaagaatttatgatcatgccagtcggtgcggaaagctttaaagaagcgcttcgtacagggacggaaattttccacagcttgaaaaaagttcttaagtcaaaaggctacaacacagctgttggtgacgaaggtggtttcgcgccaaacctttcatcgaatgaagaagcgttgcaaacgatcatcgaagcgatcgagcaagctggttacactccaggggagcaagtgaagcttgcaatggacgttgcctcttctgagctttacaacaaagaagatggaaagtaccacctttctggcgaaggaaaagttctttcttctgaagaaatggttgccttctatgaagagcttgtagctaaatatccaatcatctccatcgaagacggccttgatgagaacgattgggaaggacataaaatgcttacagaccgtcttggcgacaaagtccagcttgtcggtgacgacttgttcgtaacaaacacgaaaaagcttgcccaaggaatcgagcaaggggtcggcaactcgatcctaatcaaagtgaatcaaatcggtacattaacggaaacgttcgatgcgatcgaaatggcaaaacgcgcgggttacacagctgttatctctcaccgctctggtgaaacagaagatagcacgatcgctgacattgctgttgcgacaaacgcaggccaaatcaaaacaggtgctccgtcccgtacagaccgtgtggcgaagtacaatcaacttctacgcattgaagatgagcttggcaatttagcacaatataacggtcttcaatcgttctacaaccttaaaaagtaa

SEQ ID NO: 3950 - protein, 429 aa, Bacillus halodurans [sequence omitted]

SEQ ID NO: 3951 - DNA, 1269 bp, Lactococcus lactis subsp. lactis
  CDS (1)..(1269)
atgacagtcacaatcgaaaacatccacgcaagagaaatttttgattctagaggaaatccaaccgttgaggtagatgttagattaacagatggaacattaggacgcgcagcagtaccctcaggagcatcaactggagaccgtgaagcagttgaattaagagatggtggagaccgtcttcaagggaaaggcgtttctaaagccgtcgcaaatgtcaatggcgaaatttatgaagccttgaaaggacaatcaccatttaatcaagcaaaattagatcatttgatgattgagcttgacgggacaaaaaataaatctcgtttaggggctaatgcaattttaggggtttcaatggccatttctcgtgcggcagcgaatagtgaaaaaattccactctatcgctatcttggtggagttgatttggaacttccacaaccatttttcaatgtcattaatggtggagtacatgccgattcaggaattgacgttcaagaatttttgattacaccagtcaaacgggaaagttttcgcgatggtttagaaaaaattgcaaatatctaccatactctgaagaaaattttagctgacaaagggctagaaacagccgtaggtgatgaaggtggctttgcccctaaacttggttctactgaaaatgcaattgctacactttatcaagcaattgaaagtgcaggatatgttcctggtgaagaaattgcgattgccattgacccagcttcaagtgaattttatgatgataaagaaaaagtttatcgttttgaagggcaaaaattgacttctaaagaactattgacttactatgaaaatttagttgaaaaatatccagcacttatttctattgaagatggattttctgaacatgactgggagggctttgcagctcaaacgaaagctcaaggtcaaaaaattcaattagtaggtgatgatatttttgtgacaaatcctgaaattttcaaagaaggaattaaaaaaggtgtagcaaatgctattttgattaaacttaatcaaatcggaacagtaactgaagcgattgaagccattagtttagcgagaaaagcaggctataagacaatgatttctcatcgttcaggtgaaacagttgatagctacattgccgattttgcggtagccatgcatgctggccaaataaaaacaggttcaatggctcgaagtgaacgggttgaaaaatataatcaattcttgcgaattgaagaagaattaggaaaagatgtagctcttgctagttttccaggatag

SEQ ID NO: 3952 - protein, 422 aa, Lactococcus lactis subsp. lactis [sequence omitted]

SEQ ID NO: 3953 - DNA, 1302 bp, Lactococcus lactis subsp. lactis
  CDS (1)..(1302)
atgtcaattattactgatatttatgctcgcgaagtccttgactcacgcggtaacccaacacttgaagttgaagtttacactgaagacggtgcattcggtcgcggtatggtaccttcaggtgcttctactggtgaacatgaagcggttgaacttcgtgatggcgacaaatctcgctacaacggacttggtactcaaaaagctgttgacaacgtaaacaacatcatcgctgaagctatcatcggttatgaagttactgaccaacaagctattgaccgtgcaatgatcgctcttgacggtactgaaaacaaaggtaaattgggagctaacgctatccttggtgtttctatcgctgctgctcgtgctgctgctgatgaacttggtgttccactttacaactaccttggcggattcaacgctaaagtattgccaactccaatgatgaacatcatcaatggtggttctcactcagacgctccaatcgctttccaagaattcatgatcgtaccagttggtgcacctacattcaaagaagcgcttcgttggggtgctgaaatcttccacgctcttaagaaaattcttaaagctcgtggacttgaaacagctgtcggtgacgaaggtggattcgctcctaaattcgacggaactgaagacggtgtagaaactatccttaaagcaatcgaagcagctggttacaaagctggtgaagatggcgttatgatcggtttcgactgtgcatcatcagaattctacgaaaacggtgtttacgactacactaaattcgaaggtgaaggcggtaaaaaactttcagcttctgaacaagttgactaccttgaagaactcgtttctaaatacccaatcatcactattgaagatggtatggacgaaaacgactgggatggatggaaaatccttactgaacgtcttggtaaaaaagttcaactcgttggtgacgacttcttcgttacaaacactaaataccttgaacgtggtatccgtgaaaatgcttcaaacgctatcttgatcaaagttaaccaaatcggtactttgacagaaactttcgaagctattgaaatggctaaagaagctggtttcacagcaatcgtttctcaccgttctggtgaaactgaagattcaacaatctcagatatcgctgttgcaactaacgctggtcaaatcaaaactggttcactttcacgtacagaccgtatggctaaatacaaccaattgcttcgtatcgaagaccaattggctgaagtggctcaatacaaaggtcttaaagcattctacaaccttaaaaaataa

SEQ ID NO: 3954 - protein, 433 aa, Lactococcus lactis subsp. lactis [sequence omitted]

SEQ ID NO: 3955 - DNA, 1311 bp, Haemophilus influenzae
  misc_feature (96)..(96): n is a, c, g, or t
  CDS (1)..(1311)
atggcaaaaatcgttaaagtgattggtcgcgaaatcatcgactcacgcggtaatccaactgttgaagctgaagttcatcttgakggtggttttgtnggtttagcagcagctccatctggtgcatcaactggttctcgtgaagcattagaattacgtgacggcgacaaatctcgtttcttaggtaaaggcgtattaaaagctgtggcggcagtgaacaacgaaattgcacaagctatcgttggtaaagatgcaacaaaccaagctgaaatcgaccaaatcatgatcgatttagacggaaccgaaaacaaatctaactttggtgcaaatgcaatcttggcggtatctttagcaaacgcaaaagcagctgcagcatctaaaggtttaccactttacgcttacattgcagaattaaatggcactgctggtgtttattctatgccattaccaatgatgaacatcattaacggtggcgaacatgcagataacaacgttgatatccaagaattcatgattcaaccagttggtgcgaaaacattacgtgaagcacttcgtatcggtgctgaagtattccacaacttggcgaaagtattaaaagctaaaggcatgagcactgcagttggtgacgaaggtggtttcgcaccaaacttagcctctaacgcagacgctttagcctgtatcaaagaagcagtagaaaaagcaggttacgtattaggtaaagacgttactttagcgatggactgcgcatcttctgagttctataacaaagaaaatggtatgtacgaaatgaaaggtgaaggtaaatcattcacttctcaagaattcactcactacttagaagaattatgcaaagagtacccaatcgtgtctatcgaagatggtcaagatgagtcagactgggaaggttttgcataccaaactaaagtgttaggcgaccgcgttcaattagtgggcgatgatttattcgtcactaacaccaaaatcttaaaagaaggtatcgaaaaaggtatcgcaaactctatcttaatcaaattcaatcaaatcggttctttaactgaaactttagcagcaattaaaatggcgaaagatgcaggttacaccgctgtaatctctcaccgttcaggcgaaactgaagatgcaactatcgctgatttagcggtgggtacagcagcaggtcaaatcaaaactggttctatgagccgttctgaccgtattgcgaaatacaaccaattaatccgtatcgaagaagcattagaacgcgctggtactccagcagcattcccaggcttaaaagcggttaaaggtcaagcgtaa

SEQ ID NO: 3956 - protein, 436 aa, Haemophilus influenzae
  misc_feature (28)..(28): Xaa can be any naturally occuring amino acid
MAKIVKVIGREIIDSRGNPTVEAEVHLXGGFVGLAAAPSGASTGSREALELRDGDKSRFLGKGVLKAVAAVNNEIAQAIVGKDATNQAEIDQIMIDLDGTENKSNFGANAILAVSLANAKAAAASKGLPLYAYIAELNGTAGVYSMPLPMMNIINGGEHADNNVDIQEFMIQPVGAKTLREALRIGAEVFHNLAKVLKAKGMSTAVGDEGGFAPNLASNADALACIKEAVEKAGYVLGKDVTLAMDCASSEFYNKENGMYEMKGEGKSFTSQEFTHYLEELCKEYPIVSIEDGQDESDWEGFAYQTKVLGDRVQLVGDDLFVTNTKILKEGIEKGIANSILIKFNQIGSLTETLAAIKMAKDAGYTAVISHRSGETEDATIADLAVGTAAGQIKTGSMSRSDRIAKYNQLIRIEEALERAGTPAAFPGLKAVKGQA

SEQ ID NO: 3957 - DNA, 1245 bp, Campylobacter jejuni
  CDS (1)..(1245)
atgttagtaattgaagatgttagagcctatgaagttcttgatagtagaggaaatccaaccgtaaaagccgaagttacgctaagcgatggaagtgtaggtgcggccatagttccaagtggtgcaagtacaggttcaaaagaagccttagaattgcgtgataatgatgaaagatttggcggaaaaggcgttttaaaagctgttgcaaatgtcaatgagaccattgcagatgaaattttaggactagatgcttttaatcaaactcaacttgatgatactttgcgtgagctcgatggaacaaataattactcaaatttaggtgcaaatgcgactttaggcgtatctatggcaacagctcgtgcggctgcagctgctttgggaatgcctttatatcgctacttaggtggtgcaaatgcgagcattttacccgtgccaatgtgtaatatcataaatggcggtgctcatgcaaacaacaatgtagattttcaagaatttatgatcatgccttttggttttactagctttaaagaagctttgcgttcagtttgtgaaatttatgcgatattaaaaaaagaactcgcaaattctggacattctacggctttaggtgatgaaggcggttttgctccaaatttagctaacaacacagaacctatcgatcttttaatgacttgtatcaaaaaagcaggttatgaaaatcgtgtaaaaattgctcttgatgtggcaagtacagaatttttcaaagatggtaaataccacatggaaggcaaggctttttcaagcgaggctttgatcgaacgctatgtagaactttgtgcaaaatatccaatttgcagtatcgaagatggcttagctgaaaatgactttgaaggctggatcaagctgactgaaaaattaggcaataaaattcagcttgtaggcgatgatttgtttgtgaccaatgaagatattttaagagaaggtatcatcaaaaaaatggcaaatgctgtacttatcaaaccaaatcaaatcggaactattacccaaactatgagaactgtgcgtttagcgcaaagaaataactataaatgtgtgatgagtcatagaagcggcgaaagtgaagatgcttttatagcggattttgctgtggctttaaatacaggacaaattaaaacaggagccctagcaagaggcgaaagaaccgcaaaatacaatcgcttacttgaaattgaatttgaaagcgatgaatatttaggagaaaagctctga

SEQ ID NO: 3958 - protein, 414 aa, Campylobacter jejuni [sequence omitted]

SEQ ID NO: 3959 - DNA, 1275 bp, Chlamydia muridarum, Chlamydia trachomatis MoPn
  CDS (1)..(1275)
atgtttgatgttgtcatctccgatatagaagctagagaaattttagattcccgagggtatcctaccttgtatgttaaagtcattactaatacaggaatctttggagaagcttgtgttccttctggagcatctacaggcattaaagaagctttagaacttcgtgaccaagatcctaaacgctatcaaggaaaaggagttctacaagcagtcgctaatgtggaaaaagttctattacctgccctacaagggttcagtgtttttgatcaaatcacagcagacgctattatgatcgatgctgatggcacctctaacaaggaaaaattaggcgccaatgcgattcttggggtttctttagcattagcaaaggctgctgctgcaactttagagagacctttataccggtatttgggaggagctttctcgcatgttctcccttgcccaatgatgaacctcattaacggtggcatgcatgcaacaaatggcctccaatttcaagaatttatgatccgtcctattagcgctccttccctaacagaagctgtgcgcatgggagcagaagtttttcacactttgaaaaaaatcttacaaaatcggcaactttctacaggagtcggagatgaaggcggattcgctccccaactcgcttccaattcagaggcgcttgaccttctcttggctgctattgaaaaggctggctttatccctggagaggatatttctttagctcttgattgcgcagcttcctcgttttacaatactcaggataaaacttatgatggcaagtccgctgcagatcaagttgctgtactcacagaattatgcgatcgctatcctatagattctatcgaagatggccttgctgaggaagattttgaaggctggaagcttttatcagaaactttaggagatcgcattcaattagtaggagatgatttatttgtcacgaactctgctttgattgccgaaggaattgcgcaaggcctagctaatgccgttcttatcaaacccaatcagatagggacgcttacagaaacagcggaggctatccgcttagcaactacgcagggctatgcgaccatcctatctcacagatcaggagaaacagaagacaccacaatcgcagatcttgcggttgcctttaacacagggcaaattaaaacaggctctctctctcgttccgagcgtattgctaaatacaaccgcttgattgctattgaagaagaaataggcccagaagctgtatttcaagattccaatcctttttctaaagcataa

SEQ ID NO: 3960 - protein, 424 aa, Chlamydia muridarum, Chlamydia trachomatis MoPn
MFDVVISDIEAREILDSRGYPTLYVKVITNTGIFGEACVPSGASTGIKEALELRDQDPKRYQGKGVLQAVANVEKVLLPALQGFSVFDQITADAIMIDADGTSNKEKLGANAILGVSLALAKAAAATLERPLYRYLGGAFSHVLPCPMMNLINGGMHATNGLQFQEFMIRPISAPSLTEAVRMGAEVFHTLKKILQNRQLSTGVGDEGGFAPQLASNSEALDLLLAAIEKAGFIPGEDISLALDCAASSFYNTQDKTYDGKSAADQVAVLTELCDRYPIDSIEDGLAEEDFEGWKLLSETLGDRIQLVGDDLFVTNSALIAEGIAQGLANAVLIKPNQIGTLTETAEAIRLATTQGYATILSHRSGETEDTTIADLAVAFNTGQIKTGSLSRSERIAKYNRLIAIEEEIGPEAVFQDSNPFSKA

SEQ ID NO: 3961 - DNA, 1302 bp, Vibrio cholerae
  CDS (1)..(1302)
atgtctaagatcgttaaagttctaggtcgtgaaatcatcgactcacgtggtaacccaacggtagaagcagaagttcatctagaaggtggtttcgttggtatggcagcagctccatctggtgcttctactggttctcgtgaagcgcttgaactgcgtgacggtgacaagtctcgtttcctaggtaaaggcgttctgaaagcgctggctgcggttaatggtccaattgcagacgctctggttggcaaagatgcaaaagatcaagcaactattgaccaaatcatgatcgacctagacggtactgagaacaagtcaaacttcggtgcaaacgcgattctagcggtttctctagcaaacgcgaaagcagcagcggcagcaaaaggcatgcctctgtacgagcacatcgctgagctgaacggcactcctggcgtattctcaatgcctctaccaatgatgaacatcatcaacggtggtgagcacgctgacaacaacgtagacatccaagagttcatgatccaacctgttggcgcaaaaactctgaaagaagcagtacgtatgggcgcagaagtgttccataacctagctaaagtactgaagtctaaaggctacaacactgcagtgggtgacgaaggtggtttcgctcctaacctgaaatctaacgcagaagcgctagaagttatcgctgaagcggttgcggctgcaggttacaaactgggtactgacatcacactagcgatggactgtgctgcttctgagttctacgacgcagagaagaaagaatacaacctgaaaggcgaaggtcgtatcttcacttctaacggtttctctgatttcctagaagagctgactgagaagttcccaatcgtttctatcgaagacggtctggacgagtctgactgggaaggtttcgcataccaaactgagaaactgggtaagaaaatccaaatcgttggtgacgatctgttcgtaacaaacaccaagatcctgaagcgtggtatcgacaacggtatcgctaactctatcctgatcaagttcaaccaaatcggttctctgactgaaactctggctgcgatcaagatggcaaaagatgctggctacactgcagttatctctcaccgttcaggcgaaactgaagatgcaactatcgctgacctagcggtaggtactgctgcaggtcaaatcaagacgggttctatgagccgttctgaccgtgttgctaagtacaaccaactgatccgtatcgaagaagcactgggttcacgtgctcctttcaacggtctgaaagaagtgaaaggccaagcttaa

SEQ ID NO: 3962 - protein, 433 aa, Vibrio cholerae
MSKIVKVLGREIIDSRGNPTVEAEVHLEGGFVGMAAAPSGASTGSREALELRDGDKSRFLGKGVLKALAAVNGPIADALVGKDAKDQATIDQIMIDLDGTENKSNFGANAILAVSLANAKAAAAAKGMPLYEHIAELNGTPGVFSMPLPMMNIINGGEHADNNVDIQEFMIQPVGAKTLKEAVRMGAEVFHNLAKVLKSKGYNTAVGDEGGFAPNLKSNAEALEVIAEAVAAAGYKLGTDITLAMDCAASEFYDAEKKEYNLKGEGRIFTSNGFSDFLEELTEKFPIVSIEDGLDESDWEGFAYQTEKLGKKIQIVGDDLFVTNTKILKRGIDNGIANSILIKFNQIGSLTETLAAIKMAKDAGYTAVISHRSGETEDATIADLAVGTAAGQIKTGSMSRSDRVAKYNQLIRIEEALGSRAPFNGLKEVKGQA

SEQ ID NO: 3963 - DNA, 1281 bp, Aquifex aeolicus
  CDS (1)..(1281)
atgtcaaggataaaaagggttcacggaagagaagttcttgactccagaggaaaccctaccgttgaggtggaggtggaattagagagcggagccctcggaagggctatagtcccgagcggtgcttcaacgggtgaaagggaggctttagagctcagggacggagaccccaaaaggtatctggggaagggagttttaaaggcggttgacaacgtaaacggagttatagcaaaggcactggtgggacttgagccctacaaccagagggagatagaccagatacttatagaacttgacggaacggagaataaaagcaaacttggggcgaacgccatcctcggaacgagcatggccgtggcaagggctgcggcaaacgaactgggaattcccctatacgaatacctcggagggaagttcggttacagacttcccgttcccttgatgaacgttataaatggtggagcccacgcggataacaacctagacattcaggagttcatgatcgttccggtgtgcggaggagctttcagggaagccctgagggcaggagtggagaccttccaccatctcaagaaaatactgaaggagaagggatactcaacgaatgtgggagacgagggcggatttgctccgaacctaaattcctccgaggaagctttagatatactaatgcaggctatagaaaaggcgggctacaaacctggtgaggacattctcctcgcacttgacgttgcatcttcagagttttacgaaaacggagtttacaagtttgaaggaaaggaaagaagtgctgaagaaatgatagagttctacgaaaagttaatacagaagtacccgataatttcaatagaagacccgatgagtgaaaacgactgggagggctggaaggagataacaaaaagactcggggataaagttcagctcgtgggagacgacctcttcactacaaacccgaaaatcttgaggaagggtatagaggaaggagttgcaaacgcaatcttagtgaaactgaaccagatagggactgtttctgaaaccctggacacggtaatgctcgcaaaggaaagaaattactcagcaataatctcccaccgttccggagaaacagaagacaccttcatctctcaccttgcggtggcgacgaacgcgggtcagataaaaacgggttctgcttccagaacggacaggatagcgaagtacaacgaactgttaaggatagaggagagactgggaaatggagcagtcttctggggaagggaagagttctacaggttcacttcctaa

SEQ ID NO: 3964 - protein, 426 aa, Aquifex aeolicus [sequence omitted]

SEQ ID NO: 3965 - DNA, 1287 bp, Pyrococcus horikoshii
  CDS (1)..(1287)
atggaaaacccatatgaaattactgctatcgttgcaagggagatacttgacagtagggggaacccaacggtagaggttgatgtccatactcctattgcaatgggaagggccgcagtcccaagtggtgcttcaactggaactcatgaagccgttgaacttagagatgggggaaagaggtatcatggaaagggagttaggcgagcagtagaaaatgtaaacaagataatagctcctgaattaataggaatggacgttagatggcagagagaaatagataagctgctaatagagcttgatggtactgaaaacaaaagcaatctaggagcaaatgcaattcttgcagtttccttagccgttgcaaaagcagctgccaattcgctagaattaccgctgtatcaatatctcggaggcgttaacgcttatgttcttccagtaccgctgagcaacgtaataaatggcggggttcatgccgggaacgaattagacttccaggagtttatgataatgcccataggagctagctcatttagggaagctataaggtgggtttcagaaacatatcatgtcctaaagagggtgatcatggggaagtatggaaagaatgcggtaaacgttggagatgaaggtggatttgcaccaccgatgaaggaagttacggaacccttggatgcactaataaaggcaatagaggaggccggctacaaacctggagatgaaatagcccttgcaattgatgcagcatccagcgagttcttcaaggatggaaagtacattgtaggaggaaaggaatacacgagggaggagttacttgacctatacaaagagctcgtatcgacatatccaatagtctcaatagaagatccgttccacgaggaagattgggaaggattcgtgatgataaccaatgaactcggaaagaagatccagatagttggtgatgacctcttcgttacaaatccaagaagacttaagaaaggtatagaactaggagctgcaaacgccctattgctaaaggtgaatcagatcggtacattaacagaagctatggatgcagcttacacagcatttagagctggatacagtgtaatagtttcccatagaagtggagaaactgaagatactacgatagctgacttagcggttgccctcaacgctggacaaattaaaactggagctccggcaagaagcgataggaacgctaagtacaatcagctcataaggatcgaagaggagcttgaaggaatagcagtttacgccggcaagaactttaggaaggttttcttctga

SEQ ID NO: 3966 - protein, 428 aa, Pyrococcus horikoshii
MENPYEITAIVAREILDSRGNPTVEVDVHTPIAMGRAAVPSGASTGTHEAVELRDGGKRYHGKGVRRAVENVNKIIAPELIGMDVRWQREIDKLLIELDGTENKSNLGANAILAVSLAVAKAAANSLELPLYQYLGGVNAYVLPVPLSNVINGGVHAGNELDFQEFMIMPIGASSFREAIRWVSETYHVLKRVIMGKYGKNAVNVGDEGGFAPPMKEVTEPLDALIKAIEEAGYKPGDEIALAIDAASSEFFKDGKYIVGGKEYTREELLDLYKELVSTYPIVSIEDPFHEEDWEGFVMITNELGKKIQIVGDDLFVTNPRRLKKGIELGAANALLLKVNQIGTLTEAMDAAYTAFRAGYSVIVSHRSGETEDTTIADLAVALNAGQIKTGAPARSDRNAKYNQLIRIEEELEGIAVYAGKNFRKVFF

SEQ ID NO: 3967 - DNA, 1681 bp, Treponema pallidum subsp. pallidum (syphilis spirochete)
  CDS (207)..(1505)
attgatggttcccattgcgtatcgagaatagatataacgcgccgttgcaatactccgttggaataccgaggcggttggtacagttactttctctgtggtgttctcagtgggaagggagcgcggcgtgcgggggcgatagagagagtggaaaacctttacgcattttttttcgcgtgttaccatgcgcccacatcaggaggtcttaaatgagtgacattgcatgcattgaagcgcgcgagatcatcgattctcggggaaaccccactgtcgaagtggatgtctcgctcagtgacggtagctttggccgtgcgtgtgttccttcaggggcgtctaccggagagttcgaggcgctcgaaatgcgtgatggagacaaggagcgctataacggtaagggtgttctcaaggccgttggaactgtcaacacgctcattgctgatacgctcgaaggtatggatgcgctcaaccagggtgagatagatcacgcgatgcggaatctggacggcactgacaataagtcaaagcttggtgcgaatgctatgcttggcgtctccatggcttgtgcgcgtgctgctgcagactttctgggtgttcctctctaccgttacctcggtggtgtgcacacttttcgcatgccggtccctatggccaacattatcaatggggggaagcattctgataataaaattgactttcaagagtttatggttatgcccatcggcgctgcgtccatgcgcgaagcggtgcgcatgaccgcagaggtgttccacgcgttaaagggcctgcttgccgccgacggcaaagctacgtcagttggtgatgaaggtggttttgcgcctgatttggataacgagcaagcccttgagtacattatgaaagcgatcgcaaaagccggccttgcgccgcggaaggatgtgtgtattgcgcttgactgtgcgtcttctgagttattcgatgaaggagatcggagagggtacaagttttggaagtcgaatccggggaagctgttcacagcacaggaaatgattgatctgtacaagaagtggattgctacgtatccgattgtgtctatcgaggatccgcttgaccaaaacgactgggcaggttacgtgcagctcacgaaagagttgggagacaaagtccaaattgtgggagatgatttttttgtaaccaacactgggcgtctggcccgaggtatcaaagaaggatcgtgcaattcgattctgataaaacttaatcagattggcacggtcacagaaactgtcgacgcggtgcgtatggctcagaacgcaggctacgcggcggtgatttcacatcgctcgggtgagacagaggatgcgtttatcgcagacttagcagtggcacttgagacaggtcaaatcaaaaccggctcgatgagtcgcagtgaccgggtggcgaagtataaccagttgatgcgcattgaggaagagttgggtgcacaggcgcgctactacggggcaaagacctttgagcggtttggttgttagcttgtaaggtgcgaggaactctataagaagttggggtacggggcagagaacgcaggactccgtgtcgtttcttctttacttcctggcggaatggttgctggtctttctgctgtgaggacgcttttatcttcgccaggatgtgttttatactcccgcgtatgggcgcgggagttttc

SEQ ID NO: 3968 - protein, 432 aa, Treponema pallidum subsp. pallidum (syphilis spirochete) [sequence omitted]

SEQ ID NO: 3969 - DNA, 1371 bp, Mycoplasma pulmonis
  CDS (1)..(1371): transl_table=4
atgtcagaaatcgttaaaattaaagcacttgaagttctagactcaagaggaaatccaacaatccaagttgaagttcatactatttcaggggcctatggaaaagcccttgttccttcaggagcctctactggttcaagagaggctcttgaactaagagatgaatcaacaaaatacaaagataattgatatgcttctaaaggtgtacaaaaagcagttgataatgttaataacaaaatcgcagatttacttattgggcaaaatgttcttgatcaaagaaacattgacaacataatgattgaagctgatggaacagaaaataaatcaaaatttggagcaaatgctattttaggtgtttctttagcagctgctcatgcaggggctaattttttacaaatccctctttatagatacattggaggaattaatgccaacatgcttcctcttccaatgttaaatgttatcaatggaggagagcatgcttcaaataccattgatttccaggaatttatgattatgccaatgggggcaaaaacttttaaagaatcccttcaaatggcaaacaaagttttccataatttagctaaattactaaaaaaagcaggtcatggaactcaagtaggtgatgaaggtggttttgcacctaatttaaaaaaccatgaggaagttttagactttttaatgcaagccattgaagttgcaggttttgttgcttcaacttcaaaagaaaaaggaatagcaatagccatcgatgcagctagttctgagttatatgatcaaagcacaggaaaatatacattcaaaaaattaaaacaagctattaaaacaaaacaaccaggttttgaaaatgttgaaaaaacaaaattagattttacaagtgatgaacttattgcttattatggagagttaatttctaaatatccaataatttcaattgaagatggttttgcagaaagtgattgacaaggttttgctaaatttacaaaaatatatggtgaaaaactacaaattgtcggagatgatttaacagttacaaattcaaaaattcttgaaagagctattaaagaaaaatcaatgaattcaattttagttaaactaaaccaaattggaagtctttctgaaacccttgatactatcaacatggctcataaagcaggttttagcgctgttatttcacatcgttcaggagaaacagaagatactaccatagcagatcttgctgttgctttaaatactggtcaaattaaaacaggatcactttcaagaactgatagaattgcaaaatacaatcgccttcttgaaatagaagatcaacttgaagaagcagctgttttccctggaaaaaaagcattttgaaatttaaaaaatagataa

SEQ ID NO: 3970 - protein, 456 aa, Mycoplasma pulmonis [sequence omitted]

SEQ ID NO: 3971 - DNA, 1290 bp, Thermotoga maritima
  CDS (1)..(1290)
atgtacgtggaaatcgtggatgtaagagcaagagaggttctggattcgagaggaaaccccaccgttgaagcggaagtcgtgcttgaagacggaacaatgggaagagccatcgtaccctctggtgcctcaacgggaaaattcgaagccctggaaatcagagacaaagacaagaagagatacctcgggaaaggtgttctgaaagcagtagagaacgtgaacgaaaccatagctcctgcactgatcgggatgaacgcattcgaccagccactcgttgacaagacattgatagaactggacggcaccgaaaacaaatctaaactgggtgccaacgccatactcgccgtttctatggcagttgccagagcagcagcgaattaccttggattgcccctctacaaataccttggaggagtcaacgcgaaggttctgccagtacctctgatgaacgtgatcaacggtggacagcacgcagacaacaatcttgaccttcaggaattcatgattgttcccgccggatttgacagcttcagagaagctttgagggcaggagcggaaatattccacacgttgaaaaagatactccacgaagccggtcacgtgacagcggtcggagacgagggtggattcgctcccaatttgtcttccaacgaggaagccataaaagttctgattgaagccatagagaaagcaggctacaaacccggagaagaagttttcatagctctcgactgtgcggcatcttccttttacgatgaggaaaagggagtttactacgtcgatggtgaggaaaaatccagcgaagttctcatgggatactacgaagaactggtggcgaagtaccccatcatatccatcgaagatccgttcgcggaggaagactgggatgcatttgtggaattcacaaagagagtaggaaacaaggttcagatcgttggagatgacctttacgtgaccaacgtgaaaagactttccaaaggaatagaactcaaagcgaccaactccatactcatcaaactcaatcagataggcaccgtcacggaaactctcgacgcggtggagatggcacagaagaacaacatgacagccatcatttcccacagatccggagagagtgaagacacgttcatcgcagaccttgccgtggcaacgaacgctggtttcatcaagacaggttccctctccaggagcgaaaggatagccaagtacaaccagcttttgagaatcgaggaagaactcggaaaagtggcagaattcagaggtttgaaatctttctactctataaagagataa

SEQ ID NO: 3972 - protein, 429 aa, Thermotoga maritima [sequence omitted]

SEQ ID NO: 3973 - DNA, 1287 bp, Chlamydophila pneumoniae, Chlamydia pneumoniae
  CDS (1)..(1287)
atgtttgaagctgtcattgccgatatccaggctagggaaatcttggattctcgcgggtatcccactttacatgttaaagtaaccactagcacaggttctgttggagaagctcgggttccttcaggagcatccacagggaaaaaagaagccttagagtttcgtgatacagattctcctcgttatcaaggcaaaggggttttgcaagctgtaaaaaacgtaaaagaaattctttttcccctcgtcaagggatgtagtgtttatgagcaatccttaattgattctctgatgatggattctgacggctctccgaacaaagaaactctaggggccaatgctattttaggagtctctctagctacagcacatgcagcagcagcaacactacgcagacctctgtatcgttatttaggagggtgttttgcctgcagtcttccctgtcctatgatgaatctgatcaatggaggcatgcatgccgataacggcttggggttccaagaatttatgatccgtcctattggagcctcttccatcaaagaagctgtcaacatgggtgctgacgtttttcatactttgaaaaaattactccatgaaagaggcttatctactggagtgggtgacgaaggaggcttcgccccgaatcttgcttctaatgaagaagctctagagctcctattgctggctattgaaaaagcaggctttactccaggaaaagatatatcgctagccttagactgcgcagcatcctcattctataacgtaaaaacaggcacgtatgatgggaggcactatgaagagcaaatcgcaatcctttctaatttatgtgatcgctatcctatagactccatagaagatggtcttgctgaagaagactatgacgggtgggccttgttaactgaagttcttggagaaaaagtacagattgtgggtgatgacctatttgttacaaatccggaattaatattagagggtattagcaatggattagcgaactctgtgttgattaaaccaaatcagatagggacgcttactgaaacagtgtatgctatcaagcttgcgcaaatggctggctatactacaattatttctcatcgctcaggagaaactacggacactacgattgcagatcttgctgttgccttcaacgctggtcaaatcaaaacaggctctttatcacgttctgagcgtgttgcaaaatacaatagactcatggaaattgaagaagagcttggatccgaagcaattttcacagattctaatgtattttcttacgaggattctgaggaatag

SEQ ID NO: 3974 - protein, 428 aa, Chlamydophila pneumoniae, Chlamydia pneumoniae [sequence omitted]

SEQ ID NO: 3975 - DNA, 1459 bp, Arabidopsis thaliana (mouse-ear cress)
  CDS (1)..(1428)
atgtctgtgcaagagtatttagacaagcatatgctttctcggaaaatcgaagacgccgttaatgccgccgtaagggctaaaacctcagatcccgttctcttcatcgctaatcatctgaagaaagctgtatcatctgtgataacgaaggttaaagcacgacagatccttgacagcagaggaattccaacagttgaagttgatctgcacacgaacaaaggcgtttttcgtgcttctgttcccagtggtgattcttctggaacgtatgaagctattgagctacgtgatggagacaaaggaatgtatcttggaaacagtgtggctaaagctgttaagaacataaatgaaaaaatttctgaggcgttgattggtatggacccaaaacttcagggtcagatagatcaggctatgatagatttggataaaactgaaaagaagagtgaacttggtgctaatgctatacttgctgtgtcaattgcggcatgcaaggctggagctgctgagaaagaggtccctttgtgcaagcatctttctgatcttagtggcagagcaaacatggtgttacctgtacctgcgttcactgttttgagtggtgggaagcatgcttcgaatacttttgccattcaggaaattatgattctcccaattggagcaagtagatttgaggaggccctgcaatggggatctgagacatatcatcatttaaaggctgtcatttcagaaaagaatggtggtttgggatgtaatgttggtgaagatggtggtcttgctccagatatctcgagcctcaaggaaggtttggagcttgtaaaagaagctatcaaccgaacagggtacaatgataagataaagatagccattgatattgccgccactaatttttgtttaggtaccaagtatgatttagatatcaagtctccaaataaatctgggcaaaatttcaagtcagcggaagatatgatagatatgtacaaagaaatttgtaatgattatccaattgtgtctatagaggacccttttgacaaggaggactgggaacacaccaagtatttttcgagtcttggaatatgtcaggtggtaggtgacgatttgttgatgtcaaattcaaaacgagttgagcgtgccatacaggagtcttcttgtaatgctcttcttctcaaggtgaatcagattggtacagtaacagaagccattgaagtagtgaaaatggcaagggatgcccagtggggtgtggtgacatctcatagatgtggagaaacagaggactctttcatctctgacttatctgtgggtctcgcaacaggtgtgattaaagctggtgctccttgcagaggagaacgtactatgaagtataaccagttgctacggatagaggaagagcttggggatcaagcagtgtatgctggagaagattggaagctatctctctaaacaaaatgcacatgtgatattaattgttaca

SEQ ID NO: 3976 - protein, 475 aa, Arabidopsis thaliana (mouse-ear cress)
MSVQEYLDKHMLSRKIEDAVNAAVRAKTSDPVLFIANHLKKAVSSVITKVKARQILDSRGIPTVEVDLHTNKGVFRASVPSGDSSGTYEAIELRDGDKGMYLGNSVAKAVKNINEKISEALIGMDPKLQGQIDQAMIDLDKTEKKSELGANAILAVSIAACKAGAAEKEVPLCKHLSDLSGRANMVLPVPAFTVLSGGKHASNTFAIQEIMILPIGASRFEEALQWGSETYHHLKAVISEKNGGLGCNVGEDGGLAPDISSLKEGLELVKEAINRTGYNDKIKIAIDIAATNFCLGTKYDLDIKSPNKSGQNFKSAEDMIDMYKEICNDYPIVSIEDPFDKEDWEHTKYFSSLGICQVVGDDLLMSNSKRVERAIQESSCNALLLKVNQIGTVTEAIEVVKMARDAQWGVVTSHRCGETEDSFISDLSVGLATGVIKAGAPCRGERTMKYNQLLRIEEELGDQAVYAGEDWKLSL

SEQ ID NO: 3977 - DNA, 1296 bp, Clostridium acetobutylicum
  CDS (1)..(1296)
atgaaatcatatgttgaaattgttgacgtaatggcaagacaaatcttggattcaagggctaatcctactgtcgaagtagaggttgttcttgaagacggaacagtaggaagagcgtcagtaccttcaggagcatccacaggacagtttgaagctgtcgaacttagagacaacgataaagctcagtacttaggaaaaagtgttctcaatgctgttgacaatgtaaatgagacaatagcaacagagcttataggaatgaatgtatttgaccagacattaattgatcagacaatgcttgaaattgatggaacggaaaataagtcaaagcttggtgcaaatgcaatgcttggagtatcacttgcagtagctagagcagcagctgaatacctaggaattagtctttatcaatatcttggaggagttaatgctaaagttcttccagttccaatgatgaatattgtaaatggaggaaagcatgcagataacaatgttgatttccaagaatttatgataatgccagcaggagctccaagctttagcgaagcccttagatcatgcgcagaggtttatcacactttaaaatctttactacaatcaaaaggacttgaaacagctgttggagatgaaggcggatttgcaccaaatcttaatagtaatgaagaagcaatacaaattattttggaagctgtaactaaggcgggatatgagccaggaaaagatatgtttatagcaatggaccctgcttcaacagaattttatgagaacggaaaatacaatcttaagggcgaaggtaaggtttatacttcagaagaaatggttgaagtttacgcaaatttagtggaaaaatatcctataatatcacttgaagatggtatggctgaagaagattgggatggatggaagctgttaactgacagaatcggagataaagttcaattagtaggagacgatttatttgttacaaatactaagagactttcaaagggaatacagcttggagtagctaattcaatactcataaagttaaaccaaataggaactcttacagaaactttaaatgcaatagaaatggcacaaagagctggatatacagcagtagtttctcatagatcaggagaaacagaagatactacaatttcagatcttgttgtagctgtaaacgcaggacagataaaaacaggagcaccagcaagaacagaaagagttgcaaaatataaccaacttcttagaatagaagaggaacttggcgaagttgctgaatttagaggtttaaatgccttctacaatataaaaaaataa

SEQ ID NO: 3978 - protein, 431 aa, Clostridium acetobutylicum [sequence omitted]

SEQ ID NO: 3979 - DNA, 1302 bp, Borrelia burgdorferi (Lyme disease spirochete)
  CDS (1)..(1302)
atgggttttcacatttatgaaatcaaagccagacaaatcattgattctagagggaatccaacagttgaagctgatgtcattttagaagatggaacttacggaagagctgccgtaccatcaggtgcatcaacaggaattaacgaggctgttgagcttagagatggtgataagtctgtatatatgggaaaaggggttttaaaggcaattgaaaatataaaaaacataattgccccagaacttgaaggtatgagtgccttaaatcaggttgcaatcgacagaaaaatgcttgaacttgatggcacccctacaaaagaaaagcttggtgctaatgcaattttagcagtttcaatggctacagctaaagctgctgcaaagtaccttggacttaggccttatcaatatcttggagcgtacaaagccaacattttgcctacacctatgtgtaatattattaatggcggtgcacactctgacaactctgttgactttcaggagttcatgataatgccaataggagcaaaaacattcagtgaagcaataagaatggcagcagaggtttttcatacgctaaagggcattctaagtggcaaagggtatgcaacttctgttggagatgaagggggatttgctccaaatttgaaatcaaatgaagaagcttgtgaagtgattatagaggcaataaagaaggcaggatatgaacctggaaaagacattgcaatagctcttgatcccgcaacatctgagctttatgatccaaaaacaaaaaaatacgtacttaaatggtcaacaaaagaaaaacttacttccgaacaaatggttgaatattgggcaaagtgggtagaaaaatatccaatcatttcaattgaagatggaatggctgaagaagattgggatggatggaaaaaacttacagacaaaattggaaacaaaatacaacttgttggagatgatttatttgtaacaaatacctcgtttcttaaaaaaggaattgaaatgggagttgccaattcaatccttattaaggtcaatcaaattggaacactaacagaaacatttgaggctgtagaaatggctaaaaaagcgggttacacagcaatagtctctcacagatcgggagaaacagaagatacaacaatagctgatcttgtagtagctcttggaacaggacaaatcaaaactggttcactctcaagaacagatagaatagcaaaatacaatcaactcataagaatagaggaagaattggaaacaactgctgaataccacggtaagagcgtcttttattctattaaacaaaaataa

SEQ ID NO: 3980 - protein, 433 aa, Borrelia burgdorferi (Lyme disease spirochete) [sequence omitted]

SEQ ID NO: 3981 - DNA, 1281 bp, Helicobacter pylori
  CDS (1)..(1281)
atgctaaccattaaagatattcatgctttagaagtgatggatagtaggggcaatcctaccattcaagccagcgtgattttaagcgataacactaaggcgagcgcgattgtgcctagcggggcgagcaccggtaaaagagaagcgttagaattaagggataatgacaaaacccgttttttgggtaaaggggttttaagggcatgcgaaaatgtcaatagcgtgatcaaacaccatttgatagggcttgaagcgactaatcaggcctttgtagatgagaggttaagggctttagacggcacgcctaattacgctaatttaggggcgaacgctgttttgggcgtttctatggcgttagcaagggctagcgcgaaggctttaaatctgccattataccgctatttagggggggctaacgctttgactttgccggtgccgatgctcaatatcatcaacggcggaacgcatgcgaacaattccatagacttccaagaatacatgatcatgcctttagggtttgagagttttaaagaagctttaagagcgagtgcggaagtctatcacacgcttaaaaaacttttagatgaaaagaatcagctcacaagcgtgggcgatgaggggggctttgcgcctaattttaacaacaatgtagaacctcttgaaatcatttctcaagccattgaaaaagccggctataaattaggtgaagaaatagcgctcgctttagatgtggcgagcagtgagttagtggatgaacatttcaattaccatttaaagggcgaaaataagattttagattcgcatgaattagtggcttattataaagagttggtggcaaaatacccgattgtgtccattgaagatggtttgagcgaagacgattgggagggttgggcgtttttaagcaaggaattagggcgtcaaatccaattagtgggcgatgatttgtttgtaacgaacgcgagcatcttgcaaaaaggcattgaaaaaaacgttgcaaacgccattttgatcaaacccaatcaaatcggcaccattagtgaaactttagagaccataagattggccaaacaccatgcctatcaatgcgtgataagccatagaagcggggagagtgaagacagctttatcgctgattttgcggtcgcattgaatacgggagagattaaaaccggatccaccgcaaggagtgaaaggatcgctaaatacaaccgccttttggagattgagcatgaattaaaaggggggatttatatcggcaaagagttgtttaagcatggctag

SEQ ID NO: 3982 - protein, 426 aa, Helicobacter pylori [sequence omitted]

SEQ ID NO: 3983 - DNA, 1323 bp, Ureaplasma urealyticum
  CDS (1)..(1323): transl_table=4
atgaaaataattaatttattagcttatcaaattcttgattcgcgcggccaaccaacagtagctgttaaattatttttagagaacgatcaaagtgtaattgcaatggttccatcaggcgcttccactggagcaaaggaagcattagaattaagagatggtgatgtaaattatttttttaataagtctgttaaattagcaattcaaaatattaataatattattcgccctcatctaattaataaaaatgttttaaatttttttgaattagataatttattaattaatctagatggtactgaaaataaaagtaaattaggtgctaatgctttattaggtgtttctatagcgattgttaaagcgggagcaatagccgcttctaaacctttatatcaatatattaaagaagacttaatgcataattatgatgtaaactattatgctccaattccgttaatgaattttattaatggtggggctcacgcagataatgatttagatattcaagaatttatgattgttccattaaatgcaatttcattttctcaagcgattcaaattggatcagaaatttttcatcaattagataaacttttaaaaagcaatcatttaagtacaacaaagggtgatgaaggcggttttgctccaatgttaaaaaataattatgtgactttagaactattagttcatgctattaaaaaagcacattaccttccttcaaaaacacaaggagtttgtcttgccttagatgtcgcagcttctgaattgtatgaaaacggaaaatatttttttaaaaagtcttcatctcataacattactcttgaacaaacatcattcagtagtgatgaatgaataaagtattgaagtaaattagtatctatgtttcctatcatttcgatcgaggattgttttgaggaaaacgattgaaatagttttgcgttatttttaaaaaataacccacacattcaagtggttggtgatgatttatattgcacaaacttaaagtatctacaaaaaggaattgattttaaagcaacaaatgctattttaattaaacctaatcaaattggtacaattagtgaaacgttagatgttattaaatttgcacaaaaaaacaatattaatactatcatttcgcatcgctctggcgaaactgaagacacttttattgcagatttagcgattggtgtaggtgctgggcaaattaaaacaggttcattatcacgttctgaacggatagcgaagtataatcgtattttagaaatcgaacaagaattaaaggataaattaatttatgaaccaagtaaattttttaaatttagataa

SEQ ID NO: 3984 - protein, 440 aa, Ureaplasma urealyticum [sequence omitted]

SEQ ID NO: 3985 - DNA, 1290 bp, Pseudomonas aeruginosa
  CDS (1)..(1290)
atggcaaagatcgtcgacatcaagggccgtgaggtcctggactcccgcggcaaccctaccgttgaagcggacgtgatcctggacaacggcatcgtcggcagcgcctgcgcgccttccggtgcttccaccggttcccgcgaggccctcgagctgcgcgatggcgacaagagccgttacctgggcaagggcgtgctgaaagccgtggccaacatcaacggcccgatccgcgacctgctgctgggcaaggacgcggccgaccagaaagccctcgaccacgcgatgatcgagctggacggcaccgagaacaaggccaagctgggcgccaacgcgatcctcgcggtgtccctggctgccgccaaggccgccgcacaggccaagggcgtaccgctgtacgcgcacatcgccgacctcaacggcactcccggccagtactccatgccggtgccgatgatgaacatcatcaacggcggcgagcatgcggacaacaacgtcgatatccaggaattcatggtccagccggtcggcgcgaagaacttcgccgaggcgctgcgcatgggcgccgagatcttccatcacctcaaggccgtgctgaaggcccgtggcctgaacaccgccgtcggtgacgaaggcggcttcgcgccgaacctgtcgtccaacgaagacgccctggccgccatcgccgaggccgtcgagaaggccggctacaagctgggcgacgacgtgaccctggccctggactgcgcctccagcgagttcttcaaggacggcaagtacgacctggaaggcgaaggcaaggtattcgacgccgccggtttcgccgactacctggccggcctgacccagcgctacccgatcatctccatcgaggacggcatggacgagtccgactgggccggctggaaaggcctgaccgacaagatcggcgccaaggtccaactggtcggcgacgacctgttcgtgaccaacaccaagatcctcaaggaaggcatcgagaagggcatcggcaattcgatcctgatcaagttcaaccagatcggttcgctcaccgagaccctggaggccatccagatggccaaggccgccggctataccgcggtgatctcgcaccgctccggcgaaaccgaggactcgaccatcgccgacctggccgtgggtaccgccgccggtcagatcaagaccggttcgctgtgccgctccgaccgcgtgtccaagtacaaccagttgctgcgcatcgaagagcaactgggcgccaaggcgccgtaccgtggtcgcgcggaattccgcggctga

SEQ ID NO: 3986 - protein, 429 aa, Pseudomonas aeruginosa
MAKIVDIKGREVLDSRGNPTVEADVILDNGIVGSACAPSGASTGSREALELRDGDKSRYLGKGVLKAVANINGPIRDLLLGKDAADQKALDHAMIELDGTENKAKLGANAILAVSLAAAKAAAQAKGVPLYAHIADLNGTPGQYSMPVPMMNIINGGEHADNNVDIQEFMVQPVGAKNFAEALRMGAEIFHHLKAVLKARGLNTAVGDEGGFAPNLSSNEDALAAIAEAVEKAGYKLGDDVTLALDCASSEFFKDGKYDLEGEGKVFDAAGFADYLAGLTQRYPIISIEDGMDESDWAGWKGLTDKIGAKVQLVGDDLFVTNTKILKEGIEKGIGNSILIKFNQIGSLTETLEAIQMAKAAGYTAVISHRSGETEDSTIADLAVGTAAGQIKTGSLCRSDRVSKYNQLLRIEEQLGAKAPYRGRAEFRG

SEQ ID NO: 3987 - DNA, 1281 bp, Caulobacter crescentus
  CDS (1)..(1281)
atgaccgagatcgtcgacatcatcgcccgcgaaattctcgacagccgggggaacccgaccgtcgaagtcgacgtcattctcgaggacggcgcgttcggtcgcgccgcagtgccctcgggcgcctcgacgggcgctcacgaagccaacgaaaagcgtgatggcgacaaggctcgctatctgggcaagggcgtccagcaggcggtcgacgccgtcaatggcgagatcttcgacgcgctgtcgggcgtcgacgccgaagaccagcgtcgggtcgacaacctgatgatcgagctcgacggtacgccgaacaaggcccgcctgggcgccaacgccatcctcggcgtctcgctggccaccgccaaggccgccgccgagtccgccggcctgccgctctacaagtatgtcggcggcgtcaacgcccgcgtgctgccgaccccgatgatgaacatcatcaacggcggcgctcacgccgacaatccgatcgacatccaggagttcatgatcctgccgaccggcgccaaggacttccgcgaaggcctgcggatgggcgcagagatcttccacgccctgaagaaggctctgaaggacgcgggtcacaacaccaatgtcggcgacgaaggcggctttgcgccgaacctggcgtcggctgaagccgcactcgacttcatcgtcaaggcgggtgagaaggcgggctacaaggccggtgacgactttgtcctgggcctcgacgtcgcctcgaccgagttcttcaagaacggcaagtacgagcttgaaggcgagggcaagtcgctggatccggccgccatggtcgactacctggctggtctggtcgccaagttcccgatcctgacgatcgaggacggcatggccgaagacgacttcgacggctggaagctgctgaccgacacccttggcaagaaggtgcagctggtcggcgacgacctgttcgtcaccaaccccaagcgcctgcagatgggcctggacaagggtctggccaactcgatcctggtgaaggtcaaccagatcggcacgctctcggaaaccatcgacgcggtcgagctggcgcatcgtcacggttacaccagtgtgatgagccaccgttcgggcgagaccgaagacagcacgatcgcggacctggcggtcgctctgaactgcggtcagatcaagacgggctcgctggcgcggtcggaccggacggccaagtacaaccaactgcttcgcatccaggaaatgctggatgatcagggcgtctacgccggccgagcggccctcaagggtcgctaa

SEQ ID NO: 3988 - protein, 426 aa, Caulobacter crescentus [sequence omitted]

SEQ ID NO: 3989 - DNA, 1445 bp, Schizosaccharomyces pombe
  CDS (32)..(1351)
aattagtattctacagtaaacatcgttaatcatggccattcagaaagtctttgctcgtcaaatctacgctctcggtggtaaccccactgtcgaggtcgacctcaccaccgagaccggtatccaccgtgctatcgtcccctctggtgcctccactggtatatgggaggctcttgagatgcgtgatggtgacaagaccaagtggggtggtaagggtgttttgaaggctgttggcaatgtcaacaacatcattgcccctgccgtcgttaaggccaaccttgacgttaccgaccaaaaggccgccgacgagttcttgcttaagctcgacggtactgagaacaagtccaagttgggtgctaacgccatcttgggtgtctccatggctatctgccgtgccggtgctgcccaaaagaagctccctctctggaagtacattgccgagaactttggcaccaagggaccctatgtcctccccgttccctctttcaacgtcttgaacggtggttcccacgctggtggtgacttggctttccaagaattcatgatcctccccaccggtgctccctctttctccgaggctatgcgttggggtgctgagacctaccagactctcaagtccattgccaagaagcgttatggttcttctgccggcaatgtcggtgatgagggtggtattgctcccgatttgcaaacccctcaagaggctcttgaccttattgttgaggccatcaacaaggctggttacgagggtaagatcaagattggtcttgatgttacctcctccgagttctacgttgacggcaagtacgaccttgacatcaaggccgccaagcccaagcccgagaacaagcttacctaccaacaacttaccgacctttacgtcgagctctccaagaagtaccccattgtctccattgaggaccccttcgaccaagatgactggtctgcctggactcacatgaaggctgagaccgacttccaaattgtcggtgacgatttgactgttaccaacgtcaagcgtcttcgtaccgccatcgacaagaagtgcgctaacgctcttcttttgaaggtcaaccaaatcggttccgtcaccgagtctttgaacgtcgtccgcatgtcctacgaggctggttggggtgttatggtttctcaccgttccggtggaaccgctgacaccttcatctcccacttgactgttggtattggtgccggtcaacttaagtctggtgctccttgccgttccgagcgtttggccaagtacaacgagcttctccgtatcgaggaggaactcggttccaggggtgtttacgctggtgcccatgctggcaagtacatcaaggctgctaagttttaaactctgagcatacattaaattttactaatgtttacaatacatgtttatttttatagaatgcaatgaaatttttatcctttttgcgttttggatt

SEQ ID NO: 3990 - protein, 439 aa, Schizosaccharomyces pombe
MAIQKVFARQIYALGGNPTVEVDLTTETGIHRAIVPSGASTGIWEALEMRDGDKTKWGGKGVLKAVGNVNNIIAPAVVKANLDVTDQKAADEFLLKLDGTENKSKLGANAILGVSMAICRAGAAQKKLPLWKYIAENFGTKGPYVLPVPSFNVLNGGSHAGGDLAFQEFMILPTGAPSFSEAMRWGAETYQTLKSIAKKRYGSSAGNVGDEGGIAPDLQTPQEALDLIVEAINKAGYEGKIKIGLDVTSSEFYVDGKYDLDIKAAKPKPENKLTYQQLTDLYVELSKKYPIVSIEDPFDQDDWSAWTHMKAETDFQIVGDDLTVTNVKRLRTAIDKKCANALLLKVNQIGSVTESLNVVRMSYEAGWGVMVSHRSGGTADTFISHLTVGIGAGQLKSGAPCRSERLAKYNELLRIEEELGSRGVYAGAHAGKYIKAAKF

SEQ ID NO: 3991 - DNA, 1535 bp, Aspergillus oryzae
  CDS (21)..(1337)
caattccgcagctcgtcaaaatgcctatcaccaagatccacgcccgctctgtttacgactcccgcggtaaccctaccgttgaggtggacgttgtcaccgagactggtttgcaccgcgctatcgttccctctggtgcttccactggtcagcacgaggcccacgagctccgtgacggtgacaagacccactggggtggaaagggtgttctcaaggctgtcgagaacgtcaataagaccattgcccccgccgtcatcgaggagaaccttgatgtcaaggaccagtccaaggtcgatgagttcctcaaaaagcttgatggatctgctaacaagtctaacctcggtgctaacgccatcctcggtgtcagcttggccattgccaaggctggtgctgctgagaagggtgtccctctctatgctcacatctccgaccttgctggtactaagaagccctatgtgcttcctgtccccttccagaacgtcctgaacggtggctctcacgctggtggccgtctggctttccaggagttcatgattgttccttccgctgccccctctttctccgaggctcttcgccagggtgctgaggtctaccagaagctcaagactctcgccaagaagaagtacggccagtctgctggcaatgttggtgacgagggtggtgttgctcccgatatccagactgctgaggaggcacttgacctcatcaccgaggccattgagcaggccggttacactggcaagatgaagattgccatggacgttgcttccagcgaattctacaaggctgatgtcaagaagtacgaccttgacttcaagaaccccgacagcgactcctccaagtggctcacctacgagcaactggccgacctttacaagactcttgccagcaagtaccccattgtcagcattgaggaccccttcgctgaggatgactgggaggcctggagctacttctacaagacttctgacttccagattgttggtgatgacttgaccgtcaccaaccccctgcgtatcaagaaggccatcgagaccaaggcttgcaacgcccttctgctcaaggtcaaccagatcggtactcttaccgagtccatccaggctgccaaggactcctacgctgacaactggggtgtcatggtttcccaccgttccggtgagactgaggatgtcaccattgccgatatcgctgtcggtctccgctctggccagatcaagaccggtgctcctgcccgctctgagcgtctggccaagctgaaccagatcctccgtatcgaggaggagctgggcaacaacgccatctatgctggcgaaaagttccgcacttctgtcaacctgtaaatgaaccgtatgattatatgacgtctaccagccaacctgacacattatcgaaagatggttggactcgggaccacactgcatacccgggttcccgctacttgcaacctctgagctgcacaaagcactacagatgatattctcttaagatttatgatgacgattcgattaggccagatatagtggcagtaatgcaataaa

SEQ ID NO: 3992 - protein, 438 aa, Aspergillus oryzae
MPITKIHARSVYDSRGNPTVEVDVVTETGLHRAIVPSGASTGQHEAHELRDGDKTHWGGKGVLKAVENVNKTIAPAVIEENLDVKDQSKVDEFLKKLDGSANKSNLGANAILGVSLAIAKAGAAEKGVPLYAHISDLAGTKKPYVLPVPFQNVLNGGSHAGGRLAFQEFMIVPSAAPSFSEALRQGAEVYQKLKTLAKKKYGQSAGNVGDEGGVAPDIQTAEEALDLITEAIEQAGYTGKMKIAMDVASSEFYKADVKKYDLDFKNPDSDSSKWLTYEQLADLYKTLASKYPIVSIEDPFAEDDWEAWSYFYKTSDFQIVGDDLTVTNPLRIKKAIETKACNALLLKVNQIGTLTESIQAAKDSYADNWGVMVSHRSGETEDVTIADIAVGLRSGQIKTGAPARSERLAKLNQILRIEEELGNNAIYAGEKFRTSVNL

SEQ ID NO: 3993 - DNA, 1553 bp, Lycopersicon esculentum (tomato)
  CDS (61)..(1395)
caaaaactataaacttttttctcttcactcttttctactatttctctgttcatagatctaatggcaactatcaaatccattaaagctcgtcagatctttgacagccgtggtaaccccacagtcgaggttgatgtacatatctcaaatggtgtgtttgccagagctgctgttccaagtggtgcatccaccggaatttacgaagcccttgaattgagggatggaggatctgactacctcggaaagggtgtttcgaaggctgttaacaatgtcaactcaattattggccctgctcttgttggcaaggacccaactgatcagactggtcttgataacttcatggttcatcagttagatggaactcaaaatgagtggggttggtgcaaagaaaagcttggtgcaaatgccatccttgctgtgtcacttgctgtgtgtaaagctggcgctgctgtcaggaatgtgccattgtacaagcacattgctgatttggctggtaacaagaagttggtattaccagttcctgccttcaatgtgattaatggtggatctcatgccggaaacaaactcgcaatgcaggaatttatgatccttcctgttggagctgctaatttcaaggaggccatgaagatgggctgtgaagtctatcaccatttgaaggctgtgattaagaagaaatatggtcaggatgccacaaatgtcggtgatgagggtggttttgctcctaatatccaggagaacaaggaaggtcttgaattgctcaagacagccattgagaaagcaggttacactggaaaggtggtcattggaatggatgttgcagcatctgaattttacggaaaggacaaatcttatgacctgaacttcaaagaagagagcaatgacggctcacaaaagatatcaggtgaccaactcaaggacttatacaagtcatttgtgtccgagtaccctattgtttcaattgaagatccatttgaccaagatgactgggagacctatgctaagctcactgctgagattggggagcaagtacagattgtcggtgatgaccttcttgtcaccaaccctaagagggtcgccaaggcaattgcagagaagacttgcaatgctcttcttctcaaggttaaccaaatcggtagtgtgaccgagagtattgaagctgtgaagatgtccaagaaggcaggttggggtgtaatgaccagtcaccgcagtggagaaacagaagataccttcattgctgatcttgctgtcggtttgtcaacgggacaaatcaagactggagctccttgcaggtcagagcgtctcgccaagtacaaccagctgttgaggatcgaagaggaactcggatcagaggctgtttatgcaggagcaagcttccgcaagcccgttgagccctactaaatttcagcagttccaagtgttgagattgttgagttgttgatctgccaaaaataaattcctcttagattggtcattttaggattatattatatgaccttggtgaaataacaagcagactcaaaaacaagttttgttttctgaggttttattagtatttt

SEQ ID NO: 3994 - protein, 444 aa, Lycopersicon esculentum (tomato)
MATIKSIKARQIFDSRGNPTVEVDVHISNGVFARAAVPSGASTGIYEALELRDGGSDYLGKGVSKAVNNVNSIIGPALVGKDPTDQTGLDNFMVHQLDGTQNEWGWCKEKLGANAILAVSLAVCKAGAAVRNVPLYKHIADLAGNKKLVLPVPAFNVINGGSHAGNKLAMQEFMILPVGAANFKEAMKMGCEVYHHLKAVIKKKYGQDATNVGDEGGFAPNIQENKEGLELLKTAIEKAGYTGKVVIGMDVAASEFYGKDKSYDLNFKEESNDGSQKISGDQLKDLYKSFVSEYPIVSIEDPFDQDDWETYAKLTAEIGEQVQIVGDDLLVTNPKRVAKAIAEKTCNALLLKVNQIGSVTESIEAVKMSKKAGWGVMTSHRSGETEDTFIADLAVGLSTGQIKTGAPCRSERLAKYNQLLRIEEELGSEAVYAGASFRKPVEPY

SEQ ID NO: 3995 - DNA, 1366 bp, Arabidopsis thaliana (mouse-ear cress)
  CDS (1)..(1335)
atggctactatcaccgttgttaaggctagacagatcttcgacagtcgtggtaatcccaccgttgaggttgatatccacacgtcaaatggtattaaggttacagcagctgttccaagtggagcttccactggtatctatgaggctcttgagctgagggatggaggatctgactaccttggaaagggtgtatctaaggctgttggcaatgtgaacaacatcatcgggccagcacttattggaaaggacccaactcagcagactgctattgacaacttcatggtccatgaacttgacggaacccaaaacgagtgggggtggtgcaagcaaaagcttggagccaatgcgattcttgctgtgtctcttgctgtctgcaaagctggggctgttgtcagcggcattcctctatacaagcacattgccaaccttgctggtaaccccaagattgtgctaccagttcctgccttcaacgtcatcaatggtggatcccatgccggaaacaagcttgctatgcaggagtttatgatcctccctgttggagctgcttctttcaaggaagccatgaagatgggtgtggaagtttaccaccacttgaagtctgtgattaagaagaagtacggccaggatgccacaaatgttggtgatgaaggtgggtttgcaccaaacattcaggagaacaaggagggtcttgaattgctcaagactgctatcgagaaggctggatacactggaaaggttgtcattggaatggatgttgccgcttcagagttctactcagaagacaagacctacgacttgaacttcaaagaagagaacaacaatggctctcagaagatttctggtgatgctctaaaggacctgtacaagtcctttgtcgctgagtacccaatcgtgtccattgaggacccatttgaccaagatgactgggagcactatgctaagatgaccactgagtgtggaaccgaggttcagattgtcggtgatgatttgttggtcactaaccccaagagagttgctaaggcaatcgcagagaagtcttgcaatgctcttcttttgaaggttaaccaaatcggatctgtaaccgagagtatcgaggcagttaagatgtcgaagaaagcaggttggggagtgatgaccagccacagaagtggtgaaaccgaggacacattcattgctgacttagccgttggcttgtccactggacaaatcaaaaccggtgctccttgcagatccgagcgtcttgccaagtacaaccagcttttgcgtattgaggaggagttgggatcagaggcaatttacgctggagtcaacttccgcaaacctgtggaaccctactaaatggagcttttagaagcaaagtggtcttctt

SEQ ID NO: 3996 - protein, 444 aa, Arabidopsis thaliana (mouse-ear cress)
MATITVVKARQIFDSRGNPTVEVDIHTSNGIKVTAAVPSGASTGIYEALELRDGGSDYLGKGVSKAVGNVNNIIGPALIGKDPTQQTAIDNFMVHELDGTQNEWGWCKQKLGANAILAVSLAVCKAGAVVSGIPLYKHIANLAGNPKIVLPVPAFNVINGGSHAGNKLAMQEFMILPVGAASFKEAMKMGVEVYHHLKSVIKKKYGQDATNVGDEGGFAPNIQENKEGLELLKTAIEKAGYTGKVVIGMDVAASEFYSEDKTYDLNFKEENNNGSQKISGDALKDLYKSFVAEYPIVSIEDPFDQDDWEHYAKMTTECGTEVQIVGDDLLVTNPKRVAKAIAEKSCNALLLKVNQIGSVTESIEAVKMSKKAGWGVMTSHRSGETEDTFIADLAVGLSTGQIKTGAPCRSERLAKYNQLLRIEEELGSEAIYAGVNFRKPVEPY

SEQ ID NO: 3997 - DNA, 1314 bp, Saccharomyces cerevisiae
  CDS (1)..(1314)
atggctgtctctaaagtttacgctagatccgtctacgactcccgtggtaacccaaccgtcgaagtcgaattaaccaccgaaaagggtgttttcagatccattgtcccatctggtgcttctaccggtgtccacgaagctttggaaatgagagatggtgacaaatccaagtggatgggtaagggtgttttgcacgctgttaagaacgtcaacgatgtcattgctccagctttcgttaaggctaacattgatgttaaggaccaaaaggccgtcgatgacttcttgatttctttggacggtactgccaacaaatccaagttgggtgctaacgctatcttgggtgtttctttggctgcttccagagctgccgctgctgaaaagaatgtcccattatacaagcacttggctgacttgtctaagtccaagacctctccatacgttttgccagttccattcttgaacgttttgaacggtggttcccacgctggtggtgctttggctttgcaagaatttatgattgctccaactggtgctaagaccttcgctgaagctttgagaattggttccgaagtttaccacaacttgaagtctttgaccaagaagagatacggtgcttctgccggtaacgtcggtgacgaaggtggtgttgctccaaacattcaaactgctgaagaagctttggacttgattgttgacgctatcaaggctgctggtcacgacggtaagatcaagatcggtttggactgtgcttcctctgaattcttcaaggacggtaagtacgacttggacttcaagaatccaaactctgacaaatccaagtggttgactggtcctcaattggctgacttgtaccactccttgatgaagagatacccaattgtctccatcgaagatccatttgctgaagatgactgggaagcttggtctcacttcttcaagaccgctggtattcaaattgttgctgatgacttgactgtcaccaacccaaagagaattgctaccgctatcgaaaagaaggctgccgacgctttgttgttgaaggtcaaccaaatcggtaccttgtctgaatccatcaaggctgctcaagactctttcgctgccggttggggtgttatggtttcccacagatctggtgaaactgaagacactttcattgctgacttggtcgtcggtttgagaactggtcaaatcaagactggtgctccagctagatccgaaagattggctaaattgaaccaattgttgagaatcgaagaagaattaggtgacaacgctgttttcgctggtgaaaacttccaccacggtgacaaattataa

SEQ ID NO: 3998 - protein, 437 aa, Saccharomyces cerevisiae
MAVSKVYARSVYDSRGNPTVEVELTTEKGVFRSIVPSGASTGVHEALEMRDGDKSKWMGKGVLHAVKNVNDVIAPAFVKANIDVKDQKAVDDFLISLDGTANKSKLGANAILGVSLAASRAAAAEKNVPLYKHLADLSKSKTSPYVLPVPFLNVLNGGSHAGGALALQEFMIAPTGAKTFAEALRIGSEVYHNLKSLTKKRYGASAGNVGDEGGVAPNIQTAEEALDLIVDAIKAAGHDGKIKIGLDCASSEFFKDGKYDLDFKNPNSDKSKWLTGPQLADLYHSLMKRYPIVSIEDPFAEDDWEAWSHFFKTAGIQIVADDLTVTNPKRIATAIEKKAADALLLKVNQIGTLSESIKAAQDSFAAGWGVMVSHRSGETEDTFIADLVVGLRTGQIKTGAPARSERLAKLNQLLRIEEELGDNAVFAGENFHHGDKL

SEQ ID NO: 3999 - DNA, 1305 bp, Homo sapiens (man)
  CDS (1)..(1305)
atgtccatagagaagatctgggcccgggagatcctggactcccgcgggaaccccacagtggaggtggatctctatactgccaaaggtcttttccgggctgcagtgcccagtggagcctctacgggcatctatgaggccctggagctgagggatggagacaaacagcgttacttaggcaaaggtgtcctgaaggcagtggaccacatcaactccaccatcgcgccagccctcatcagctcaggtctctctgtggtggagcaagagaaactggacaacctgatgctggagttggatgggactgagaacaaatccaagtttggggccaatgccatcctgggtgtgtctctggccgtgtgtaaggcaggggcagctgagcgggaactgcccctgtatcgccacattgctcagctggccgggaactcagacctcatcctgcctgtgccggccttcaacgtgatcaatggtggctctcatgctggcaacaagctggccatgcaggagttcatgatcctcccagtgggagctgagagctttcgggatgccatgcgactaggtgcagaggtctaccatacactcaagggagtcatcaaggacaaatacggcaaggatgccaccaatgtgggggatgaaggtggctttgcccccaatatcctggagaacagtgaagccttggagctggtgaaggaagccatcgacaaggctggctacacggaaaagatcgttattggcatggatgttgctgcctcagagttttatcgtgatggcaaatatgacttggacttcaagtctcccactgatccttcccgatacatcactggggaccagctgggggcactctaccaggactttgtcagggactatcctgtggtctccattgaggacccatttgaccaggatgattgggctgcctggtccaagttcacagccaatgtagggatccagattgtgggtgatgacctgacagtgaccaacccaaaacgtattgagcgggcagtggaagaaaaggcctgcaactgtctgctgctcaaggtcaaccagatcggctcggtcactgaagccatccaagcgtgcaagctggcccaggagaatggctggggggtcatggtgagtcatcgctcaggagagactgaggacacattcattgctgacctggtggtggggctgtgcacaggccagatcaagactggtgccccgtgccgttctgaacgtctggctaaatacaaccagctcatgagaattgaggaagagctgggggatgaagctcgctttgccggacataacttccgtaatcccagtgtgctgtga

SEQ ID NO: 4000 - protein, 434 aa, Homo sapiens (man)
MSIEKIWAREILDSRGNPTVEVDLYTAKGLFRAAVPSGASTGIYEALELRDGDKQRYLGKGVLKAVDHINSTIAPALISSGLSVVEQEKLDNLMLELDGTENKSKFGANAILGVSLAVCKAGAAERELPLYRHIAQLAGNSDLILPVPAFNVINGGSHAGNKLAMQEFMILPVGAESFRDAMRLGAEVYHTLKGVIKDKYGKDATNVGDEGGFAPNILENSEALELVKEAIDKAGYTEKIVIGMDVAASEFYRDGKYDLDFKSPTDPSRYITGDQLGALYQDFVRDYPVVSIEDPFDQDDWAAWSKFTANVGIQIVGDDLTVTNPKRIERAVEEKACNCLLLKVNQIGSVTEAIQACKLAQENGWGVMVSHRSGETEDTFIADLVVGLCTGQIKTGAPCRSERLAKYNQLMRIEEELGDEARFAGHNFRNPSVL

SEQ ID NO: 4001 - DNA, 1720 bp, Xenopus laevis (African clawed frog)
  CDS (35)..(1339)
ggaagagaacggttgcacccacaagaaagtgaaaatgtctatcaagaacatccgtgcacgtgaaatatttgattctcgtgggaaccctacagtggaggttgacctatacacttgcaaaggactgttccgtgctgctgttccaagtggagcttccactggtatttatgaagcactagaactccgggacaatgacaagactcgctacctgggaaagggtgtcggcagagctgtcaaatatgtaaatgagtttctgggacctgcattatgcacccagaatctaaatgttgttgagcaggaaaagattgacaagctcatgattgaaatggatggaactgaaaacaaatccaaatttggtgctaatgcactcctgggagtgtccctggcagtgtgtaaagctggagctgcagagaagggagtcccactgtaccgtcacattgctgacctggctgggaaccctgaggtcatacttcctgtaccggcatttaatgttatcaatggtggctctcatgctggcaacaagctggctatgcaagaattcatgatcttgcctgtgggtgcagacagctttaaggaggccatgcgcataggggcagaggtgtatcacaatctgaagaatgtcatcaaggagaaatatggaaaggatgccacaaatgttggtgatgaagggggtttcgctcccaatatcttggagaacaaagaagccttggagcttctgaaaactgccattaacaaggcaggatacccagataagattgtcattgggatggacgtggcagcatctgaattctaccgtgatggaaaatatgatctggacttcaagtcccccgatgaccccagcaggtacatctcacctgacaagctggctgaactgtacatgagctttgtcaaaaattatccagtggtatccattgaagatccctttgaccaggatcattgggaagcctggacaaagttcacagcagcttctggtatccaggtagttggtgatgacttgactgtgaccaaccctaagcgtattgccaaggctgtggaggagaaggcttgtaactgtctgcttctgaaagtcaatcagattggcacagtgacagaatccctggaggcgtgtaagctggctcagtcaaacggctggggtgtgatggtcagccatcgttctggggagacagaagatactttcattgctgacctagtggttggtctttgcactggacagataaagactggggctccatgcagatctgagcgacttgcaaagtacaaccaattgctcaggattgaagaagaacttggcagcaaggcccgctttgctggaaaaaacttcagaaaaccagttttcaactaattggcgacttccctaggcaatcacccaactgatgtagtagctgtgcacccaggagagactacaagaggtggcttacttgtcactgctgagccctcgcttaatttcaggcacttccagcgatgttagatgttacggagcctctcccagcataaccctgccatctttccaattcaaaagctttgcgctgctgctgtttaggattactcctaattcagtgtcactctggtgcctgcatgtcgtacttgtcttttctattgtggctgtggtcctggtcacgtcttctttgtagtcctgtgttctcatcctgttgcagtttcacaatagataatggtttgtgttacactgtagagattaagaggcaataaaactctttcgaaggtg

SEQ ID NO: 4002 - protein, 434 aa, Xenopus laevis (African clawed frog)
MSIKNIRAREIFDSRGNPTVEVDLYTCKGLFRAAVPSGASTGIYEALELRDNDKTRYLGKGVGRAVKYVNEFLGPALCTQNLNVVEQEKIDKLMIEMDGTENKSKFGANALLGVSLAVCKAGAAEKGVPLYRHIADLAGNPEVILPVPAFNVINGGSHAGNKLAMQEFMILPVGADSFKEAMRIGAEVYHNLKNVIKEKYGKDATNVGDEGGFAPNILENKEALELLKTAINKAGYPDKIVIGMDVAASEFYRDGKYDLDFKSPDDPSRYISPDKLAELYMSFVKNYPVVSIEDPFDQDHWEAWTKFTAASGIQVVGDDLTVTNPKRIAKAVEEKACNCLLLKVNQIGTVTESLEACKLAQSNGWGVMVSHRSGETEDTFIADLVVGLCTGQIKTGAPCRSERLAKYNQLLRIEEELGSKARFAGKNFRKPVFN

SEQ ID NO: 4003 - DNA, 1390 bp, Homo sapiens (man)
  CDS (1)..(1305)
atggccatgcagaaaatctttgcccgggaaatcttggactccaggggcaaccccacggtggaggtggacctgcacacggccaagggccgattccgagcagctgtgcccagtggggcttccacgggtatctatgaggctctggaactaagagacggagacaaaggccgctacctggggaaaggagtcctgaaggctgtggagaacatcaacaatactctgggccctgctctgctgcaaaagaaactaagcgttgttgatcaagaaaaagttgacaaatttatgattgagctagatgggaccgagaataagtccaagtttggggccaatgccatcctgggcgtgtccttggccgtgtgtaaggcgggagcagctgagaagggggtccccctgtaccgccacatcgcagatctcgctgggaaccctgacctcatactcccagtgccagccttcaatgtgatcaacgggggctcccatgctggaaacaacttggccatgcaggagttcatgattctgcctgtgggagccagctccttcaaggaagccatgcgcattggcgccgaggtctaccaccacctcaagggggtcatcaaggccaagtatgggaaggatgccaccaatgtgggtgatgaaggtggcttcgcacccaacatcctggagaacaatgaggccctggagctgctgaagacggccatccaggcggctggttacccagacaaggtggtgatcggcatggatgtggcagcatctgagttctatcgcaatgggaagtacgatcttgacttcaagtcgcctgatgatcccgcacggcacatcactggggagaagctcggagagctgtataagagctttatcaagaactatcctgtggtctccatcgaagacccctttgaccaggatgactgggccacttggacctccttcctctcgggggtgaacatccagattgtgggggatgacttgacagtcaccaaccccaagaggattgcccaggccgttgagaagaaggcctgcaactgtctgctgctgaaggtcaaccagatcggctcggtgaccgaatcgatccaggcgtgcaaactggctcagtctaatggctggggggtgatggtgagccaccgctcaggggagactgaggacacattcattgctgaccttgtggtggggctctgcacaggacagatcaagactggcgccccctgccgctcggagcgtctggccaaatacaaccaactcatgaggatcgaggaggctcttggggacaaggcaatctttgctggacgcaagttccgtaacccgaaggccaagtgagaagctggaggctccaggactccactggacagacccaggtcttccagacctgcttcctgaaataaacactggtgccaaccaagac

SEQ ID NO: 4004 - protein, 434 aa, Homo sapiens (man) [sequence omitted]

SEQ ID NO: 4005 - DNA, 2341 bp, Mus musculus (house mouse)
  CDS (114)..(1418)
ccaccgccactcctgctctctctgcgccgccgccgtcaccaccgccactgccaccgccaccgccgccaacgccaccgactgagtctgcagtcctcgaggagatcccagccatcatgtctatagagaagatttgggcccgagagatcttggactcccgtgggaatcccaccgtggaggtggatctctatactgccaaaggtcttttccgggctgcagtccccagtggagcctccaccggcatctatgaggccctggaactaagggatggggacaaacagcgttacttaggcaaaggtgtcctgaaggcagtggaccacatcaacagcaggattgcaccagccctcatcagctcaggtatctccgtggtggagcaggagaaactggacaacctgatgttggaactggatgggactgagaataaatccaagtttggggccaatgccatcctgggtgtgtccctggccgtgtgtaaggctggggcagctgagagggacttgcccctctatcgccacattgctcagctagctgggaactccgacctcatcctgcctgtgccggcctttaatgtgatcaatggtggctctcatgctgggaacaagttggccatgcaggagttcatgatcctcccagtgggtgctgagagctttcgggatgccatgcgacttggggcagaggtgtaccacaccctcaagggggtcatcaaggacaagtatggcaaggatgccactaacgtgggggatgaaggcggctttgcccccaatatcctggagaacagcgaagccttggagctggtgaaggaagccatcgacaaggctggctacacggaaaagatggtgatcggtatggatgtggctgcctctgagttttaccgcgatggcaaatacgacttggatttcaagtctcccgctgatccttcccgatacatcactggggaccagctgggggcactctaccaggactttgtccggaactatcctgtggtctccattgaagacccatttgaccaggacgactgggcagcttggtccaagttcacagccaacgtcggcatccagatagtgggcgatgacctgacggtgaccaaccccaagcgcatcgagcgggcagtggaggagaaggcctgcaactgtttgctgctcaaggtcaatcagatcggctcggtcacagaagccatccaagcgtgcaagctggcccaggagaatggctggggggttatggtgagccatcgctctggagaaacggaggacacgttcattgctgatcttgtcgtcggactgtgtacaggccagatcaagactggcgccccatgcagatctgaacgtctggcgaagtacaaccagctcatgagaattgaggaagagctgggggacgaagctcgcttcgcgggacataatttccgaaatcccagtgtgctgtgatccccttcccccaaccccgcttgcctgaacgcgggaacatctcattctcctggagcctctttcttgctgccctgacctgccatagtcactctgataccctgagccccaagtcacccagaacacctcgactcaccgctcctgctgttcttggcttccacaaccccccttgctctctctgctcttcctcctctctgggccccatttttgggggattcagtcttcccactttcccttctattctctcttctctttaaaaaaaaattatgaagattagaagggggtccacagaagaatcctcagtgtctgacaggagcttcaggattggtgtgttggggtgtttaaagtggggtcacgggcatgagtgtttcagtgcttaccatggtgtgtataagccttgaactatgcatagaactggagtttggggagtgctggatgtgtggtcatgcttggttgaggctttagtgtatgtgtttacatacacaagcacagtttgtttgtttgcttatttatttatttatttatttatttatttatttatttatttctcagctggtcagtcagccatctcctgtaactctccagtctgaaagtgacctaacttgacaggactaggcacccctattccatgtggcttcattccaagatgacccaggatggggattttgctagcatgggaaggggaacagaaaagggccttagcaattgcttcattcggtgcactaaccgaagctcggaactttacagaatggggctgtggacctggggaggcttttctcctctaaccctctccccagccctaggctcctccgtctttctccggctgcaccagagcgctgcctcactcccctgcgccatgtcccacagttgccaccatctccgtggctttgaaatgaccaccaccattaaagtctgaatcacagcgc

SEQ ID NO: 4006 - protein, 434 aa, Mus musculus (house mouse)
MSIEKIWAREILDSRGNPTVEVDLYTAKGLFRAAVPSGASTGIYEALELRDGDKQRYLGKGVLKAVDHINSRIAPALISSGISVVEQEKLDNLMLELDGTENKSKFGANAILGVSLAVCKAGAAERDLPLYRHIAQLAGNSDLILPVPAFNVINGGSHAGNKLAMQEFMILPVGAESFRDAMRLGAEVYHTLKGVIKDKYGKDATNVGDEGGFAPNILENSEALELVKEAIDKAGYTEKMVIGMDVAASEFYRDGKYDLDFKSPADPSRYITGDQLGALYQDFVRNYPVVSIEDPFDQDDWAAWSKFTANVGIQIVGDDLTVTNPKRIERAVEEKACNCLLLKVNQIGSVTEAIQACKLAQENGWGVMVSHRSGETEDTFIADLVVGLCTGQIKTGAPCRSERLAKYNQLMRIEEELGDEARFAGHNFRNPSVL

SEQ ID NO: 4007 - DNA, 1699 bp, Zea mays (maize)
  CDS (55)..(1395)
acagcgcgcgcttcaaggcctttttttttgagataacaaggaggagaggaggagatggcggtcacgatcacgtgggtgaaggcgaggcagatcttcgacagccgcggcaaccccaccgtcgaggtggacgtgggcctcagcgacggcagctacgcgaggggggccgtacccagcggcgcatccactggaatatatgaggccttggagttgagggatggaggatctgattatcttggcaagggtgttcttaaggctgtcagcaatgtaaacaacattattggaccagcgattgttggaaaggaccccactgagcaggttgagattgacaacttcatggtccaacagcttgacggaacctccaatgagtggggctggtgcaaacagaagcttggagcaaatgccatccttgcggtttcacttgctgtgtgcaaagctggagctatggtgaagaagattcctctttaccagcacatcgcaaatcttgctgggaacaaaactctggtgctccctgtacctgcctttaatgtgattaatggagggtcacatgctggaaacaagcttgccatgcaggagttcatgatcctcccaactggtgcctcctcgttcaaggaggccatgaagatgggagttgaggtgtaccacaacctgaagagcataatcaagaagaagtacggtcaggatgcgacaaatgttggggatgaaggtggttttgcacctaacattcaggaaaacaaagaaggccttgaactattgaaggcagccatagaaaaggctggctacactggaaaggtggtcattggaatggatgttgctgcttctgagttcttcggtgagaaagacaagacttatgatcttaatttcaaggaggagaacaacgatggctcaaacaaaatttcaggcgacagcctgaaagacctgtacaagtcctttgtttctgagtaccctatcgagtcgatcgaagatccatttgatcaggatgactggagcacttatgccaaactcactgatgagattggacagaaagtgcagattgtaggagatgatcttctcgttaccaaccccaccagggtcgccaaggccatcaatgagaagacctgcaatgctctcctcttgaaggtgaaccaaatcgggtctgtgaccgagagtatcgaagctgtcaggatgtccaagcgcgccggatggggagtgatggcaagccacaggagtggcgagacagaggacaccttcattgctgacctctcagttggcctgtctacgggccaaatcaagacgggagctccttgccggtctgagcgcctggccaaatacaaccagctgctcaggatcgaggaagagctcggtgatgccgcggtctacgccggagcaaagttcagggcaccagtggagccctactaagaaaggaagaggatgaggatgttttcttgtggagctatactagctcgctgctgccttttgttacaatgtttgtacggtcgcaataaatgtatggtcgtgtttgctcgagagctactcaggtgattttgtcgtgggagcaccaaaagcagaaaagaactgtttttttttcaatctctctagattctgacgagtggtggtctgcactcgtcgtaatgtcgtttgcctaaactgattttgatggaacaggaaatcttgctggtcttgccaaaaaaaaaaaaaaaaaaaaaaaaaaaaaaaaaaaaaa

SEQ ID NO: 4008 - protein, 446 aa, Zea mays (maize)
MAVTITWVKARQIFDSRGNPTVEVDVGLSDGSYARGAVPSGASTGIYEALELRDGGSDYLGKGVLKAVSNVNNIIGPAIVGKDPTEQVEIDNFMVQQLDGTSNEWGWCKQKLGANAILAVSLAVCKAGAMVKKIPLYQHIANLAGNKTLVLPVPAFNVINGGSHAGNKLAMQEFMILPTGASSFKEAMKMGVEVYHNLKSIIKKKYGQDATNVGDEGGFAPNIQENKEGLELLKAAIEKAGYTGKVVIGMDVAASEFFGEKDKTYDLNFKEENNDGSNKISGDSLKDLYKSFVSEYPIESIEDPFDQDDWSTYAKLTDEIGQKVQIVGDDLLVTNPTRVAKAINEKTCNALLLKVNQIGSVTESIEAVRMSKRAGWGVMASHRSGETEDTFIADLSVGLSTGQIKTGAPCRSERLAKYNQLLRIEEELGDAAVYAGAKFRAPVEPY

SEQ ID NO: 4009 - DNA, 1776 bp, Ricinus communis (castor bean)
  CDS (74)..(1411)
ctaacacgttgttgctgtcgattttttctatctcaaaacaactttcactctctccagatctaaacaaaaacctatggcgattactatcgtctccgtcagggctaggcagatcttcgacagccgtggtaatccaacggtcgaggctgatataaaattatcggatggtcacttggctagagccgccgttcctagtggtgcatccactggtatttatgaggctcttgagttaagagatggaggatcagattacttaggaaaaggtgtttctaaggctgttgagaatgttaattcaattattggccctgcattgattggcaaggacccaactgagcagactgctcttgataactttatggttcaagaattggatggaactgtaaatgagtggggttggtgcaaacaaaagctcggagcaaacgccatcttggctgtgtctctcgctctttgcaaggctggtgctcatgtcaagggtattcccctttacaagcacattgctaaccttgctggtaacaagaacttggtgttgcctgtccctgctttcaatgtcattaatggtggatcacatgctggaaataaacttgctatgcaggagttcatgattcttcctgttggagcttcttcattcaaggaggccatgaagatgggtgctgaagtataccatcacttgaagtctgtgataaaaaagaagtatggtcaggatgcaaccaatgttggtgatgaaggtggttttgctcctaacattcaggaaaacaaggaaggactggaattgctcaagactgccatcgctaaagctggttacacaggcaaagtggttattggaatggacgttgctgcttctgaattttatggttcagataaaacatatgatttgaacttcaaagaagagaacaatgatggttcgcagaagatatcaggtgaagctctcaaggacctgtacaagtcatttgcatctgagtatcccattgtatcaattgaagatccatttgaccaagatgactgggagcactactcaaagctaactagtgaaattggagagaaagtacaaattgtaggagatgatcttttagtcaccaatcctaagagggtggagaaggctattcaagagaaggcttgcaatgctcttctcctcaaggttaatcagattggatctgtaactgagagcattgaagcagtgaggatgtccaagcgagctggatggggtgtgatggccagtcaccgcagtggtgaaactgaggatactttcattgctgacttgtcagtgggtttggccacgggtcagattaagactggagcgccatgcaggtcagagcgccttgcaaaatataatcagctcctgcgtattgaggaagagcttggtgcagaagcagtttatgctggagccaaattcaggacacctgttgaaccctattagaatctgaaaggggtacttgttggaggtcagatccgagcagcggacttttacttgaaatgaataaatttgtgtgaaatgggttaaccctggaccctttttcaaataattttgacagaagttttgttatgaggttgcaatagtggtgtagggagtagtgttttttttcttctaaagtcagaatatgttccacaaaaagcttacattgagtttgctttttataatcgggaaatgaaatgttggattacattataaatctttgcgaaatggttttgacccggctggtttgttgacttcctttcaaaaaaaaaaaaaaaaaaaaaaaaaaaaaaaaaaaaaaaaaaaaaaaaaaaaaaaaaaaaaaaaaa

SEQ ID NO: 4010 - protein, 445 aa, Ricinus communis (castor bean)
MAITIVSVRARQIFDSRGNPTVEADIKLSDGHLARAAVPSGASTGIYEALELRDGGSDYLGKGVSKAVENVNSIIGPALIGKDPTEQTALDNFMVQELDGTVNEWGWCKQKLGANAILAVSLALCKAGAHVKGIPLYKHIANLAGNKNLVLPVPAFNVINGGSHAGNKLAMQEFMILPVGASSFKEAMKMGAEVYHHLKSVIKKKYGQDATNVGDEGGFAPNIQENKEGLELLKTAIAKAGYTGKVVIGMDVAASEFYGSDKTYDLNFKEENNDGSQKISGEALKDLYKSFASEYPIVSIEDPFDQDDWEHYSKLTSEIGEKVQIVGDDLLVTNPKRVEKAIQEKACNALLLKVNQIGSVTESIEAVRMSKRAGWGVMASHRSGETEDTFIADLSVGLATGQIKTGAPCRSERLAKYNQLLRIEEELGAEAVYAGAKFRTPVEPY

SEQ ID NO: 4011 - DNA, 1341 bp, Plasmodium falciparum
  CDS (1)..(1341)
atggctcatgtaataactcgtattaatgcccgtgaaattttagattctagaggaaacccaactgtagaagttgacttagagaccaacttaggtattttcagagctgccgtaccatctggtgcctccactggtatttatgaagccttagaattaagagataatgacaagagcaggtacttaggaaagggtgttcaaaaagctatcaagaacattaatgaaattattgctccaaaattgattggaatgaattgtactgaacaaaagaaaattgacaatttaatggttgaagaattagatggaagtaaaaatgaatggggatggtcaaaaagtaaattaggagctaatgctattttagctatatccatggctgtatgtagagctggtgcagctcctaataaagtatctttatacaaatatttggcacaattagctggaaagaaaagtgaccaaatggtattaccagtaccttgtttaaacgttatcaatggaggatcccatgcaggaaacaaattatctttccaagaatttatgatagtgccagttggtgctccatcatttaaagaagccttaagatatggtgctgaagtatatcataccttaaaatcagaaattaaaaagaaatatggtattgatgcaaccaatgtaggtgatgaaggtggatttgctccaaatatattaaacgctaatgaagctcttgatttattagtaactgccattaaatcagctggttatgaaggaaaggttaaaattgctatggatgttgcagcttctgaattttacaacagtgaaaacaaaacatacgatttagatttcaaaactccaaataatgacaaatcattagttaagactggagctcaattagttgacttatacattgatttagtaaagaaatatccaattgtttctattgaagatccatttgatcaagatgattgggaaaattatgctaaattaacagcagctattggaaaggatgttcaaattgttggtgatgatttattagttacaaacccaaccagaattactaaagctcttgaaaaaaatgcttgcaatgctttacttcttaaagttaaccaaatcggttctattactgaagctattgaagcttgcttattatctcaaaaaaataactggggtgttatggtttctcacagatctggtgaaaccgaagatgtttttattgctgatttagttgttgctttaagaaccggacaaatcaaaacaggagcaccatgcagaagtgaaagaaacgccaaatataaccaattattaagaattgaagaatctttaggaaacaatgctgtttttgctggagaaaaatttagattacaattaaattaa

SEQ ID NO: 4012 - protein, 446 aa, Plasmodium falciparum [sequence omitted]

SEQ ID NO: 4013 - DNA, 1450 bp, Cladosporium herbarum
  CDS (19)..(1341)
gcacgagaaaccgccaacatgcctatctccaagatccactcccgctacgtctacgactcccgtggaaaccccaccgtcgaggtcgacattgtcaccgagaccggtcttcaccgcgccattgtcccctctgttgcctctaccggctcccacgaggcttgcgagctccgtgatggtgacaagagcaagtgggctggcaagggtgtgaccaaggctgttgccaacgtcaacgagatcattgctcccgctctcatcaaggagaacctcgacgtcaaggaccaggccgccgttgacgctttcctcaacaagctcgatggcaccaccaacaagaccaagattggtgccaacgccatcctcggtgtctccatggctgtggccaaggctgccgccgccgagaagcgtgtccctctctacgcccacatcagcgacctttccggcaccaagaagcccttcgttctccccgttcccttcatgaacgtcgtcaacggtggctcccacgcgggtggccgtcttgccttccaggagttcatgatcgttcccagcggggctccctccttcaccgaggccatgcgccagggtgctgaggtctaccagaagctgaagtccctcaccaagaagaggtacggccagtctgccggcaacgtcggtgacgagggtggtgtcgctcccgatattcagaccgctgaggaggctcttgacctcatcaccgacgccattgaggaggccggctacactggccagatcaagatcgccatggacgttgcctcctccgagttctacaaggccgacgagaagaagtacgaccttgacttcaagaaccccgactctgacaagagcaagtggatcacctacgagcagcttgccgaccagtacaacgagctcgctgccaagtaccccattgtctccattgaggaccccttcgctgaggatgactgggaggcctggagctacttctacaagacctctggctctgacttccagatcgtcggtgatgaccttaccgtcaccaaccccgagttcatcaagaaggccatcgagaccaaggcctgcaacgccctcctcctcaaggtcaaccagatcggtaccatcaccgaggccatcaacgccgccaaggactccttcgccgctggctggggtgtcatggtctctcaccgttccggtgagaccgaggacgtcaccatcgccgacatcgttgtcggtctccgtgccggccagatcaagaccggtgcccctgcccgttccgagcgtctcgccaagctcaaccagatcctccgtatcgaggaggagctcggtgacaagaggctctacgccggtgacaacttccgcactgccatcaacttgtaagctatctcatagcttgatggctacgagagtagtaatttctttatcatgaggatgacgagacggatgcatggctagcgtttagtcggatgaacaaaaagtattcaaatgt

SEQ ID NO: 4014 - protein, 440 aa, Cladosporium herbarum
MPISKIHSRYVYDSRGNPTVEVDIVTETGLHRAIVPSVASTGSHEACELRDGDKSKWAGKGVTKAVANVNEIIAPALIKENLDVKDQAAVDAFLNKLDGTTNKTKIGANAILGVSMAVAKAAAAEKRVPLYAHISDLSGTKKPFVLPVPFMNVVNGGSHAGGRLAFQEFMIVPSGAPSFTEAMRQGAEVYQKLKSLTKKRYGQSAGNVGDEGGVAPDIQTAEEALDLITDAIEEAGYTGQIKIAMDVASSEFYKADEKKYDLDFKNPDSDKSKWITYEQLADQYNELAAKYPIVSIEDPFAEDDWEAWSYFYKTSGSDFQIVGDDLTVTNPEFIKKAIETKACNALLLKVNQIGTITEAINAAKDSFAAGWGVMVSHRSGETEDVTIADIVVGLRAGQIKTGAPARSERLAKLNQILRIEEELGDKRLYAGDNFRTAINL

SEQ ID NO: 4015 - DNA, 1314 bp, Saccharomyces cerevisiae
  CDS (1)..(1314)
atgtccatcacgaaggtacatgctagaacggtgtatgattctcgcggtaatccgactgttgaggttgaaattacaacagagaatggtctcttcagagcgatcgtcccatctggtgcctccaccggcattcacgaagctgttgaacttagagacgggaacaagtccgaatggatgggaaaaggggtgaccaaggcagtcagtaacgtcaatagtatcatagggcctgctttaatcaagtccgacttatgtgtaaccaatcagaagggcatagacgagctcatgatatcgttagacggaacttctaacaagtcaaggttgggcgccaatgctatccttggtgtttccttgtgcgttgctcgagctgctgccgcacaaaagggaattactctctacaagtatatagccgagttagcggatgctagacaggacccctttgttattcctgttccttttttcaatgttttgaatggtggagcccacgccggtggctctttagctatgcaagaattcaagatcgcgccagtcggggctcagagctttgcagaagccatgaggatgggttcggaggtttaccatcatttgaagatattggcgaaggagcaatatggaccttccgctggaaatgttggtgacgagggtggagtcgcccccgatatcgacactgccgaggacgccttggacatgattgtgaaagccattaacatatgcggttacgagggtagagtgaaagtaggaatcgatagtgctccttctgttttttataaggacgggaaatacgacctaaatttcaaggaaccgaactctgacccatctcactggctcagtccagctcagttagcagaatattatcattcattgctaaagaaatacccaatcatttccctggaagacccctacgccgaagatgattggtcctcgtggtctgccttcctaaagactgtcaatgttcagataattgcagatgacctgacatgcaccaacaagaccaggatcgcccgtgctatagaggagaaatgtgcgaatactctgttgctgaaactcaaccagatcggtactctgactgagtctattgaagccgccaatcaggctttcgatgctggatggggtgtaatgatatcacatagatcaggtgaaaccgaagatccgtttatcgctgatttggtcgttggtttaagatgtggtcaaattaaatcgggcgctttgtcgagatcagaaagactggccaagtataatgaacttttgcgtatcgaagaggaactgggggacgattgtatatatgctggtcataggtttcatgatggaaacaaactataa

SEQ ID NO: 4016 - protein, 437 aa, Saccharomyces cerevisiae [sequence omitted]

SEQ ID NO: 4017 - DNA, 1371 bp, Mycoplasma pneumoniae
  CDS (1)..(1371): transl_table=4
atgagtgcacaaactggaaccgatcttttcaagattgctgatctttttgcttaccaagtttttgattcacggggttttcccactgttgcttgtgttgtgaagttagctagtggtcatactggagaagcgatggttccatctggggcttctactggggaaaaagaagcgattgaactacgcgatggtgatcccaaagcttactttggcaaaggggtgagccaagctgtgcaaaacgttaaccaaactattgcccctaaactaattggtttaaatgcgactgatcaagcagccattgatgctttaatgatccaactggatggtacccccaataaggctaagttaggtgctaatgccattttggcagtttctctagctgtggctaaagcagctgctagcgcccaaaagacttccttgtttaagtaccttgctaaccaggtcatgggtctaaataaaaccgagtttatcctcaccgtaccaatgctaaacgtcattaacggtggagcacatgctgacaataacattgacttccaggagttcatgattatgccattgggtgctaactcgatgcaccaagcattgaagatggcgagtgaaaccttccatgctttacaaaagctgttaaagcaacggggtttaaacaccaataagggtgatgaaggtggttttgcgcctaacttaaagttagcggaagaagcgcttgatttaatggtcgaagcaattaaggcagctgggtaccaaccaggtagtgacattgcgattgcactggatgtagcagcgagtgagttttatgatgacaccaccaagcgctatgtcttcaaaaaaggaattaaggccaaaattcttgacgagaaggaatggagtttaactactgcccaaatgatcgcttacctcaagaagcttactgagcagtaccctattatttccatagaagatggtcttagcgaacacgactgggaaggtatggaaacattaactaaaacactgggtcaacacattcaaatagttggtgatgatctgtactgcaccaatccagcaattgctgaaaaaggtgttgctcacaaagctaccaactcgatcttaattaaactcaaccaaattggtacccttacagaaacaattaaagcgattaacattgccaaggacgctaactggagtcaggtaatttcccaccgtagtggggaaaccgaagacacgacaattgctgatctagcagtagcggcttgcactggtcaaattaaaactggttcgatgtcccgctccgaacgaattgccaaatacaatcgcttattgcaaattgaactggaattgggcaataatgctaagtacttaggttgaaacacctttaaaaacattaaaccgcaaaaagcttaa

SEQ ID NO: 4018 - protein, 456 aa, Mycoplasma pneumoniae [sequence omitted]

SEQ ID NO: 4019 - DNA, 1299 bp, Synechocystis sp
  CDS (1)..(1299)
atgttaagtaaagtccccgccaccattgaagaaatcgccgcccgggaaattttagactccaggggtcgccccaccatcgaagcggaagtccggctggaaagtggggcccacggcattgcccaggtgcccagtggtgcttccacaggcagttttgaagcccatgaattgcgggacggagaccccaaacgctatgacgggaaaggggtagaaaaagcagtacggaacgtgacagaaaaaattgccccggtggtggaaggcctggatgccttcgatcaaatggcggtggatcaggccatgattgaccgggatggaacggacaataaaaaagaattgggggccaatgccattttgggggtttctttagccaccgctaaggccgccgccgctgagctagccattcccctctaccgctacctgggaggccccctggctaacgtactgccggtaccgatgatgaacgtgattaacggtggggcccatgccgacaataacgtcgattttcaggaattcatgatcatgccggtgggggcagaaacctttaaagaagctctgcgctggggggcggaagttttcgctgtgttgggcaaagtgttgaaagaacgaaaactgctctccggtggggtgggggacgaagggggttatgctcccaatttgacctcgaatcaacaggccctagatattctcatcgaggcgattgaacaagctggttacaaacccggtagtcaaattgccttggccatggacattgccgccagtgaatttttcaaaaatggtcagtatgaatacgacggtggttcccattctccccaggaattcatcgactatcaggccaagctagtgagtcaatatcccattgtctccattgaagacggtttgcacgaagacgattgggaaagttggaagggtttaaccacttccctgggcaccaaaacccagttggtgggggatgacttgatggtgaccaacccggtgcgtctgcaaaaatccattgatttgggagttgccaacgccattttgatcaaactcaatcaaatcggcactttgagcgaaactttagagaccatttccctagctactcgccatagttaccgttctgttatttcccatcgctccggtgaaacggaggacaccacgatcgccgacttggccgtggccaccagggtagggcaaattaaaaccggttccctttgtcgttctgagcgggttgctaaatataaccgtttactccgcattgaagatgaacttggcgatcgggccgtttatgcccctaaaattggcctgggtcccaaacattcttaa

SEQ ID NO: 4020 - protein, 432 aa, Synechocystis sp [sequence omitted]

SEQ ID NO: 4021 - DNA, 1575 bp, Zea mays (maize)
  CDS (47)..(1387)
ccgggctgcaggaattcggcacgaggttttttctgaagattcggcgatggcggcgacgatccaatccgtgaaggcgcgccagatctttgacagccgcggcaaccctacagtcgaggtcgacgtgttttgctcagatggaacctttgcaagggcagctgttcccagtggagcatcaactggtgtatatgaagctctggagttgagggatggtggctcttactatttggggaagggtgtctccaaggctgtgaacaatgtgaattctgttattggacctgctctgattggcaaggaccctacagcacagactgagattgataacttcatggttcaacaacttgatgggaccaaaaatgagtggggatggtgcaagcaaaagcttggtgctaatgcgattctggctgtgtcattagctgtttgcaaagctggggctagcatcaagaggattcctttataccagcacattgccaacctagctgggaacaagcagttagtgttgcctgtccctgcattcaatgtcatcaacggtggttcccatgctggaaacaagcttgctatgcaggagtttatgatccttcctactggagctgcctcatttaaggaggctatgaagatgggtgttgaagtttatcaccacctgaagtccgttatcaaaaagaagtatgggcaagatgccacgaatgttggtgacgaaggtggttttgctccgaacatccaggagaacaaggaaggacttgagctcttgaaaactgcaattgagaaggctggatacactggcaaggttgtcatcggaatggatgttgctgcttcggagttttacagtgacaaggaccaaacctatgacctcaactttaaggaggagaataatgatggttcacagaagatatctggcgatagcttaaagaatgtatacaaatcttttgtgagcgaataccccattgtttcgattgaagatccttttgaccaggatgactgggttcactatgctaagatgactgaagaaattggagagcaagtgcagattgttggtgatgaccttctcgtcaccaaccccactagggttgctaaggctatcaaggagaaatcatgcaatgcccttctgctcaaggttaaccaaatcggatctgtgactgagagtattgaggctgtgaagatgtcaaagcgtgcgggctggggtgtgatgactagtcataggagtggtgagactgaggacactttcattgctgatctggcagttggtttgtccacgggtcagattaagactggagcaccctgcagatcagagcgtcttgccaaatacaaccagcttcttaggattgaagaagagcttggcgctattgctgtctacgcaggtgccaaattccgtgcacctgtggagccctactaaacgggcgggatgcaagtgcttttatgtctgcacaagtcctgtgaaactgtttactgcgacctgcagattttactcttggagtgccctgagtagattttagcaataatatccaacatgtaactgttacggacatgtacccaaacgtgatccagttttagttaatgtgccccatgcttgacgtttaaaaa

SEQ ID NO: 4022 - protein, 446 aa, Zea mays (maize)
MAATIQSVKARQIFDSRGNPTVEVDVFCSDGTFARAAVPSGASTGVYEALELRDGGSYYLGKGVSKAVNNVNSVIGPALIGKDPTAQTEIDNFMVQQLDGTKNEWGWCKQKLGANAILAVSLAVCKAGASIKRIPLYQHIANLAGNKQLVLPVPAFNVINGGSHAGNKLAMQEFMILPTGAASFKEAMKMGVEVYHHLKSVIKKKYGQDATNVGDEGGFAPNIQENKEGLELLKTAIEKAGYTGKVVIGMDVAASEFYSDKDQTYDLNFKEENNDGSQKISGDSLKNVYKSFVSEYPIVSIEDPFDQDDWVHYAKMTEEIGEQVQIVGDDLLVTNPTRVAKAIKEKSCNALLLKVNQIGSVTESIEAVKMSKRAGWGVMTSHRSGETEDTFIADLAVGLSTGQIKTGAPCRSERLAKYNQLLRIEEELGAIAVYAGAKFRAPVEPY

SEQ ID NO: 4023 - DNA, 1687 bp, Oryza sativa (rice)
  CDS (81)..(1421)
ccactttattagcaccaaccccgtctccttcctccattcctccgccgctagaaccttctagaagctctcctcctcctcccatggcggcgacgatcgtgtccgtcaaggcgcgccagatcttcgacagcaggggcaaccccaccgtcgaggtcgatgtgtgctgctcagatggaacctttgcaagggctgcagttcccagtggtgcatcaactggtgtctatgaagctctcgaattgagggacggtggatctgattacttgggaaagggtgtttccaaggctgtcgacaatgtgaactcggttattgccccagctctgattggcaaggaccctacgtcacaggctgagcttgataacttcatggttcagcagcttgatggaaccaaaaatgagtgggggtggtgcaagcagaagcttggtgctaatgcaatcctggctgtgtcactggccatttgcaaagctggagctatcatcaagaagattcctctgtaccagcacattgccaaccttgctggaaacaagcaactggttttgcccgtacctgcattcaacgtcattaacggtggatcacatgctggaaacaagcttgccatgcaggagttcatgatccttcctactggggccgcttcattcaaggaggccatgaagatgggtgttgaagtgtaccacaacctgaagtctgttatcaagaagaagtatggtcaggatgccaccaatgttggtgatgaaggtggttttgctcctaacattcaggaaaacaaggagggtcttgagctcttgaagactgcaattgaaaaggctggatacactggcaaggttgtcattggaatggatgttgctgcttcggaattctacaatgacaaggacaaaacctatgaccttaacttcaaggaggagaacaatgatggttcacaaaagatatctggtgatagcctgaagaatgtatacaagtcatttgtcagtgaataccccattgtctcgattgaggatccgtttgaccaggatgactgggaacactatgctaagatgaccgctgaaattggagagcaagtgcagattgtcggtgatgacctccttgtcaccaacccaacaagggtggcaaaggcaatccaggagaagtcatgcaatgctcttctgctgaaggttaaccaaattggatctgtcactgagagtattgaggccgtgaagatgtcaaagcgtgctggctggggtgtgatgaccagccacaggagtggtgagactgaggataccttcattgctgaattggctgttggtttggccacgggtcagatcaagactggagcaccctgccgatcagagcgccttgccaaatacaaccagcttcttaggattgaggaggagcttggtgcggctgctgtctacgctggtgccaagttccgcgcacccgtggagccctactaaacttgatggtgaatatcatgcggttcatgcccactgttgtgtgcatgggttttgtgaagacaggatgctcatttctatccgtaattgacttcccggtcgaactctagttaaaaagctcgtagaatcgagaaataaatcctccactgtatgagcggatatgtacccccaaacttgctccaattttggtgatgtgtagttctgagcttgcgtgttctctgaacctgttggatctttaatacagagagtatggcttttgttattatggc

SEQ ID NO: 4024 - protein, 446 aa, Oryza sativa (rice)
MAATIVSVKARQIFDSRGNPTVEVDVCCSDGTFARAAVPSGASTGVYEALELRDGGSDYLGKGVSKAVDNVNSVIAPALIGKDPTSQAELDNFMVQQLDGTKNEWGWCKQKLGANAILAVSLAICKAGAIIKKIPLYQHIANLAGNKQLVLPVPAFNVINGGSHAGNKLAMQEFMILPTGAASFKEAMKMGVEVYHNLKSVIKKKYGQDATNVGDEGGFAPNIQENKEGLELLKTAIEKAGYTGKVVIGMDVAASEFYNDKDKTYDLNFKEENNDGSQKISGDSLKNVYKSFVSEYPIVSIEDPFDQDDWEHYAKMTAEIGEQVQIVGDDLLVTNPTRVAKAIQEKSCNALLLKVNQIGSVTESIEAVKMSKRAGWGVMTSHRSGETEDTFIAELAVGLATGQIKTGAPCRSERLAKYNQLLRIEEELGAAAVYAGAKFRAPVEPY

SEQ ID NO: 4025 - DNA, 1628 bp, Mesembryanthemum crystallinum (common ice plant)
  CDS (31)..(1365)
gcacgagacagatctcagattacttcaaccatggttaccattaagtgcgtcaaggcccgacagatctacgacagtcgtggtaaccccactgttgaggctgatattcatcttgatgatggaacttacgctagagctgctgtccccagtggtgcatccaccggagtttacgaagcacttgagctcagggatggaggtaaagactacatgggaaagggtgtttacaaggctgttaagaacgtaaacgagattattggccctgcattggttggcaaggacccaactcagcagaccgctatcgacaacttcatggttcaacaacttgatggaaccgtgaacgagtggggttggtgcaagcaaaaattgggagcaaatgctatcttggctgtttcccttgctgtctgcaaagctggagcccaggtcaagaaaattcctttgtaccagcacatcgcggagattgctggaaacaagaatatggttttgccagtaccagccttcaacgtcatcaatggtggatctcatgctggaaacaagcttgcgatgcaggagttcatgattcttcccaccggagcttcttcattcaaagaagcaatgaagatgggcagcgaagtataccacaatttgaagagtgtgatcaagaagaagtatggtcaagacgcaaccaatgttggagatgagggtggctttgctcccaacatccaggagaacaaggagggtcttgagttgctcaagacagccattgagaaagccggatacaccggcaaagtggttatcggaatggatgttgccgcatccgagttctacaaggaagacaaatcctatgacttgaacttcaaggaagagaacaatgacggttcacagaggatctctggcgaagccctcaaggatctttacaaatcatttgtagccgagtaccccatagtgtccattgaggacccatttgaccaggatgactgggaacactatgccaagatgaccgcagaatgtggagagaaagtacagatcgttggagatgatcttttggtcaccaaccccaagagggtaaaaaaggctatcgacgagaactcctgcaatgcacttcttctcaaggttaaccaaattgggtctgtcacagagagtatcgaagctgtgaagatgtccaagaaagctggatggggtgtgatggctagccaccgcagtggtgaaaccgaggacactttcattgctgacctttcagtgggtttgtctacgggccaaatcaagaccggagctccatgcagatctgagcgtcttgccaaatacaaccagctcttgcgtattgaagaggagctcggtgacaaggctgtttacgctggagcaaacttccgccgccctgttgagccctactaaggcatagatttctcagtccgaggttctactggtttttgaggcgaagcgttttcggaacctttgtttcctgcccttcaataagagacctttttttaggagtcttgcacaataactcttttttgttgaaagttttgtgaaccagtagtactggtacgtactacccaaggccaaaggttttcgcaagtgttggatgttttgagctttagcattattaattatgattccagagaatgaatgtttttttggcttgagttactcttacc

SEQ ID NO: 4026 - protein, 444 aa, Mesembryanthemum crystallinum (common ice plant)
MVTIKCVKARQIYDSRGNPTVEADIHLDDGTYARAAVPSGASTGVYEALELRDGGKDYMGKGVYKAVKNVNEIIGPALVGKDPTQQTAIDNFMVQQLDGTVNEWGWCKQKLGANAILAVSLAVCKAGAQVKKIPLYQHIAEIAGNKNMVLPVPAFNVINGGSHAGNKLAMQEFMILPTGASSFKEAMKMGSEVYHNLKSVIKKKYGQDATNVGDEGGFAPNIQENKEGLELLKTAIEKAGYTGKVVIGMDVAASEFYKEDKSYDLNFKEENNDGSQRISGEALKDLYKSFVAEYPIVSIEDPFDQDDWEHYAKMTAECGEKVQIVGDDLLVTNPKRVKKAIDENSCNALLLKVNQIGSVTESIEAVKMSKKAGWGVMASHRSGETEDTFIADLSVGLSTGQIKTGAPCRSERLAKYNQLLRIEEELGDKAVYAGANFRRPVEPY

SEQ ID NO: 4027 - DNA, 1134 bp, Zymomonas mobilis
  CDS (1)..(1134)
atgacagctattgtcagtatccatggccgtcaggttgtcgacagccgcggtaacccgaccgttgaagttgatgttacgcttgaagatggcagcttcggccgcgccgcagtgccgtcaggtgcttctaccggcgttcatgaagctgttgaacttcgtgatggcgacaaaacccgttggggtggtaaaggcgttaccaaagctgttcacgctgtaaacaacgaaattgctaacgcaattattggtctggaagccgaagatcaggaactgatcgaccagacgatgatcaagctcgatggcaccccgaacaagggtaaattcggtgctaacgctatcctcggtgtcagcttggctgttgctaaagctgctgctgaagctcgcggtctcccgctttaccgttatgttggtggtacggcagctcacgttcttccggttccgatgatgaacatcgttaacggtggtatgcacgctgacaaccccatcgatttccaggaattcatgattgctccggttggcgccagctccatcaatgaagctgtacgcatcggtaccgaagtttcccataccctgaaaaaagaactgtctgctaaaggcatgaacaccaacgtcggtgacgaaggtggtttcgctcctagccttgacagtgcttcttctgctctggacttcatcgtcgattccatctccaaagccggttacaagccgggcgaagatgtgttcatcgctctcgatgcagcttcctccgagttctacaacaaagatcagaacatctacgatcttaagggtgaaggccgtaaactgacctccgctcagctcgttgattactatgtcgaactctgcggcaaatatccgatctattccatcgaagatctggccgaagatgacttcgaattctggaagatccttaccgaaaagctcggtgacaaagttcagttggtcggtgacgatctgttcgtgaccaacgtgaagcgtctttctgatggtatcgaacgcggtatcgccaactcgctgctcgtgaagttcaaccagatcggttctttgtctgaaacgctcgcagccgttaacatggctaacgacgcttcttacacgcctgttatgtctcaccgttccggtggaaaccgaagacaccacgattgctga

SEQ ID NO: 4028 - protein, 377 aa, Zymomonas mobilis
MTAIVSIHGRQVVDSRGNPTVEVDVTLEDGSFGRAAVPSGASTGVHEAVELRDGDKTRWGGKGVTKAVHAVNNEIANAIIGLEAEDQELIDQTMIKLDGTPNKGKFGANAILGVSLAVAKAAAEARGLPLYRYVGGTAAHVLPVPMMNIVNGGMHADNPIDFQEFMIAPVGASSINEAVRIGTEVSHTLKKELSAKGMNTNVGDEGGFAPSLDSASSALDFIVDSISKAGYKPGEDVFIALDAASSEFYNKDQNIYDLKGEGRKLTSAQLVDYYVELCGKYPIYSIEDLAEDDFEFWKILTEKLGDKVQLVGDDLFVTNVKRLSDGIERGIANSLLVKFNQIGSLSETLAAVNMANDASYTPVMSHRSGGNRRHHDC

SEQ ID NO: 4029 - DNA, 1421 bp, Schizosaccharomyces pombe
  CDS (8)..(1327)
gttaatcatggccattcagaaagtctttgctcgtcaaatctacgactctcgtggtaaccccactgtcgaggtcgacctcaccaccgagaccggtatccaccgtgctatcgtcccctctggtgcctccactggtatatgggaggctcttgagatgcgtgatggtgacaagaccaagtggggtggtaagggtgttttgaaggctgttggcaatgtcaacaacatcattgcccctgccgtcgttaaggccaaccttgacgttaccgaccaaaaggccgccgacgagttcttgcttaagctcgacggtactgagaacaagtccaagttgggtgctaacgccatcttgggtgtctccatggctatctgccgtgccggtgctgcccaaaagaagctccctctctggaagtacattgccgagaactttggcaccaagggtccctatgtcctccccgttccctctttcaacgtcttgaacggtggttcccacgctggtggtgacttggctttccaagaattcatgatcctccccaccggtgctccctctttctccgaggctatgcgttggggtgctgagacctaccacactctcaagtccattgccaagaagcgttatggttcttctgccggcaatgtcggtgatgagggtggtattgctcccgatttgcaaacccctcaagaggctcttgaccttattgttgaggccatcaacaaggctggttacgagggtaagatcaagattggtcttgatgttgcctcctccgagttctacgttgacggcaagtacgaccttgacatcaaggccgccaagcccaagcccgagaacaagcttacctaccaacaacttaccgacctttacgtcgagctctccaagaagtaccccattgtctccattgaggaccccttcgaccaagatgactggtctgcctggactcacatgaaggctgagaccgacttccaaattgtcggtgacgatttgactgttaccaacgtcaagcgtcttcgtaccgccatcgacaagaagtgcgctaacgctcttcttttgaaggtcaaccaaatcggttccgtcaccgagtctttgaacgccgtccgcatgtcctacgaggctggttggggtgttatggtttctcaccgttccggtgagaccgctgacaccttcatctcccacttgactgttggtattggtgccggtcaacttaagtctggtgctccttgccgttccgagcgtttggccaagtacaacgagcttctccgtatcgaggaggaactcggttccgagggtgtttacgctggtgcccatgctggcaagtacatcaaggctgctaagttttaaactctgagcatacattaaattttactaatgtttacaatacatgtttatttttatagaatgcaatgaaatttttatcctttttgcgttttggatt

SEQ ID NO: 4030 - protein, 439 aa, Schizosaccharomyces pombe [sequence omitted]

SEQ ID NO: 4031 - DNA, 1245 bp, Drosophila pseudoobscura
  CDS (1)..(1245): Xaa of translated CDS can stand for any naturally occuring amino acid which can be translated from respective CDS-codon
atggaggttgatctgaccaccgagaatggtctgttccgggccgccgttccgtctggcgcytccaccggtgtccatgaggccctggagctgcgcgacaacgacaaggccaactaccatggcaagtccgtgctgaaggctgtggctcacgtcaacgataccctcggacccgaggtgatcaaagccaatctggatgtggttgatcaggctgctgtcgacaacttcatgatcaagctggacggcaccgagaacaagagcaagttcggcgccaacgccattctgggcatttccctggccgtcgccaaggccggtgccgccaagaagaacgtgcccctgtacaaacacatcgccgatctggccggcaacaaggagatcatcctgcccgtgcccgctttcaacgtgatcaacggtggcagccatgccggcaacaagcttgccatgcaggagttcatgatcctgcccaccggcgccaccaccttcaccgaggccatgaagatgggctccgaggtgtaccatcacctgaagaacgtgatcaaggcaaagttcggtctggatgccaccgctgtcggtgatgagggtggctttgcccccaacattcagtccaacaaggaggctctcgtcctgatcaccgatgccatcgccaaggctggctacactggcaagatcgaaatcggcatggatgttgccgcctctgagttcttcaaggatggtctgtacgatctggacttcaagaaccccgcgagcgacaaggcccagtggctgtcacccgacaagmtggccaatctgtaccaggagttcatcaaggagttccccattacatccattgaggatcccttcgatcaggatcactgggatgcctggaccaacctgacctgcaacaccaagatccagattgtcggcgacgatctgactgtgaccaaccccaagcgcattgccaccgctgtcgagaagggtgcctgcaactgcctgctgctgaaggtaaaccagatcggtaccgtcaccgagtccattgccgctcatctgctggccaagaagaacggctggggcaccatggtctctcaccgttccggcgagaccgaggattcgttcaycggtgatttggttgttggtctgtccaccggccagatcaagaccggtgctccatgccgctcggagcgtctggccaagtacaaccagatcttgcgcattgaggaggagatcggctccggtgtcaagttcgccggcaagaacttcaggaagccccagtag

SEQ ID NO: 4032 - protein, 414 aa, Drosophila pseudoobscura
  misc_feature (258)..(258): Xaa can be any naturally occuring amino acid
  misc_feature (363)..(363): Xaa can be any naturally occuring amino acid
MEVDLTTENGLFRAAVPSGASTGVHEALELRDNDKANYHGKSVLKAVAHVNDTLGPEVIKANLDVVDQAAVDNFMIKLDGTENKSKFGANAILGISLAVAKAGAAKKNVPLYKHIADLAGNKEIILPVPAFNVINGGSHAGNKLAMQEFMILPTGATTFTEAMKMGSEVYHHLKNVIKAKFGLDATAVGDEGGFAPNIQSNKEALVLITDAIAKAGYTGKIEIGMDVAASEFFKDGLYDLDFKNPASDKAQWLSPDKXANLYQEFIKEFPITSIEDPFDQDHWDAWTNLTCNTKIQIVGDDLTVTNPKRIATAVEKGACNCLLLKVNQIGTVTESIAAHLLAKKNGWGTMVSHRSGETEDSFXGDLVVGLSTGQIKTGAPCRSERLAKYNQILRIEEEIGSGVKFAGKNFRKPQ

SEQ ID NO: 4033 - DNA, 1450 bp, Pneumocystis carinii f
  CDS (42)..(1343)
gagctcgatattaaaaaaaaatactgttattaaaaaaaattatgggaatttttaaaattcacgcaagatcattttatgattcacgaggtaatcctaccgtagaagtagaagtgactacagaaacaggggttcatcgagcaaatgtaccttcaggtgcttcaacaggaattcatgaagctttggaattacgtgataatggttcttcttggtctggaaaaggagttactcttgcagtttccaacgttaatgatatcattgccccctctcttttatctgcaggcattgatattaaggatcaacgttctatagataaatttcttattgatcttgatggtacttctaataaatcaagacttggagctaatgctattcttggtgtttctattgctatttgtaaggctgctgctgctgaaaagggtgttcctctttatcgacattttgctgatattgctgatattaaagagccatttattcttcctcttccatgttttaatgtacttaatgggggatcacatgccggtggaaggttagcttttcaagagtttatgattcttcctactagtgctgttacatttcatgaagctatgcagcaaggctctgaggtttattctgctttaaaaaagctttctagaaagagatatgggcattccgctggaaatgccggcgatgagggcggcgttgctccagatattcaaacagctgatgaagctcttgatcttattgttactgctattgaagaagctggttatactggaaaaataaaaattgcattagatgttgctgctagtgaattttataagaatggcaaatatgatttagattttaaaaatcctgaaagtgattcttctcaacataaaacttctaaagaacttgctgatatctatttagatctttctaaaaaatatcctatagtttctattgaaaatcctgttgatcgggatgattgggatgcttggatttatgtatctagacgtgcgacgtttcaaatggtcggtgatgatttgactgttacaaatgtttctcgaataaacgaagctgctgataaaaaggcttgtaattgtttgcttttgaaaattaatcagataggaaccatttctgaaagtatcgatgcttttaaaacagcttttgatgctggctggggagttatggtttcccatcgtagcggcgaaactgaagatacagtcattgctgatcttgttgttggtcttggtactggtcaaattaagactggtgctccgtgccgttcagagcgtgtagcaaaatataatcagcttttaaggattgaagaagaacttaaccattctgtttatgcttcaatgaattacattaaaaatattaaataatatatttattatttcctgtgattttgatatgtttttgttaaatcaaatggcttaaatataataaaaaatatttttttattttttgtttaaaaaaaaaaaaaaaaagc

SEQ ID NO: 4034 - protein, 433 aa, Pneumocystis carinii f
MGIFKIHARSFYDSRGNPTVEVEVTTETGVHRANVPSGASTGIHEALELRDNGSSWSGKGVTLAVSNVNDIIAPSLLSAGIDIKDQRSIDKFLIDLDGTSNKSRLGANAILGVSIAICKAAAAEKGVPLYRHFADIADIKEPFILPLPCFNVLNGGSHAGGRLAFQEFMILPTSAVTFHEAMQQGSEVYSALKKLSRKRYGHSAGNAGDEGGVAPDIQTADEALDLIVTAIEEAGYTGKIKIALDVAASEFYKNGKYDLDFKNPESDSSQHKTSKELADIYLDLSKKYPIVSIENPVDRDDWDAWIYVSRRATFQMVGDDLTVTNVSRINEAADKKACNCLLLKINQIGTISESIDAFKTAFDAGWGVMVSHRSGETEDTVIADLVVGLGTGQIKTGAPCRSERVAKYNQLLRIEEELNHSVYASMNYIKNIK

SEQ ID NO: 4035 - DNA, 1320 bp, Debaryomyces hansenii
  CDS (1)..(1320)
atggccgtcactaagttatttgctcgttatgtctacgattctcgtggtaacccaactgttgaagttgatttaaccaccgacaagggattattcagatccattgttccatctggtgcttccactggtatccatgaagctttggaattgagagatggtgacaagtccaaatggttaggtaagggtgttaccaaggctgttgccaatgttaacgaactcattgctccagctttcgtcaaggccaacctcgacgtcaccaaccaaagtgccgttgatgacttcttgaacaagttggacggtaccccaaacaagtctaagttaggtgccaatgccatcttaggtgtttctttagccactgctaaggctgctgctgctgaaaagaacgttccattataccagcacttagctgatatttctggttccaagcaagacaagtttgtcttaccagttccattccaaaacgtcttgaacggtggttcccatgctggtggtgctttagctttccaagaattcatgattgtcccaactgacgctccaaccttctctgaagctttgagaatgggttctgaagtctaccacaacttgaagtccttgaccaagaagaagtacggtcaatccgctggtaacgtcggtgatgaaggtggtgttgctccagatatcggttctccaagagaagctttagacttgatcatggatgctattgacaaggctggttacaagggtaagatcggtattgccttagatgttgccgcttctgaattctacaaagacggtaagtacgatttagacttcaagaatccaaactctgacgaatctaagtggttatctggtgaacaattagcttccttatacgaagaattgatcaacgaatacccaattgtttctattgaagatcctttcggtgaagatgactgggatgcttgggttcacttctactccaaggtttcttccaaggtccaaatcgttggtgatgacttaactgtcactaacccattaagaatcaagaccgccattgaaaagaaggccgccaacgctttgttattaaaggtcaaccaaattggttctttaactgaatccatcaaggctgctcaagactcctttgatgctacctggggtgttatggtttcccacagatctggtgaaaccgaagataccttcattgctgatttatctgttggtttaagagctggtcaaattaagactggtgccccagccagatctgaaagattagccaagttaaaccaaatcttaagaatcgaagaagaattaggtgacaaggctatctacgctggtaagaacttccacgctgcttctcaattataa

SEQ ID NO: 4036 - protein, 439 aa, Debaryomyces hansenii
MAVTKLFARYVYDSRGNPTVEVDLTTDKGLFRSIVPSGASTGIHEALELRDGDKSKWLGKGVTKAVANVNELIAPAFVKANLDVTNQSAVDDFLNKLDGTPNKSKLGANAILGVSLATAKAAAAEKNVPLYQHLADISGSKQDKFVLPVPFQNVLNGGSHAGGALAFQEFMIVPTDAPTFSEALRMGSEVYHNLKSLTKKKYGQSAGNVGDEGGVAPDIGSPREALDLIMDAIDKAGYKGKIGIALDVAASEFYKDGKYDLDFKNPNSDESKWLSGEQLASLYEELINEYPIVSIEDPFGEDDWDAWVHFYSKVSSKVQIVGDDLTVTNPLRIKTAIEKKAANALLLKVNQIGSLTESIKAAQDSFDATWGVMVSHRSGETEDTFIADLSVGLRAGQIKTGAPARSERLAKLNQILRIEEELGDKAIYAGKNFHAASQL

SEQ ID NO: 4037 - DNA, 1320 bp, Debaryomyces hansenii
  CDS (1)..(1320)
atgactatttctaaagttcattcacgttatgtatacgattcccgtggtaatccaactgtagaggttgatgttacaaccgaaaatggcttatttagagcaattgtaccttcaggagcatctactggtatcaatgaagctatggaattaagagatggtgataaatctaaatggcaaggaaaaggtgtaactaaggctgttgataatgtcaacaaaacaattgctccacatttgataaagtcaggtcttgatgaaaagaatcaagaagaaatcgattctttcttgttgaaattggatggcaccccaaataagaggagcttgggtgcaaacgccatacttggagtctctttggctgttgctaaagctggtgctgcagcaaaacaagtcccactatatagacatattgctgatataagcaaatcgaagcaagacaaatatgttttgccagttccattccagaacgttttaaacggtggttctcatgctggcggttcgttagcgttccaagaatttatgatagctccaacaaacgcgccaagtttttccgaggctttgagaattggttccgaagtctatcaccatttaaagtctttaaccaagagtaagtacggacaatctgctggcaatgttggagatgaaggtggtgtagcaccagatattgaaactcctgaagaagcactcgatttgattgttgcttctattgaaaaggctggctacaagggtaaggtatccattgccttagacgtagcatcatccgaattttacaaggatggtaaatatgacttagatttcaaaaatccaaattctgataaatctaaatggttatcgggagaccagttggccgatttatatgaaagcttaattgataattatccaattatatcaattgaagacccattttcagaagaagattgggatgcatggtctaatttttaccctaaggtggcctctaagttacagattgttggtgatgacttaactgtaactaacccaatcttcattaaaaaggctatagagaaaaaggctgcaaacgcgttattgttgaaagtgaatcaaattggtacacttactgagtcaattaaggcagcccaacttgcgttcagcgataaatggggagttatggtttctcacagatctggtgaaacagaagatcatattattgctgatattgtagttggtttaagaactggccaaattaagacgggtgctccttccagatccgaaagattagccaaattaaaccaaattctaagaattgaacaggaattgggagatgatgctgtatattctggtaagggtttccataccgctcagaatttgtaa

SEQ ID NO: 4038 - protein, 439 aa, Debaryomyces hansenii
MTISKVHSRYVYDSRGNPTVEVDVTTENGLFRAIVPSGASTGINEAMELRDGDKSKWQGKGVTKAVDNVNKTIAPHLIKSGLDEKNQEEIDSFLLKLDGTPNKRSLGANAILGVSLAVAKAGAAAKQVPLYRHIADISKSKQDKYVLPVPFQNVLNGGSHAGGSLAFQEFMIAPTNAPSFSEALRIGSEVYHHLKSLTKSKYGQSAGNVGDEGGVAPDIETPEEALDLIVASIEKAGYKGKVSIALDVASSEFYKDGKYDLDFKNPNSDKSKWLSGDQLADLYESLIDNYPIISIEDPFSEEDWDAWSNFYPKVASKLQIVGDDLTVTNPIFIKKAIEKKAANALLLKVNQIGTLTESIKAAQLAFSDKWGVMVSHRSGETEDHIIADIVVGLRTGQIKTGAPSRSERLAKLNQILRIEQELGDDAVYSGKGFHTAQNL

SEQ ID NO: 4039 - DNA, 1296 bp, Erwinia carotovora subsp
  CDS (1)..(1296)
atgtccaaaattgttaaagtcatcggccgtgaaatcatcgactcacgcggaaacccaactgttgaagctgaagttcatctggaaggtggttttgtaggtctggctgctgcgccatcaggagcttctactggctctcgcgaagcgctggaactgcgtgacggtgacaaatcccgttttctgggcaaaggcgtaacgaaagccgttgctgctgttaacggcccgattgctcaggctgtactgggtaaagacgcgaaagatcaggcgaacatcgacaagatcatgatcgacctggatggtactgaaaacaaatctcagttcggtgctaacgccattctggccgtttctctggcagccgctaaagcagcagctgcgtcaaaaggcctgccgctgtacgctcacatcgctgagctgaacggcaccccaggtaaatattctatgccactgccaatgatgaacatcatcaacggcggcgagcacgcggataacaacgttgatatccaagaattcatgattcagcctgttggtgcgaaaaccctgaaagaagccatccgtatgggttctgaagtgttccacactctggcaaaagttctgaaatcaaaaggtatggggactgctgttggtgacgaaggtggctatgcgccaaacctgggttccaacgccgaagcgctggccgttatcgcagaagcggtaaaagcagcaggctacgagctgggcaaagacatcactctggcgatggactgtgcagcatctgaattctacaaagacggtaaatacgttctggctggcgaaggcaacaaatcgttcacctctgaagaattcacccacttcctggaagatctgaccaaacagtacccgatcgtgtctatcgaagacggtctggacgaatctgattgggctggcttcgcttaccagactaaagttctgggcgacaaaatccagctggttggtgacgatctgttcgtaaccaacaccaagatcctgaaagaaggcatcgataaaggcatcgctaactctatcctgatcaaattcaaccagatcggttctctgaccgaaacactggctgcgattaaaatggcgaaagatgcaggctacaccgctgttatctctcaccgttcaggcgaaactgaagatgcaaccatcgctgacctcgcagtaggtacagctgcgggccagatcaaaaccggttctatgagccgttctgaccgtgttgctaaatacaaccagctgattcgtattgaagaagcgctgggtgactctgcgccgttcaacggcctgaaagaagttaaaggccaataa

SEQ ID NO: 4040 - protein, 431 aa, Erwinia carotovora subsp
MSKIVKVIGREIIDSRGNPTVEAEVHLEGGFVGLAAAPSGASTGSREALELRDGDKSRFLGKGVTKAVAAVNGPIAQAVLGKDAKDQANIDKIMIDLDGTENKSQFGANAILAVSLAAAKAAAASKGLPLYAHIAELNGTPGKYSMPLPMMNIINGGEHADNNVDIQEFMIQPVGAKTLKEAIRMGSEVFHTLAKVLKSKGMGTAVGDEGGYAPNLGSNAEALAVIAEAVKAAGYELGKDITLAMDCAASEFYKDGKYVLAGEGNKSFTSEEFTHFLEDLTKQYPIVSIEDGLDESDWAGFAYQTKVLGDKIQLVGDDLFVTNTKILKEGIDKGIANSILIKFNQIGSLTETLAAIKMAKDAGYTAVISHRSGETEDATIADLAVGTAAGQIKTGSMSRSDRVAKYNQLIRIEEALGDSAPFNGLKEVKGQ

SEQ ID NO: 4041 - DNA, 1362 bp, Mesoplasma florum L1
  CDS (1)..(1362): transl_table=4
atgtcaagaattgagaaaattattgcacgtgaagtattagactcacgtggaactccaactgttgaagttgaattatgaactgaatttggtggttatggaattgctaaagcaccatcaggagcatcaactggagaaaacgaagctttagaactaagagatggagacaaagcacgttacaacggtaaaggtgttttaaaagcagttgctaatgtaaacgataaaatcgcaccagctttaattggacacgatgttcaagaccaattaggtttagacagagtaatgattaaattagatggaactgaatttaagaaaaaattaggagcaaacggtatgttagctgtttcattagctgcagctcacgcagcagcaagtgaattagaagttcctttatacagatacattggtggagttcaagcaaaacgtttacctgttccaatgttaaatgttattaatggtggagaacatgctgattcagcaatcgatttccaagaattcatgattatgccagttggagcaccaacatttaaagaagcattaagatgatcatcagaaactttccaagcattaaaatcattattacatgataaaggtgatattactgctgttggagacgaaggtggatttgcacctcatttctcatgagcatatgctaaacaagacttagcttcatttaaagctaaaacacctgctgaaattgcattagacttattagttgaagctattacaaaagctggttacaaagttggtaaagatggaatcatgatcgcaatggactgtgcttcatcagaattatactttgaagacaaaaaataccacttcaaaaaaattgaaaaagttactggtcaagaatgagcattcactacagaagaaatgattgcttacttagaaaaattagtaaacaactacccaattatttcaatcgaagatggattaagtgaaaaagactgagatggatttgttcaattaactgaaaaaattggagacagagttcaaatcgttggagatgacttatttacaacaaacccaagatttattaaagaaggaatcagcaaagatgctgctaactcaactttaattaaattaaaccaaattggaactttatcagaaactgttgaagctattactatgactcaaaaagctggttgaactgcagttgtttcacaccgttcaggagaaacagaagacgcaacaatcgctgacttagctgtagcatttaatgcaggtcaaatcaaaacaggatcaatgtcacgttcagatagaattgcaaaatacaacagattattacaaatcgaagaccaattaggtgaagatgcaatttatgatggatatgcaacattctataacttaaaaattaataaataa

SEQ ID NO: 4042 - protein, 453 aa, Mesoplasma florum L1
MSRIEKIIAREVLDSRGTPTVEVELWTEFGGYGIAKAPSGASTGENEALELRDGDKARYNGKGVLKAVANVNDKIAPALIGHDVQDQLGLDRVMIKLDGTEFKKKLGANGMLAVSLAAAHAAASELEVPLYRYIGGVQAKRLPVPMLNVINGGEHADSAIDFQEFMIMPVGAPTFKEALRWSSETFQALKSLLHDKGDITAVGDEGGFAPHFSWAYAKQDLASFKAKTPAEIALDLLVEAITKAGYKVGKDGIMIAMDCASSELYFEDKKYHFKKIEKVTGQEWAFTTEEMIAYLEKLVNNYPIISIEDGLSEKDWDGFVQLTEKIGDRVQIVGDDLFTTNPRFIKEGISKDAANSTLIKLNQIGTLSETVEAITMTQKAGWTAVVSHRSGETEDATIADLAVAFNAGQIKTGSMSRSDRIAKYNRLLQIEDQLGEDAIYDGYATFYNLKINK

SEQ ID NO: 4043 - DNA, 1296 bp, Acinetobacter sp
  CDS (1)..(1296)
atgttcatgagccaaatcgttgacattcgtgcacgtgaaattttggactctcgtggtaacccgaccatcgaagcagacgtaatcttagcatctggcgtagttggccgtgcatgtgcaccatctggtgcttcaactggttctcgtgaagcgttagaacttcgtgatggcgacaaagcacgctatttgggtaaaggtgttaaaactgcggttaacaatgtcaacaccattatccgcgatgctttagtgggcaaatcagtatttgaacaaaaagacatcgataatacgatgattgagcttgatggtactgaaaataaagaaaaattaggcgcaaatgcaactttagcggtatcgctagctgctgcacgcgctgctgccgatgaaaagaaaattcctcttttccaatacatcgcagacttacgtggtcaaaccattttgacgatgcctgtacctatgatgaacatcatcaatggtggttcgcatgcagataataacgttgatattcaagaatttatgattgagcctgttggcttcacttcattctctgaagcattgcgtgcaggtgctgaaatcttccattctctaaaatcagttttaaacaaaaaaggtttaaacactgctgtaggtgatgaaggtggttttgcgccaaacttgcgttctaacgaagaggcaatcactgttattcttgaagcgattggtcaaactggctataaggcgggttctgacatcatgcttgcacttgactgtgcatcttcagaattctacaaaaatggtcagtacatcttggcaggtgaaggcaataaagcattcacaagcaatcagttctctgactatttagcgggtcttgtaaaccagtatccaattatctcaattgaagatggtttagatgagtctgattgggaaggttggtcttacttgacatctattttaggtgacaaaatccagttggtgggtgatgacttgttcgttaccaacccgaaaatccttcaacgtggtatcaatgagaaagtaggtaactctatcttaatcaagtacaatcaaattggtaccttgactgaaacgcttgatgcaatctatcttgctaaagacaatggttactctacagtgatttcacaccgttcaggtgaaactgaagattcaaccatcgccgatcttgctgtgggtactgctgcaggtcaaatcaaaacaggttcactttgccgttctgatcgtgtagcaaaatataaccaattacttcgtattgaagaattgactaaagcagcttatcgcggtaaagctgaattcaaaggcttaaattaa

SEQ ID NO: 4044 - protein, 431 aa, Acinetobacter sp
MFMSQIVDIRAREILDSRGNPTIEADVILASGVVGRACAPSGASTGSREALELRDGDKARYLGKGVKTAVNNVNTIIRDALVGKSVFEQKDIDNTMIELDGTENKEKLGANATLAVSLAAARAAADEKKIPLFQYIADLRGQTILTMPVPMMNIINGGSHADNNVDIQEFMIEPVGFTSFSEALRAGAEIFHSLKSVLNKKGLNTAVGDEGGFAPNLRSNEEAITVILEAIGQTGYKAGSDIMLALDCASSEFYKNGQYILAGEGNKAFTSNQFSDYLAGLVNQYPIISIEDGLDESDWEGWSYLTSILGDKIQLVGDDLFVTNPKILQRGINEKVGNSILIKYNQIGTLTETLDAIYLAKDNGYSTVISHRSGETEDSTIADLAVGTAAGQIKTGSLCRSDRVAKYNQLLRIEELTKAAYRGKAEFKGLN

SEQ ID NO: 4045 - DNA, 1314 bp, Candida glabrata
  CDS (1)..(1314)
atggctgtctctaaggtttacgctagatccgtctacgactcccgtggtaacccaactgtcgaagttgaattgaccaccgaaaagggtgtcttcagatccattgtcccatctggtgcttctactggtatccacgaagctttggaaatgagagatggtgacaagtccaagtggttgggtaagggtgtcgaaaacgctgtcaagaacgttaacgacgtcattgctccagctttcgtcaaggctaacgttgacatcaaggaccaaaaggccgtcgatgacttgttgttgtctctagatggtactgctaacaagtccaagctaggtgctaacgctatcttgggtgtctccatggccgctgccagagccgctgctgctgaaaagaacgtcccattgtaccaacacttggctgacttgtctgactccaagacctctccattcgtcttgccagttccattcttgaacgtcttgaacggtggttcccacgctggtggtgctttggctttgcaagaattcatgatcgccccaaccggtgctaagtctttccgtgaagctatgagaattggttccgaagtctaccacaacttgaagtctttgaccaagaagagatacggttcctccgccggtaacgtcggtgacgaaggtggtgtcgctccagacattcaaaccgctgaagaagctttggacttgatcgttgacgctatcaaggccgctggtcacgaaggtaaggtcaagatcggtttggactgtgcctcctccgaattcttcaaggacggtaagtacgacttggacttcaagaaccctaactctgacgcttccaagtggttgtccggtccacaattggctgacttgtaccactccttggtcaagaagtacccaattgtctccatcgaagatccattcgctgaagatgactgggaagcttggtcccacttcttcaagaccgctggtgttcaaattgttgctgatgacttgactgtcaccaacccaaagagaattgccaccgctattgaaaagaaggccgctgacgctttgttgttgaaggttaaccaaatcggttctctatccgaatccatcaaggctgctcaagactctttcgctgccggctggggtgtcatggtttcccacagatctggtgaaactgaagacactttcattgctgacttggtcgtcggtttgagaactggtcaaatcaagaccggtgctccagctagatccgaaagattggctaagttgaaccaattgttgagaattgaagaagaattgggtgacaaggctgtctacgctggtgacaacttccaccacggtttcaagttgtaa

SEQ ID NO: 4046 - protein, 437 aa, Candida glabrata
MAVSKVYARSVYDSRGNPTVEVELTTEKGVFRSIVPSGASTGIHEALEMRDGDKSKWLGKGVENAVKNVNDVIAPAFVKANVDIKDQKAVDDLLLSLDGTANKSKLGANAILGVSMAAARAAAAEKNVPLYQHLADLSDSKTSPFVLPVPFLNVLNGGSHAGGALALQEFMIAPTGAKSFREAMRIGSEVYHNLKSLTKKRYGSSAGNVGDEGGVAPDIQTAEEALDLIVDAIKAAGHEGKVKIGLDCASSEFFKDGKYDLDFKNPNSDASKWLSGPQLADLYHSLVKKYPIVSIEDPFAEDDWEAWSHFFKTAGVQIVADDLTVTNPKRIATAIEKKAADALLLKVNQIGSLSESIKAAQDSFAAGWGVMVSHRSGETEDTFIADLVVGLRTGQIKTGAPARSERLAKLNQLLRIEEELGDKAVYAGDNFHHGFKL

SEQ ID NO: 4047 - DNA, 1317 bp, Candida glabrata
  CDS (1)..(1317)
atgtcagtcactaaagtccacgccagaacagtctatgactccagaggtaaccctacagttgaagtagaggtctacaccaaggacggtatgttcagggctattgtcccatccggtgcctcaacgggttctcatgaagccctcgagcttcgtgacggtgacaagtccaagtgggaaggtaaaggtgtcaccaaggctgtctccaatgtcaacgatatcattggaccaaagctgattgaatccaagctggatgtcaaggaccaaaaagccatcgatgagttcatgatcaagcttgacggtacaaagaacaagagtaagttgggtgccaacgcaatcttgggtgtttctttggctgtcgctagggccggtgccgctgccaaaggggtgccactgtaccaacacatcgctgagttggcggacatgaagaaagaaccatacgtcattccttgtcctttcttcaacgtcttgaacggtggtgtccatgctggtggtaacctggctttgcaagaatttttaattgctcctgttggcgctgagtccttccatgaggctttgagactaggttccgaagtctaccacaagttgaaggccttggctaagaagagaatcggctcttctgctggcaatgtcggtgatgagggtggtatcgccccatctctatctactccattcgaagctttggatttgatctacgacgctatcaaagaagctggtcacgaaggtaaggtgaagattgccatggaccccgcttcttcggaatttttccaaggtgacaagtatgacttggactttaagaacccacatccagatgctaagaacaagttgtcaggtgctcaactcggtgactactacaagaccattttggaaaaatatccaattgtgtctttggaagatccatttgctgaagacgactgggaggcttggactaacttcttccctaaggcaggtgttcaaatcatcgctgatgacttaactgtcaccaaccctgaaagaatccaaactgccattgacaagaagactgctgactgtttgttgttgaaggttaaccaaattggttctttgacagaatcaattaactctgctaagctggcttacggtgccggctggggtgtccaggtttcccatagatctggtgaaactgaagacactttcattgctgatcttgttgttggtttgagaactggtcaaattaaatctggttctctggctagatcagaaagattggcaaagtggaaccaaattttgagaattgaagaggaattgggtgcttcaaacacaatttttgcaggtgccaaattccataagggacaattgttgtaa

SEQ ID NO: 4048 - protein, 438 aa, Candida glabrata
MSVTKVHARTVYDSRGNPTVEVEVYTKDGMFRAIVPSGASTGSHEALELRDGDKSKWEGKGVTKAVSNVNDIIGPKLIESKLDVKDQKAIDEFMIKLDGTKNKSKLGANAILGVSLAVARAGAAAKGVPLYQHIAELADMKKEPYVIPCPFFNVLNGGVHAGGNLALQEFLIAPVGAESFHEALRLGSEVYHKLKALAKKRIGSSAGNVGDEGGIAPSLSTPFEALDLIYDAIKEAGHEGKVKIAMDPASSEFFQGDKYDLDFKNPHPDAKNKLSGAQLGDYYKTILEKYPIVSLEDPFAEDDWEAWTNFFPKAGVQIIADDLTVTNPERIQTAIDKKTADCLLLKVNQIGSLTESINSAKLAYGAGWGVQVSHRSGETEDTFIADLVVGLRTGQIKSGSLARSERLAKWNQILRIEEELGASNTIFAGAKFHKGQLL

SEQ ID NO: 4049 - DNA, 1269 bp, Bartonella quintana
  CDS (1)..(1269)
atgactataattgtcgatatcattgggcgtgaaatacttgatagccgagggaatccaacagtagaagttgatgttcatttggaaaatgggattgtaggtcgtgcttttgttccttcaggcgcatctaaaggggcccatgaagctgtagaacttcgtgatggtgggatacgttatcaaggtaaaggtgttgaaagagcggttgctgcagtaaatggtgaaattcttgaggaacttgttgggcgagatgcaagaaatcaaatcgctattgatcaagcaatgattgctttggatggaacaccaaataaagcgcgtcttggtgcgaatgctattctcggcgtttcattggctgttgcgaaagcagcagcagaatcattgtgtttacctttatatcgttatattggtggtacacaagcgcatgttcttccaactcccatgatgaatattattaatggtggtgtccatgctgataactcgattgattttcaagaatttatgattattcccgtaggtgcatctacgctgaaagaagcagttcgctacggtgctgaaatttttcatatgttaaaaaagcgcttaaaagatgcgggtcataataccaatgttggtgatgaaggtggttttgccccccagtttaaaagtgctgagcaggcaattgattttattatggaatctataataacctgtggttataaaccaggggaacagattgcacttggtttagattgtgcttcaaccgaattttataaaaatggttcgtatttttataaaggtgaagggaaatgtcgtaatacccaagaacaggtcgattatttggcgcaacttgttaaaacttatcctattattacgattgaagatgggatggctgaggacgattgggaaggttggaagttactcactgactcgattggtaaacaatgtcagcttgttggcgatgatttatttgtaacaaattcagcgcgtttgcgcgatggtatcaaaatgggtgcggccaattctattcttatcaaaatgaaccagattggcacgttgagtgagacacttgatgctgtagagacagcgcatagagcaagctatcgtgctattatatcgcatcgctcgggcgaaacggaggattcttttattgcggatcttgctgttgcaaccaattgtggacaaattaaaactggttcgcttgcccgttcggatagattagcaaaatataatcagctcattcgcattgaagaaatgctaggggcacaggcatgttatgctggtaattggcattgttga

SEQ ID NO: 4050 - protein, 422 aa, Bartonella quintana
MTIIVDIIGREILDSRGNPTVEVDVHLENGIVGRAFVPSGASKGAHEAVELRDGGIRYQGKGVERAVAAVNGEILEELVGRDARNQIAIDQAMIALDGTPNKARLGANAILGVSLAVAKAAAESLCLPLYRYIGGTQAHVLPTPMMNIINGGVHADNSIDFQEFMIIPVGASTLKEAVRYGAEIFHMLKKRLKDAGHNTNVGDEGGFAPQFKSAEQAIDFIMESIITCGYKPGEQIALGLDCASTEFYKNGSYFYKGEGKCRNTQEQVDYLAQLVKTYPIITIEDGMAEDDWEGWKLLTDSIGKQCQLVGDDLFVTNSARLRDGIKMGAANSILIKMNQIGTLSETLDAVETAHRASYRAIISHRSGETEDSFIADLAVATNCGQIKTGSLARSDRLAKYNQLIRIEEMLGAQACYAGNWHC

SEQ ID NO: 4051 - DNA, 1296 bp, Bacillus thuringiensis serovar konkukian str
  CDS (1)..(1296)
atgtcaacaattattgatgtttatgctcgcgaagtccttgactctcgtggtaacccaactgtagaagtagaagtttacacagaaagcggcgctttcggacgcgctatcgtaccaagtggtgcatctactggtgagcacgaagcagtagaattacgtgacggtgacaaatctcgttaccttggtaaaggtgttatgaacgcagtaaacaacgttaatgaagcaatcgctccagaaatcgttggtttcgacgtaactgaccaagctggtatcgaccgtgctatgatcgaattagatggcactccaaacaaaggtaaactaggcgctaacgctatccttggtgtatctatggcagtagctcacgcagcagctgacttcgtaggtcttccattataccgttaccttggtggattcaatgcaaaacaattaccaactccaatgatgaacatcatcaacggtggttctcacgctgataacaacgttgacttccaagagttcatgatcttaccagttggtgctccaacattcaaagaatcaatccgtatgggtgctgaagtattccatgcacttaaagctgtattacatgacaaaggtcttaacactgcagtaggtgacgaaggtggattcgctccaaaccttggttctaaccgtgaagcattagaagtaatcatcgaagctatcgaaaaagctggttacaaagctggcgagaacgtattcttaggaatggacgttgcttcttctgagttctacaacaaagaaactggtaaatatgaccttgcaggtgaaggccgtactggcttaacttctgcagaaatggttgatttctacgaagagctttgcaaagacttcccaatcatctctatcgaagatggtttagacgaaaacgactgggatggtcacaaattattaactgagcgtatcggtgataaagtacaattagttggtgacgatttattcgtaactaacactcaaaaacttgctgaaggtatcgaaaaaggtatctctaactcaatcttaattaaagttaaccaaatcggtactttaactgagactttcgaagctatcgaaatggctaaacgtgctggttacacagcagttgtatctcaccgttctggtgaaactgaagatgctacaattgctgacatcgcagttgcaactaacgctggccaaatcaaaactggttctatgagccgtactgaccgtattgctaagtacaaccaattattacgcatcgaagacgaactaggcgaaatcgctgtttacgatggtatcaaatctttttataacatcaaacgataa

SEQ ID NO: 4052 - protein, 431 aa, Bacillus thuringiensis serovar konkukian str
MSTIIDVYAREVLDSRGNPTVEVEVYTESGAFGRAIVPSGASTGEHEAVELRDGDKSRYLGKGVMNAVNNVNEAIAPEIVGFDVTDQAGIDRAMIELDGTPNKGKLGANAILGVSMAVAHAAADFVGLPLYRYLGGFNAKQLPTPMMNIINGGSHADNNVDFQEFMILPVGAPTFKESIRMGAEVFHALKAVLHDKGLNTAVGDEGGFAPNLGSNREALEVIIEAIEKAGYKAGENVFLGMDVASSEFYNKETGKYDLAGEGRTGLTSAEMVDFYEELCKDFPIISIEDGLDENDWDGHKLLTERIGDKVQLVGDDLFVTNTQKLAEGIEKGISNSILIKVNQIGTLTETFEAIEMAKRAGYTAVVSHRSGETEDATIADIAVATNAGQIKTGSMSRTDRIAKYNQLLRIEDELGEIAVYDGIKSFYNIKR

SEQ ID NO: 4053 - DNA, 1368 bp, Mycoplasma mobile
  CDS (1)..(1368): trans_table 4
atgtcagcaattatgagaattcacgcaagagaagttttagattctcgtggaaatccaacaattcaaattgaagttgaatcagaatatggttatgggagtgcaatggtcccttctggagcttcaacgggtgaaaaagaagctaaagaattaagagataaaggtacaaagtatgagaaaaattgatatggtggaaaaggtgttcaaaccgctgttgataatgtaaataatattattgcaccaaaaatcgaaggttatgatgttcttgatcaaagagcaattgattatgaaatgattaaattagacggaacagaattcaaggaaaaattaggagcaaatgcaatactaggagtatctttagcggttgctaaagcagcagcagatgaattaaacattcctttatatcgttatgttggtggaacaaatggctttaagttacctgttccaatgcttaatgtgattaatggtggagaacatgcttcaaacactgttgattttcaagagtttttaattatgccaattggagcaaaaacttttaaagaagcaatgcaagttgcaaacaaagtatttcacaatttaaaagatttattagcttcacaaggtcattcaacagctgtgggagacgaaggtggatttgcacctgatttaaaatctcatgaagaagttttagattttattgtttcagcgattaaaaaagctggatatgaaccaagtaaaaaaggagacaaggctgttgctattgcaattgatgcagcatcaagtgaattatttgataaaaaatcaaaaacatacactttcaaaaaacttaaaaaagctattttaactaaacaaccaggatttgaaaatttaggaaaagttaaagttgaatattcatcagatgaacttgttgagtactttaaagatttgtttaaaaagtatccaatcatttctttagaagatggtttttcagaacatgattgagatgcttttacaaaattaaataattctgttggcgcaacacatcaaattatgggtgatgacttagtaacaactaatccaaaattcattaaaaaagcaattgaaactaaggcaataaattctgttttaattaaattaaaccaaatcggaactctttcagaaacaatggatgcaatcgaaatggctcataaagctggtatgacttgtgtggtttctcaccgttcaggagagactgaagatactacaattgctgatttagcagttgctttaaatacaggacaaattaaaactggttcaatttcaagaacagatagagttgcaaagtacaatagattattagtaattgaagaagaattaggcatagttgcttcttatgaaggaatccaagtttttcacaacttaaaagttaaataa

SEQ ID NO: 4054 - protein, 455 aa, Mycoplasma mobile
MSAIMRIHAREVLDSRGNPTIQIEVESEYGYGSAMVPSGASTGEKEAKELRDKGTKYEKNWYGGKGVQTAVDNVNNIIAPKIEGYDVLDQRAIDYEMIKLDGTEFKEKLGANAILGVSLAVAKAAADELNIPLYRYVGGTNGFKLPVPMLNVINGGEHASNTVDFQEFLIMPIGAKTFKEAMQVANKVFHNLKDLLASQGHSTAVGDEGGFAPDLKSHEEVLDFIVSAIKKAGYEPSKKGDKAVAIAIDAASSELFDKKSKTYTFKKLKKAILTKQPGFENLGKVKVEYSSDELVEYFKDLFKKYPIISLEDGFSEHDWDAFTKLNNSVGATHQIMGDDLVTTNPKFIKKAIETKAINSVLIKLNQIGTLSETMDAIEMAHKAGMTCVVSHRSGETEDTTIADLAVALNTGQIKTGSISRTDRVAKYNRLLVIEEELGIVASYEGIQVFHNLKVK

SEQ ID NO: 4055 - DNA, 1302 bp, Photobacterium profundum
  CDS (1)..(1302)
atgtctaagatcgttaaagttctaggtcgtgaaatcatcgattcacgtggtaacccaacagtagaagctgaagttcacctagaaggcggtttcgtaggtatggctgctgctccatctggcgcatcaacaggttctcgtgaagctcttgaactacgtgatggcgacaagtctcgcttcctaggtaaaggcgttcttaaagctcttgaagctgtgaacggtcctatcgctgaagcgctacttggtaaagatgcaacagatcaagctgcaatcgatcaggtaatgatcgacctagacggtactgaaaacaagtctaagtttggtgctaacgcaattcttgctgtttctctagcaaacgctaaagcaggcgctgcagctaaaggcatgcctttatacgagcacattgcagaactaaacggtactgcgggtcagttctctatgcctcttccaatgatgaacatcatcaacggtggcgagcacgctgataacaacgttgatatccaagagtttatgattcagcctgttggcgctaaaactttccgtgaagcggtacgtattggtgctgaagtattccacaacctagctaaagtacttaaggctaaaggcctaagcacagcagttggcgatgaaggtggttttgctcctaacctagaatctaacgctgcagcactagctgcaatcaaagaagcggttgaagcggctggttacgagctaggtaaagacgttactctagcaatggactgtgcagcatctgagttttacgacaaagaagctggcaactacaacatgaaaggcgaaggtaaaatctttacttctgaagagtttaacttctacctacaagaccttgctaaccaatacccaatcgtatctatcgaagacggtcttgacgaatcagattgggctggcttcaagcaccaaactgaacttctaggcgacaagcttcaaatcgttggtgacgatctattcgttacaaacacgaagattcttgctgaaggtattgagaaaggcgttgctaactcaatccttatcaagttcaaccaaatcggttctctaacagagactctagctgcaatcaagatggctaaagatgctggttacacagctgtaatctctcaccgttctggcgaaactgaagatgcaactatcgctgatctagcggtaggtacagctgcaggtcaaatcaagactggttctatgagccgttctgaccgtgttgctaagtacaaccagctacttcgtatcgaagaagcgctaggcgcgaaagcacctttcaacggtcttaaagaagttaaaggtcaagcttaa

SEQ ID NO: 4056 - protein, 433 aa, Photobacterium profundum
MSKIVKVLGREIIDSRGNPTVEAEVHLEGGFVGMAAAPSGASTGSREALELRDGDKSRFLGKGVLKALEAVNGPIAEALLGKDATDQAAIDQVMIDLDGTENKSKFGANAILAVSLANAKAGAAAKGMPLYEHIAELNGTAGQFSMPLPMMNIINGGEHADNNVDIQEFMIQPVGAKTFREAVRIGAEVFHNLAKVLKAKGLSTAVGDEGGFAPNLESNAAALAAIKEAVEAAGYELGKDVTLAMDCAASEFYDKEAGNYNMKGEGKIFTSEEFNFYLQDLANQYPIVSIEDGLDESDWAGFKHQTELLGDKLQIVGDDLFVTNTKILAEGIEKGVANSILIKFNQIGSLTETLAAIKMAKDAGYTAVISHRSGETEDATIADLAVGTAAGQIKTGSMSRSDRVAKYNQLLRIEEALGAKAPFNGLKEVKGQA

SEQ ID NO: 4057 - DNA, 1293 bp, Methanococcus maripaludis
  CDS (1)..(1293)
atgttaagaaacatggacgattcatttgatatatatgaaataaaagcaagacaggtacttgattcacggggaaacccaactgtggaagctgaagtgttaactgcaggtggtggatacggtcatacaattgttccaagcggtgcttcaacaggaactttcgaagcagttgaattaagagataaaaaagaaaaatatggcggaaaaagcgtattaaatgcagtttcaaacgtaaatgatattattgcacaggaattaatcggtgaagatgcaagaaaccagagattaattgatcaaataatgttaaacttggatggaactgaaaataaaggaaatttgggcgcaaatgcaattttagcagtttcacttgcagttgcaaaagcagcggcagacactgcatcacttccactttataaatacatcggtggctctaacgcatatgttatgcctgccccaatgatgaacgtgttaaacggtggccagcacgcaggaaatgcacttgattttcaggaattcatgataatgccagttggcgcggattcatttgcagaagctgtaagaatgtgttctgaaacataccaatctttgaaaaaagtagttgctgaaaaatacggaaaagatgctgtaaatgtaggggatgaaggtggatttgcaccccctgtaaaaacaatcgacgaagctctcgcagtacttttagaaggggttaaaaaagcaggttatgaagacgaaatcgtctttacaatcgattctgccgcaagtgagttttacgatgaaaaatccggttcatatatgattgcaggagaaaaagtttcaaccgataaattaatcgatatttacaaagaaatggttgaacaatatccaattgtttcaattgaggatccattgtttgaagaagatttcgaaggatttaaaactgcaacaaaagagttaaaaggaattcagattgtcggtgacgatttgtttgttacaaacacgaaaagactcaaaaaaggaattgaaatgggcgctgcaaattcacttctcttgaaagtaaatcagattggaaccctttcagaatcaatcgatgctgcaaacatggcatttagaaatggatacagtttggttgtttcacacagaagtggagaatcagaggactcaacaattgcagatttagccgttgcactaaatgcaggccagataaaaaccggtgctcctgcaaggggagaaagaactgcaaaatacaaccagttaatgagaatcgaagaagaactccagatttcaaaatatgctggaaaagatttcaaaattccattttaa

SEQ ID NO: 4058 - protein, 430 aa, Methanococcus maripaludis
MLRNMDDSFDIYEIKARQVLDSRGNPTVEAEVLTAGGGYGHTIVPSGASTGTFEAVELRDKKEKYGGKSVLNAVSNVNDIIAQELIGEDARNQRLIDQIMLNLDGTENKGNLGANAILAVSLAVAKAAADTASLPLYKYIGGSNAYVMPAPMMNVLNGGQHAGNALDFQEFMIMPVGADSFAEAVRMCSETYQSLKKVVAEKYGKDAVNVGDEGGFAPPVKTIDEALAVLLEGVKKAGYEDEIVFTIDSAASEFYDEKSGSYMIAGEKVSTDKLIDIYKEMVEQYPIVSIEDPLFEEDFEGFKTATKELKGIQIVGDDLFVTNTKRLKKGIEMGAANSLLLKVNQIGTLSESIDAANMAFRNGYSLVVSHRSGESEDSTIADLAVALNAGQIKTGAPARGERTAKYNQLMRIEEELQISKYAGKDFKIPF

SEQ ID NO: 4059 - DNA, 1305 bp, Parachlamydia sp
  CDS (1)..(1305)
atgtcatatataagatctgtaaaaggaagagaaattttagattctagaggtaatccaactgttgaggttgaactaattacagatcaaaatgtcatggttaaagcgtctgttccttctggagcttctacaggagaaaatgaggcattagaattacgtgatggggatctcaattattactttggtaaaggagttttaaaagcaattgctaatattaatggtccaattgcacaaattctggttggagagcaggtctatgatcaagaaagattagatcggatgttaattgaagctgatgggacagacaataaaggtcatttcggagccaacgcgattttaggtgtttcgctagctttagcacgggcgggagcgttgacagcaaatctccctttatatcgctacattggaggggttcatgcccatcttttaccatgtcccatgatgaatattattaatggaggggctcatgctgataactctcttgattttcaagaatttatgattcgacctgttggagcttctactcttcgtgaagcggttcggtggggagctgaaatttttcacacgttaaaaggaatacttaaaaaagctgggcatgtgacagctgttggagatgaagggggttttgcacctaacctttcctcaaatgaagaggctttagaattgattttattagcgattgaaaaagctggttatcaacctggtaaacaagtggttctagcaatggattgtgcagcttcggaattttatgataaaactactaagcaatattttgaaaagaaaaagaaacaaaagaatcaagtatttgcggaaagaaccgctgaagagcaaattgcctatcttgaaaccctttgtcaaaattatccaattgattcaattgaagatgcgttagctgaaggagattggtgtggttggcaacgattaactgaaagattaggacgaaaaatacaaattgtaggagatgatatttttgtcaccaaccccaaatttctggaaaaaggaattgaacttggtgtggggaatgcaattttagtgaaaattaatcaaatcggaacactaaccgaaacgctgcaaacaattcgtttggctcaaactaacaattatgcttgtattatttctcatcgatctggcgaaacagaagatagtatcattgccgatattagtgtagcggctaatacaggacaaatcaaaacaggttctctttctagatctgaccgaattgctaagtacaatcggttattagctattgaggcagaattagaatcgacagcgctttatcaagatagtaatcgatttcagattttctaa

SEQ ID NO: 4060 - protein, 434 aa, Parachlamydia sp
MSYIRSVKGREILDSRGNPTVEVELITDQNVMVKASVPSGASTGENEALELRDGDLNYYFGKGVLKAIANINGPIAQILVGEQVYDQERLDRMLIEADGTDNKGHFGANAILGVSLALARAGALTANLPLYRYIGGVHAHLLPCPMMNIINGGAHADNSLDFQEFMIRPVGASTLREAVRWGAEIFHTLKGILKKAGHVTAVGDEGGFAPNLSSNEEALELILLAIEKAGYQPGKQVVLAMDCAASEFYDKTTKQYFEKKKKQKNQVFAERTAEEQIAYLETLCQNYPIDSIEDALAEGDWCGWQRLTERLGRKIQIVGDDIFVTNPKFLEKGIELGVGNAILVKINQIGTLTETLQTIRLAQTNNYACIISHRSGETEDSIIADISVAANTGQIKTGSLSRSDRIAKYNRLLAIEAELESTALYQDSNRFQIF

SEQ ID NO: 4061 - DNA, 1269 bp, Bdellovibrio bacteriovorus
  CDS (1)..(1269)
atgtctgaaatcatcagtgtcatctctcgtgaaatcctggacagccgtggaaacccgactgtagaggttgaagttacaacagctgacggcaatatgggccgcgcagcagttccatctggtgcctccacaggtgctcacgaagcttgcgagcttcgcgatggcgacaaaaaccgtttcctgggtaaaggcgtttacaaagctgtcgacaatgttcgtgaaaaaatcgctccggaaatcgtgggccttcaggcaactgaacaggtttacatcgataaaatcctgcgcgacatcgacggcactgaaaataaatccaacttgggcgcaaatgcgatcctgggtgtttctttggcagttgccaaagcggcagctaaagactgccgtttgccgctttaccgttacgttggtggctctcaggcttctcgcttgccggttccattgatgaacgttctgaacggtggcgcgcacgcgaacaacggtttggatattcaggaattcatgatcgttccaactgtgaacaactcatacgctgagtccctgcgtgcaggtactgagatcttccacactctgaaaaagatcctggcgaaaaaaggtctttccacagcagtaggtgacgaaggtggcttcgcgccgaaattgggttccaatcaggaagctcttgatttgctgatgaatgcgattgtggatgctggttatgatccaggtcagaacgtgttcctggcgttggacgtggctgcaactgaaatgttcaaagaaggcaaatacgaatggcagggtggtcacatcagcccgaccgaacttcttggcatctacaaatcctgggcagagaaatatcctcttgtttccattgaagacggcttcgcggaagacgactgggattcctgggttcagtccacagctcaaatgggctccactatgcagttgattggtgatgatttgtttgtgaccaatccaaaacgtctgcgcatgggtcttgagaaaaaagcgggtaacgctttgttggtgaaagtaaaccaaatcggtactttgactgaaacttacgaagccgtgaacctggctcaacgtaacaaattccgcacaatcatgtcccaccgctctggtgagacggaagatgtgacgattgcagatctggctgtaggcctgaactgccatcagatcaaaacaggcagcttgtgccgtggtgaaagaaccgcgaagtacaaccagcttctgagaatcgaagaagacttgggcggtatgggcctatactgggacaaagccgccttccgatag

SEQ ID NO: 4062 - protein, 422 aa, Bdellovibrio bacteriovorus
MSEIISVISREILDSRGNPTVEVEVTTADGNMGRAAVPSGASTGAHEACELRDGDKNRFLGKGVYKAVDNVREKIAPEIVGLQATEQVYIDKILRDIDGTENKSNLGANAILGVSLAVAKAAAKDCRLPLYRYVGGSQASRLPVPLMNVLNGGAHANNGLDIQEFMIVPTVNNSYAESLRAGTEIFHTLKKILAKKGLSTAVGDEGGFAPKLGSNQEALDLLMNAIVDAGYDPGQNVFLALDVAATEMFKEGKYEWQGGHISPTELLGIYKSWAEKYPLVSIEDGFAEDDWDSWVQSTAQMGSTMQLIGDDLFVTNPKRLRMGLEKKAGNALLVKVNQIGTLTETYEAVNLAQRNKFRTIMSHRSGETEDVTIADLAVGLNCHQIKTGSLCRGERTAKYNQLLRIEEDLGGMGLYWDKAAFR

SEQ ID NO: 4063 - DNA, 1356 bp, Mycoplasma mycoides
  CDS (1)..(1356): trans_table 4
atgtcaagaatagaaagaattttcgctcgtgaaattctagattcaagaggaacaccaacagttgaagttgaagtttgaactgaatttggtggatatggttgtgctaaagctccttctggtgcttcaactggagttaatgaagctttagaattaagagatggagataaagctcgttataatggtaaaggtgtattaaaagcagttaaaaatgttaatgaaataattgcacctaaactaattggagttgatgctttagatcaattaacagtagatagaataatgttagatttagatggaacagaatttaaaactaaattaggagctaatggaattttagctgtttctttagctgttgcaaaatctgctgctagtgaattagacattccattatataaatatttaggtggagttcaagcaaaaaaattaccagttcctatgttaaatgttattaatggtggagaacacgctgattcagcaattgactttcaagaatttatgattatgccagttggagcaaaatcatttagtgaagctttaagatgatcttctgaaacttttcaagctttaaaatcattattaaaatctaaaaaagatattactgctgttggagatgaaggtggatttgcacctaattttgaatgagcgtatgaaaaacacgatttaaaatcatttaaagcaaaaacaccagctgaaatcgctttagatctattagttgaagctattaaaaaggcaggatacaaaccaggaaaagatggaattatgatcgcaatggattgtgcttcatctgaactatatttagaagataaaaaatatcattttaaaaaaattgaaaaagtaactaaccaagaatgatcattaactacagatgaaatgatttcatatttagaaaaacttgttgataattatccaattatttcaattgaagatggattagctgaaactgactgagaaggatttactaaattaactcaaaaaattggtgataaagttcaaattgttggagatgacttatttacaacaaaccctaaatttattaaacaaggtattaataaaaaagctgcaaactcaactttaattaaactaaaccaaattggtactttaagtgaaactgttgaagcaatcactatgactcaaaaagcgggatgaactgcagttgtatcacatagatctggagaaactgaagatacaactattgctgatttagctgttgcatttaacacaggacaaattaaaactggatcaatgtcaagaagtgatagaattgcaaaatacaatagattattacaaattgaatctgaacttgataaaaatgctgtatatgatggattagaagcattttataatttaaaaaaataa

SEQ ID NO: 4064 - protein, 451 aa, Mycoplasma mycoides
MSRIERIFAREILDSRGTPTVEVEVWTEFGGYGCAKAPSGASTGVNEALELRDGDKARYNGKGVLKAVKNVNEIIAPKLIGVDALDQLTVDRIMLDLDGTEFKTKLGANGILAVSLAVAKSAASELDIPLYKYLGGVQAKKLPVPMLNVINGGEHADSAIDFQEFMIMPVGAKSFSEALRWSSETFQALKSLLKSKKDITAVGDEGGFAPNFEWAYEKHDLKSFKAKTPAEIALDLLVEAIKKAGYKPGKDGIMIAMDCASSELYLEDKKYHFKKIEKVTNQEWSLTTDEMISYLEKLVDNYPIISIEDGLAETDWEGFTKLTQKIGDKVQIVGDDLFTTNPKFIKQGINKKAANSTLIKLNQIGTLSETVEAITMTQKAGWTAVVSHRSGETEDTTIADLAVAFNTGQIKTGSMSRSDRIAKYNRLLQIESELDKNAVYDGLEAFYNLKK

SEQ ID NO: 4065 - DNA, 1284 bp, Rhodopseudomonas palustris
  CDS (1)..(1284)
atgaccgccatcgtcgacatcatcggccgcgaaattctcgacagccgcggcaatccgaccgtcgaagtcgacgtggtgctcgaggacggctccgtcggccgcgccgccgttccgtcgggcgcctccaccggcgcccacgaggcggtcgagctgcgcgacggcgacaaggcccgctatctcggcaagggcgtgcagaaggcggtcgaggcggtcaacggcgagctgttcgacgcgctcggcggcatggacgccgaacagcaggtgcagatcgatcagaccatgatcgagctcgacggcaccccgaacaagggccggatcggcgccaacgccatcctcggcgtttcgctggccgcggcgaaggcggcggcggcatcctacgacatgccgctgtatcgctacgtcggcggcacctcggcccgcaccctgccggtgccgatgatgaacatcgtcaacggcggcgtgcacgccgacaatccgatcgacttccaggaattcatgatcatgccggtcggcgcgccgaccttcgctgacgcgctgcgctgtggctcggagatcttccacaccctcaagggcgaattgaagaaggccggccacaacaccaatgtcggcgacgaaggcggctttgcgccgaacctgccgtcggccgatgcggcgctcgacttcgtcatggccgccatcggcaaggccggctacaaggccggcggcgacgtgatgctggcgctggactgcgccgccaccgagttcttcaaggacggctcctacgtctatggcggcgagaacaagacccgctcgcgctccgagcaggccaagtacctcgccgatctcgtcgcgcgctatccgatcgtgtcgatcgaagacggcatgagcgaagacgacatggacggctggaaggagctgaccgatctgatcggcagcaagtgccagctcgtcggcgacgatctgttcgtcaccaacgtcacccggctcgcggacggcatcaagaacggtcgcgccaactcgatcctgatcaaggtcaaccagatcggcacgctgaccgagacgctcgccgctgtcgaaatggcgcacaaggccggctacaccgcggtgatgtcgcatcgttcgggcgagaccgaggactcgaccatcgccgacctcgcggtcgccaccaattgcgggcagatcaagaccggctcgctggcgcgcgccgaccgcaccgccaagtacaaccagctgctgcgcatcgagcaggagctcggcgctcacgcgcactacgccggcaaggcggcgctgaaagcgctccgctga

SEQ ID NO: 4066 - protein, 427 aa, Rhodopseudomonas palustris
MTAIVDIIGREILDSRGNPTVEVDVVLEDGSVGRAAVPSGASTGAHEAVELRDGDKARYLGKGVQKAVEAVNGELFDALGGMDAEQQVQIDQTMIELDGTPNKGRIGANAILGVSLAAAKAAAASYDMPLYRYVGGTSARTLPVPMMNIVNGGVHADNPIDFQEFMIMPVGAPTFADALRCGSEIFHTLKGELKKAGHNTNVGDEGGFAPNLPSADAALDFVMAAIGKAGYKAGGDVMLALDCAATEFFKDGSYVYGGENKTRSRSEQAKYLADLVARYPIVSIEDGMSEDDMDGWKELTDLIGSKCQLVGDDLFVTNVTRLADGIKNGRANSILIKVNQIGTLTETLAAVEMAHKAGYTAVMSHRSGETEDSTIADLAVATNCGQIKTGSLARADRTAKYNQLLRIEQELGAHAHYAGKAALKALR

SEQ ID NO: 4067 - DNA, 1278 bp, Corynebacterium diphtheriae
  CDS (1)..(1278)
atggctgacattatgcacgtatttgctcgtgaaatcttggactcccgcggtaacccaaccgttgaagccgaagttttcttggatgacggatcccacggcgttgcgggcgttccttccggtgcgtccaccggtgttcacgaggctcacgagcttcgcgacggtggcgagcgctacctcggcaagggcgttctcaatgcagttaacaacgtgaacgaggaaatcgctgacgcaatcgctggtgcagaagccgacgatcagcgcctgatcgatcaggcgatgattgctctcgacggcactgagaacaagtctcgtctcggcgcaaacgctatcttgggtgtatccatcgccgtagctaaggctgccgcagagtctgctggcctacctttgtaccgctacatcggcggccctaacgctcacgttcttccagttcctatgatgaacattgttaacggtggcgcacacgctgactccggcgttgatgttcaggagttcatgattgctcctatcggtgccgagtccttctctgaggctctgcgcatgggtgcagaggtctaccactccttgaagtccgtgattaagtccaagggactttccaccggcctcggcgacgaaggtggtttcgcaccttctgttgagtccaccaaggcagctctcgacctcatcgttgaggcaattgagaaggctggcttcaagccaggtgctgacatcgcacttgcactcgacgttgcttcctccgagttctacaaggatggcaagtaccacttcgaggggggcgagcacaccgctgaggagatggcaaaggtctacgagcagctcatcgctgagtacccaattgtttccatcgaggacccactgcaggaagacgactgggagggctacaccgccctgaccgccgcaatcggtgacaaggttcagatcgtcggcgacgacttcttcgtcaccaacccagcacgcctcaaggaaggcatcgagaagaaggctgccaatgccttgctggtaaaggtcaaccagatcggtaccctgaccgagaccttcgacgctgttgatctcgcacaccgcaacggctaccgcaccatgatgtcccaccgctccggcgagactgaagacaccaccattgctgaccttgcagtcgcattgggctgtggccagatcaagaccggtgcaccagctcgttccgagcgcgttgccaagtacaatcagcttctgcgcatcgagcagcagcttgacgatgcagcagtctacgcaggccgttcagcatttccacgttttcagggctaa

SEQ ID NO: 4068 - protein, 425 aa, Corynebacterium diphtheriae
MADIMHVFAREILDSRGNPTVEAEVFLDDGSHGVAGVPSGASTGVHEAHELRDGGERYLGKGVLNAVNNVNEEIADAIAGAEADDQRLIDQAMIALDGTENKSRLGANAILGVSIAVAKAAAESAGLPLYRYIGGPNAHVLPVPMMNIVNGGAHADSGVDVQEFMIAPIGAESFSEALRMGAEVYHSLKSVIKSKGLSTGLGDEGGFAPSVESTKAALDLIVEAIEKAGFKPGADIALALDVASSEFYKDGKYHFEGGEHTAEEMAKVYEQLIAEYPIVSIEDPLQEDDWEGYTALTAAIGDKVQIVGDDFFVTNPARLKEGIEKKAANALLVKVNQIGTLTETFDAVDLAHRNGYRTMMSHRSGETEDTTIADLAVALGCGQIKTGAPARSERVAKYNQLLRIEQQLDDAAVYAGRSAFPRFQG

SEQ ID NO: 4069 - DNA, 1694 bp, Capsella bursa
  CDS (87)..(1421)
gactcctcagctaccactgttaagcgattctcactaaaaccctcgaacacatcgcccttatctctctctctcttgatctactcgctatggctactatcaccgttgttaaggctaggcagatcttcgacagccgtggtaaccccaccgttgaggttgatatccacacatcaaatggtgtcaaggttacagcagctgtcccaagtggagcttccactggaatctacgaggctcttgagctgagggatggaggatcagactaccttggaaagggtgtctctaaggctgttggcaacgtgaacaacatcattggcccagctcttattggcaaggacccaactcagcagacagctattgacaacttcatggtccatgaacttgatggaacccagaatgagtggggttggtgcaagcaaaagcttggagccaatgctattcttgctgtgtctcttgcagtctgcaaagccggggctgttgtcagcggcattcctctgtacaagcacattgccaatcttgctggaaacccaaagattgtcctgccagttcctgccttcaacgtcatcaatggtggatctcatgctggaaacaagcttgccatgcaggagtttatgatcttacctgttggagcttcttctttcaaggaagccatgaaaatgggtgtggaagtttaccaccacttgaagtccgtgattgagaagaagtacggtcaggatgccacaaatgttggtgatgaaggtggctttgcaccaaacattcaggagaacaaggaaggtcttgaattgcttaagactgctatcgagaaggctggctacactggcaaggttgtcattggaatggatgttgctgcttcagagttttactcatcagacaagacctatgacttgaacttcaaagaagagaacaacaatggttctcagaagatttctggagatgctcttaaggacctgtacaagtcctttgttgctgaatacccaattgtgtccattgaggacccatttgaccaagatgactgggagcactatgctaagatgaccaccgagtgtggaaaagaggtccagattgttggtgatgatttgttggtcaccaaccccaagagagttgcaaaggcaattgccgagaagtcttgcaatgctcttcttttgaaggttaaccaaatcggatcagtaactgagagtatcgaggcagttaggatgtcgaagaaggcaggctggggagtgatgaccagccacagaagtggtgaaactgaggacaccttcattgctgatttagccgttgggttgtctactggacaaatcaagactggtgccccttgcagatccgagcgtcttgccaagtacaaccagcttttgcgtattgaggaggagttgggatcagaggcagtttacgctggagtcaacttccgcacaccagtggaaccctactaagtgaagcatttagaaggcaaagttagtcttcttgttgacacgagaagatgacttttgagtttggccatttgcttaattaaataaaacgtttgttttgtttttttctttgttggggttttacgtttatactttggaccctttggaggaaaagtttgtgtttatttttgtaaggggaaacatgagtgagctctgcctttacggaggacggtagcccttattttacaatctaatttcggctttacccaaaaaaaaaaaaaaaaaaaaaaaaaaaaa

SEQ ID NO: 4070 - protein, 444 aa, Capsella bursa
MATITVVKARQIFDSRGNPTVEVDIHTSNGVKVTAAVPSGASTGIYEALELRDGGSDYLGKGVSKAVGNVNNIIGPALIGKDPTQQTAIDNFMVHELDGTQNEWGWCKQKLGANAILAVSLAVCKAGAVVSGIPLYKHIANLAGNPKIVLPVPAFNVINGGSHAGNKLAMQEFMILPVGASSFKEAMKMGVEVYHHLKSVIEKKYGQDATNVGDEGGFAPNIQENKEGLELLKTAIEKAGYTGKVVIGMDVAASEFYSSDKTYDLNFKEENNNGSQKISGDALKDLYKSFVAEYPIVSIEDPFDQDDWEHYAKMTTECGKEVQIVGDDLLVTNPKRVAKAIAEKSCNALLLKVNQIGSVTESIEAVRMSKKAGWGVMTSHRSGETEDTFIADLAVGLSTGQIKTGAPCRSERLAKYNQLLRIEEELGSEAVYAGVNFRTPVEPY

SEQ ID NO: 4071 - DNA, 1317 bp, Cryphonectria parasitica
  CDS (1)..(1317)
atgcctatctccaagattcacgcccgttacgtctacgactctcgtggcaaccccaccgtcgaggtcgacctcgtcaccgagaccggcctccaccgtgccatcgttccctccggtgcttcgaccggtcagcacgaggcatgcgagctccgtgacggtgacaagtccaagtggctgggcaagggtgtcctgaaggccgtcgagaatgtcaacaccgtcctcggccctgagctgatcaaggctggcctggacgtcaaggaccagaccgccgtggacgagttcctcatcaagctcgacggcactgccaacaagaccaagctcggcgcgaatgccatcctcggtgtcagtctggctgtcgccaaggccggtgccgctgagaagggtgttcccctgtacgctcacgtctccgaccttgctggcaccaagaagccctacgtcctccctgttcccttccagaacgtcctgaacggtggctcccacgctggtggccgtctcgccttccaggagttcatgattgttccttctgccgctccctccttctctgagggtctgcgctggggtgccgagacctaccaccagctgaagagcctggccaagaagaagtacggccagtctgccggcaacgtcggcgatgagggtggcgtcgcccccgatatccagactgccgaggaggcgctcgagctcatctccgaggccatcgagaaggctggctacacaggcaagatgaagattgccatggacgttgcctcgtccgagttctacaaggaggacgtcaagaagtacgacctcgacttcaagaacccagactcggaccccagcaactggctcacctacgagcagctggccgccctgtacgccgacctcaccaagaagtaccccatcgtctcgatcgaggaccccttcgccgaggatgactgggaggcctggagctacttctacaagacccaggacatccagctcgttgctgatgacctgaccgtcaccaaccccatccgcatcaagaaggccatcgagctcaaggccgccaacgccctgctgctcaaggtcaaccagatcggtaccctgaccgagtccattcaggccgccaaggactcgtacgctgacggctggggtgtcatggtctctcaccgctctggtgagaccgaggatgtcaccattgccgacattgtcgtcggtatccgggctggccagatcaagactggtgcccctgcccggtctgagcgccttgccaagctcaaccagattctccgcattgaggaggagctcggctcgaacgccatctacgctggcgaggacttccgcaagtctgttaccctgtaa

SEQ ID NO: 4072 - protein, 438 aa, Cryphonectria parasitica
MPISKIHARYVYDSRGNPTVEVDLVTETGLHRAIVPSGASTGQHEACELRDGDKSKWLGKGVLKAVENVNTVLGPELIKAGLDVKDQTAVDEFLIKLDGTANKTKLGANAILGVSLAVAKAGAAEKGVPLYAHVSDLAGTKKPYVLPVPFQNVLNGGSHAGGRLAFQEFMIVPSAAPSFSEGLRWGAETYHQLKSLAKKKYGQSAGNVGDEGGVAPDIQTAEEALELISEAIEKAGYTGKMKIAMDVASSEFYKEDVKKYDLDFKNPDSDPSNWLTYEQLAALYADLTKKYPIVSIEDPFAEDDWEAWSYFYKTQDIQLVADDLTVTNPIRIKKAIELKAANALLLKVNQIGTLTESIQAAKDSYADGWGVMVSHRSGETEDVTIADIVVGIRAGQIKTGAPARSERLAKLNQILRIEEELGSNAIYAGEDFRKSVTL

SEQ ID NO: 4073 - DNA, 1607 bp, Glycine max
  CDS (36)..(1370)
ctcactcactgcagatctcaattgcatcgctgcccatggctaccatcgttagcatcaacgcccgccaaatcttcgacagtcgtggcaatccaactgtcgaggtggatttgacttgctccgatggtacttttgccagagctgctgttccaagtggtgcatccactgggatttatgaggcccttgaattgagagatggaggatctgactaccttggaaagggtgtatcaaaggctgttgacaatgtgaacaccgtcattggccctgctttgattggcaaggacccaactgagcagactgctattgacaacttaatggttcaacagcttgatggaactgttaacgaatggggttggtgcaagcaaaagctaggagcaaatgccatattggcagtgtttcttgcagtctgcaaagctggtgctagcgtcctgaaaattcctctttacaagcatattgctaatatcgcgggtaacaaaaagttggttttgcctgttcctgctttcaatgtcattaatggtggatcacatgctggaaacaaacttgctatgcaggagtttatggttcttcctgtgggagcttcctcgttcaaggaagccatgaagatgggtgtagaagtgtatcacaatttgaagtctgtgattaagaagaaatatggtcaagatgcaataaatgttggtgacgaaggtggctttgcccctaacatccaggaaaacaaggaaggcttggaattgctgaaaactgccatcgccaaagctggttacacaggcaaagttgtcattggaatggatgttgcagcttctgaattctacaaggaagacaaaacatacgatttgaacttcaaggaagataacaatgatggctcccagaggatctctggagatgctttgaaagatctgtacaagtcatttgtgtcagagtacccaattgtttcaattgaggatccatttgaccaggatgactgggagcactatgctaagctaactgctgaggttggagccaatgtacaaattgttggtgatgatctcttggttaccaaccccaagagggttcagaaggcaattgatactaaagcatgcaatgctcttctcctcaaggtcaaccaaattggttctgtgactgagagtattgaagctgtcaggatgtccaaaaaagctggatggggtgtcatggccagtcacagaagtggagagactgaggataccttcattgctgacctttctgttggtttggctacgggtcaaattaagactggagctccatgcaggtctgagcgtcttgctaaatataaccagctcttgagaattgaggaggagcttggtgctgaagcagtgtacgccggagctaacttccgtacccccgttgaaccctactaaagttttcaagtggaaaaaacctggagatccacacgagtttgagcattgagatttgggtgcgcggtttttggtgtgatatataagttgatagttggaacattatacaagaatataaagaccttgccaataatttgagttctgattcacagagctaggacagttatgtcttaagactttgaaaggtgtttaatgatatttagctttaatacttgaagcctaaaaaaaaaaaaaaaaaaa

SEQ ID NO: 4074 - protein, 444 aa, Glycine max
MATIVSINARQIFDSRGNPTVEVDLTCSDGTFARAAVPSGASTGIYEALELRDGGSDYLGKGVSKAVDNVNTVIGPALIGKDPTEQTAIDNLMVQQLDGTVNEWGWCKQKLGANAILAVFLAVCKAGASVLKIPLYKHIANIAGNKKLVLPVPAFNVINGGSHAGNKLAMQEFMVLPVGASSFKEAMKMGVEVYHNLKSVIKKKYGQDAINVGDEGGFAPNIQENKEGLELLKTAIAKAGYTGKVVIGMDVAASEFYKEDKTYDLNFKEDNNDGSQRISGDALKDLYKSFVSEYPIVSIEDPFDQDDWEHYAKLTAEVGANVQIVGDDLLVTNPKRVQKAIDTKACNALLLKVNQIGSVTESIEAVRMSKKAGWGVMASHRSGETEDTFIADLSVGLATGQIKTGAPCRSERLAKYNQLLRIEEELGAEAVYAGANFRTPVEPY

SEQ ID NO: 4075 - DNA, 1278 bp, uncultured bacterium 583
  CDS (1)..(1278)
atgcaaattaaacaaatcaaagcccgtgaggttttagactctagaggtaaccctactgttgaggcagatgtaattcttaataatggtgttttcggaagggcaatggttccgtctggagcttctactgggcaacgtgaagccttggaactaagagatggagataaaaatcgttatttaggaaaaggtgttactcaatctgttattaatatcaaccatgagattaacgacgccctcgttgatatgaaaatctcaaatcagcaagatattgatcaaaaaatgattgacatggatggtactgaaacaaaatctcgcttgggtgctaattctattttggcagtctccttagcctgtgcgcacgccaatgcaaataacaacaaacaatcattgtttcgttcgtttaatttttctgaaacttatcaacttccagtgcccatgatgaatattatcaatggaggtgagcatgccaataatagtattgatatccaagagtttatgattatcccagctggagcacctagcttcaaagaagcattaagatacggtgctgaagtttttcatcatttaaaaaagctgcttgaccaaggaggttttaatacagcagtcggagatgaaggtggctttgcacctgacttaagctccaacgaggaggctttaaaggtcatccttaaagctattgagagtgcgggatatgaagcaggaaaagatatctttattggaattgatgctgctagttctgagttttacaataacggcacctataacttaacctcagaaggtttgaaactgagtaatgaggaatttacgagttatcttgcatcatgggttgaaaaatatccaatcatttcgattgaagacggaatggatgaaaatgactgggtaggttgggagatgcttaccaaaaaattatctgacaaagttcaattggtaggtgatgatttatttgttactaatagtaaaattttagctaaaggtatagaaaataatattgccaactcgatccttatcaaagtcaaccaaataggcacacttacagaaacatttaacgcaatgaagatggcttcaaatgctggatatacttgcgttatgtcacatagaagtggcgaaactgaagacacgactattgctgacctatctgttgcaactagctgtggacaaattaaaacaggctcattgtctcgctctgacaggcttgcaaaatataatcgattgctgcgtatcgaagaggaactaggggatgatgcatactatcctggactcagtacattcaaacatttataa

SEQ ID NO: 4076 - protein, 425 aa, uncultured bacterium 583
MQIKQIKAREVLDSRGNPTVEADVILNNGVFGRAMVPSGASTGQREALELRDGDKNRYLGKGVTQSVININHEINDALVDMKISNQQDIDQKMIDMDGTETKSRLGANSILAVSLACAHANANNNKQSLFRSFNFSETYQLPVPMMNIINGGEHANNSIDIQEFMIIPAGAPSFKEALRYGAEVFHHLKKLLDQGGFNTAVGDEGGFAPDLSSNEEALKVILKAIESAGYEAGKDIFIGIDAASSEFYNNGTYNLTSEGLKLSNEEFTSYLASWVEKYPIISIEDGMDENDWVGWEMLTKKLSDKVQLVGDDLFVTNSKILAKGIENNIANSILIKVNQIGTLTETFNAMKMASNAGYTCVMSHRSGETEDTTIADLSVATSCGQIKTGSLSRSDRLAKYNRLLRIEEELGDDAYYPGLSTFKHL

SEQ ID NO: 4077 - DNA, 1278 bp, uncultured bacterium 560
  CDS (1)..(1278)
atgacaattaaacaaatcaaggctcgagaggttttagattctagaggcaaccctactgttgaggcagatgtaattcttagtaacggtgttttcggaagggcaatggttccatctggagcttcaactgggcaacgtgaagctttagagctaagagatggcgataaaaaccgttatttgggaaaaggtgttactcaatctgttaataatattaatcatgagattaacaacgccctagttggtatgaaaatctcaaatcaacaagctatcgatcaaaaaatgattgacatagatggcactgaaacaaaatctcgcttaggtgcaaattctattctggcagtttccttagcctgtgcacacgctaatgcaaataataataaacaatcattgtttcgttcgtttgatttttctgaaacttatcaacttccagtccccatgatgaacattatcaatggcggtgagcatgccaataatagcattgatatacaagaatttatgattatcccagctggagcacctaacttcagggaagcattaagatacggtgctgaagtttttcatcatttaaaaaagttactcgatcaagaaggtcttaatacagctgtcggagatgaaggtggctttgcacctgacttaagctccaacgaagaggctttaaaaatcataattaaagctattaagagtgcgggatataaagcaggaaaagatatttttattggaattgatgctgctagttctgagttttacaataacggcacttataacttatcctcagaaggtttgaaactgagtaatgaggaatttacgagttatcttgcatcatgggttgaaaaatatccaataatttcgattgaagacgggatggatgaaaatgactggtcaggctgggagatgcttaccaaaaaattatctgacaaagttcagttggtaggtgatgatttatttgttacaaatagtaaaattttagctagaggtatagaaaataatattgccaactcaatccttatcaaagtaaaccaaataggcacacttacagaaactttcaacgcaatgaagatggccttaaatgctggatacacttgcgttatgtctcatagaagtggcgaaactgaagacactacaattgcagacctatctgttgcaaccggatgtggacaaattaaaacaggatcattatctcgttctgacagacttgcaaaatataatcgattactgcgtattgaagaggaactaggggatgatgcattctatcctggaattaatgcattcaaacatctttaa

SEQ ID NO: 4078 - protein, 425 aa, uncultured bacterium 560
MTIKQIKAREVLDSRGNPTVEADVILSNGVFGRAMVPSGASTGQREALELRDGDKNRYLGKGVTQSVNNINHEINNALVGMKISNQQAIDQKMIDIDGTETKSRLGANSILAVSLACAHANANNNKQSLFRSFDFSETYQLPVPMMNIINGGEHANNSIDIQEFMIIPAGAPNFREALRYGAEVFHHLKKLLDQEGLNTAVGDEGGFAPDLSSNEEALKIIIKAIKSAGYKAGKDIFIGIDAASSEFYNNGTYNLSSEGLKLSNEEFTSYLASWVEKYPIISIEDGMDENDWSGWEMLTKKLSDKVQLVGDDLFVTNSKILARGIENNIANSILIKVNQIGTLTETFNAMKMALNAGYTCVMSHRSGETEDTTIADLSVATGCGQIKTGSLSRSDRLAKYNRLLRIEEELGDDAFYPGINAFKHL

SEQ ID NO: 4079 - DNA, 1323 bp, Tuber borchii
  CDS (1)..(1323)
atgattaccaaaattcacgcccgctcagtctacgactctcgtggtaaccccacggttgaagtagatctcacaaccaccgacaccggtttacacagggctattgtcccctccggcgcttccaccggccaacatgaagccattgagcttcgtgacaaagacaagaccaagtgggccgggaagggcgttctcaaggccgttgagaacgtcaacactatcatcgctcccgccctcattaaggaaaagtttgacgttaaggaccaagctactatcgacaagttcttgattgatcttgacggaaccccgaataaggccaaattaggagccaacgctatcctcggcgtttctttggcggttgctaaggctggagctgctgcaaagaaagttccgttgtatgcccatgttgcggatcttgccggtaccaaaaagccattcgttctcccggttccgttcatgaatgtcattaatggaggatctcatgccggaggccgtcttgccttccaagagttcatgattgttcccagcgaggccccgagctttaccgaggctatgaggcagggagctgaagtttaccagatcctcaagacccttaccaagaagaagtacggccagtctgccggtaatgttggtgatgaaggtggttggcccgacattcagaccgttgaggaggctcttgaccttatcaccgatgctattgacaaggctggatacactggccagataaagatcgccatggatgttgcttcttccgagttctacaaggaggatgctaagaagtacgatcttgacttcaagaaccctgactccgatagcagcaagtggttgacctatcaggaattggctgatctctataagagccttgcccagagataccccattgtcagcattgaggatccctttgccgaggatgactgggaagcctgggcccacttttacaagaccagcgacttccagatcgttggtgacgatttgactgttactaaccccatccgtatcaagagggccattgacgagaagagctgcaatgctctccttctcaaggttaaccagatcgctactcttaccgaatctatccaggccgctaaggactcatactccgctggctggggtgtcatggtctcccaccgttctggtgagactgaagatgtcaccattgcggacatcgttgtcggtctccgtgccggccagatcaagactggtgcccccgcgagaagtgaacgtcttgccaagctcaaccagatcctccgtatcgaggaggagttgggcgagcaggccatctacgctgggacaagttcagaaccgccgcacctttacatttttatttag

SEQ ID NO: 4080 - protein, 440 aa, Tuber borchii
MITKIHARSVYDSRGNPTVEVDLTTTDTGLHRAIVPSGASTGQHEAIELRDKDKTKWAGKGVLKAVENVNTIIAPALIKEKFDVKDQATIDKFLIDLDGTPNKAKLGANAILGVSLAVAKAGAAAKKVPLYAHVADLAGTKKPFVLPVPFMNVINGGSHAGGRLAFQEFMIVPSEAPSFTEAMRQGAEVYQILKTLTKKKYGQSAGNVGDEGGWPDIQTVEEALDLITDAIDKAGYTGQIKIAMDVASSEFYKEDAKKYDLDFKNPDSDSSKWLTYQELADLYKSLAQRYPIVSIEDPFAEDDWEAWAHFYKTSDFQIVGDDLTVTNPIRIKRAIDEKSCNALLLKVNQIATLTESIQAAKDSYSAGWGVMVSHRSGETEDVTIADIVVGLRAGQIKTGAPARSERLAKLNQILRIEEELGEQAIYAGTSSEPPHLYIFI

SEQ ID NO: 4081 - DNA, 1624 bp, Brassica napus
  CDS (20)..(1354)
tctagatctactcgaaaccatggccactatcaccgtcgttaaggctaggcagatcttcgacagtcgtggcaatcccacggttgaggttgatgtccacacatcaagtggtgtcaaggtcactgctgctgttccgagtggagcttccactggtatctacgaggctcttgggcttagggatggtggatctgattatctcggaaagggtgcttctaaggctgttggtaatgtgaacaacatcatcggcccagcgttgattggaaaggacccgactcagcagactgctattgacaacttcatggtccatgaacttgatggaacccagaacgagtggggttggtgcaagcaaaagcttggagccaatgccatccttgctgtgtcccttgctgtttgcaaagctggggccgttgtcagtggcattcctctctacaagcacattgccaaccttgctggtaaccctaaaattgtgctaccagttcccgctttcaacgtcatcaatggtggattacatgcaggaaacaagctcgctatgcaggagtttatgattctccctgttggagcttcatctttcaaagaagccatgaaaatgggtgttgaagtttaccacaacttgaagtctgtgatcaagaagaagtatggccaggatgctaccaacgttggtgatgaaggtggctttgcaccaaacattcaggagaacaaggaaggtcttgaattgcttaagactgccattgaaaaggctggctacactggcaaggttgtcattggaatggatgttgccgcttcagagttctactcatcagacaagacctacgacttgaactccaaagaagagaacaacaatggctctcagaagatttctggtgatgcactaaagggcctctacaagtcctttgtctctgagtacccaattgtgtccattgaggacccatttgaccaagatgactgggagcactatgctaagatgaccgccgagtgtggagacaatgttcagattgtcggtgatgatttgttggtcaccaaccccaagagagttgccaaggcaatcgcagaaaagtcttgcaatgctcttctcttgaaggttaatcaaatcgggtcagtaacagagagtattgaggcagtgaagatgtcaaagagagcaggatggggagtgatggctagccaccgaagtggtgaaaccgaggacaccttcatcgctgacttatccgttggcttgtctactggacaaatcaagactggagctccttgcagatccgagcgtcttgccaagtacaaccagcttttgcgtattgaagaggagttgggatcagaggcagtttacgctggagctaacttccgcaagcctgtggagccgtactagacaagtgctgctcgtagaagcgaagtgctctcctttgttacgagaaaaagaagatctgagttgtgcttggtcattttgctttaaataaaacattacgtttgctttttttttctccctttgttggtttattttccaaaccactcttgttgggattaagttgcttatttttgtaagaaaaaaacctgagatagctctgcctttaaagaggacagcagctcttcttttataatctaatttcggcttcttttaatttcaaaaaaaaaaaaaaaa

SEQ ID NO: 4082 - protein, 444 aa, Brassica napus
MATITVVKARQIFDSRGNPTVEVDVHTSSGVKVTAAVPSGASTGIYEALGLRDGGSDYLGKGASKAVGNVNNIIGPALIGKDPTQQTAIDNFMVHELDGTQNEWGWCKQKLGANAILAVSLAVCKAGAVVSGIPLYKHIANLAGNPKIVLPVPAFNVINGGLHAGNKLAMQEFMILPVGASSFKEAMKMGVEVYHNLKSVIKKKYGQDATNVGDEGGFAPNIQENKEGLELLKTAIEKAGYTGKVVIGMDVAASEFYSSDKTYDLNSKEENNNGSQKISGDALKGLYKSFVSEYPIVSIEDPFDQDDWEHYAKMTAECGDNVQIVGDDLLVTNPKRVAKAIAEKSCNALLLKVNQIGSVTESIEAVKMSKRAGWGVMASHRSGETEDTFIADLSVGLSTGQIKTGAPCRSERLAKYNQLLRIEEELGSEAVYAGANFRKPVEPY

SEQ ID NO: 4083 - DNA, 1580 bp, Brassica campestris
  CDS (20)..(1354)
tccagatctctactcaaccatggccactatcaccgctgttaaagctaggcagatcttcgacagccgtggcaatcccacggttgaggttgatgtacacacatcaagtggtgttaaggttacagcagcggttccgagtggagcttccaccggtatctacgaggctcttgagcttagggatggtggatcagactaccttggaaagggtgtctctaaggctgttggcaatgtgaactccatcatcggcccagcttcgattggaaaagacccaactcagcagactgctattgacaacttcatggtccatgaacttgatggaacccagaacgaatggggatggtgcaagcaaaagcttggagccaatgctattcttgctgtatctctagctgtctgcaaagctggggctgttgtcagtggcattcctctctacaagcacattgccaatcttgctggtaaccctaagattgtgctaccagttcctgcgttcaacgttatcaatggtggatcccatgccggaaacaagctcgccatgcaggagtttatgatcctccctgttggagcttcttctttcaaagaagccatgaaaatgggtgttgaagtttaccacaacttgaagtctgtgattaagaagaagtatggacaggatgccaccaacgtcggtgatgaagggggctttgcaccaaacattcaagaaaacaaggaaggtcttgaactgcttaagactgctatcgagaaggctggatacactggcaaggttgtcattgggatggatgttgccgcttctgagttctactcatctgacaagacttacgacttgaacttcaaagaagagaacaacaatggttctcagaagatttctggagatgctctcaaggacctgtacaagtccttcgttgctgagtacccaattgtgtccattgaggacccatttgaccaagatgactgggagcactatgctaagatgaccgccgagtgtggagacaatgttcagattgtcggtgatgatttgttggtcaccaaccccaagggagttgccaaggcaatcgcagaaaagtcttgcaatgctcttctcttgaaggttaatcaaatcgggtcagtaacagagagtattgaggcagtgaagatgtcaaagagagcaggatggggagtgatggctagccaccgaagtggtgaaaccgaggacaccttcatcgctgacttatccgttggcttgtctactggacaaatcaagactggagctccttgcagatccgagcgtcttgccaagtacaaccagcttttgcgtattgaggaggagttgggatcagaggcagtttacgctggagccaacttccgcaagcctgtggagccctactagaagaagtacaagcttttttgaagcaaagtggtcttttgtgacgcgaagaggatgagagttgttttggtcattttgcttaaataaaacactacgcttctgttttttctgtgtttatgatttgaacccttatttttgtaagagaaacctgagatagctttgtctttatagacaacagcagcgttcttttataatataatttcggctttactcaaaaaaaaaaaaaaaa

SEQ ID NO: 4084 - protein, 444 aa, Brassica campestris
MATITAVKARQIFDSRGNPTVEVDVHTSSGVKVTAAVPSGASTGIYEALELRDGGSDYLGKGVSKAVGNVNSIIGPASIGKDPTQQTAIDNFMVHELDGTQNEWGWCKQKLGANAILAVSLAVCKAGAVVSGIPLYKHIANLAGNPKIVLPVPAFNVINGGSHAGNKLAMQEFMILPVGASSFKEAMKMGVEVYHNLKSVIKKKYGQDATNVGDEGGFAPNIQENKEGLELLKTAIEKAGYTGKVVIGMDVAASEFYSSDKTYDLNFKEENNNGSQKISGDALKDLYKSFVAEYPIVSIEDPFDQDDWEHYAKMTAECGDNVQIVGDDLLVTNPKGVAKAIAEKSCNALLLKVNQIGSVTESIEAVKMSKRAGWGVMASHRSGETEDTFIADLSVGLSTGQIKTGAPCRSERLAKYNQLLRIEEELGSEAVYAGANFRKPVEPY

SEQ ID NO: 4085 - DNA, 1580 bp, Gossypium barbadense
  CDS (20)..(1357)
aagctctctttttcatctcatggctgctactatcgtctccgtcaaagctaggcagatcttcgacagccgtggaaatcccactgttgaggttgatgtggaaacatcgaacggtataaaggctagggccgcagttcctagcggtgcatccactggaatttacgaggctcttgagttgagagatggaggttccgattacctcggtaaaggtgtatcgaaggctgttgctaatgttaacacaatcatcggccctgcattgattggaaaggacccaaccgagcagactgcaattgacaatttcatggttcaacaactggatggaacccaaaatgagtggggttggtgcaaacaaaagctcggtgcaaatgccattcttgccgtgtcccttgctgtttgcaaagctggagctgaagtcaagaaacttcccctttacaagcacattgctaaccttgctggtaacagcaagttggttcttcctgtccctgctttcaatgtcatcaacggtggttcacatgcaggaaacaaattggctatgcaggagttcatgattcttcctgtaggagcatcatcctttaaggaggccatgaaaatgggtgttgaagtctatcaccatttgaagtctgtgattaagaagaagtatggtcaagatgcaaccaatgtcggtgatgaaggtggctttgctcctaatatccaggagaacaaggaaggacttgaattgttgaatacagccattgctaaagctggttacactggcaaagttgttattggaatggatgttgccgcgtctgaattttatggaacagataaaacttacgacctgaacttcaaagaagagaacaatgacggtaaacaaaagatctcaggagatgctttgaaagatttatacaagtcattcgtagccgagtatccaattgtgtcaatcgaagatccatttgaccaagatgattgggagcactactccaaactaaccaaggaaatcggagaaaaagttcagattgtaggagatgatcttttggtcaccaacccaaagagggttgcgaaggctattgccgaaaaaacttgtaatgcccttcttctcaaggtcaatcaaattggatctgttaccgaaagtattgaagctgtgaaaatgtccaagcaagctggatggggtgtgatggccagccaccgcagtggtgaaacggaggatacttttattgctgatctttcagtcggtttggccacgggccaaattaagaccggagctccacgcaggtctgagcgtttagccaagtacaaccagcttctgcgaattgaggaggagcttggtgcgaaagccgtctatgccggagctagcttccgtgctccagttgcaccctattaagatgcttgtttagatgataatgtgctgagactggatgcgtgcggcagagcttcagtggtttgttgagaccctaaaacatatttcaataattttgatagcaattttggacttgtgttcaaaataaatcgatctccgtgttatttttgttggactttgcctgcatatatgctcgctatattcataaatacatgatgcttgaaaaaaaaaaaaaaaaaaaaaaaaa

SEQ ID NO: 4086 - protein, 445 aa, Gossypium barbadense
MAATIVSVKARQIFDSRGNPTVEVDVETSNGIKARAAVPSGASTGIYEALELRDGGSDYLGKGVSKAVANVNTIIGPALIGKDPTEQTAIDNFMVQQLDGTQNEWGWCKQKLGANAILAVSLAVCKAGAEVKKLPLYKHIANLAGNSKLVLPVPAFNVINGGSHAGNKLAMQEFMILPVGASSFKEAMKMGVEVYHHLKSVIKKKYGQDATNVGDEGGFAPNIQENKEGLELLNTAIAKAGYTGKVVIGMDVAASEFYGTDKTYDLNFKEENNDGKQKISGDALKDLYKSFVAEYPIVSIEDPFDQDDWEHYSKLTKEIGEKVQIVGDDLLVTNPKRVAKAIAEKTCNALLLKVNQIGSVTESIEAVKMSKQAGWGVMASHRSGETEDTFIADLSVGLATGQIKTGAPRRSERLAKYNQLLRIEEELGAKAVYAGASFRAPVAPY

SEQ ID NO: 4087 - DNA, 1293 bp, Onion yellows phytoplasma
  CDS (1)..(1293)
atgccatatattgaaagtattttagcgcgcgaagtgctagattccagaggaaatcctacagtagaagtagaagtttatacagaatcaggagcgtttggaagagctattgttccttcaggagcttctaccggacaatacgaagcagttgaattaagggatggggatgcccaaagatttttaggtaaaggcgttttgcaagctgttaaaaatgttattgaagttattcaaccagaattagaaggttattctgtcttagaacaaactttaattgataaattattaattaaacttgacggaactcctaacaaatctaatttaggagctaacgctattttaggtgtttctttggcttgtgctaaagctgcagctaactacttaaatcttgagttttatcaatatgtaggaggcgttttacctaaacaaatgccagttcctatgatgaatgttatcaacggtggagctcatgcttctaacagtgttgattttcaagagtttatgattttaccaactggaccaacatcttttaaagaagctttacgttatggggctgaagtttttcaccatttaggaaaaatcttaaaacaaaaaggacttccaactacagtaggagacgaaggcggatatgcacctgaccttaattctaacgaagaagccttacaaatcattttggaagctatcaaaagtgcaggatacgagccaggaaaagacatttttttaggaatggacgttgcagcttccgagttttatgacaaaaaacttcaaaaatacgttcttgcatctgaaaataacaaagcttttagtagccaagaattagttcattattacgaaactttagtttctaaatatccaattatttcaatcgaagacggacttgatgaaaatgattgggatggatggaaatacttaacccaaaaattaggtaaccaaatccaattagtaggggatgacctatttgttactaacacccaaaaattagctcaaggaattgaaaacaaaataggaaactctattttaattaaattaaatcaaataggaactctaacagaaaccctagaaacaattgaaatggcaaaaaaagcttcttacaccgctgttatttctcaccgtagtggcgaaaccgaagacacaactattgctgatttagctgttgctactaatgcgggtcaaattaaaactggttcttgttcacgtactgatcgtatggcaaaatacaatcaattattaagaattgaagaccaattagtagaagctccttttttaggattaaaaactttttataatttgaaaaaataa

SEQ ID NO: 4088 - protein, 430 aa, Onion yellows phytoplasma
MPYIESILAREVLDSRGNPTVEVEVYTESGAFGRAIVPSGASTGQYEAVELRDGDAQRFLGKGVLQAVKNVIEVIQPELEGYSVLEQTLIDKLLIKLDGTPNKSNLGANAILGVSLACAKAAANYLNLEFYQYVGGVLPKQMPVPMMNVINGGAHASNSVDFQEFMILPTGPTSFKEALRYGAEVFHHLGKILKQKGLPTTVGDEGGYAPDLNSNEEALQIILEAIKSAGYEPGKDIFLGMDVAASEFYDKKLQKYVLASENNKAFSSQELVHYYETLVSKYPIISIEDGLDENDWDGWKYLTQKLGNQIQLVGDDLFVTNTQKLAQGIENKIGNSILIKLNQIGTLTETLETIEMAKKASYTAVISHRSGETEDTTIADLAVATNAGQIKTGSCSRTDRMAKYNQLLRIEDQLVEAPFLGLKTFYNLKK

SEQ ID NO: 4089 - DNA, 1314 bp, Kluyveromyces lactis
  CDS (1)..(1314)
atgccaatctctaaagtttacgccagatccgtctacgattctcgtggtaacccaactgttgaagttgaattgaccaccgaaaagggtactttcagatccattgttccatctggtgcctccactggtgttcacgaagctctagaattgagagatggtgacaaatctaaatggttaggtaagggtgttttgactgctgtttctaacgttaacaacatcattgctccagctttggttaaggctaacgttgacgttaccaaccaacaacaagtcgatgacttgttgttgtctctagacggtactgctaacaagtccaagttgggtgctaacgctatcttgggtgtttccttggctgcttccaaggccggtgctgctgccaagaacgtcccattgtaccaacatttggctgacttggccggtgctaagacccaaccattcgtcttgccagttccattcttgaacgtcttgaacggtggttcccacgctggtggtgctttggctttgcaagaatttatgattgctccaactggtgctgaaaccttcgctgaagccttgagaatgggttccgaagtttaccacaacttgaagtctttgaccaagaagagatacggtgcttctgccggtaacgtcggtgacgaaggtggtgttgctccaaacattcaaactgctgaagaagctttggacttgattgtcgatgctatcaaggctgctggttacgaaggtaagatcgatatcggtttggactgtgcttcttctgaattctacaaggacggtaagtacgacttggacttcaagaacccagaatccgacccatccaagtggttgtctggtccacaattggctgacttgtaccacgaattggtcaagaagtacccaattgtttccatcgaagatccatttgctgaagatgactgggaagcttggtctcacttctacaagaccgctggtgtccaaatcgttgctgacgatttgactgtcaccaacccagtcagaatcgctactgctatcgaaaagaaggctgccgatgctctattgttgaaggtcaaccaaatcggttctctatccgaatccatcaaggctgctaatgactccttcgctgctaactggggtgtcatggtctctcacagatctggtgaaactgaagacactttcattgctgacttggtcgtcggtctaagaactggtcaaattaagactggtgctccagctagatccgaaagattggctaaattgaaccaattgctaagaattgaagaagaattgggttccaacgctatcttcgctggtaagaagttccacaacggtaaccaattgtaa

SEQ ID NO: 4090 - protein, 437 aa, Kluyveromyces lactis
MPISKVYARSVYDSRGNPTVEVELTTEKGTFRSIVPSGASTGVHEALELRDGDKSKWLGKGVLTAVSNVNNIIAPALVKANVDVTNQQQVDDLLLSLDGTANKSKLGANAILGVSLAASKAGAAAKNVPLYQHLADLAGAKTQPFVLPVPFLNVLNGGSHAGGALALQEFMIAPTGAETFAEALRMGSEVYHNLKSLTKKRYGASAGNVGDEGGVAPNIQTAEEALDLIVDAIKAAGYEGKIDIGLDCASSEFYKDGKYDLDFKNPESDPSKWLSGPQLADLYHELVKKYPIVSIEDPFAEDDWEAWSHFYKTAGVQIVADDLTVTNPVRIATAIEKKAADALLLKVNQIGSLSESIKAANDSFAANWGVMVSHRSGETEDTFIADLVVGLRTGQIKTGAPARSERLAKLNQLLRIEEELGSNAIFAGKKFHNGNQL

SEQ ID NO: 4091 - DNA, 1293 bp, Listeria monocytogenes
  CDS (1)..(1293)
atgtctattattactgaagtttatgctcgcgaagtcttagattcccgtggtaacccaactgttgaggttgaagtttatactgaagctggtgcgtttggtcgcgctttagttccaagtggtgcttcaactggtgaatacgaagctgtagaattacgcgatggcgacaaagctcgttaccttggaaaaggtgttttaaaagctgttgaaaacgtaaacgacattattgctgacaaaattatcggttttgacgtaactgaccaaatcggaattgacaaagcaatgatcgaacttgatggtacacctaacaaaggtaaattaggtgctaacgctattcttggtgtttctttagctgctgctcgtgctgctgctgacgaactaggcgtacatttatatgaatatcttggcggagtgaacggtaaagttcttccagttccaatgatgaacatccttaacggcggagaacatgctgataacaatgtcgacgttcaagaatttatggtaatgcctgttggagctccaaactttaaagaagctctacgtatgggtgctgaaatcctacacgcacttaaagctgtacttaaaggtaaaggcttaaacactggtgttggtgatgaaggtggattcgctccaaaccttaaatccaatgaagaagctcttgaaacaatcatgcaagcaattaaagatgctggttacaaacctggcgaagaagttaaacttgcgatggatgctgcatcaagtgagttctataaccgcgaaactggtaaatacgaacttaaaggtgaaggcgtaactcgtacttctgaagaaatggtaacttggtatgaagaaatgattactaaatacccaatcatctctattgaagatggcctagacgaaaacgactgggacggattcaaactacttacagaacgtattggtgaccgcgttcaattagtaggtgacgatctatttgtaactaacacaactaaacttaaagaaggtatcgaaaaaggtatcgctaactccatcctaatcaaagttaaccaaatcggtactttgactgaaacattggatgcaattgaaatggctaaacgcgctggctacactgcagttatctctcaccgttctggtgaaacagaagattccacaatcgctgacattgcagtagctacaaacgctggtcaaatcaaaactggtgcgcctactcgtactgaccgtgttgcaaaatataaccaattactccgcatcgaagacaatttggctgatcttgctgaataccatggtaacgaaactttctacaacttaaaaaaataa

SEQ ID NO: 4092 - protein, 430 aa, Listeria monocytogenes
MSIITEVYAREVLDSRGNPTVEVEVYTEAGAFGRALVPSGASTGEYEAVELRDGDKARYLGKGVLKAVENVNDIIADKIIGFDVTDQIGIDKAMIELDGTPNKGKLGANAILGVSLAAARAAADELGVHLYEYLGGVNGKVLPVPMMNILNGGEHADNNVDVQEFMVMPVGAPNFKEALRMGAEILHALKAVLKGKGLNTGVGDEGGFAPNLKSNEEALETIMQAIKDAGYKPGEEVKLAMDAASSEFYNRETGKYELKGEGVTRTSEEMVTWYEEMITKYPIISIEDGLDENDWDGFKLLTERIGDRVQLVGDDLFVTNTTKLKEGIEKGIANSILIKVNQIGTLTETLDAIEMAKRAGYTAVISHRSGETEDSTIADIAVATNAGQIKTGAPTRTDRVAKYNQLLRIEDNLADLAEYHGNETFYNLKK

SEQ ID NO: 4093 - DNA, 1314 bp, Desulfovibrio vulgaris
  CDS (1)..(1314)
atgagcaccatcgtttccgtctgggcgcgcgagattcttgactcccgcgggaatcccaccatcgaggtcgaagtctccctcgaatccggccattccgggcgtgccgccgtgccgtccggtgcctccaccggcacccgtgaagccctcgaactgcgtgacggcgacaagggccgctacaagggcaagggcgtggagaaggccgtggacaacgtcatgggcgaaatcgccgaggccgtcatcgggctcgacgccctgcgtcaggtgcaactcgacaacacccttctcgacctcgacggcaccgacaacaaggaacgcctcggggccaatgccatgctgggcgtctcgctggcgaccgcccgtgccgcttcgagcttcctcggcctgccgctgtaccagtacctcggcggggtcaacgccaaggtgctgcccgtgccgctgatgaacatcatcaacggtggcgcgcacgcccccaacaacctcgacatccaggaattcatgatcatgcccatcggtgccgccaccttccgtgacgcgctccgcatgggtgccgagaccttccataccctcaaggccctgctcgccgccgacggtcacgtgaccagcgtgggcgacgagggcggcttcgcccccaacctcaagagccacgacgaggccttcaagtacatcacccgcgccatcgaggagtcgggctacatccccggcgccgaaatagcgctggccatcgacgccgccgcctccgagttctaccgcgacggcaagtaccatctggcgggtgagggcaagaccttctccaacagcgagatgaccgaatggctcggcgagttcaccgccaagtatccgctcatctccatcgaagacggccttgccgaaggcgactgggaaggctggggcgagctcacctacaagctgggcgacaccgtgcagcttgtgggcgacgacatcttcgtcaccaaccccgacatcctcgcgcagggcatcgatgaaggcgtggccaactccatcctcatcaagctgaaccagattggcacgctcaccgagaccctcgacaccatcgagatggcgaagcaggcggcctacaccacggtcatctcgcaccgttcgggcgagaccgaagaccacttcatcgccgacctcgccgtggggctcaacgccgggcagatcaagaccggctcgctgtgccgcagcgaccgtcttgccaagtacaaccagttgctgcgcatcgaagaggacctcgacgatgcgggcatctacttcggccccatgatcgcctcccacttcggctacgagggcgacgaagagttcgaggacgcctag

SEQ ID NO: 4094 - protein, 437 aa, Desulfovibrio vulgaris
MSTIVSVWAREILDSRGNPTIEVEVSLESGHSGRAAVPSGASTGTREALELRDGDKGRYKGKGVEKAVDNVMGEIAEAVIGLDALRQVQLDNTLLDLDGTDNKERLGANAMLGVSLATARAASSFLGLPLYQYLGGVNAKVLPVPLMNIINGGAHAPNNLDIQEFMIMPIGAATFRDALRMGAETFHTLKALLAADGHVTSVGDEGGFAPNLKSHDEAFKYITRAIEESGYIPGAEIALAIDAAASEFYRDGKYHLAGEGKTFSNSEMTEWLGEFTAKYPLISIEDGLAEGDWEGWGELTYKLGDTVQLVGDDIFVTNPDILAQGIDEGVANSILIKLNQIGTLTETLDTIEMAKQAAYTTVISHRSGETEDHFIADLAVGLNAGQIKTGSLCRSDRLAKYNQLLRIEEDLDDAGIYFGPMIASHFGYEGDEEFEDA

SEQ ID NO: 4095 - DNA, 1269 bp, Thermus thermophilus
  CDS (1)..(1269)
atgaccaccatcgtcggcgtccgggcacgcgaggttttggattccaggggctttcccacggtagaggcggaggtggagctggaaggcggggccaggggccgggccatggtgccctccggggcctccaccggaacccacgaggccctggagctcagggacggcggcaagcgctacctgggcaagggggtgcgccgggcggtggagaacgtcaacgagcgcatcgcccccgagctcgtcggcatggacgccctggaccaggaaggggtggaccgggccatgctggagctggacggcacccccaacaaggccaacctgggggcgaacgccgtcctcgcggtctccctggccgtggcccgggcggcggccgaggccctgggcctgcccctttaccgctacctgggcggggtccagggggtcaccctgcccgtgcccctcatgaacgtcatcaacggggggaagcacgccgacaaccgggtggacttccaggagttcatgctggtgcccgcgggggcgggaagcttcgccgaggccttgaggatcggggccgaggtcttccacaccctcaaggccgtcctcaaggagaagggctacagcaccaacgtgggggacgaggggggcttcgcccccgacctcaggagcaacgaggaggcggtggagcttttgctcctcgccattgagcgggcggggtacaccccgggccaggaggtctccctggccctggacccggccacgagcgagctttaccgggacgggaagtaccacctggagggggagggcaaggtcctctcctcggaggagatggtggccttctgggaggcctgggtggagaagtaccccatccgctccattgaggacggcctcgccgaggacgactgggaggggtggcggcttctcaccgagcgcctgggggggaaggtccagctcgtgggggacgacctcttcgtcaccaacccggaaaggctccgggcggggattgagcggggggtggccaacgccatcctggtcaaggtgaaccagatcgggaccctctcggagaccctcgaggccatccgcctggcccagcgctcggggtacagggcggtgatcagccaccgctccggggagacggaggacagcttcatcgccgacctcgccgtggcggtgaacgccggacagatcaagaccggttccctttcccgctccgaccggctggccaagtacaaccagctcctgcgcattgaggaggagctgggccgggccgcgaggtttttggggtatgccgccttttag

SEQ ID NO: 4096 - protein, 422 aa, Thermus thermophilus
MTTIVGVRAREVLDSRGFPTVEAEVELEGGARGRAMVPSGASTGTHEALELRDGGKRYLGKGVRRAVENVNERIAPELVGMDALDQEGVDRAMLELDGTPNKANLGANAVLAVSLAVARAAAEALGLPLYRYLGGVQGVTLPVPLMNVINGGKHADNRVDFQEFMLVPAGAGSFAEALRIGAEVFHTLKAVLKEKGYSTNVGDEGGFAPDLRSNEEAVELLLLAIERAGYTPGQEVSLALDPATSELYRDGKYHLEGEGKVLSSEEMVAFWEAWVEKYPIRSIEDGLAEDDWEGWRLLTERLGGKVQLVGDDLFVTNPERLRAGIERGVANAILVKVNQIGTLSETLEAIRLAQRSGYRAVISHRSGETEDSFIADLAVAVNAGQIKTGSLSRSDRLAKYNQLLRIEEELGRAARFLGYAAF

SEQ ID NO: 4097 - DNA, 1275 bp, Wolbachia pipientis wMel
  CDS (1)..(1275)
atgaataaggtaatcaataacgtatttgcaagagaaattttagatagcaggggttaccccactattgaggtagaaattgagctctgtgatggtgcaataggcagggcatctgtaccttctggagcttcaaccggtaaattagaagtcttggaactcagggaccaagatgagaaaaggtattgtggtaagggagtgctgaaagctgttcaagctgtaaatgggataatagcagatgaaatcattggaatgaatgcagcggaccaaaatgcaattgataaagcattaattgaactggatggaacaaaaaacaaatcaaaacttggagcaaatgcaactttgggtgtgtctcttgcagttgcaaaagcagcagcaaacagtttcaaaatgccgctatatagatatttgggaggaaagcagacgagtgttatgccggttccactcattaacataattaatggtggagtacatgcagacaataagctcgatttccaagaattcatgattcttccggtcggtgctgagactttcagcgaagcgattagaatatctgcggaggtattccacaacttacgtagcattcttaagaaaaaaggttatagcacaaatgtaggggatgaaggtggttttgcaccaaatattgaaagtactgaagaagcacttgatttgatcatatacgttatagaatcagcaggttattcagcgcaaagtgattttgcactaggccttgatgttgcttcatctactttttatgaagatggaatttacaaatttgaacacagagatcttacttcagaagagttgactgaatattattgtaatcttgtggaaagatatccaataatttctatagaagatgcaatgagtgaagacgactatgaaggttggaaattacttactgcaaaattggggagtaaaattcaattggttggggatgatttgtttgttacaaattgtgaactgatatgcaaaggaatagaggaaaaaatggcaaatgctgtactgatcaagccaaatcaaatagggacgttaacagaaacttttgctgctattgaaatggcaaaatcaaatggctataaagctgttgtttctcatcgctcaggtgaaacagaagacacaacaatatctcatatagcagttgcgtcaaattgcgggcaaataaaaaccgggtcgctatcgcgttctgatagactcgcgaagtataacgagctaatcagaatagaaagcgcattaggaaaggatgctaaatattatcgtgggttagcatgggttttatag

SEQ ID NO: 4098 - protein, 424 aa, Wolbachia pipientis wMel
MNKVINNVFAREILDSRGYPTIEVEIELCDGAIGRASVPSGASTGKLEVLELRDQDEKRYCGKGVLKAVQAVNGIIADEIIGMNAADQNAIDKALIELDGTKNKSKLGANATLGVSLAVAKAAANSFKMPLYRYLGGKQTSVMPVPLINIINGGVHADNKLDFQEFMILPVGAETFSEAIRISAEVFHNLRSILKKKGYSTNVGDEGGFAPNIESTEEALDLIIYVIESAGYSAQSDFALGLDVASSTFYEDGIYKFEHRDLTSEELTEYYCNLVERYPIISIEDAMSEDDYEGWKLLTAKLGSKIQLVGDDLFVTNCELICKGIEEKMANAVLIKPNQIGTLTETFAAIEMAKSNGYKAVVSHRSGETEDTTISHIAVASNCGQIKTGSLSRSDRLAKYNELIRIESALGKDAKYYRGLAWVL

SEQ ID NO: 4099 - DNA, 1302 bp, Treponema denticola
  CDS (1)..(1302)
atgtctgatattatttatattgaaggccgcgagattttggattcgcggggaaatcctactgtagaggttgaggttcagttaagcgattttagctacggccgggcctgtgttccttcgggagcttctacgggagaatatgaagctttggaaatgagggacggcgataaaagccgctacatgggaaagggtgttttaaaggctgttgaccaagttaatacggttattgccgaagaacttgacggggctgatgctttggatcaggccgaaatagataatatgcttatcaatcttgacggcaccgaaaataaatccaagctcggagcaaatgctatgctcggtgtttcgatggctgtagcccgtgccgctgccgacagtttaggtttgccgctttaccgctatttgggaggcgttcatgcaatgcagatgccggttcccatggctaatatcataaacggcggccgccactccgacaataagatagattttcaggagtatatgattatgcccgtcggtgctccgtcaatccgtgaaggcataagaatgactgccgaggttttccatgccttaaaggatattctaaagaaggaaggccatgttacggctgtaggcgatgagggcggttttgctcccaatattgaaaatgttcaagccttggattatataatgaaggctatcgaaaaagcaggctacaaacccggaaaggatgtggtgatagctttggactgcgcttcttcagagctctttgatgctggagacagaaagggttacaagttctggaagtcggagccttctaaaattttaaatgccgacgagatggttgacctgtttaaagattggataagcaaatatccgattgtttctattgaagacccgctcgatcaaaacgattgggaaggctatgcaaagatgacaaaggaattgggaaatcaaattcagattgtgggtgacgacttttttgtaacaaacacaaaacggcttgcccgcggtattgaagaaggagcctgcaattctattttgataaagctcaaccaaatcggaaccgttaccgaaacaatcgatgccgtaagaatggctcaaaaggccggctacactgcggttatttcgcaccgctcaggcgagaccgaagatgcctttattgcagacttggctgttgcccttgaaaccggacaaattaaaaccggttcaatgagccgcagcgaccgcattgcaaagtataaccagcttatgaggattgaagatgagctcggctacaacgcccgctatgcaggtatggcaacctttgcaaacctgataaaaaaataa

SEQ ID NO: 4100 - protein, 433 aa, Treponema denticola
MSDIIYIEGREILDSRGNPTVEVEVQLSDFSYGRACVPSGASTGEYEALEMRDGDKSRYMGKGVLKAVDQVNTVIAEELDGADALDQAEIDNMLINLDGTENKSKLGANAMLGVSMAVARAAADSLGLPLYRYLGGVHAMQMPVPMANIINGGRHSDNKIDFQEYMIMPVGAPSIREGIRMTAEVFHALKDILKKEGHVTAVGDEGGFAPNIENVQALDYIMKAIEKAGYKPGKDVVIALDCASSELFDAGDRKGYKFWKSEPSKILNADEMVDLFKDWISKYPIVSIEDPLDQNDWEGYAKMTKELGNQIQIVGDDFFVTNTKRLARGIEEGACNSILIKLNQIGTVTETIDAVRMAQKAGYTAVISHRSGETEDAFIADLAVALETGQIKTGSMSRSDRIAKYNQLMRIEDELGYNARYAGMATFANLIKK

SEQ ID NO: 4101 - DNA, 1290 bp, Mycobacterium paratuberculosis
  CDS (1)..(1290)
atgccgattatcgagcaggtcggggcccgcgagatcctcgactcccgcggtaacccgacagtcgaggtcgagatcgccctgaccgacggaacgttcgcccgcgcggcggtgccgtccggggcgtcgaccggtgagcacgaggccgtcgaactgcgcgacggcggggagcggtacggcggcaagggcgtgcagaaggcggtgcaggccgtgctggacgagatcggcccggcggtgatcgggctgaacgccgacgaccagcgcctggtggaccaggcgctggtcgacctggacggcaccccggacaagtcgaggctgggcggcaacgcgatcctgggcgtgtcgctggccgtggccaaggcggccgccgattccgcggagttgccgctgttccgctacctgggcgggcccaacgcgcacatcctgccggtgccgatgatgaacatcctcaacggcggcgcgcacgccgacaccgccgtcgacatccaggagttcatggtcgccccgatcggcgcgccgagtttcgccgaggcgttgcgctggggtgcggaggtgtatcactcgctgaagtcggtgctgaagaaggagggcctgagcaccggcctgggcgacgagggcggcttcgcccccgacgtggcgggcaccaccgcggcgctggacctgatcggccgggccatcgaatcggccggcttcaaactcggcaccgacgtggcgctggccctcgacgcggcggccaccgagttctacagcgacggcaccggctacaagttcgagggcagcacccgcaccgccgagcagatggccgagttctacgccgggctgctcggcgcgtatccgttggtgtccatcgaagacccgctgtccgaagatgattgggacggctgggcggcgctgaccgcgtcgatcggcgaccgggtgcagctcgtcggcgacgacgtcttcgtcaccaatcccgaacgcctggaagagggtatcgagaagggcgtcgcaaatgcgttgctggtcaaggtgaatcagatcggcacgctgaccgagacgctggacgccgtcgcgctggcccaccacagcggctaccgcacgatgatgagccaccgcagcggtgaaaccgaggacaccacgatcgccgacctggcggtggccgtcggcagtgggcagatcaagaccggagcgccggcccgcagcgagcgggtggccaagtacaaccagctgctgcggatcgaggaggcgctcggcgacgccgcgcgttacgccggcgacctggccttcccgcggttcgcgttggagaccagatag

SEQ ID NO: 4102 - protein, 429 aa, Mycobacterium paratuberculosis
MPIIEQVGAREILDSRGNPTVEVEIALTDGTFARAAVPSGASTGEHEAVELRDGGERYGGKGVQKAVQAVLDEIGPAVIGLNADDQRLVDQALVDLDGTPDKSRLGGNAILGVSLAVAKAAADSAELPLFRYLGGPNAHILPVPMMNILNGGAHADTAVDIQEFMVAPIGAPSFAEALRWGAEVYHSLKSVLKKEGLSTGLGDEGGFAPDVAGTTAALDLIGRAIESAGFKLGTDVALALDAAATEFYSDGTGYKFEGSTRTAEQMAEFYAGLLGAYPLVSIEDPLSEDDWDGWAALTASIGDRVQLVGDDVFVTNPERLEEGIEKGVANALLVKVNQIGTLTETLDAVALAHHSGYRTMMSHRSGETEDTTIADLAVAVGSGQIKTGAPARSERVAKYNQLLRIEEALGDAARYAGDLAFPRFALETR

SEQ ID NO: 4103 - DNA, 1287 bp, Geobacter sulfurreducens
  CDS (1)..(1287)
atgagcgaaatcactgatgtttacgcgagggagatcctcgattcccgcggcaatcccaccctggaggtggaagtttttctggagtccggcgtcatgggccgtgcggctgttccctccggcgcctcgaccggtgagcgggaagctctggaactgcgggacggcgacgcctcacgttacctgggcaagggagttctcaaggccgtcgacaacgtgaacgacatcattgccgagcaactcatcggcatggaggccaccgaccaggtggggatcgaccggcggatgctggagctcgacggaacggaatacaagagcaccctgggggccaacgccattctcggcgtgtcgcttgccgttgccaaggccgcggccgaagaggtcggcctccccctctaccagtacatcggcggctgcaatgcccgggagcttcccctccccatgatgaacatcctcaacggcggtgcccacgccgacaacaacgtcgacatccaggagttcatgatcatgcccgccggtgcccggagcttttccgaagccctgcggatgggggccgaggtgttccacgcactgaagagcgtcctgaagggtaagggctacaatactgccgttggggacgaagggggcttcgcaccgaacctcaagtcgaacgaagaggcactcgaagtcatcatggaagccattgccaaggccggttacaaggcgggtgaggacatcctcctggccctcgacgtggcgtcgtcggagctgttcaaggacggcaagtacttccttgagaacgaggccaaacccgaaaaaaccgcagacgagctgatcgatttctatgagaacctggtgaacaagtatcccatcatctccatcgaggacggcatggccgagaacgactgggaaggatggaagaagatcaccgaccgcctcggcaaacgggtccaactggtgggagacgacctcttcgtaaccaatacgaagatcctcaaggaggggatcagcaagggtgtagccaactccatcctcatcaaactgaaccagatcggcacgctcaccgaaaccctcgacgccatcgagactgccaagcgcgccgggtacaccaccgtcatctcccaccgctccggcgaaaccgaggacacgacccttgccgacctggcggtggcggtgaacgccggacagatcaagaccggctccctgtgccggaccgaccgggtggccaagtacaaccagttgctcaggatcgaggatgaactggatgtgaccgcccagttccgcggtaaggatgtattctacaacctgcgttga

SEQ ID NO: 4104 - protein, 428 aa, Geobacter sulfurreducens
MSEITDVYAREILDSRGNPTLEVEVFLESGVMGRAAVPSGASTGEREALELRDGDASRYLGKGVLKAVDNVNDIIAEQLIGMEATDQVGIDRRMLELDGTEYKSTLGANAILGVSLAVAKAAAEEVGLPLYQYIGGCNARELPLPMMNILNGGAHADNNVDIQEFMIMPAGARSFSEALRMGAEVFHALKSVLKGKGYNTAVGDEGGFAPNLKSNEEALEVIMEAIAKAGYKAGEDILLALDVASSELFKDGKYFLENEAKPEKTADELIDFYENLVNKYPIISIEDGMAENDWEGWKKITDRLGKRVQLVGDDLFVTNTKILKEGISKGVANSILIKLNQIGTLTETLDAIETAKRAGYTTVISHRSGETEDTTLADLAVAVNAGQIKTGSLCRTDRVAKYNQLLRIEDELDVTAQFRGKDVFYNLR

SEQ ID NO: 4105 - DNA, 2421 bp, Lactobacillus johnsonii
  CDS (1)..(1287)
atgctcaaatcagttattgagaatgtacatgcacttgaaatctttgattcacgtggtaacccaactgttgaagttttcgttactctttcaaacggtgttgtaggtaaggctgaagttccatctggtgcttcaactggtgaaaacgaagctgttgaattacgtgatggtggttcacgtcttggtggtaaaggtgttatgaacgctgttaacaacgttaacactgaaatcaacgacgctttaaagggattagatccacatgatcaaccaaacatcgacgcaactatgattgctttagatggtactccaaacaagggccgtcttggtgctaacgctatcttaggtgtatctatggctactgctgctgcagctgctaaggataaccaccaaccattataccgttaccttggtggtactgaccttgaaatgcctcaaactttccacaacgttattaacggtggtgaacacgcagacaacggtatcgatattcaagaattcatgattaccccagttgctaagacttcattccgtgatggttttgaaaagattgttaacgtataccacactttgaagaaagttcttgaagatatgggttacgaaactggcttaggtgacgaaggtggtttcgctcctaacatgaagaactcagaagaagctttgaaggcattacatgaatcaatcatcaaggctggttacaagccaggtgaagatattgctattgcatgtgactgtgctgcttcatacttctacaacaaagaagacggcaagtaccaccttgaaggtaaagttcttactgacgaagaattggcagactactacgacaagttacttgacgaattcccagaattaatttctatggaagacccatacgatgaaaacgatgttgaaggtatggttaagtttactcaaagccacaaggaccgtatccaaatcgttcttgacgacttcatttgtactaaccctaagcttttgaacaaggctattcacgaaggtgctggtaacgcttcattaatcaagttgaaccaaatcggtactgttactgaaactcttgaaactattcgtctttcacgtaagaatggttacaacactatgatttctcaccgttcaggtgaaactggtgatactttcatcgctgacttcgcagttgctgttaacggtggtcaattgaagactggtgctccagctcgttcagaacgtgttgaaaagtacaaccgtttacttgaaatcgaagaagaacttggtaagggtgaacgtttagcattcttcccagacaacgttgacttagattaatataagttgatattaaaaaaagagattgatttttgatcaatctctttttttgtgcttgagataactataaaaagtaagtaaactagataacatagtatagaaaggaagattagttgaaaaagaaaattagatcttttgataataagactgtattaacgattggacgaattggctcagttttatctgttctaatgtatgtttcttatattccacaaattatgaataatttgcaaggaaattacggcaatcctattcagccattagtcgcagccattaactgccttatttgggttctgtatgctctcttaagagagaaaaaggattggccgttgtttgtagctaactttccggggattttatttggattagctacattcattaccagtttgcattaaattttcataaaaagactttctataatgtgttataactaaaaaattagatgtaagagaggaaaataatttgattactgtctcagatttaagtttaaatttatctggtcgtaccttatacgaagatgttaacttgaaattcactcccggtaattgttatggagtaatcggtgctaatggtgccggtaagtcaacttttttgaaactgttagaaggtaagattgaacctactactggtaatatttctattgatgctaatgaaagaatgtcgagcttgaatcaagatcactttgctttcgaagaatttactgttttagatacagtaattcaggggcataaagaactttatcaagtaatgaaagataaggatgagctttattctaaggctgattttagcgatgaagatggagttaaggctgcagaattagaatctaaatttgctgaacttgacggttggaacgccgaagcagacgcatctaagcttttgcagtctttaggtataccagaagagttgcatcaaagtaagatgagtgaattaccagaagcggaaaaagttaaagtattattagcacaagccttatttggtaatcctgatattcttttaattgatgagcccactaacggtttagatgttcatactgtaaactggcttgaagactttttagccgattatccaaatattgttattgtagtttcccacgacccgtcacttcttaaatcaagtatgtacacaaatgtgtga

SEQ ID NO: 4106 - protein, 428 aa, Lactobacillus johnsonii
MLKSVIENVHALEIFDSRGNPTVEVFVTLSNGVVGKAEVPSGASTGENEAVELRDGGSRLGGKGVMNAVNNVNTEINDALKGLDPHDQPNIDATMIALDGTPNKGRLGANAILGVSMATAAAAAKDNHQPLYRYLGGTDLEMPQTFHNVINGGEHADNGIDIQEFMITPVAKTSFRDGFEKIVNVYHTLKKVLEDMGYETGLGDEGGFAPNMKNSEEALKALHESIIKAGYKPGEDIAIACDCAASYFYNKEDGKYHLEGKVLTDEELADYYDKLLDEFPELISMEDPYDENDVEGMVKFTQSHKDRIQIVLDDFICTNPKLLNKAIHEGAGNASLIKLNQIGTVTETLETIRLSRKNGYNTMISHRSGETGDTFIADFAVAVNGGQLKTGAPARSERVEKYNRLLEIEEELGKGERLAFFPDNVDLD

SEQ ID NO: 4107 - DNA, 1299 bp, Lactobacillus johnsonii
  CDS (1)..(1299)
atgtctgttattactgatattcacgcacgtgaagttcttgactctcgtggtaatccaactgttgaagctgaagtttacactgaattaggtggctttggtcgtgctatcgtaccatctggtgcttctactggtgaacatgaagcagtagaattacgtgatggtgacaagtctcgttttcttggtcaaggtgttttaactgctgttgaaaacgttaatggtgaaattgcaaaagctgttattggcttagatgtaactgatcaacgtttaattgaccaaactatgattgaccttgacggtactccaaacaagggtcgtttaggtgctaacgctatgttggctgtttcattagcaagtgcacgtgctgcagctgatgaattaggtttacctttatacgaatacttaggtggaccaaacgctcatgttttaccaactccaatgatgaatgttattaacggtggtaagcacgccgataacaacgttgatatccaagaattcatgattatgccagttggtgctaagtctcttcatgaagctgttcgtatgggtgcagaaactttccatactttgaagagcttgcttcaagaacgtggtgaatcaactgctgtaggtgacgaaggtggttttgcaccaaacttgaagaacaacgaagaaccatttgaaattttagttgaagctattcaacgtgctggctacaagcctggtcaagatatttctattgcatttgactgtgcagcttctgaattctacaacaaggatactaagaagtatgtgactgttgctgacggccgtgaatacactgctgaagaatggacttcacttatggaagacatcgttgacaaatacccagttatttccattgaagatcctttggacgaaaacgattgggaaggttggaaagtcttcactgaacgtttaggtgataaggtacaaatcgttggtgacgatttattcgtaactaacactaactaccttgaaaagggtattaagatgggtgttgctaactcaatcttaattaagcttaaccaaatcggtactttgactgaaacttttgaagctattgaaatggctaaggaagcaggctacactgctgttgtttctcaccgttctggtgaaactgaagatactacaattgctgatttagttgttgcaactaatgctggtcaaattaagactggttcaatgtcaagaactgatcgaattgctaagtacaaccaattaatgagaattgaagaagctttgggttcaactgctcaatacaaaggaattcacagtttctacaacttacacaaacaattttaa

SEQ ID NO: 4108 - protein, 432 aa, Lactobacillus johnsonii
MSVITDIHAREVLDSRGNPTVEAEVYTELGGFGRAIVPSGASTGEHEAVELRDGDKSRFLGQGVLTAVENVNGEIAKAVIGLDVTDQRLIDQTMIDLDGTPNKGRLGANAMLAVSLASARAAADELGLPLYEYLGGPNAHVLPTPMMNVINGGKHADNNVDIQEFMIMPVGAKSLHEAVRMGAETFHTLKSLLQERGESTAVGDEGGFAPNLKNNEEPFEILVEAIQRAGYKPGQDISIAFDCAASEFYNKDTKKYVTVADGREYTAEEWTSLMEDIVDKYPVISIEDPLDENDWEGWKVFTERLGDKVQIVGDDLFVTNTNYLEKGIKMGVANSILIKLNQIGTLTETFEAIEMAKEAGYTAVVSHRSGETEDTTIADLVVATNAGQIKTGSMSRTDRIAKYNQLMRIEEALGSTAQYKGIHSFYNLHKQF

SEQ ID NO: 4109 - DNA, 1314 bp, Ashbya gossypii
  CDS (1)..(1314)
atggctatttccaaggtctacgctagatccgtgtacgattcccgtggtaacccaaccgtcgaggttgaggtgaccaccgagaacggcactttcagatcgattgttccatccggtgcttccaccggtgtccacgaggctcttgagttgagagacggtgacaagtccaagtggttgggcaagggtgtgaccaaggccgtgtccaacgtcaacgacatcatcgctccagctttgctatccgccaacgtcgacgtcaaggaccagaaggccgttgacgctttgatgttgaccttggacggcactccaaacaagagcaagttgggtgctaacgccatcttgggtgtctccatggctgttgccaaggctgctgctgctgagaagaaggtgccattgtaccagcacttggctgacttggctggctcttccaccactccattcgtgttgccagttccattcttgaacgttttgaacggtggctctcacgccggtggtgctttggctctacaggagttcatgatcgccccaaccggtgctgagtctttctccgaggctttgagaatgggctctgaggtctaccacaacttgaagtctttgaccaagaagagatacggtgcctccgccggtaacgtcggtgacgagggtggtgttgctccaaacatccagactgccgaggaggctttggacttgattgtcgacgccatcaaggctgccggctacgagggcaagatcgacattgccttggactgtgcttcttccgagttcttcaaggacggtaagtacgacttggacttcaagaacccagagtccgactcttccaagtggttgtctggccaggagttggctgacctatacaagaagttggtcgagaagtacccaattgtctccatcgaggacccattcgctgaggacgactgggaggcttggtctcacttctacaagaacgctggtgtccagattgtcgctgacgacttgaccgtcaccaacccaactagaattgccactgctattcagaagaaggccgccgacgctttgttgttgaaggtcaaccagattggttctttgactgagtctatccaggccgccaaggactctttcgacgccacctggggtgtcatggtctctcacagatctggtgagactgaggacactttcattgccgacttggttgtcggtttgagaaccggccagatcaagactggtgctccagccagatctgagagattggccaagttgaaccagttgttgagaatcgaggaggagttgggctccaaagctatctacgctggtaagaagttccacaacgctaacaagttgtaa

SEQ ID NO: 4110 - protein, 437 aa, Ashbya gossypii
MAISKVYARSVYDSRGNPTVEVEVTTENGTFRSIVPSGASTGVHEALELRDGDKSKWLGKGVTKAVSNVNDIIAPALLSANVDVKDQKAVDALMLTLDGTPNKSKLGANAILGVSMAVAKAAAAEKKVPLYQHLADLAGSSTTPFVLPVPFLNVLNGGSHAGGALALQEFMIAPTGAESFSEALRMGSEVYHNLKSLTKKRYGASAGNVGDEGGVAPNIQTAEEALDLIVDAIKAAGYEGKIDIALDCASSEFFKDGKYDLDFKNPESDSSKWLSGQELADLYKKLVEKYPIVSIEDPFAEDDWEAWSHFYKNAGVQIVADDLTVTNPTRIATAIQKKAADALLLKVNQIGSLTESIQAAKDSFDATWGVMVSHRSGETEDTFIADLVVGLRTGQIKTGAPARSERLAKLNQLLRIEEELGSKAIYAGKKFHNANKL

SEQ ID NO: 4111 - DNA, 1504 bp, Penicillium chrysogenum
  CDS (39)..(1355)
aactgactgaatccataatcagcctgtccaattccaacatgcctatctctaagatccacgctcgctccgtgtacgactcgcgcggcaaccccaccgttgaggtggatgttgtcaccgagaccggccttcaccgcgccattgtcccctccggtgcttccactggcctgcacgaggtcgttgagctccgcgatggtgacaagaccaagtggggtggtaagggtgtcctcaacgccgtcaagaacgtcaacgacgtcattggccccgccctcatcaaggagaacatcgacgttaaggaccaggccaaggttgacgagttcctgaacaagcttgatggaacccccaacaagggcaagctcggtgccaacgccatcctcggtgtttctctcgccgttgccaaggctgccgccgctgagaagggtgttcccctctacgctcacatctccgaccttgccggaaccaagaagcccttcgtcctgcccgtccccttccagaacgtcctgaacggtggctcccacgccggtggccgtctcgccttccaggagttcatgattgttcccgacactgcccccactttctccgagggtctccgccagggtgctgaggtctaccaggagctcaaggctctcgccaagaagaagtacggtcagtccgccggtaacgtcggtgacgagggtggtgtcgctcctgatattcagaccgccgaggaggctctcgacctcatcaccgaggccattgagcaggctggctacactggccagatcaagattgccatggatgttgcctccagcgagttctacaaggaggatgccaagaagtacgatcttgacttcaagaatcccgagagcgaccccaccaagtggctcacctacgagcagcttgccgacctctacaagtccctcgctgccaagtaccccattgtctccatcgaggaccccttcgctgaggacgactgggaggcctggagctacttctacaagacctccgacttccagatcgtcggtgatgacttgactgtcaccaaccctctgcgcattaagaaggccattgagctcaagtcctgcaacgcccttctcctgaaggtcaaccagatcggtaccttgaccgagtctatccaggccgccaaggactcctatgccgacggctggggtgtcatggtctcccaccgctccggtgagaccgaggatgtcaccattgctgacatcgctgttggtctccgtgccggtcagatcaagaccggtgcccctgcccgttccgagcgtcttgccaagcttaaccagatcctccgcattgaggaggagcttggtgccaacgctgtctacgccggcgagaagttccgcactgctgtcaacctgtaaatgcagcctttcggcagcatagatcgggcctgatgagggcccatcaaaaacgatggtttgatgatctacggagccgtcgcccatgatgattatgaatttaataggatctttttcaatgaaaacaaattcaatcactgaaaaaaaaaaaa

SEQ ID NO: 4112 - protein, 438 aa, Penicillium chrysogenum
MPISKIHARSVYDSRGNPTVEVDVVTETGLHRAIVPSGASTGLHEVVELRDGDKTKWGGKGVLNAVKNVNDVIGPALIKENIDVKDQAKVDEFLNKLDGTPNKGKLGANAILGVSLAVAKAAAAEKGVPLYAHISDLAGTKKPFVLPVPFQNVLNGGSHAGGRLAFQEFMIVPDTAPTFSEGLRQGAEVYQELKALAKKKYGQSAGNVGDEGGVAPDIQTAEEALDLITEAIEQAGYTGQIKIAMDVASSEFYKEDAKKYDLDFKNPESDPTKWLTYEQLADLYKSLAAKYPIVSIEDPFAEDDWEAWSYFYKTSDFQIVGDDLTVTNPLRIKKAIELKSCNALLLKVNQIGTLTESIQAAKDSYADGWGVMVSHRSGETEDVTIADIAVGLRAGQIKTGAPARSERLAKLNQILRIEEELGANAVYAGEKFRTAVNL

SEQ ID NO: 4113 - DNA, 1269 bp, Wolinella succinogenes
  CDS (1)..(1269)
atgatttatatcgataatattgttgctcaagaagtcatggatagccgaggcaatccgaccgtcaaagccaccgtgaccctaagcgatggaaatagcgccagcgctatcgttccaagtggtgccagcacagggaaaagggaggctttggagcttcgagacggcgattctcgatatttaggcaagggagtcttgcaggcctgcgaaaatgtcaacaccaagctctccgaggagctcatcggattgagcccttttgatcagagtgagattgacgccattatccaagaattagatggcacggaaaactttgccaatatcggcgccaatgccgctcttggagtctctatggcagtggctagaagcgcggcgaaaagcctcaatattcctctttatcgctatcttggcggagccaatgccctcaccctgcccgtccccatgctcaacatcatcaacggcggaagccatgccgataacacggtggattttcaagagtatatgatcatgcccctaggctttgagaacttctccgaatcgcttcgcgctagcgccgaagtctatcatcacctcaaaaagattctcaaagattccaaacatatcaccagcattggagatgaggggggctttgcacccaacctcaaaactaatgaagagcccatccaaatcatcatacaggcgattgagaaagcgggttatcgacccggcgaagagatcgctctcgcccttgatgtcgctagcagcgagtttgtcaacgagcaaggcctctatcacctcgagggagaaggacgcacgcttagcagtgaggagcttgtgggctattatgaatctctcatcgccaaatatcccattgtctccattgaagatggtctgagcgaagatgattggaaaggatggaaatatctcaccgagagattgggcggcaaagttcagcttgtaggggatgatctcttcgtcaccaacgccaaaatcctccaagagggaatctctcaaggaatcgccaatgcgattctcattaagcccaaccaaattggaaccgtgagccaaaccatgcagaccgttcgattggctcaaagaaatcactatcgatgcgtgatgagtcaccgaagtggcgaaagtgaagattcctttattgccgattttgccgtagcgctcaacacaggcgaaatcaaaacaggctccaccgcccgaagcgaacgaatcgccaaatataatcgcctgcttgccattgagagcgagctttgccgctctgaatatcttggccgctctcttttttaa

SEQ ID NO: 4114 - protein, 422 aa, Wolinella succinogenes
MIYIDNIVAQEVMDSRGNPTVKATVTLSDGNSASAIVPSGASTGKREALELRDGDSRYLGKGVLQACENVNTKLSEELIGLSPFDQSEIDAIIQELDGTENFANIGANAALGVSMAVARSAAKSLNIPLYRYLGGANALTLPVPMLNIINGGSHADNTVDFQEYMIMPLGFENFSESLRASAEVYHHLKKILKDSKHITSIGDEGGFAPNLKTNEEPIQIIIQAIEKAGYRPGEEIALALDVASSEFVNEQGLYHLEGEGRTLSSEELVGYYESLIAKYPIVSIEDGLSEDDWKGWKYLTERLGGKVQLVGDDLFVTNAKILQEGISQGIANAILIKPNQIGTVSQTMQTVRLAQRNHYRCVMSHRSGESEDSFIADFAVALNTGEIKTGSTARSERIAKYNRLLAIESELCRSEYLGRSLF

SEQ ID NO: 4115 - DNA, 1278 bp, Porphyromonas gingivalis
  CDS (1)..(1278)
atggaaattgcaaagattattggcagggagatcctcgattccagaggcaatccgacggttgaggtagatgtacacctggcctgtggcataataggacgcgcggctgtacccagcggagcttccaccggtgagaatgaggctatcgagcttcgcgatcaggataaggctcgctactgtggcaaaggtgtcctcaaggctgtgaagaacgtaaatgaagtgatagatcccgcactctgcggaatgtctgtattggaacaaacagctattgaccgcaagctcatcgaattggatggcaccaaaacgaaaagcaacctcggagcaaatgccatgctgggcgtatcactggccgtagccaaagcagctgcagcttatttggatattcctctctaccgatatatcggcggttcgaacacctatgtcctgcctgttcctatgatgaatatcatcaacggcggttctcactcggacgctcctatcgcattccaggagttcatgatccgccctgtgggagcatgctgcttccgtgagggcttgcgcatgggtgccgaagttttccatgcactcaaaaaggtgcttcacgatcgtggtctgagtactgcagtcggggatgaaggaggttttgctcctgccctgaatggtacggaagatgctatcgaatcaatcctcaaggctgtggaagctgccggatacgtgcccggtaaggatattaccatcgcaatggactgcgcctcttccgagttcttcaaggatggtatttacgactacactaagttcgaaggcgaaaagggcaagaaacgctctatcgatgagcaggtggcttatctgaccgaactggttggcaagtatcccatcgattctatcgaagacggtatgagcgaaaatgactgggaaggatggaagaagctgaccgtagctttgggagataaggttcagctcgtcggcgacgatctcttcgttaccaacgtggaattccttcgccgtggtatcgccgagaagtgcggcaactccatccttatcaaggtaaaccagattggtacgctcacagagaccctgaatgccatcgagatggcacaccgtcacggctttaccagcgttacttcgcaccgctccggagagacagaagacaccactatcgcagacattgctgtagcaaccaactcgggacagatcaagacgggatcgctcagtcgtaccgaccgtatggctaagtacaaccaactgctccgcatcgaagaggagttaggcccttgcgctgtatacggctacaagaaagtgtaa

SEQ ID NO: 4116 - protein, 425 aa, Porphyromonas gingivalis
MEIAKIIGREILDSRGNPTVEVDVHLACGIIGRAAVPSGASTGENEAIELRDQDKARYCGKGVLKAVKNVNEVIDPALCGMSVLEQTAIDRKLIELDGTKTKSNLGANAMLGVSLAVAKAAAAYLDIPLYRYIGGSNTYVLPVPMMNIINGGSHSDAPIAFQEFMIRPVGACCFREGLRMGAEVFHALKKVLHDRGLSTAVGDEGGFAPALNGTEDAIESILKAVEAAGYVPGKDITIAMDCASSEFFKDGIYDYTKFEGEKGKKRSIDEQVAYLTELVGKYPIDSIEDGMSENDWEGWKKLTVALGDKVQLVGDDLFVTNVEFLRRGIAEKCGNSILIKVNQIGTLTETLNAIEMAHRHGFTSVTSHRSGETEDTTIADIAVATNSGQIKTGSLSRTDRMAKYNQLLRIEEELGPCAVYGYKKV

SEQ ID NO: 4117 - DNA, 1302 bp, Photorhabdus luminescens
  CDS (1)..(1302)
atgtccaaaatcgttaaagtgatcggtcgtgaaatcattgactcccgtggtaacccaactgtagaagcagaagtgcatctggaagggggctttgtgggtttagcggctgcaccctctggtgcatctaccggttctcgcgaagcgttggaactgcgtgacggtgacaaatcccgttttatgggtaaaggtgtattgaaagctgttgatgcagtaaatggcccgattgcacaggcagttatcggccaggatgcgaaagatcaggctaacatcgacaaaatcatgatcgacctggatggtactgaaaataaatctcaattcggtgctaatgcgattctggcggtttctctggctaatgcgaaagccgcagcagcagcgaaaggtatgccgttgtacgagcacattgctgaattgaatggcactccgggtaaattctctatgccgttgccgatgatgaacatcatcaatggtggtgagcacgcggataacaacgttgatatccaggaatttatgattcaaccgattggagcaaaaacgctgaaagaggcggttcgtatcggttctgaagttttccataacttggctaaagttctgaaagcaaaaggcatgagtactgcggttggtgacgaaggtggttatgcgcctaacttggaatctaacgctgctgcgctggctgctattaaagaagcggtagaacaagcaggctatgttctgggcaaagatgtcactttggctatggattgtgctgcttctgaattctacaacccagaaaccggtaattacgaactgaaaggtgaaggtaaaactttcacttctcaagagttcactcattacctcgaagatttgaccagaaaatatccgattgtttctattgaagatggcttgaatgaatctgactgggaaggcttcgcttaccagacaaaagtgctgggcgaaaaaatccagttggttggtgatgacctgtttgttaccaatactaagatcctgaaagaaggtattgagaaaggcattgctaactccattttgattaaattcaaccagattggttctctcactgaaacactggcagcgattaaaatggcaaaagacgcaggttacacggcggtaatttctcatcgttctggtgaaactgaagatgcgactattgctgatctggcagtaggtaccgcggcaggtcaaatcaaaaccggttctatgagtcgctctgatcgcgttgctaaatacaatcagttgatccgtattgaagaagctttgggtaaccgcgctcctttctatggcctgaaagaagtaaaaggtcaggcttaa

SEQ ID NO: 4118 - protein, 433 aa, Photorhabdus luminescens
MSKIVKVIGREIIDSRGNPTVEAEVHLEGGFVGLAAAPSGASTGSREALELRDGDKSRFMGKGVLKAVDAVNGPIAQAVIGQDAKDQANIDKIMIDLDGTENKSQFGANAILAVSLANAKAAAAAKGMPLYEHIAELNGTPGKFSMPLPMMNIINGGEHADNNVDIQEFMIQPIGAKTLKEAVRIGSEVFHNLAKVLKAKGMSTAVGDEGGYAPNLESNAAALAAIKEAVEQAGYVLGKDVTLAMDCAASEFYNPETGNYELKGEGKTFTSQEFTHYLEDLTRKYPIVSIEDGLNESDWEGFAYQTKVLGEKIQLVGDDLFVTNTKILKEGIEKGIANSILIKFNQIGSLTETLAAIKMAKDAGYTAVISHRSGETEDATIADLAVGTAAGQIKTGSMSRSDRVAKYNQLIRIEEALGNRAPFYGLKEVKGQA

SEQ ID NO: 4119 - DNA, 1428 bp, Mycoplasma gallisepticum
  CDS (1)..(1428): trans_table 4
atggcaaagacaaacagtactagcaaaaacaataaattagaaataaagagtgtttttgcataccaagcatttgattcaagaggttttcctacagttgcttgtgaagttgttttaaacgacggatctaaaggattatcaatggtttcatctggtgcttcaactggtgaaaaggaagctttagaattaagagatggtggcactaaatatcatggtaaaggtgtaactaaagctgttaataatattaacaaaaagattggtccaaaaatcttaggtgttgatgctactttacaaactcagatcgatgagttcatgattgaattagacggtactaagactaaagctaaattaggtgcaaatgcaatcttagcagtatcaatggctgtatgtagagcagctgctaaatcattaaatctacctttatatcaatacattgctaagaaagtggcaaaagttaagggtgctgatttcatcttaccagttcctatgttaaacgtaattaacggtggagctcacgctgataacacaatcgacttccaagagttcatgattatgccagttggtgcaaaaacgatggctaaagcgttacaaatggctagtgaagtgttccactcactacaaaaactacttaaagctaagaagtttaacactaacaaaggtgatgaaggtggttttgcgcctaacttaaaatcagctgaagaagcacttgatttaatgagtcaagcagttgttgatgctgggtatgctttaggtaaggatgttgcgtttgcacttgactgtgcagctagtgaattctacagcaaagaaaagcaagcttatgtctttaaaaaagcagtaaaagctggaattctttctgaagaaaaaggtactaaaacaactgaacaattaattagttacttagaagatttaactaagaaatatccaatcgtttcaatcgaagatggtttagatgaaaacgactgaaaagggatggaatcactaactaaaaagatcggtaagaaagtacagatcgttggtgatgacacttactgtacaaaccctgaattaacttctaagggtgtttcattatcagcgactaactcagtattaattaagttaaaccaaatcggaacattaactgaaacgatccaaacaattaatattgctaaaaaagcaaactgaacggctgtagtttctcaccgttcaggtgaaactgaagatgctttcattgctgatttagctgtagctctaagtacaggtcagatcaagactggttcaatgtcacgatctgaaagaattgctaaatacaaccgtttattagcaattgaaatgcaattaggtaataaagctaaatatctaggaagtaaaactttctataacctaagcacacctgctgcaacacctaaaaagagtccagctaaaaaaacaacaaaagcaaaatcaaaaaaataa

SEQ ID NO: 4120 - protein, 475 aa, Mycoplasma gallisepticum
MAKTNSTSKNNKLEIKSVFAYQAFDSRGFPTVACEVVLNDGSKGLSMVSSGASTGEKEALELRDGGTKYHGKGVTKAVNNINKKIGPKILGVDATLQTQIDEFMIELDGTKTKAKLGANAILAVSMAVCRAAAKSLNLPLYQYIAKKVAKVKGADFILPVPMLNVINGGAHADNTIDFQEFMIMPVGAKTMAKALQMASEVFHSLQKLLKAKKFNTNKGDEGGFAPNLKSAEEALDLMSQAVVDAGYALGKDVAFALDCAASEFYSKEKQAYVFKKAVKAGILSEEKGTKTTEQLISYLEDLTKKYPIVSIEDGLDENDWKGMESLTKKIGKKVQIVGDDTYCTNPELTSKGVSLSATNSVLIKLNQIGTLTETIQTINIAKKANWTAVVSHRSGETEDAFIADLAVALSTGQIKTGSMSRSERIAKYNRLLAIEMQLGNKAKYLGSKTFYNLSTPAATPKKSPAKKTTKAKSKK

SEQ ID NO: 4121 - DNA, 1278 bp, Gloeobacter violaceus
  CDS (1)..(1278)
atgctgattacatcgatcgaagcgcacgaaattctcgattcacggggcaatccgaccgtcgaagcacaggtggcgcttgaaaacgggacgaccggctcggccatcgttccttcgggcgcctccaccggcgaaaaagaagcggtggagttgcgcgacagcgatccgaagcgctacggcggcaaaggggtgctgagcgccgtggccaacgtcaacgactcgatcgcccccgaaattatcggcatggaagtcaccgaccagcgcagcatcgaccgcaagatgatcgaaatcgacggtaccgccaacaaagccaccctcggcgccaacgcgatcttggcggtctcgatggcggtggcacgcaccgccgctctctcgctggggctgcctctctatcgctatttgggcggtacgaacgcctcgctgttgccggtaccctgcatgaacgtgatcaacggcggcaagcacgccgacaacaccgtcgattttcaagaatttatgatcgccccgcacaacgcacccaattttgccgaggcactacgcatgggagctgagactttccatgccctcaaatcgatcctgcgcggcaaaggctacagcacgggcgtgggcgacgaaggcggctttgcccccgatctcaagtccaacgaagaggcggtcgaagtgattttgcttgcgatcgaaaaggccggctaccggcccggcgaggacatctcgatctgtcttgacccggccaccagcgagatgtggaaggacggcaagtacttgttcttcaagtccgaccagtccaccaagacctccgaggaaatggtcgatctgtgggcttcctgggcaggccagtatccgatcgtttcgctcgaagacggcatgggtgagaacgattgggaaggctggaaaatgctcaccgaccgcatcggtgccactgtcgagctggtaggagacgacctgttttgcactaacgctaaaattcttgccgaaggcatcgaaaagggtgtcgccaattccattttgatcaaattgaatcagatcggttcggtcagcgagacgctcgacaccatcgaactggccgtcaagcacaactacaaatgttttgtctcccatcgctccggcgagaccgaggacacgaccattgcggatctgaccgtggcgaccgccgcgggccagatcaagaccggctccggctgccgcagtgagcgggtggccaagttcaaccagttactgagaatcgagcgccagctcggcgaggcggcccgcttcgcgggcaagtccgcctttgcgcgttag

SEQ ID NO: 4122 - protein, 425 aa, Gloeobacter violaceus
MLITSIEAHEILDSRGNPTVEAQVALENGTTGSAIVPSGASTGEKEAVELRDSDPKRYGGKGVLSAVANVNDSIAPEIIGMEVTDQRSIDRKMIEIDGTANKATLGANAILAVSMAVARTAALSLGLPLYRYLGGTNASLLPVPCMNVINGGKHADNTVDFQEFMIAPHNAPNFAEALRMGAETFHALKSILRGKGYSTGVGDEGGFAPDLKSNEEAVEVILLAIEKAGYRPGEDISICLDPATSEMWKDGKYLFFKSDQSTKTSEEMVDLWASWAGQYPIVSLEDGMGENDWEGWKMLTDRIGATVELVGDDLFCTNAKILAEGIEKGVANSILIKLNQIGSVSETLDTIELAVKHNYKCFVSHRSGETEDTTIADLTVATAAGQIKTGSGCRSERVAKFNQLLRIERQLGEAARFAGKSAFAR

SEQ ID NO: 4123 - DNA, 1305 bp, Fusobacterium nucleatum subsp
  CDS (1)..(1305)
atgacaggaatagtagatgtaattggaagagaaattttagattcaagaggaaatccgacagtagaagtagatgtaatattagaatgtggtgtaaaaggtagagcagctgttccatctggtgcttcaactggaagccatgaagcagttgagttaagagatgaagataaaacaagatatttaggaaaaggagttttaaaagctgtaaataatgtaaatactgaaattagagaagctcttttaggaatggatgctttaaatcaagttgaaattgatagagtaatgctagaattagatggaactgctaataaaggaagattaggagctaatgctatattaggtgtatctcttgctgtatcaaaagcagcagcagaagcattgggactacctttatataaatatttaggtggagtgaatgcaaaagaattaccactacctatgatgaatattttaaatggtggagcacatgctgattcagcggttgacttacaagaatttatgatacaaccagttggagctaaatcatttagagaagctatgcaaatgggagcagaagttttccatcatttaggaaaaattttaaaagctaatggagattcaacaaatgttggaaatgaaggaggatatgctccatcaaagattcaagggacagaaggagctttatctttaattagtgaagcagtaaaagctgctggttatgaattaggtaaagatatcacatttgcattagatgctgcttcaagtgaattttgtgaaaaagtaaatggagaatatcaatatcattttaaaagagaaggtggaattattagaaacactgatgcaatgataaaatggtatgaagaattaataaataaatatccaatagtttcaatagaagatggtttaggtgaagatgactgggatggttgggtaaaactaactaaggctattggagatagagttcaaatagttggagatgacttatttgtaactaatactgaaagattgaaaaaaggaatagaattaggagcaggaaactctatccttataaaattaaatcaaataggttcattaactgaaacattagatgcaatagaaatggcgaaaagagcaggatatacagctgttgtgtctcatagatcaggagaaacagaagatgcaacaatagctgatgtagctgttgcaaccaatgctggacaaattaaaactggttcaacttcaagaactgatagaatggctaaatacaaccaattattaagaatagaagaagaattagggtctgttgctcaatataaaggtagagatgtattctacaatataaagaaataa

SEQ ID NO: 4124 - protein, 434 aa, Fusobacterium nucleatum subsp
MTGIVDVIGREILDSRGNPTVEVDVILECGVKGRAAVPSGASTGSHEAVELRDEDKTRYLGKGVLKAVNNVNTEIREALLGMDALNQVEIDRVMLELDGTANKGRLGANAILGVSLAVSKAAAEALGLPLYKYLGGVNAKELPLPMMNILNGGAHADSAVDLQEFMIQPVGAKSFREAMQMGAEVFHHLGKILKANGDSTNVGNEGGYAPSKIQGTEGALSLISEAVKAAGYELGKDITFALDAASSEFCEKVNGEYQYHFKREGGIIRNTDAMIKWYEELINKYPIVSIEDGLGEDDWDGWVKLTKAIGDRVQIVGDDLFVTNTERLKKGIELGAGNSILIKLNQIGSLTETLDAIEMAKRAGYTAVVSHRSGETEDATIADVAVATNAGQIKTGSTSRTDRMAKYNQLLRIEEELGSVAQYKGRDVFYNIKK

SEQ ID NO: 4125 - DNA, 1317 bp, Neurospora crassa
  CDS (1)..(1317)
atgcccatctccaagatccacgctcgctacgtctacgactctcgtggcaacccgaccgttgaggttgacgttgttactgagctcggccttcaccgcgccattgtcccctccggtgcctccactggccagcacgaggcttgcgagctccgcgatggtgacaagaccaagtggggtggcaagggtgttctcaaggccgtccagaacgtgaacgaggtcatcggccccgctctcatcaaggagaacattgacgtcaaggaccagtccaaggttgacaagttcctcatcgacctcgatggcacccccaacaagaccaagctcggcgccaacgccatcctcggtgtctcgctcgccgttgccaaggccggtgctgctgagaagggcgttcccctttacgctcacatctccgaccttgctggcaccaagaagccctatgtccttcccgttcccttcatgaacgtcctcaacggcggttcccacgctggtggccgtctcgccttccaggagttcatgatcgtcccctccgccgctcctaccttctctgaggcccttcgtcagggtgctgaggtgtaccagatcctcaagagcctcgccaagaagaagtacggccagtccgctggtaacgtcggtgacgagggtggtgtcgctcccgatatccaaaaccccgaggaggccctcgaccttatcaccgaggccattgagaaggccggctacactggccaggtcaagatcgccatggatgtcgcttccagcgagttctacaaggaggacgtcaagaagtacgacctcgacttcaagaaccccgagtccgacccctccaagtggctcacctacgaggagctcgccaacctctactccgagctctgcaagaagtaccccatcgtctccatcgaggaccccttcgctgaggatgactgggaggcctggagctacttctacaagacccaggacatccagatcgttgctgatgacttgaccgtcaccaaccccctccgcatcaagaaggccattgagctcaaggccgccaacgccctcctcctcaaggtcaaccagatcggtacccttaccgagtccatccaagctgccaaggactcctacgccgatggctggggtgtcatggtctctcaccgctctggtgagactgaggatgtcaccattgccgacattgtcgttggtatccgctctggccagatcaagactggtgctcctgcccgttccgagcgtcttgccaagctcaaccagatcctccgcatcgaggaggagcttgccgacaacgccatctttgccggcgagaagttccgcaaggctgttgagctctaa

SEQ ID NO: 4126 - protein, 438 aa, Neurospora crassa
MPISKIHARYVYDSRGNPTVEVDVVTELGLHRAIVPSGASTGQHEACELRDGDKTKWGGKGVLKAVQNVNEVIGPALIKENIDVKDQSKVDKFLIDLDGTPNKTKLGANAILGVSLAVAKAGAAEKGVPLYAHISDLAGTKKPYVLPVPFMNVLNGGSHAGGRLAFQEFMIVPSAAPTFSEALRQGAEVYQILKSLAKKKYGQSAGNVGDEGGVAPDIQNPEEALDLITEAIEKAGYTGQVKIAMDVASSEFYKEDVKKYDLDFKNPESDPSKWLTYEELANLYSELCKKYPIVSIEDPFAEDDWEAWSYFYKTQDIQIVADDLTVTNPLRIKKAIELKAANALLLKVNQIGTLTESIQAAKDSYADGWGVMVSHRSGETEDVTIADIVVGIRSGQIKTGAPARSERLAKLNQILRIEEELADNAIFAGEKFRKAVEL

SEQ ID NO: 4127 - DNA, 1290 bp, Mycobacterium bovis
  CDS (1)..(1290)
atgccgattatcgagcaggttggggcccgagagatcctcgattcccgcggcaacccgacggtggaggtcgaggtggcgcttatcgacgggacattcgcccgggccgcggtgccgtcgggcgcctcgaccggggagcacgaggccgtcgagttgcgcgacggcggcgatcgctacggcggcaaaggcgtgcaaaaagccgtgcaggctgttcttgatgagatcggcccggccgtcatcggactcaacgccgacgaccagcgattggtcgaccaggcgctggtggacctagacggcacccccgacaagtcccggctgggcggcaacgcgatcttgggtgtctcgctcgctgttgccaaggcggcggcggattcggcggagctgccgttgttccgttatgtcggggggccaaacgcgcacattctgccggtaccgatgatgaacatcctcaacggcggcgcacacgccgataccgctgtcgacattcaagagttcatggtggcgccaattggcgcgcccagcttcgtcgaggcgttgcgctggggcgctgaggtgtaccacgcgctcaagtcggtcctgaaaaaggaggggctgtccaccggcctgggcgacgaaggcggcttcgccccggatgtggccggcaccaccgcggcgttggacctgatcagccgggccatcgagtcggcgggcttgcgacccggcgccgacgtggcgctggccctggacgcggcggccaccgagttcttcaccgacggcaccggctacgtcttcgagggcaccacccgtaccgcagaccagatgaccgagttctacgcgggcctgctcggcgcctacccgctggtgtcgatcgaagacccactgtccgaagacgattgggacggctgggccgcgctgacggcctcgatcggtgaccgggtgcaaatcgtcggcgacgacatctttgtcaccaatcccgagcggctcgaggagggcatcgaacggggcgtggcaaatgcgttgctggtcaaggtgaaccagatcgggacgttgaccgagacactcgacgcggtcacgctggctcaccacggcggataccgcacgatgatcagtcaccgcagtggcgagacggaggacaccatgatcgccgacctcgcggtggccatcggcagcgggcagatcaagacgggcgcgcctgctcgcagtgagcgcgtcgcaaaatacaaccagctgctgcggatcgaagaggcgcttggcgacgcggcccgctacgcgggcgacctggcatttcctcggttcgcgtgcgagacgaaatag

SEQ ID NO: 4128 - protein, 429 aa, Mycobacterium bovis
MPIIEQVGAREILDSRGNPTVEVEVALIDGTFARAAVPSGASTGEHEAVELRDGGDRYGGKGVQKAVQAVLDEIGPAVIGLNADDQRLVDQALVDLDGTPDKSRLGGNAILGVSLAVAKAAADSAELPLFRYVGGPNAHILPVPMMNILNGGAHADTAVDIQEFMVAPIGAPSFVEALRWGAEVYHALKSVLKKEGLSTGLGDEGGFAPDVAGTTAALDLISRAIESAGLRPGADVALALDAAATEFFTDGTGYVFEGTTRTADQMTEFYAGLLGAYPLVSIEDPLSEDDWDGWAALTASIGDRVQIVGDDIFVTNPERLEEGIERGVANALLVKVNQIGTLTETLDAVTLAHHGGYRTMISHRSGETEDTMIADLAVAIGSGQIKTGAPARSERVAKYNQLLRIEEALGDAARYAGDLAFPRFACETK

SEQ ID NO: 4129 - DNA, 1293 bp, Synechococcus sp
  CDS (1)..(1293)
atgatcgattcgctcgacctcgtcatcgacaccatcgtggcccgcgaagttctcgattcccgcggcaacccaaccgttgaagccgaagtgctgctcgaaggtggtgccatgggccgggccatcgtgcccagcggcgccagcacaggtgcccacgaggcccacgaactgcgggacggcggcgaccgttacatgggtaaaggcgtcagccaggccgtcacccacatcgaagagcgcatcgcgccaaccctgtgcggactctccgccctggatcaggccgccgtggatgcagcgatgctcgagttggacggcagcgacaacaaatccagcctgggagccaatgcgattctcgcggtgagcatggccaccgcccgcgctgcggccaacggactgggactacccctgtaccgctaccttggcggaccgatggccaacctgctgccggtgccgttgatgaacgtgatcaacggtggcgcccatgcggccaacagcctggatttccaggaattcatgctggtgccccacggagcccccagcttccgcgaggctctgcgcatgggcaccgaggtcttccacaccctcaagggtctgctcaaagccaagggcatgagcacctctgtgggggatgagggtggtttcgcccccgacctgggcaatgtggaagccggggagatcctggtggaggcgatcacgaaggccggctacaaacctggcgagcagatttccctggcgctggatgtcgccagcaccgaattcttcgagaacggccgctatgcctttgatggcggcaactacgacagcgccgaaatggtcggccagctggagcagctggtggagaaattcccgatcgtgtcgatcgaggacggcctggcggaagacgactgggagggttggaagctgctcaccgaacggcttggcggcaaggtgcagctggtgggtgatgacctgttcgtgaccaacaccaagcgcctgcagcagggcatcgacaacagcacggcgaactcgatcctgatcaaggtgaaccagatcggatctctcaccgaaaccctgcaggcgatcgatctggctgggcgttccgggtacaccagcgtgatcagccaccgcagtggcgaaaccgaggacaccaccatcgccgacctctccgtcgccacccgcgccggtcagatcaagaccggttcgctcagccgcagcgagcgcgtcgccaagtacaaccagctcctacggatcgaggacgaactgggcagccaggcggtttacgccggagctgtgggccagggtccccggggtaacgcctga

SEQ ID NO: 4130 - protein, 430 aa, Synechococcus sp
MIDSLDLVIDTIVAREVLDSRGNPTVEAEVLLEGGAMGRAIVPSGASTGAHEAHELRDGGDRYMGKGVSQAVTHIEERIAPTLCGLSALDQAAVDAAMLELDGSDNKSSLGANAILAVSMATARAAANGLGLPLYRYLGGPMANLLPVPLMNVINGGAHAANSLDFQEFMLVPHGAPSFREALRMGTEVFHTLKGLLKAKGMSTSVGDEGGFAPDLGNVEAGEILVEAITKAGYKPGEQISLALDVASTEFFENGRYAFDGGNYDSAEMVGQLEQLVEKFPIVSIEDGLAEDDWEGWKLLTERLGGKVQLVGDDLFVTNTKRLQQGIDNSTANSILIKVNQIGSLTETLQAIDLAGRSGYTSVISHRSGETEDTTIADLSVATRAGQIKTGSLSRSERVAKYNQLLRIEDELGSQAVYAGAVGQGPRGNA

SEQ ID NO: 4131 - DNA, 1287 bp, Rhodopirellula baltica
  CDS (1)..(1287)
atgacactgatcgaatcgattcacgctcggcaaatcttggacagccgcggcaaccccaccgtcgagtgcgaagtcacattgatggacggtgccgccggtcgcgctgccgtgcccagcggagccagcaccgggatgcacgaagcctgggaactgcgagacggtgacaagtccgtcttcatgggcaaaggcgtcacaaccgctgtcaagaacgtcaacacaaaaatcgccgatgccttggaaggcatggacgcaaccgatcaagctgcggttgaccaagcgatgattgaactggatggcacacctaacaaaaaagaacttggtgctaacgccattctcggcgtttcgttggccgtcgctcacgcagcggccgcttcgaccaaccagcccttgttccgctacctcggtggtgctggcgctcgcatgttgcctgccccgatgatgaacatcatcaacggtggtgagcacgctgataacggcgtcgacatccaagagttcatggtcatgccattgggctttgaacgcttcagcgatgctctgcgttgcggaactgaaatcttccacaacctgaagaaggttctgtcggacaagggttacagcaccgcggttggcgatgaaggcggtttcgcacctgacttgaagagcaaccaagaagctctcgatgtgatcatgaccgcgatcgacaaggctggctacaaagctggcgaacaagtctggatcgccttggacgcggcttcgactgagttctacgacaagtcatccggcaagtactcgttggacaacaaccaaatgtccggcgatgaaatggtcgacttcttggccggttggtgcgacaagtacccgatctgcagcatcgaagacggatgcgatgaagacgactgggaaacttggaagaaactgaccaccaagatcggcgacaaggttcaactggttggcgacgacttgttcgtaaccaacgtcgaacgtttgcaacgcggtatcgacgaagggatcgccaacagcatcttgatcaaggtcaaccaaatcggaacgatgaccgaaaccatcgacgcgatccagctcgctcatcgcaacggttacacctccatcagcagccaccgcagtggtgaaacagaagattcgaccatcgctgacttggccgttgccatgtcgactggtcagatcaagactgggtcggcaagtcgtagtgaccggatggccaaatacaaccaattgcttcgcatcgaagaattgttgggcgacgccgctcagtacggcggtcctttgttcgccaagcgaatcaccggctga

SEQ ID NO: 4132 - protein, 428 aa, Rhodopirellula baltica
MTLIESIHARQILDSRGNPTVECEVTLMDGAAGRAAVPSGASTGMHEAWELRDGDKSVFMGKGVTTAVKNVNTKIADALEGMDATDQAAVDQAMIELDGTPNKKELGANAILGVSLAVAHAAAASTNQPLFRYLGGAGARMLPAPMMNIINGGEHADNGVDIQEFMVMPLGFERFSDALRCGTEIFHNLKKVLSDKGYSTAVGDEGGFAPDLKSNQEALDVIMTAIDKAGYKAGEQVWIALDAASTEFYDKSSGKYSLDNNQMSGDEMVDFLAGWCDKYPICSIEDGCDEDDWETWKKLTTKIGDKVQLVGDDLFVTNVERLQRGIDEGIANSILIKVNQIGTMTETIDAIQLAHRNGYTSISSHRSGETEDSTIADLAVAMSTGQIKTGSASRSDRMAKYNQLLRIEELLGDAAQYGGPLFAKRITG

SEQ ID NO: 4133 - DNA, 1293 bp, Prochlorococcus marinus subsp
  CDS (1)..(1293)
atgaaagaaactattgatttccttattgacactattgaagctaggcaagtgcttgattcaagagggaaccccactgtagaggctgaagtatttttggaatgtggtgctattggcagagcaatagttcctagcggagcgagtactggtgctcatgaagcacacgaattgagagatggtgggacaaaatatatggggaaaggtgtcttaaatgcggttaataaaattcatgagacgatttctcctgctttatgtggattatcagctttagatcaaacaagtattgataacttaatgattgaaattgatggaactcctaataaatctagtttgggtgctaactcaattcttgcagtgagtctagccaacgctagagctgcatcaaatgctttggatctaccgttatatagatatcttggcgatccattatctaatcttctccctgtaccactgatgaatgtaattaatggtggagctcatgcacctaatggtcttgattgccaagaatttatgcttgtccctcatggggtgaaaacttttagtgaagcattaagaattggaactgaaatatttcattcactaaaatctttacttgaaaaaaaaggtttatctacagctgttggagacgaaggtggttttgctccagaattatcatctagtgaagcagcaggagatttgcttttagaggctattcagaaagcaggatttattcctggtgagcaggtatcgttagcattagacgtagctagtactgaattttataaagatggattttataaatatgaaggtaaaagtttaactagctctcaaatgatttcttatctttcaaatttagtttcaaattatccaatagtttcaatagaggatggactagcagaagatgattgggagggttggtcagccctaaataaagagattggaaataaagtgcagttagtaggtgatgatttatttgttactaatactgaaaggttaagaaaaggaatattagaaaaatccgcaaattcaatattaataaaggtaaatcaaattggcacattaacagaaactctggaagctatggatctagctaaaagtgctggttttacaagtgttatcagtcatagaagcggcgaaacagaagatacaacgattgccgatttatctgtggcaacgcgagccgggcaaattaaaactggctctttgagcagaagtgaaagaattgctaagtacaataggctcttaaggattgaggaagagttgggtgatcaagctagatttgctggtgatttaggattaggtccaaaaaatatatag

SEQ ID NO: 4134 - protein, 430 aa, Prochlorococcus marinus subsp
MKETIDFLIDTIEARQVLDSRGNPTVEAEVFLECGAIGRAIVPSGASTGAHEAHELRDGGTKYMGKGVLNAVNKIHETISPALCGLSALDQTSIDNLMIEIDGTPNKSSLGANSILAVSLANARAASNALDLPLYRYLGDPLSNLLPVPLMNVINGGAHAPNGLDCQEFMLVPHGVKTFSEALRIGTEIFHSLKSLLEKKGLSTAVGDEGGFAPELSSSEAAGDLLLEAIQKAGFIPGEQVSLALDVASTEFYKDGFYKYEGKSLTSSQMISYLSNLVSNYPIVSIEDGLAEDDWEGWSALNKEIGNKVQLVGDDLFVTNTERLRKGILEKSANSILIKVNQIGTLTETLEAMDLAKSAGFTSVISHRSGETEDTTIADLSVATRAGQIKTGSLSRSERIAKYNRLLRIEEELGDQARFAGDLGLGPKNI

SEQ ID NO: 4135 - DNA, 1296 bp, Prochlorococcus marinus
  CDS (1)..(1296)
atgatcgattccctcgacctcgtcattgacaccatcgtggccagagaggttctggactctcgcggcaaccccacagttgaagcagaagtgttgctcgaagcaggtgctatcggtagggccatcgtgcccagcggagcaagcaccggtgcccatgaggcgcatgaattaagagatggcgacagccgctacctgggcaaaggggtgactaaggctgtgaaccatatcgaggatcggattgccccagcgctctgtgggatctcttccctagatcaggccagtgttgatggcaccatgcaagagcttgatggcagcgacaacaaatcaagcctgggcgcaaacgcgatcctggccgtgagcatggccactgcccgcgcggccgccaatggcttgggtttgcccctctaccgctacctgggtggccccatggcctcattgctgcccgtaccgctgatgaatgtgatcaacggcggtgcgcatgctgctaacaatctcgattttcaggaattcatgctggtgccccatggagcaagcagcttccgagaatcgctgcgcatgggcgcagaagtattccacacactcaagggcctgctcagtgctcaggggctctcaacggcagttggagatgaaggcggctttgcacccaatctggccaacaatgatgcagcaggagatctgctcattcaagcaatcgaaaaagcaggctattcgccaggtaaggatatttccttggcactagatgtagccagcacagagttctatcaagacggctgctatgccttcgggggtggtcgttacaccagtaccgaaatggtcaatgagctcgaaaaacttgttgatcgctacccaattatttcgatcgaagatggactagcagaagatgattggcaaggttgggctctactcacaaaaaaattggggaagcgtatccaactgataggtgacgatatttttgtaacgagtactaagcgcctacagcagggaattgatcaaaacgtagccaattccatcctgattaaagtgaatcagatcggctcgctaacggaaacgcttcaggccattgatcttgctgggcgctctggttacaccagcgtaatcagccaccgcagcggcgaaacggaagacaccacaattgcagatcttgccgttgccacccgtgctgggcagatcaaaacgggctccctaagtcgcagtgaacgggtagcgaaatacaaccaactgctgcgaatcgaagacgaactcggtagccaagcggtctatgccggtgccacaggacaagggccacgggggcgaagctaa

SEQ ID NO: 4136 - protein, 431 aa, Prochlorococcus marinus
MIDSLDLVIDTIVAREVLDSRGNPTVEAEVLLEAGAIGRAIVPSGASTGAHEAHELRDGDSRYLGKGVTKAVNHIEDRIAPALCGISSLDQASVDGTMQELDGSDNKSSLGANAILAVSMATARAAANGLGLPLYRYLGGPMASLLPVPLMNVINGGAHAANNLDFQEFMLVPHGASSFRESLRMGAEVFHTLKGLLSAQGLSTAVGDEGGFAPNLANNDAAGDLLIQAIEKAGYSPGKDISLALDVASTEFYQDGCYAFGGGRYTSTEMVNELEKLVDRYPIISIEDGLAEDDWQGWALLTKKLGKRIQLIGDDIFVTSTKRLQQGIDQNVANSILIKVNQIGSLTETLQAIDLAGRSGYTSVISHRSGETEDTTIADLAVATRAGQIKTGSLSRSERVAKYNQLLRIEDELGSQAVYAGATGQGPRGRS

SEQ ID NO: 4137 - DNA, 1299 bp, Prochlorococcus marinus
  CDS (1)..(1299)
atgattgattcccttgatttggttattgatagcatctttgcaagagaagtgcttgattcaaggggaaaccctacagttgaagctgaggtattgcttgaaggcggagcaaaaggcagagcaattgttcccagtggagcaagtactggtgcctatgaggcgcatgaattaagggatggtggaactcgctacatgggaaagggtgttctcagagtcgtagaacatatagaagaccgcatagcaccttccctttgtggtttatctgcttcggatcaagtaaatgttgatcaaataatgcgagagcttgatggtactgaaaataaagaaaatttaggagcaaatgccatcttggcagtcagtattgcaacagcacgctctgctgctaatgcttttgggatgcctttgtatcgttatttaggtaatccaatgtcttcactattaccagtcccattaatgaatgtgattaatggaggagctcatgctgccaataatcttgattttcaagaatttatgttggtgcctcatggtgctgagagctttcgcgaagctctcagaatgggtgcagaagtttttcatacacttaagaagcttctttcagataagggtttatctactgcagttggagatgaaggaggctttgcacctgaccttgaaaataataacgctgctggagacctacttgttcaagcaattgaaaaagctggatttcgtccaggagaagagatttctttggctttagatgttgcaagcactgaattttttaaaaatggcttgtatcactttggtgagggaaaattctcaagtgaaaagatggtagaagaattgaaaaagttagttaatttatatccaattatttcaatagaagatggtttgtcggaagatgattggtcaggctgggaattattaacaaaagaattaggaaataaggtccaactagttggggatgatttgtttgtcacaaatacaaaacgattgcgccaaggaatagataggagtattgcaaattctatattaattaaagtcaatcagattggtactttgactgagacactagaagcaatagatctatctcatcgtatgggatatacaagtattattagtcatagaagtggtgaaactgaagatactacaatcgctgatctagcagtggcaacaagagctggtcaaatcaaaacaggctcattgagtaggagtgagagagtagctaaatacaatcaacttcttcgaattgaagatcaattaggtgctcaggctgtctacgcaggatctgttggattagggcctagaggtttatctaaataa

SEQ ID NO: 4138 - protein, 432 aa, Prochlorococcus marinus
MIDSLDLVIDSIFAREVLDSRGNPTVEAEVLLEGGAKGRAIVPSGASTGAYEAHELRDGGTRYMGKGVLRVVEHIEDRIAPSLCGLSASDQVNVDQIMRELDGTENKENLGANAILAVSIATARSAANAFGMPLYRYLGNPMSSLLPVPLMNVINGGAHAANNLDFQEFMLVPHGAESFREALRMGAEVFHTLKKLLSDKGLSTAVGDEGGFAPDLENNNAAGDLLVQAIEKAGFRPGEEISLALDVASTEFFKNGLYHFGEGKFSSEKMVEELKKLVNLYPIISIEDGLSEDDWSGWELLTKELGNKVQLVGDDLFVTNTKRLRQGIDRSIANSILIKVNQIGTLTETLEAIDLSHRMGYTSIISHRSGETEDTTIADLAVATRAGQIKTGSLSRSERVAKYNQLLRIEDQLGAQAVYAGSVGLGPRGLSK

SEQ ID NO: 4139 - DNA, 1278 bp, Helicobacter hepaticus
  CDS (1)..(1278)
atggtttatattgaagcaattgatgcacaagaagtaatggatagtcgtggaaacccaactgttagagcagcagtaaggttaagtgatggcacaagagcggcagctatcgttccaagtggtgcaagcactggtaaaagagaagcccttgaattacgtgatggcgataaagaacgttatcttggtaaaggcgtgttgaaagcctgtgcaaatattaaaactgaaattgctgcacaacttgatggggtatcaccttatgaccaaagtaaaattgatttgattttaaaaaaaattgatggcacagagaattattcagagcttggggcaaatgcaactttaggcgtgagtatggctattgctcgtgcaagtgcgcaatctttgaggttacctctttatcgttatttaggtgggagtaatgcgcttacacttcctaccccgatgcttaatatcattaatggtggttctcacgcagataatactgtggattttcaagagtatatgattatgcctttgggttttgatacttttgctgaaagtttgcgtgcatcagctgaaatttatcatcatctcaaagcgattcttaaaggaagtggacatattacaagcattggtgatgaaggtggattcgcccctaatttaaaaaacaatgaagagcccatagaaattattttaaaggctattgaacaagcgggttataagccgcttgatgagattgctattgcactagatgtggcaagtagtgagcttgtagatgagaatggtatgtatcatttggcaggagagggcaaagtgcttgatagtgcaggtatgattgcatattatgagaatcttgtagcaaaatatcctattgtttctattgaagatggcttaagtgaagatgattgggagggttggaaacttcttactcaaaaacttggcaataaaattcagcttgtgggcgatgatttatttgttacaaataaaaaaattcttcaagaaggtattgaaaaaaatatagctaatgcaattttgattaaacctaatcaaatcggtagcgtgagtgaaacaatgcaatctgtgcgccttgcccaacgtaataattataagtgcataatgagtcatcgtagtggggagagtgaagatacatttattgcagattttgctgtggcacttaatacaggtgagattaaaactggctcaactgcaagaagtgagcggattgcaaaatataatcgtttgcttgaaattgagcgagagattagtgatgcggaatatattggaaaaacactttttaagcgttaa

SEQ ID NO: 4140 - protein, 425 aa, Helicobacter hepaticus
MVYIEAIDAQEVMDSRGNPTVRAAVRLSDGTRAAAIVPSGASTGKREALELRDGDKERYLGKGVLKACANIKTEIAAQLDGVSPYDQSKIDLILKKIDGTENYSELGANATLGVSMAIARASAQSLRLPLYRYLGGSNALTLPTPMLNIINGGSHADNTVDFQEYMIMPLGFDTFAESLRASAEIYHHLKAILKGSGHITSIGDEGGFAPNLKNNEEPIEIILKAIEQAGYKPLDEIAIALDVASSELVDENGMYHLAGEGKVLDSAGMIAYYENLVAKYPIVSIEDGLSEDDWEGWKLLTQKLGNKIQLVGDDLFVTNKKILQEGIEKNIANAILIKPNQIGSVSETMQSVRLAQRNNYKCIMSHRSGESEDTFIADFAVALNTGEIKTGSTARSERIAKYNRLLEIEREISDAEYIGKTLFKR

SEQ ID NO: 4141 - DNA, 1302 bp, Haemophilus ducreyi
  CDS (1)..(1302)
atggctaaaattgtaaaagtaattggtcgtgaaattatcgactctcgtggtaacccgacggttgaagctgaagttcatttagagggcggttttgtaggcttagcggctgctccgtctggtgcatcaacaggatcacgtgaggcattagagttacgtgacggcgataaatcacgttttttaggtaaaggcgtattaaaagcggttgcggcagtaaataatgaaattgcgcaagcaatcgtaggaaaagaaggttgcgcacaatctgaaatcgaccaaactatgatcgatttagatggtactgaaaataaatctaaattcggtgcgaatgcaattttagcggtttctttagcaacagcaaaagcagctgcagcttctaaaggtttaccattatatgcttatattgcagaattaaatggtacaccgggtgtgtattctatgccattaccaatgatgaatattatcaatggcggtgagcacgcggacaacaatgttgatattcaagaatttatgattcaacctattggtgcaaaaacattacgtgaggcattacgtatcggcgcagaagttttccataatttagccaaggtattaaaagcgaaaggtttaagtactgcggtaggtgatgaaggtggtttcgcaccaaacttggcatctaatgctgatgctttagcttgtattaaagaagcggttgaaaatgcaggttatgtgttaggtaaagatattactttggcgatggattgtgcatcatccgaattctataataaagaaaatggtttatatgaaatgaaaggtgagggtaaatcattcacttctcaagaatttactcactatctagaaaatttatgtaaagaataccctattgtttctattgaagatggccaagatgaatccgattgggatggctttgcttatcaaactaagatattaggtgataaagtccaattagttggcgacgatctatttgttactaataccaaaatcttaaaagaaggtattgaaaaaggcattgcaaattctatcttaattaagttcaatcagattggttcattaacagaaacgttagctgcaattaaaatggcaaaagatgctggctatactgccgttatttcgcaccgttcaggtgaaactgaagatgcaacaattgctgatttagccgtcggcactgcagcaggtcaaatcaaaacaggatcaatgagccgttcagatcggatcgctaaatataatcaattaatccgtattgaagaagcattaggcgaaatggcgccattcttagggttaaaagccattaaaggtcaagcataa

SEQ ID NO: 4142 - protein, 433 aa, Haemophilus ducreyi
MAKIVKVIGREIIDSRGNPTVEAEVHLEGGFVGLAAAPSGASTGSREALELRDGDKSRFLGKGVLKAVAAVNNEIAQAIVGKEGCAQSEIDQTMIDLDGTENKSKFGANAILAVSLATAKAAAASKGLPLYAYIAELNGTPGVYSMPLPMMNIINGGEHADNNVDIQEFMIQPIGAKTLREALRIGAEVFHNLAKVLKAKGLSTAVGDEGGFAPNLASNADALACIKEAVENAGYVLGKDITLAMDCASSEFYNKENGLYEMKGEGKSFTSQEFTHYLENLCKEYPIVSIEDGQDESDWDGFAYQTKILGDKVQLVGDDLFVTNTKILKEGIEKGIANSILIKFNQIGSLTETLAAIKMAKDAGYTAVISHRSGETEDATIADLAVGTAAGQIKTGSMSRSDRIAKYNQLIRIEEALGEMAPFLGLKAIKGQA

SEQ ID NO: 4143 - DNA, 1344 bp, Candidatus Blochmannia floridanus
  CDS (1)..(1344)
atgccagagatagtaaatattattagtcgtgaaattgttgattctagaggtaatcctacggtggaatcagaagtacatactaaaagtggtttttttggtttagcatctgttccgtcaggatcttctttgggttctcaagaagcattggaattacgagataatgatcatgctcgtttttttggaaaaggagtaaaaaaatcagtcaatattattaatagtactattcgtgtatcattgttaaatatagatgtaacgaaacaaagtgttattgatgaaattatgattaatttagacggtactaataataaatctcaacttggagctaattctattttgagtgtatctttagcgatagctaaagctgctgctagttttatgggtatgccgttgtatcaatatatagctagattatatggaatgtcgagtaatgtgtattctatgccggttcctatgatgaacattatgaatggaggaaaacatgctgataataatttagatattcaggaatttatgattgtacctgttggggctaaaaatattaaacaagctatacaaatgggatcagaaatttcatatagtttaaaaaatgttttaaataatttagggatatctattgcattaggtgatgaagggggatatgctccaaatttaaaatctcattcttatgcattagaattaattaataagtctatagagcaatctaattatgtgttaggtaaagatgtggttttggctatagattgtgctgcatctgaattatttgaagtatctactggaaagtacgttataaatagtgaaaaagttagttttacttctgaagaatttgttgattatttatcatctttagcacgtaaatattgtattttttctattgaagatggtcagagtgagcatgattggcatgggttttcttatcttactaagaaacttggagatattatgcaattagtgggtgatgatttatttgttactaatccaaatttattaaaaatgggtattaataagaatgtagcaaattctattttagttaaacctaatcaaataggttcgttaactgagactttaaatgtgattaaattggcaaaagaatctggatattcgaccattgtttcacatagatctggagaaactgaagatacaagtattgctgatatagctgttggtacatctgctgggcagataaaaactggtccagtacgttgttctgaacgtacatctaagtataatagattaatacgtattgaagaatttttgaaagataatagtaagttttatggagtgaacgagataaagaatctctcagctcagttgtggatgtatcaaaataagaatatgaatatatag

SEQ ID NO: 4144 - protein, 447 aa, Candidatus Blochmannia floridanus
MPEIVNIISREIVDSRGNPTVESEVHTKSGFFGLASVPSGSSLGSQEALELRDNDHARFFGKGVKKSVNIINSTIRVSLLNIDVTKQSVIDEIMINLDGTNNKSQLGANSILSVSLAIAKAAASFMGMPLYQYIARLYGMSSNVYSMPVPMMNIMNGGKHADNNLDIQEFMIVPVGAKNIKQAIQMGSEISYSLKNVLNNLGISIALGDEGGYAPNLKSHSYALELINKSIEQSNYVLGKDVVLAIDCAASELFEVSTGKYVINSEKVSFTSEEFVDYLSSLARKYCIFSIEDGQSEHDWHGFSYLTKKLGDIMQLVGDDLFVTNPNLLKMGINKNVANSILVKPNQIGSLTETLNVIKLAKESGYSTIVSHRSGETEDTSIADIAVGTSAGQIKTGPVRCSERTSKYNRLIRIEEFLKDNSKFYGVNEIKNLSAQLWMYQNKNMNI

SEQ ID NO: 4145 - DNA, 1287 bp, Bordetella pertussis
  CDS (1)..(1287)
atgagtgcaatcgtcgatatcatcggccgcgaaatcctcgattcgcgcggcaaccctaccgtcgagtgcgatgtgctgctggagtcgggcgcgatgggtcgcgcctccgtgccttcgggcgcctccaccggctcgcgcgaggccatcgaactgcgcgacggcgacaagggccgttatctgggcaagggcgtgctgcgggcggtggagaatctcaacaccgagatctccgaagccctgatgggcctggatgcgcaggagcagaccttcgttgatcgtaccctgatcgaactcgacggcaccgacagcaaggagcgcctgggcgccaatgccatgctggccgccagcatggcggtcgcgcgcgccgcggccgacgagtcgggcctgtcgctgtaccgctacttcggcggcagcggccccatgagcatgcccgtgccgatgatgaacgtcatcaacggcggcgcgcacgccaacaatacgctggacctgcaggagctgatgatcctgccggtgggcgcggccagcttccgcgaagcgctgcgctggggcgccgaagtgttccacatgctcaagaagctgatccacgaccagggcatgtcgaccgccgtgggcgacgagggcggtttcgcgcccaacgtggccagccacgaggccgccatccagctgatcctcaaggccatcaccgaagccggctacgagccgggcacgcagatcgccctgggcctggattgcgccagctcggagttctaccgtgacggcaagtacacgctggctggcgaaggcggcgtgtcgctgtcctcgcaggagtttgccaacctgctggcgacctggtgcgacaagtaccccatcatctcgatcgaagacggcatggccgaaaacgactgggacggctggaagctgctgaccgaccagctgggcaagaaggtgcagctggtgggcgacgacctgttcgtcaccaacacgcgcatcctgcgcgaaggcatccagaagggcgtggccaactcgattctcatcaagatcaaccagatcggcaccctgaccgagaccttcgccgccatcgaaatggccaagcgcgccggctacaccgccgttgtctcgcaccgttccggtgaaaccgaagactccaccattgccgacatcgcggtggctaccaacgccatgcagatcaagaccggttcgctgtcgcgttccgaccgcatggcgaagtacaaccagttgctgcgcatcgaggaagaactggccgaagtggcttcctacccgggcctcgaggcgttctacaacctgcgttaa

SEQ ID NO: 4146 - protein, 428 aa, Bordetella pertussis
MSAIVDIIGREILDSRGNPTVECDVLLESGAMGRASVPSGASTGSREAIELRDGDKGRYLGKGVLRAVENLNTEISEALMGLDAQEQTFVDRTLIELDGTDSKERLGANAMLAASMAVARAAADESGLSLYRYFGGSGPMSMPVPMMNVINGGAHANNTLDLQELMILPVGAASFREALRWGAEVFHMLKKLIHDQGMSTAVGDEGGFAPNVASHEAAIQLILKAITEAGYEPGTQIALGLDCASSEFYRDGKYTLAGEGGVSLSSQEFANLLATWCDKYPIISIEDGMAENDWDGWKLLTDQLGKKVQLVGDDLFVTNTRILREGIQKGVANSILIKINQIGTLTETFAAIEMAKRAGYTAVVSHRSGETEDSTIADIAVATNAMQIKTGSLSRSDRMAKYNQLLRIEEELAEVASYPGLEAFYNLR

SEQ ID NO: 4147 - DNA, 1615 bp, Onchocerca volvulus
  CDS (52)..(1359)
ggcacgaggtttgagtagctttctcgctgatcataagagatatcatcaactatgccgatcacacgtgttcatgcccgtcctatctatgattcacgcggtaatccaaccgtcgaagttgacttaaccactgagaaaggtattttccgcgcagctgtgccaagtggtgcttcaactggtatacacgaagcgcttgaacttcgggataatgatgaagctgttaatcacggtaaaggtgttttgcaggctgtcggaaatgtcaatgaacagattggacccgctctggttgcgaagaatttctgtccaactcaacaacgtgaaatcgatctttttatgctgcagcttgatggaacagaaaataaagcgaaacttggtgccaatgcaattttgggtgtttcattggcggtctgcaaggctggtgccgtgcataaaggcatgccattgtataagtatatagcggaattggctggtaccagacaaattgttctaccagttcctgctatgaatgtcatcaacggtggctctcatgctggtaacaaattagcgatgcaggaatttatgatcatgcctgttggagctagttcattcagcgaagcaatgcgtatgggttccgaaatttatcattatttgaaggcagaaatcgaaaaacgctatggtctcgatgcaacagcagtgggtgatgaaggggggttcgctcctaatattcaagataacaaggaaggccttgatttattaaatacagctattgcaacagctggatacactggaaaagtatcaatcgcaatggattgtgccgcatctgaatattccaaagaagcggataagctctatgatttaaaattcaaaaatcctaattcgggcaaaactcaatggaaaactggtgatcaaatgatgaattttcaatcgtttattaaggaatatccagtggtgtcaattgaagattggtttcacgaagatgattggcacaattggccaaaaggattggccaagacaaatattcaaattgttggcgatgacttgactgttccgaacccaaagagaatcgcattggctgccgaaaagaaagcttgcaactgtctgctgctcaaggtaaaccaaattggctccgtgacagaatcaattgatgcggctaacttagctcgcaaaaatggttggggtgtgatggtttcgcatcgttctggtgaaaccgaagacacatttatcgctgatctagtcgtcggtctcgctgctgggcagatcaaaactggagccccatgccgttcggagcgtcttgccaaatacaatcaaatacttcgtatcgaggaagaacttggatcagctgcagtttatgctggtcaaaaattccgaaatcctcaggcataaattgtgagacattggtgggaaaaattattgcgtcttaactgattattatatctttctttcatgaatattatgttagtcgtatgcagtaataatagctgttgatttattaagtcatttaaattaatttaaactatttctcattgttcccgatttggattgtagttttcgtgcttatctggttgaagttccatagaaattaaaattgatttatgatgataaaaaaatttttttttaaaaaaaaaaaaaaaaaaaaaaa

SEQ ID NO: 4148 - protein, 435 aa, Onchocerca volvulus
MPITRVHARPIYDSRGNPTVEVDLTTEKGIFRAAVPSGASTGIHEALELRDNDEAVNHGKGVLQAVGNVNEQIGPALVAKNFCPTQQREIDLFMLQLDGTENKAKLGANAILGVSLAVCKAGAVHKGMPLYKYIAELAGTRQIVLPVPAMNVINGGSHAGNKLAMQEFMIMPVGASSFSEAMRMGSEIYHYLKAEIEKRYGLDATAVGDEGGFAPNIQDNKEGLDLLNTAIATAGYTGKVSIAMDCAASEYSKEADKLYDLKFKNPNSGKTQWKTGDQMMNFQSFIKEYPVVSIEDWFHEDDWHNWPKGLAKTNIQIVGDDLTVPNPKRIALAAEKKACNCLLLKVNQIGSVTESIDAANLARKNGWGVMVSHRSGETEDTFIADLVVGLAAGQIKTGAPCRSERLAKYNQILRIEEELGSAAVYAGQKFRNPQA

SEQ ID NO: 4149 - DNA, 1287 bp, Streptomyces avermitilis
  CDS (1)..(1287)
atgccgtccatcgacgtcgtcgtagcccgggaaatcctggactcccgaggcaaccccacggtcgaggtcgaggtcggcctcgacgacggcagcacgggtcgtgccgccgtcccgtccggcgcctccaccggtgccttcgaggccatcgagctccgcgacggtgaccccaaccgttaccagggcaagggtgtcgagaaggccgtcctcgccgtcatcgagcagatcggcccggagctcgtcggctacgacgccaccgagcagcgcctgatcgaccaggcgatgttcgacctggacgccaccgacaacaagggctcgctcggcgccaacgccatcctcggcgtctccctcgccgtcgcgcacgccgcctccgaggccagcgacctcccgctcttccgctacctgggcggcccgaacgcgcacctgctgcccgttccgatgatgaacatcctgaacggcggctcgcacgccgactccaacgtggacatccaggagttcatgatcgccccgatcggcgcggagtccttctccgaggccctgcgctggggcgccgaggtctaccacaccctcaagaaggtgctgaagaccaagggcctgtccaccggcctcggcgacgagggcggcttcgccccgaacctggagtcgaaccgcgccgcgctcgacctcatcatcgaggccatcaagcaggccggttacatcccgggcgagcagatcgcgctcgcgctcgacgtcgccgcgtccgagttctacaaggacggcaagtacgagttcgagggcaagtcccgctcggccgccgagatgaccgagtactacgaggagctcgtctccgcgtacccgctcgtctccatcgaggacccgctgtacgaggacgactgggccggctggaaggtcatcaccgacaagctgggcgacaaggtccagatcgtcggcgacgacctcttcgtcaccaacccggagcgcctggcccgcggcatcgaggagggctccgccaacgccctgctcgtcaaggtcaaccagatcggttcgctgaccgagaccctggacgccgtcgagctggcccagcgcaacggcttcaagtgcatgatgtcccaccgctccggcgagaccgaggacgtcaccatcgccgacctcgccgtcgccgtgaactgcggtcagatcaagaccggcgccccggcccgctcggaccgtgtcgccaagtacaaccagctgctgcgcatcgaggagatcctcgacgacgccgccgagtacgccggccgctcggcgttcccccggttccgctcggcgaactga

SEQ ID NO: 4150 - protein, 428 aa, Streptomyces avermitilis
MPSIDVVVAREILDSRGNPTVEVEVGLDDGSTGRAAVPSGASTGAFEAIELRDGDPNRYQGKGVEKAVLAVIEQIGPELVGYDATEQRLIDQAMFDLDATDNKGSLGANAILGVSLAVAHAASEASDLPLFRYLGGPNAHLLPVPMMNILNGGSHADSNVDIQEFMIAPIGAESFSEALRWGAEVYHTLKKVLKTKGLSTGLGDEGGFAPNLESNRAALDLIIEAIKQAGYIPGEQIALALDVAASEFYKDGKYEFEGKSRSAAEMTEYYEELVSAYPLVSIEDPLYEDDWAGWKVITDKLGDKVQIVGDDLFVTNPERLARGIEEGSANALLVKVNQIGSLTETLDAVELAQRNGFKCMMSHRSGETEDVTIADLAVAVNCGQIKTGAPARSDRVAKYNQLLRIEEILDDAAEYAGRSAFPRFRSAN

SEQ ID NO: 4151 - DNA, 1287 bp, Coxiella burnetii
  CDS (1)..(1287)
atgacagcgaccatcactgatattaatgctcatgaaattttagattcgcgcgctaatcctactttggaagtgcgcgtcaccttgtcttcacaagcctacggttgtgcggccgtcccgtcaggggcatccaccggcgagcgggaggcggttgaattacgcgataatgatcttgaacgttacggcggcaaaggtgttttacaagccgtcgaaaacgtcaatggccccatccgcgacgccttgctcggacaagatccgcgctcgcaagaagaaattgatcgcattatgattgaattggatggcacagaaaataaagcgaatttaggcgctaacgcgatcttaggtgtttcattagccgtggcttatgcggctgccaataatgcggatttacccttgtatcgttatttaggaggcgacggcggtccttttagtatgcctgtgcccatgatgaatattatcaacggcggcgcgcacgctactaataatttggattttcaagaatttatgattgtcccggtcggtgcgccgacctttgctgaagcattgcgttacggagccgaagttttccacgctttaaaaaaacgtttggtttctcgagggttaatgtcagcggtcggtgatgaagggggttttgctcccgatttgccgaataacgaagcagcgtttgagttaattttagaagccattgaagatgcaaactatgttcccggaaaagatatttaccttgccttagatgcagccagttctgaactttaccaaaatggccgttatgattttgaaaacaatcaattgacgagtgaagaaatgatcgatcgattgactgaatggacgaagaaatacccggttatttccattgaagacggcttatcagaaaatgattgggcgggctggaaattattgacagaacgtttagaaaataaagtgcagttggtaggcgacgatattttcgtcacgaatccagacattttagaaaaaggcattaaaaaaaatatcgccaacgccattttggttaaacttaatcaaattggaacgctcactgaaacgttagctacagtgggattagcgaaaagtaataaatacggtgttattatttcgcaccgttctggagaaacggaagatacgaccattgctgatttggctgtggcgaccgatgcgagacaaataaaaacggggtctttgtgccgctccgatcgtgtggcaaaatataatcgattattgcaaatcgaacgggagcttaatgatcaagccccgtatgctggcaaggaagcatttctttttaacaggaagtaa

SEQ ID NO: 4152 - protein, 428 aa, Coxiella burnetii
MTATITDINAHEILDSRANPTLEVRVTLSSQAYGCAAVPSGASTGEREAVELRDNDLERYGGKGVLQAVENVNGPIRDALLGQDPRSQEEIDRIMIELDGTENKANLGANAILGVSLAVAYAAANNADLPLYRYLGGDGGPFSMPVPMMNIINGGAHATNNLDFQEFMIVPVGAPTFAEALRYGAEVFHALKKRLVSRGLMSAVGDEGGFAPDLPNNEAAFELILEAIEDANYVPGKDIYLALDAASSELYQNGRYDFENNQLTSEEMIDRLTEWTKKYPVISIEDGLSENDWAGWKLLTERLENKVQLVGDDIFVTNPDILEKGIKKNIANAILVKLNQIGTLTETLATVGLAKSNKYGVIISHRSGETEDTTIADLAVATDARQIKTGSLCRSDRVAKYNRLLQIERELNDQAPYAGKEAFLFNRK

SEQ ID NO: 4153 - DNA, 1287 bp, Tropheryma whipplei
  CDS (1)..(1287)
atgtgtctaatagattctgtacatgcaaggcagatcctcgactctagaggcactccgaccgtggaggttgaggtaactctcgaagatggatctatgggaagatccgcagttccatctggagcttctaccggtgcgtttgaggcgcacgaattgcgcgatcaggataataatgaatacctcggtaagggcgtcacgcgggctgttcgttctgttaattccgagatagcaccggttcttatcggttttgacgcattcgatcaggttggccttgaccaccgtatgattgagctagatgggactaacaacaagagtaggcttggcgcaaatgccattcttggcgttagtttggcctccgcgagcgctgcggcacgcgccgctgacctgtcgctttttaggtatttaggcggtccatcctcgcgcatattgccggttccaatgatgaatataataaacggcggtgcgcacgctgatacaggtgttgatattcaagagtttatgattctgccggtcggcgcacgtagtttttcggaatccttgcgctggggctgtgaggtgtatcactctttgaaggtccaacttagagagagcggactttcgtctggtttgggtgatgaggggggttttgcccctgctttgcgcagcaatcgcacggcgctggatttgattttatctgctattgagaaagctggtttctccccggggatcgatatagtgcttgcccttgatatcgcggcgagcgagttctgtaaagcacctggacactacagatttgaagggaaagatataacatctgacgagctcatttcatactatgagggcctgttatcttcatatccgcttgtcagcatagaagatccgcttgatcaagacgattgggaggggtatcgcaccctaaccacccacattggtgatagggtgcaaattgttggcgatgatctcttcgtaactaatacctcgaggttatccagggggattcagtctggtgtggcaaattctattcttgttaaagtaaatcaaataggtactttgaccgagacgtttgacgcagtcgatatggcagctaaagggggatataccgcagttctgtctcatcgctcgggcgaaaccgaggatacaactatcgcagatatggcggttgcaacaaactgtggacagataaagactggcgcgcccgctcgcggcgagcgtattgcaaagtacaaccagctcttgcgaattgaggaaaagcttggaaggtctgctcgttatgctgggtggctatcgtacccacgatggcaaggcaaatga

SEQ ID NO: 4154 - protein, 428 aa, Tropheryma whipplei
MCLIDSVHARQILDSRGTPTVEVEVTLEDGSMGRSAVPSGASTGAFEAHELRDQDNNEYLGKGVTRAVRSVNSEIAPVLIGFDAFDQVGLDHRMIELDGTNNKSRLGANAILGVSLASASAAARAADLSLFRYLGGPSSRILPVPMMNIINGGAHADTGVDIQEFMILPVGARSFSESLRWGCEVYHSLKVQLRESGLSSGLGDEGGFAPALRSNRTALDLILSAIEKAGFSPGIDIVLALDIAASEFCKAPGHYRFEGKDITSDELISYYEGLLSSYPLVSIEDPLDQDDWEGYRTLTTHIGDRVQIVGDDLFVTNTSRLSRGIQSGVANSILVKVNQIGTLTETFDAVDMAAKGGYTAVLSHRSGETEDTTIADMAVATNCGQIKTGAPARGERIAKYNQLLRIEEKLGRSARYAGWLSYPRWQGK

SEQ ID NO: 4155 - DNA, 1302 bp, Streptococcus sobrinus
  CDS (1)..(1302)
atgtcaattattactgatgtttacgcacgcgaagtccttgactcacgcggtaacccaacacttgaagtagaagtttatactgaatcaggtgctttcggacgtggtatggttccttcaggagcttctactggtgaacacgaagcagttgaacttcgtgatggtgacaaatctcgttacggcggacttggtactcaaaaagctgttgacaacgtaaacaacatcatcgcagaagctatcatcggttacgatgtacgcgaccaacaagcaatcgaccgtgcaatgatcgctcttgatggtactcctaacaaaggtaaattgggtgctaatgccatccttggtgtgtctatcgctgcagcacgcgcagccgctgactaccttgaaatcccactttacagctaccttggcggattcaacactaaagttcttccaacgccaatgatgaacatcgtcaacggtggttctcactctgacgctccaattgctttccaagaattcatgattatgcctgttggcgcaccaacattcaaggaaggtcttcgttggggtgctgaagtattccatgctttgaagaaaatccttaaagaacgtggtcttgaaacagccgttggtgatgaaggtggattcgcacctcgtttcgacggaattgaagatggtgtagaaactatccttaaggctatcgaaactgctggttacgaagctggtgaaaaaggaatcatgcttggtttcgactgtgcttcatctgaattctacgaagatggcgtttacgactacactaaattcgaaggtgaaaaaggtgctaaacgttctgcagcagaacaaatcgattacatcgaaggtttggtaaacaaatacccaatcatcacaatcgaagatgctatggatgaaaacgactgggaaggttggaaggccctcacagaacgtcttggtaaccgtgttcaattggttggtgacgacttcttcgttacaaacactgactaccttgcacgtggtatcaaggaaggtgccgcaaactcaatccttatcaaggttaaccaaatcggtactttgacagaaactttcgaagctattgaaatggctaaggaagctggatacactgccgttgtatcacaccgttcaggtgaaactgaagattcaacaatcgctgacatcgcagttgcaactaacgctggtcaaatcaagacaggctcactgtcacgtacggaccgtatggctaaatacaaccaattgcttcgtatcgaagatcaacttggtgaagttgctcaatataaaggaatcaactcattctacaacttgaaaaaataa

SEQ ID NO: 4156 - protein, 433 aa, Streptococcus sobrinus
MSIITDVYAREVLDSRGNPTLEVEVYTESGAFGRGMVPSGASTGEHEAVELRDGDKSRYGGLGTQKAVDNVNNIIAEAIIGYDVRDQQAIDRAMIALDGTPNKGKLGANAILGVSIAAARAAADYLEIPLYSYLGGFNTKVLPTPMMNIVNGGSHSDAPIAFQEFMIMPVGAPTFKEGLRWGAEVFHALKKILKERGLETAVGDEGGFAPRFDGIEDGVETILKAIETAGYEAGEKGIMLGFDCASSEFYEDGVYDYTKFEGEKGAKRSAAEQIDYIEGLVNKYPIITIEDAMDENDWEGWKALTERLGNRVQLVGDDFFVTNTDYLARGIKEGAANSILIKVNQIGTLTETFEAIEMAKEAGYTAVVSHRSGETEDSTIADIAVATNAGQIKTGSLSRTDRMAKYNQLLRIEDQLGEVAQYKGINSFYNLKK

SEQ ID NO: 4157 - DNA, 1290 bp, Methylobacterium extorquens
  CDS (1)..(1290)
atgaccgcgatcaccaatatcgccgcccgcgagattctcgacagccgtggcaaccccaccgtcgaggtcgatgtccttctggaggacggctctttcggccgcgccgccgtcccctccggcgcctccaccggcgcacacgaggcggtcgagctgcgggacggcgacaagagccgctacaacggcaagggcgtgctcaaggccgtcgacgcggtgcagagcgaaattctcgacgcgatcggcggcatggatgccgaggatcaggtcgccgtcgatgaggcgatgatcgcgctcgacggcacccccaacaaggcacggctcggcgccaacgccatcctcggcgtctcgctcgcggtcgccaaggctgcggccgagaccgccggcctgccgctctaccgctatgtcggcggcgtgcagggccgggtgctcccggtgccgatgatgaacatcgtcaacggcggggcccacgccgacaacccgatcgacttccaggaattcatggtgatgccggttggcgccacctcgctctccgacgcggtgcggatgggcgccgagatcttccacaccctcaagagcgccctgaagaaggccggccacaacacgaatgtcggcgacgagggcggcttcgccccgaacctgccttcggccgaggctgcgctcgatttcgtcatggaatcgatcaacgccgccgggttcaagcccggcagcgacgtggtgctggcgctcgactgcgccgcgaccgagttcttcaaggacggcgcctaccgctacgagggcgagggccagacccgctcgatcgagcaacaggttgattacctcgccaagctgaccgaggcctatccgattctctccatcgaggacggcatgtccgaggatgattgggagggctggaagctcctcaccgaccggatcggcagccgtgtgcagctcgtcggcgacgacctgttcgtcaccaatgtcgagcgcctcgcccgcggcatcgagacggggacggccaactcgattctcgtgaaggtcaaccagatcggctcgctcaccgagaccctggccgccgtcgatatggcccagcgcgccggctacaccgcggtgatgtcgcaccgctccggcgagaccgaggattcgaccatcgccgacctcgcggtcgcgacgaattgcgggcagatcaagaccggctcgctcgcccgctcggacagactggccaagtacaaccagctcatccgcatcgaggagggcctcggtgcccaggcgctctacgccggccgcagcgcgatccgccagctcgccgggcgctga

SEQ ID NO: 4158 - protein, 429 aa, Methylobacterium extorquens
MTAITNIAAREILDSRGNPTVEVDVLLEDGSFGRAAVPSGASTGAHEAVELRDGDKSRYNGKGVLKAVDAVQSEILDAIGGMDAEDQVAVDEAMIALDGTPNKARLGANAILGVSLAVAKAAAETAGLPLYRYVGGVQGRVLPVPMMNIVNGGAHADNPIDFQEFMVMPVGATSLSDAVRMGAEIFHTLKSALKKAGHNTNVGDEGGFAPNLPSAEAALDFVMESINAAGFKPGSDVVLALDCAATEFFKDGAYRYEGEGQTRSIEQQVDYLAKLTEAYPILSIEDGMSEDDWEGWKLLTDRIGSRVQLVGDDLFVTNVERLARGIETGTANSILVKVNQIGSLTETLAAVDMAQRAGYTAVMSHRSGETEDSTIADLAVATNCGQIKTGSLARSDRLAKYNQLIRIEEGLGAQALYAGRSAIRQLAGR

SEQ ID NO: 4159 - DNA, 1734 bp, Dunaliella salina
  CDS (66)..(1505)
caaccgcgcagagcccaacacccctcttaagcagcagcaaggcgctccccccccaacgcagcacaatggccaccgtgcaggagtacatcgacaagcaccagctgcagaaaaagacggaggacgtgctcaacatcgcggtgaagtccaagcccgatgagccactgtccttcctggccaaggagctgctcaggatggctccatcagagatcttgaaggttgtaggccgtcagatcattgactctcgcggcaaccccactgtggaggcagacgtgcacacccataagggcatgttccgtgctgctgtgccctccggtgcctccactggcatccacgaggcagttgagctgcgtgatggcgacaagaccaagttcctgggcaagggtgtgcagaaggctgtggagagcatcaacaccatcatcagccccgccctgaagggcatggaccccaagaaccagagcgaggtggaccagaagatgatcgaccttgatggcactcccaacaaggccaagctgggtgccaatgcaattctggccgtctccctggccactgccaaggctggtgctgccgagaaggaagtgcctctgtacaggcacattgctgacctggccggcaaccccaagctgtacttgcccgtgccagcgttcaacatcatcaacggcggcagccacgcaggcaacgcccttgccatgcaggagttcatgatcttacccactggagcatcatctttctctgaggccatgcgcatgggcactgaggtgtaccacacactgaagggcatcatcaaggccaagtacggccaggatgctaccaacgttggtgatgagggtggctttgcccccaacatccaatccaatgatgatggtctgtccttggtcaccgatgccattgagaaggcaggatacactggcaaggtcaagatcggcatggacgtggctgcgtcagagttcattaccgaggacaagatgtacgacctgaacctcaagcagcagcccaacgatggctcccacaagaagacagctgcccaaatgctggagatgtacaaggagttctgcaccaagtaccccgtcatctccatcgaggatcccttcgagcaggatgactgggagcctgccaagtccctgactgcagagaacatctgccaggtggttggcgatgacatgctggtgacgaaccccatccgcgtcaagcgcggcattgagcagaaggcagtcaactccttgctcctgaaggtcaaccagattggctccctgactgagtccatcgaggccgtgaggatgtccaaggaggcaggctggggtgtgatgaccagccacaggtctggtgagactgaggactgcttcatcgcagacttggcagttggcctgtccacaggccagatcaagactggtgctccttgccgctctgagcgcaatgctaagtacaaccagctgctccgcattgaggaggagcttggcgagaatgcagtgtacgctggtgagaagtggcgcttcattgagtggcagtgaattgtcatggagtagacttatgttgcttggtggaaatgttgggctgcaaatgcccttgcttgtgtcctgagtggagtgtgtctcgtgggttaatcggatagcttcagcataatgctcctagagagctcacacttcacctgtgtgatccaaacccttggtttgctgaaattctagacgaataatggtgtaacaaacagggctctgaagaaaaaaaaaaaaaaaaaaaaaa

SEQ ID NO: 4160 - protein, 479 aa, Dunaliella salina
MATVQEYIDKHQLQKKTEDVLNIAVKSKPDEPLSFLAKELLRMAPSEILKVVGRQIIDSRGNPTVEADVHTHKGMFRAAVPSGASTGIHEAVELRDGDKTKFLGKGVQKAVESINTIISPALKGMDPKNQSEVDQKMIDLDGTPNKAKLGANAILAVSLATAKAGAAEKEVPLYRHIADLAGNPKLYLPVPAFNIINGGSHAGNALAMQEFMILPTGASSFSEAMRMGTEVYHTLKGIIKAKYGQDATNVGDEGGFAPNIQSNDDGLSLVTDAIEKAGYTGKVKIGMDVAASEFITEDKMYDLNLKQQPNDGSHKKTAAQMLEMYKEFCTKYPVISIEDPFEQDDWEPAKSLTAENICQVVGDDMLVTNPIRVKRGIEQKAVNSLLLKVNQIGSLTESIEAVRMSKEAGWGVMTSHRSGETEDCFIADLAVGLSTGQIKTGAPCRSERNAKYNQLLRIEEELGENAVYAGEKWRFIEWQ

SEQ ID NO: 4161 - DNA, 1296 bp, Clostridium tetani
  CDS (1)..(1296)
atgaaaaattatattgaaattatcgatgtatcagcaagacaagtacttgattcaagatcaaatccaacagttgaggtagatgtaatcctagaagatggaactacaggaagagcagctgtaccatcaggagcatcaacagggatttttgaagctgttgaattaagagatggtgataaatcagtatataatggaaaaggtgttttaaaggcaatagaaaatgtaaacactataattgcagaagaattagttggtatgaatgttttagatcaaattgcaatagacaaaacaatgatagaattagatggaacagataataaaggtaaattaggagctaatgctatgcttggagtatctctagcatgtgcaaaagctgcagcagaatatttaggattaagcctatatcaatatattggaggagtaaatgcaaaggtattaccagttccaatgatgaacataataaatggaggagagcatgcagacaacaatgtagatcttcaagaatttatgataatgcctgcaggagcatcaagttttagtgaagctttaagaatgtgttcagaagtatatcatagcttaaaatctttattaaaagctaaaggatatgatacaggtgtaggcgatgaaggtggatttgctccaaatctaaattctaatgaagaagctattcaagttatagtagaagctatagaaaaagctggatataaaccaggagtagaaatatttattgcattagacccagcgtcttcagaaatatttgaagatggaaaatacaatttaaagggagagggaaaagttcttactccacaagaaatggtagattattatgctaatttagtagctaaatatccaatcatatccatagaagatggtatggcagaagaagattgggaaggttggagacttataactgaaagattaggaacaaaaattcagttagtaggagatgatctatttgtaactaatactgataggttaactatgggaattgaaagaggagtagcaaattcaattcttattaagctaaaccaaataggaactttaactgaaactttaaatgctatagaaatggctgaaagagcaggatatactgcggtagtttcacatagatcaggagaaactgaagatacaactatagcagacttagttgtagctgtaaatgcaggtcaaataaagactggtgcaccagcaagaagtgaaagggttgctaaatacaatcaattattaagaattgaagatgagttaggagaaatgggagaatacagaggattaaaagctttctataatattaaaaagtaa

SEQ ID NO: 4162 - protein, 431 aa, Clostridium tetani
MKNYIEIIDVSARQVLDSRSNPTVEVDVILEDGTTGRAAVPSGASTGIFEAVELRDGDKSVYNGKGVLKAIENVNTIIAEELVGMNVLDQIAIDKTMIELDGTDNKGKLGANAMLGVSLACAKAAAEYLGLSLYQYIGGVNAKVLPVPMMNIINGGEHADNNVDLQEFMIMPAGASSFSEALRMCSEVYHSLKSLLKAKGYDTGVGDEGGFAPNLNSNEEAIQVIVEAIEKAGYKPGVEIFIALDPASSEIFEDGKYNLKGEGKVLTPQEMVDYYANLVAKYPIISIEDGMAEEDWEGWRLITERLGTKIQLVGDDLFVTNTDRLTMGIERGVANSILIKLNQIGTLTETLNAIEMAERAGYTAVVSHRSGETEDTTIADLVVAVNAGQIKTGAPARSERVAKYNQLLRIEDELGEMGEYRGLKAFYNIKK

SEQ ID NO: 4163 - DNA, 1284 bp, Bradyrhizobium japonicum
  CDS (1)..(1284)
atgaccgccatcatcgacatcatcggccgcgaaatcctcgacagccgtggcaatcccaccgtcgaggtcgacgtcgtgctggaagatggcgcgctcggccgcgccgcggtgccatcaggcgcctccaccggcgcccacgaggcggtggaactgcgcgatggcgacaaggcccgctatctcggcaagggcgtcaccaaggcggtcggcgccgtcaatggcgagatcttcgaggccttgagcggcctcgatgtcgagcagcaggcccagatcgaccagatcatgatcgacctcgacggcaccccgaacaagagccgccttggtgccaatgccatcctcggcgtgtcgctcgcctgcgccaaggcggctgcgaactcgctcgacatgccgctctaccgttacgtcggcggcacctcggcgcgactgctgccggtgccgatgatgaacatcatcaatggcggtgtgcatgccgacaacccgatcgacttccaggagttcatgatcctgccggtcggcgcgtcgagcttcgccgagggcctgcgttacggcgcggaggttttccacacgctgaagtcggagctgaagaaggccggccacaataccaatgtcggcgacgagggcggctttgccccgaacctgccgtcagcggacgccgcgctcgaattcgtcatgaacgcgatcggcaaggccggcttcaaggcgggcagtgacatcgtgatcggcctcgactgcgcctcgaccgagttcttcaaggacggcaagtacgtctatgaaggcgagggcaagacccgttcgatctccgagcaggccaagtaccttgccgacctcgttgcgcgctatccgatcgtgaccatcgaggacggcatgtcggaagacgacatggacggctggaaggagctcaccgacctcatcggcaagaagtgccagctcgtcggcgacgatctgttcgtcaccaacgtcaagcgcctcgccgaaggcatcaaggcgggccgggccaactcgatcctgatcaaggtcaaccagatcggcacgctgaccgagacgctggccgccgtcgagatggcgcacaaggcgggctacacctccgtgatgtcgcaccgctccggcgagaccgaggattccaccatcgccgacctcgcggtcgccaccaattgcggtcagatcaagaccggctcccttgcgcgttccgatcgcaccgccaagtacaaccagctcctgcgcatcgagcagcagctcggcaagcaggcgctctatggcggcaaggcggcactgaaggcgctggcctaa

SEQ ID NO: 4164 - protein, 427 aa, Bradyrhizobium japonicum
MTAIIDIIGREILDSRGNPTVEVDVVLEDGALGRAAVPSGASTGAHEAVELRDGDKARYLGKGVTKAVGAVNGEIFEALSGLDVEQQAQIDQIMIDLDGTPNKSRLGANAILGVSLACAKAAANSLDMPLYRYVGGTSARLLPVPMMNIINGGVHADNPIDFQEFMILPVGASSFAEGLRYGAEVFHTLKSELKKAGHNTNVGDEGGFAPNLPSADAALEFVMNAIGKAGFKAGSDIVIGLDCASTEFFKDGKYVYEGEGKTRSISEQAKYLADLVARYPIVTIEDGMSEDDMDGWKELTDLIGKKCQLVGDDLFVTNVKRLAEGIKAGRANSILIKVNQIGTLTETLAAVEMAHKAGYTSVMSHRSGETEDSTIADLAVATNCGQIKTGSLARSDRTAKYNQLLRIEQQLGKQALYGGKAALKALA

SEQ ID NO: 4165 - DNA, 1281 bp, Bacteroides thetaiotaomicron
  CDS (1)..(1281)
atgaaaatagaaaaaattgtagctcgagaaattctcgattcaagaggtaaccccacagtagaagttgacgtagtattggaatcaggtatcatgggacgtgcgtctgttccgtcaggtgcttccacaggtgaacatgaagcactcgaacttcgtgatggtgacaagcaacgttacggtggcaaaggcgtacaaaaggcggtggacaatgtaaacaagatcattgctccgaaactgatcggtatgtcttctctcaaccaaagaggaatcgactacgcaatgttggcactcgacggtactaaaaccaagtccaatctaggtgctaacgctattcttggcgtatctctcgctgtagccaaagcagcagccagctatcttgatctccctctctatcgctatatcggcggaacaaatacatacgtaatgcctgtaccgatgatgaatatcatcaatggcggttcacacagtgacgctcctatcgcattccaggaattcatgattcgtccggtaggtgcaccctcattcagagaaggtttgagaatgggcgccgaagtattccacgctttgaagaaagtactgaaagatcgtggcctcagcactgccgtaggcgacgaaggtggtttcgctcctaacctcgaaggtacggaagatgctctgaactctatcatcgcagccatcaaagctgccggatacgaaccaggtaaagacgtaatgatcggtatggactgcgcttcttccgaattctaccatgacggtatctacgactataccaagtttgaaggtgccaaaggcaagaaacgtaccgccgaagaacagatcgactacctggaagaactgatcaacaaattcccaatcgactccatcgaagacggtatgagcgaaaacgactgggaaggctggaagaaactgactgaacgtatcggcgaccgctgccagttggtaggtgatgacctgttcgttacgaacgttgacttcctcgcaatgggtatcgagaagggatgtgcaaactctatcctgatcaaagtaaaccaaatcggttcgctgaccgaaactctgaacgctatcgaaatggctcaccgtcatggctatacgactgtcacttcccaccgctccggcgaaacggaagacgcaacgattgcagacatcgcagtagctacgaatagcggacagatcaagaccggttcattaagccgttcggaccgtatggctaaatataaccaactgctccgcatcgaagaagaactcggtgacttggctgtatacggatataagagaatcaaataa

SEQ ID NO: 4166 - protein, 426 aa, Bacteroides thetaiotaomicron
MKIEKIVAREILDSRGNPTVEVDVVLESGIMGRASVPSGASTGEHEALELRDGDKQRYGGKGVQKAVDNVNKIIAPKLIGMSSLNQRGIDYAMLALDGTKTKSNLGANAILGVSLAVAKAAASYLDLPLYRYIGGTNTYVMPVPMMNIINGGSHSDAPIAFQEFMIRPVGAPSFREGLRMGAEVFHALKKVLKDRGLSTAVGDEGGFAPNLEGTEDALNSIIAAIKAAGYEPGKDVMIGMDCASSEFYHDGIYDYTKFEGAKGKKRTAEEQIDYLEELINKFPIDSIEDGMSENDWEGWKKLTERIGDRCQLVGDDLFVTNVDFLAMGIEKGCANSILIKVNQIGSLTETLNAIEMAHRHGYTTVTSHRSGETEDATIADIAVATNSGQIKTGSLSRSDRMAKYNQLLRIEEELGDLAVYGYKRIK

SEQ ID NO: 4167 - DNA, 1510 bp, Phytophthora infestans
  CDS (48)..(1412)
ctcttaagcctcaagttcctgaaaacaagctctcctcctctaaaacaatggtgtcgattgtgtcgatcaaggcccgtcagatctttgactcgcgtggcaaccccaccgttgaggttgacctcgtcaccgagctcggcgagtaccgtgccgctgtcccgagcggagcctccacgggcgaatttgaggcccttgagatgcgtgacggcggcaaggactacatgggcaagggtgtcctgaacgctgtgaagaacgtgaacgagatcatcgctcctgctcttatcggcaaggacgtgacgaagcaggccgagatcgaccgcttcatggtggagaagctggacggcacgcagaacgagtggggctggtacaagaagaagctgggcgccaacgcgattctgggtgtgtcgcttgctctgtgccgtgccggtgccgctgccaagaagcagcctctgtggcagcacatcgccgacctggccggcaacccgaccccatgcctgcccgtgccgtcgttcaacattatcaacggtggctcgcacgccggcaacaagctggccatgcaggagttcatgatccttcctgtgggtgcgaagaacttcacggaggccatgaagatcggttcggaggtgtaccacaacctgaagaaggtgatcaagggtcgctacggcctggacgccactgctgtgggtgacgagggtggtttcgccccgaacatccagtcgaacggtgaggccatcgacctgatcgaggaggccatcaaggccgctggctacacgaaccaggtgcgtcttggcatggacgttgccgcgtcggagttctacactggcgccgaggacgctcgctacaaccttgacttcaagaacgagaacgctgcagagtcggagaagatcccggccgacaagctgctggaggtgtacgagggcttcatcgccaagtgcgctgactcgagcaagatcgtgtccattgaggacccgttcgaccaggatgactgggagtcgtgggtgaagatcacgggcaaggtgggcaaggacgtgcagatcgtgggtgacgacctcacggtgacgaacccgacccgtgtgaagaaggccatcgagcagaaggcttgcaatgctcttctgttgaaggtgaaccagattggcagcattacggagtcgatcgaggccgtgacgatggccaagaaggccggctggggcattatggccagccaccgtagtggtgagacagaggacacgttcatcgctgacctggctgtgggtctgagtgccggccagatcaagactggcgccccgtgccgttcggagcgtctggcgaagtacaaccagcttctgcgtattgaggaggagcttggcaacaaggctcgctacgccggcgaggacttccgtgacgtggagaagctcggcaagtactcgaccttttaagtatcttgcatccacatttgatatgatctaaagctctctttaattcgaggggcttaaggttcaacacgtagttctcgttctagtttttcaaaaaaaaa

SEQ ID NO: 4168 - protein, 454 aa, Phytophthora infestans
MVSIVSIKARQIFDSRGNPTVEVDLVTELGEYRAAVPSGASTGEFEALEMRDGGKDYMGKGVLNAVKNVNEIIAPALIGKDVTKQAEIDRFMVEKLDGTQNEWGWYKKKLGANAILGVSLALCRAGAAAKKQPLWQHIADLAGNPTPCLPVPSFNIINGGSHAGNKLAMQEFMILPVGAKNFTEAMKIGSEVYHNLKKVIKGRYGLDATAVGDEGGFAPNIQSNGEAIDLIEEAIKAAGYTNQVRLGMDVAASEFYTGAEDARYNLDFKNENAAESEKIPADKLLEVYEGFIAKCADSSKIVSIEDPFDQDDWESWVKITGKVGKDVQIVGDDLTVTNPTRVKKAIEQKACNALLLKVNQIGSITESIEAVTMAKKAGWGIMASHRSGETEDTFIADLAVGLSAGQIKTGAPCRSERLAKYNQLLRIEEELGNKARYAGEDFRDVEKLGKYSTF

SEQ ID NO: 4169 - DNA, 2194 bp, Drosophila melanogaster
  CDS (307)..(1809)
ccaacacactgcctttgcgccaacattcacatcaaaattcaacccaatcagtttggctaaccatttctttttatataaaaatagacatgcaatccacagctacgtgtggatcccgattactctaaccttgtgcgaaggtcaattttccccaaaaaatataggaaacgtaccagggaaaacaacaaaaaagggaaagcgcacccccacactgaaaaccggcgagcacctggaaacgcatacatataaaaggagagtaaatatacaaattggtagcactttcgccgccgtcttttacacattcaagccatgtcttggaccgcttcagttttcttgaggacttccaccactagcatgaagtttctgcgtctgcgctggcctctccccagaattccccagaataaatcggcaaacgttgcgccgcgtttcagaagcaaatcagcagtcagccagctctcatctggatttaaatttgtgcagatccgcaaaagtacttgtgacagcaacgagatgaccatcaaagcgatcaaggcccgtcagatctacgactcccgtggcaaccccaccgtggaggtcgacctgaccaccgagctgggactcttccgcgccgccgtgccctccggcgcctccactggcgtccacgaggccctggagctgcgcgacaacgacaaggccaactaccatggcaagtcggtgctgaaggccgtgggccatgtgaacgacaccctgggccccgagctgatcaaggccaatctggatgtggttgaccaggcgtccattgacaacttcatgatcaagttggacggcaccgagaacaagagcaagttcggagccaacgccatcctgggcgtttccctggccgtggccaaggctggagccgccaagaagggcgtgccgctgtacaaacacattgccgatctggctggcaacaaggagatcatcctgccggtgcccgctttcaacgtgatcaacggcggcagccacgccggcaacaagctggccatgcaggagttcatgatcctgcccaccggcgccaccagcttcacagaggccatgaagatgggctccgaggtgtaccaccacctgaagaatgtgatcaaggccaagttcggtctggacgccaccgccgtgggcgatgagggcggcttcgcccccaacatccagtccaacaaggaggctctgaatctgatcagcgatgccatcgccaaggccggatacaccggcaagatcgagatcggcatggatgtggccgcctccgagttctacaaggatggccagtacgatctggacttcaagaacgagaagagcgacaggtcgcagtggctgcccgccgacaagctggccaacctgtaccaggagtttatcaaggacttccccatcgtctcgattgaggatccctttgaccaggaccactgggaggcctggtccaacctgaccggctgcaccgacatccagatcgtgggcgatgatctgaccgtgaccaaccccaagcgtattgccaccgccgtggagaagaaggcctgcaactgcctgctcctgaaggtcaaccagatcggcaccgtcaccgaatccattgccgcccatctgctggccaagaagaacggctggggcaccatggtctcccaccgttccggtgagaccgaggactcgttcatcggtgacctggtcgtcggtctgtccaccggccagatcaagaccggagctccatgccgctcggagcgtctggccaagtacaaccagatcctgcgcatcgaggaggagatcggcgctggcgtcaagttcgccggcaagtcgttcaggaagccgcagtaagcgcagggcacttcgaaattccaaccacaccagccccatcgaatgagatctggatcttggagagggagctggacgcagtagatccatggaaaggcggcggtgcacgtgttcgtcaaccttttacgttcggaacttgtgtctggcgcacaaatacatcagaattaaactaccaaacccatttgctgtctctatgcttcgttcttagacattattaattaatgctaaaccttgatctaatcattatttataaacaaaagcataaaaaacactatgtgcaagatattcgttcagttgccgagagctttgaatatcttcaatgtaatcgctgtaatcgttttgaaattataaattgatctacacaaacaccaaaaaaaaaaaaaaaaaa

SEQ ID NO: 4170 - protein, 500 aa, Drosophila melanogaster
MSWTASVFLRTSTTSMKFLRLRWPLPRIPQNKSANVAPRFRSKSAVSQLSSGFKFVQIRKSTCDSNEMTIKAIKARQIYDSRGNPTVEVDLTTELGLFRAAVPSGASTGVHEALELRDNDKANYHGKSVLKAVGHVNDTLGPELIKANLDVVDQASIDNFMIKLDGTENKSKFGANAILGVSLAVAKAGAAKKGVPLYKHIADLAGNKEIILPVPAFNVINGGSHAGNKLAMQEFMILPTGATSFTEAMKMGSEVYHHLKNVIKAKFGLDATAVGDEGGFAPNIQSNKEALNLISDAIAKAGYTGKIEIGMDVAASEFYKDGQYDLDFKNEKSDRSQWLPADKLANLYQEFIKDFPIVSIEDPFDQDHWEAWSNLTGCTDIQIVGDDLTVTNPKRIATAVEKKACNCLLLKVNQIGTVTESIAAHLLAKKNGWGTMVSHRSGETEDSFIGDLVVGLSTGQIKTGAPCRSERLAKYNQILRIEEEIGAGVKFAGKSFRKPQ

SEQ ID NO: 4171 - DNA, 1981 bp, Anisakis simplex
  CDS (63)..(1373)
gcaaatcgccactctttgggcagcatatcgccgcactttctacaactgcatcatcactcgcaatgccgatcactcgtattcacgctcgtcaaatctacgactctcgtggtaacccaaccgttgaggttgatttgaccactgagaaaggtgttttccgtgctgcggtaccaagcggtgcgtccaccggagtgcatgaggcgctcgagctccgtgacggagacaaagccgtcaaccatggtaagagcgtgctgaaggctgtcgcgaatattaatgacaagattgcacctgcgattgtggccaagaacttctgctccacccaacaaaaggaaatcgatcagttcatgctggatatggacggaactgcgaataaagcgaatttgggtgcgaatgcaattctgggcgtttcgttggcggtcgccaaggctggagcagtgcacaagggaatgccactctacaagtatatcgctgaattggccggtgtgaagcaagtagttatgccggtgccgtcgttcaacgttatcaatggaggatcgcatgcaggaaacaaattggccatgcaggagtttatgattatgccaatcggagcgaagaatttcaccgaagcaatgcgaatgggctctgagatttatcatcatttgaaggcagagatcaagaaacgttacggtttggatgcgacagcagtcggagacgagggtggctttgcgccgaatattcaggataacagggaggggttggacctgttgaacacggccattgctctggctggttatactggcaaggtgtcgatcgctatggacacggctgcgtccgaattctacaaggccgatgagaaaaaatacgatctagacttcaagaatccgaattcggataagagccaatggaagactggagatcaactggccgagatttatcactcgttcgtaaaggagtatccaattgtgtccattgaagacgcattcgaccaggacgattgggagaattggaccaaattcaagagtactcttaacattcagttggttggagacgacttgacggtcacaaaccgtgagcgtattcagatggcgattgataagaaggcgtgcgactgccttttgttgaaggtgaaccaaattggatccgtcacggagtcgatcgaggcagccaagcttgcgcgtgcaaacggatggggcgtgatggtttcgcatcgttctggcgagactgaggacacgttcatcgcagatttagtggtgggtttggccgtaggacagatcaagaccggtgcgccgtgccgttcggaacgtttagccaaatacaatcagcttctgcgaatcgaggaagagctcggctcggcggccgtttacgcaggagagaagttcagaaatccgcaagcctaaatttgtggccgtctgacctgcccagattttggcaatttcatcagctgaagttttggtaccacaccccccccccctccacgaattttgtcaactttttgtgaatttcggtgtttatttattatcgttgttgttgtgcgtccggtgttacataattgtcactgcaatttctcttcgtaatcagtttcaatagttccatttcagttttaacatgttttttgtgctaatgttatgttaggatggatgtatgttctatgatattatgcatctgctattgaacagtattctcgctgctgaattattgaagccagtaataatgcattctgtcgctctgcaaacccgtagcaactggcggaatgtagcggggttcgtgttaattttacatattttcggggtaggattcccctcatgcagaggtaatgtttcttcagcatagcgaattgattttatacgtgttatcttttcaatttgaaaggtttttaacttattaatagtaataattttctcgtttgttataattattattattgatagaagttttttacttaattgcagtgttgtcttttgtaaaactgttataaatcataaggactaaaaaaaaaaaaaaaaaa

SEQ ID NO: 4172 - protein, 436 aa, Anisakis simplex
MPITRIHARQIYDSRGNPTVEVDLTTEKGVFRAAVPSGASTGVHEALELRDGDKAVNHGKSVLKAVANINDKIAPAIVAKNFCSTQQKEIDQFMLDMDGTANKANLGANAILGVSLAVAKAGAVHKGMPLYKYIAELAGVKQVVMPVPSFNVINGGSHAGNKLAMQEFMIMPIGAKNFTEAMRMGSEIYHHLKAEIKKRYGLDATAVGDEGGFAPNIQDNREGLDLLNTAIALAGYTGKVSIAMDTAASEFYKADEKKYDLDFKNPNSDKSQWKTGDQLAEIYHSFVKEYPIVSIEDAFDQDDWENWTKFKSTLNIQLVGDDLTVTNRERIQMAIDKKACDCLLLKVNQIGSVTESIEAAKLARANGWGVMVSHRSGETEDTFIADLVVGLAVGQIKTGAPCRSERLAKYNQLLRIEEELGSAAVYAGEKFRNPQA

SEQ ID NO: 4173 - DNA, 1305 bp, Streptococcus pneumoniae
  CDS (1)..(1305)
atgtcaattattactgatgtttacgctcgcgaagtcctagactcacgcggtaacccaacacttgaagtagaagtttacactgaatcaggtgctttcggacgtggtatggttccatcaggagcttctactggtgaacacgaagcagttgaacttcgcgacggtgacaaatctcgttacggtggtcttggtacacaaaaagctgttgacaacgtaaacaacatcattgctgaagctatcattggctacgatgtacgtgatcaacaagctattgaccgtgctatgatcgcacttgacggtactcctaacaaaggtaaattgggtgcgaatgcaatcctcggtgtgtctatcgctgtagctcgtgctgctgctgactaccttgaaatcccactttacagctaccttggtggattcaacactaaagcccttccaactccaatgatgaacatcatcaacggtggttctcactctgacgctccaatcgctttccaagagttcatgatcttgccagttggtgcgccaacatttaaagaagcccttcgttacggtgctgaaatcttccacgctcttaagaaaatccttaaatcacgtggtttggaaactgccgtaggtgacgaaggtggattcgctcctcgtttcgaaggaactgaagatggtgttgaaactatccttgctgcgattgaagctgctggatatgtaccaggtaaagacgtatttctcggatttgactgtgcttcatcagaattctacgataaagaacgtaaagtttacgactacactaaatttgaaggcgaaggtgctgctgttcgtacatctgcagaacaaatcgactaccttgaagaattggttaacaaatacccaatcatcactattgaagatggtatggatgaaaacgactgggatggttggaaagctcttactgaacgtcttggtaagaaagtacaacttgttggtgacgacttcttcgtaacaaacactgactaccttgcacgtggtatccaagaaggtgctgctaactcaatccttatcaaagttaaccaaatcggtactcttactgaaacttttgaagctatcgaaatggctaaagaagctggttacactgctgttgtatcacaccgttcaggtgaaactgaagattcaacaatcgctgatattgcagttgcaactaacgcaggacaaatcaagactggttcactttcacgtacagaccgcatcgctaaatacaaccaattgcttcgtatcgaagaccaacttggtgaagtagctgaatatcgtggattgaaatcattctacaaccttaaaaaataa

SEQ ID NO: 4174 - protein, 434 aa, Streptococcus pneumoniae
MSIITDVYAREVLDSRGNPTLEVEVYTESGAFGRGMVPSGASTGEHEAVELRDGDKSRYGGLGTQKAVDNVNNIIAEAIIGYDVRDQQAIDRAMIALDGTPNKGKLGANAILGVSIAVARAAADYLEIPLYSYLGGFNTKALPTPMMNIINGGSHSDAPIAFQEFMILPVGAPTFKEALRYGAEIFHALKKILKSRGLETAVGDEGGFAPRFEGTEDGVETILAAIEAAGYVPGKDVFLGFDCASSEFYDKERKVYDYTKFEGEGAAVRTSAEQIDYLEELVNKYPIITIEDGMDENDWDGWKALTERLGKKVQLVGDDFFVTNTDYLARGIQEGAANSILIKVNQIGTLTETFEAIEMAKEAGYTAVVSHRSGETEDSTIADIAVATNAGQIKTGSLSRTDRIAKYNQLLRIEDQLGEVAEYRGLKSFYNLKK

SEQ ID NO: 4175 - DNA, 1314 bp, Trichinella spiralis
  CDS (1)..(1314)
atgtctattttggatattcatgctagacagattttcgattcacgtggcaatccaactgttgaagtagatttgcgtacaaatagaggcatttttcgcgctgcggttcctagcggtgctagcactggcattcatgaagctttggaattgcgtgatggggacaaatctcagtacatgggaaaaggagtcagcaaagcggttaagaatatcaacgaagtcatcgcaccatctctgatagcgaagaattttgaagttacagaacaaagtctaatcgacaactttatgctttctctggacggaactgagaacaaatccgtcctcggagcgaacgctattcttggtgtttcgttggccgtttgcaaagctggagcggtgcacaaaggagtttcgctgtaccgttacattgctgacttggctggtgtagacaaggtgatcatgccagtgcctgcgttcaatgttataaacggcggttctcacgcaggaaataagttagctatgcaggaattcatgttgcttcccattggagcatccaactttaaggaagcgatgcgtatgggaagtgaagtgtatcatcatttgaagaactgcattaaagcacgctatggtttggacgcgacagctgtcggggacgaaggtggatttgcgccgaatatccaagacaacaaggaagcactcgagttgctgaaagaggctattggtaaagctggttacgaaggcaaagtgaaaattggcatggatattgcagcgtccgaattttataaatcgaaagaaaaattgtacgatttggatttcaaaaatccagaatcgaatgcaaaagattggaaaaatggcgagcaaatgcttgaattatacaaggattttgttacgaactatccaattgtgtctatcgaggatggttacgaccaggatgattgggataattgggccaaaatgtgcagtgagttgaaaatacaaatagttggagatgatttgacctgcacaaatccgaagcgtattcagcaggcaatagataagaaggcgtgcaacacgttgttgctgaaagtcaaccaaattggttcagtgactgaaagtattcaagcatgtcagctgtctcgtaaaaatggctggggtgttatggtttctcatcgtagtggagaaactgaagacacgtttatcgctgatcttgttgtcggtttggctactggacagattaaaactggcgcaccatgtcgttctgagcgtttggcgaaatataaccaactgttgcgtattgaagaagaactggaacgtcagggcattgcgaaatatgctggcgaaaactttcataatccacagtga

SEQ ID NO: 4176 - protein, 437 aa, Trichinella spiralis
MSILDIHARQIFDSRGNPTVEVDLRTNRGIFRAAVPSGASTGIHEALELRDGDKSQYMGKGVSKAVKNINEVIAPSLIAKNFEVTEQSLIDNFMLSLDGTENKSVLGANAILGVSLAVCKAGAVHKGVSLYRYIADLAGVDKVIMPVPAFNVINGGSHAGNKLAMQEFMLLPIGASNFKEAMRMGSEVYHHLKNCIKARYGLDATAVGDEGGFAPNIQDNKEALELLKEAIGKAGYEGKVKIGMDIAASEFYKSKEKLYDLDFKNPESNAKDWKNGEQMLELYKDFVTNYPIVSIEDGYDQDDWDNWAKMCSELKIQIVGDDLTCTNPKRIQQAIDKKACNTLLLKVNQIGSVTESIQACQLSRKNGWGVMVSHRSGETEDTFIADLVVGLATGQIKTGAPCRSERLAKYNQLLRIEEELERQGIAKYAGENFHNPQ

SEQ ID NO: 4177 - DNA, 1649 bp, Aspergillus fumigatus
  CDS (87)..(1403)
aaattgtctttgatcttccttttcatttgctgcacttgaaccccagttatcctctgatcctcactaccgtctgaaatctcgtcagaatgcctatctccaagatccacgctcgttccgtgtacgactctcgcggtaaccccaccgttgaggtggacgttgccaccgagaccggtttgcaccgtgctattgttccttctggagcttccaccggccagcacgaggctcacgagctccgtgacggtgacaagacccagtggggcggcaagggtgtcctcaaggctgtcaagaatgtcaacgagaccattggccctgctctcatcaaggagaacatcgatgtgaaggaccagtctaaggtcgacgagttccttaacaagcttgacgggactgccaacaagtccaacctcggtgctaatgccatcctcggtgtcagcttggctgttgccaaggctggtgctgctgagaagggtgtccctctctacgctcacatctccgaccttgccggtaccaagaagccctatgtccttcccgttcccttccagaacgtcctgaacggcggttctcacgctggtggtcgcctcgctttccaggagttcatgatcgtccctgactccgctccctctttctccgaggccctccgccagggtgctgaggtctaccagaagctcaaggctctggccaagaagaagtacggccagtccgctggcaacgttggtgacgagggtggtgttgctcccgatattcagaccgccgaggaggctctcgacctgatcaccgaggccatcgaacaggccggctacaccggcaagattaagatcgctatggacgttgcctccagcgagttctacaaggccgacgtcaagaagtacgaccttgacttcaagaaccccgagagcgacccctccaagtggctcacctacgagcagcttgccgacctctacaagtcccttgctgccaagtaccccattgtcagcattgaggaccccttcgctgaggatgattgggaggcctggagctacttctacaagacctccgacttccagattgttggtgatgacctgactgttaccaaccctgggcgtatcaagaaggccatcgagctcaagtcctgcaacgccctcctgctcaaggtcaaccagatcggtaccctgaccgagtccatccaggccgccaaggactcctacgccgacaactggggtgtcatggtctcccaccgctctggtgagactgaggacgtcaccattgccgacattgctgtcggtctgcgctctggccagatcaagaccggtgctccttgccgttccgagcgtctggctaagctgaaccagatcctccgtatcgaggaggagctcggcgagaataccgtttacgctggttccaagttccgcactgccgtcaacctgtaaatgcagccgcggaccttactatttacagagaaaaggttctcaacccaatcagacatacttcaaaaaatgacgattggactcggacccattttgggcttcgaaaaaataacagcattgccaggctgagcaacagaccagcacgtcccaatgctgttcgataaagagttatgatgatgatatgatcagccaattacactatatagtggcttaatgaaaaatgcatccagcttaaaaaaaaaaaaaaaa

SEQ ID NO: 4178 - protein, 438 aa, Aspergillus fumigatus
MPISKIHARSVYDSRGNPTVEVDVATETGLHRAIVPSGASTGQHEAHELRDGDKTQWGGKGVLKAVKNVNETIGPALIKENIDVKDQSKVDEFLNKLDGTANKSNLGANAILGVSLAVAKAGAAEKGVPLYAHISDLAGTKKPYVLPVPFQNVLNGGSHAGGRLAFQEFMIVPDSAPSFSEALRQGAEVYQKLKALAKKKYGQSAGNVGDEGGVAPDIQTAEEALDLITEAIEQAGYTGKIKIAMDVASSEFYKADVKKYDLDFKNPESDPSKWLTYEQLADLYKSLAAKYPIVSIEDPFAEDDWEAWSYFYKTSDFQIVGDDLTVTNPGRIKKAIELKSCNALLLKVNQIGTLTESIQAAKDSYADNWGVMVSHRSGETEDVTIADIAVGLRSGQIKTGAPCRSERLAKLNQILRIEEELGENTVYAGSKFRTAVNL

SEQ ID NO: 4179 - DNA, 1552 bp, Penicillium citrinum
  CDS (114)..(1430)
cgacctctctctcccctactactcttccatcaacatccttccagcttcacctaaagccaagaagggatagcactgtctatacttgacacattcagaccacacattacttcattatgcctatcgccaaggttcacgctcgttccgtgtacgtctctcgcggtaaccccaccgttgaggtggacgttgtcactgagactggtctgcaccgcgccattgtcccctccggtgcttccaccggtcaacacgaggctgttgagctccgtgacggtgacaaggccaagtggggtggcaagggtgtcctcaaggccgtcaagaacgtcaacgagaccattggccccgctctcatcaaggagaacattgacgtcaaggaccaggctaaggttgatgagttcctgaacaagctcgatggcactgccaacaagggtaaccttggtgccaacgccatccttggtgtctccctggccattgccaaggctgccgccgccgagaagggtgtccctctctacgttcacatttccgaccttgccggtaccaagaagccctacgtcctccccgttcccttccagaacgtcctgaacggtggctcccacgccggtggccgtctggccttccaggagttcatgattgtccctgacactgccgagtctttctccgagggtctccgtcagggtgctgaggtctaccagaagctgaaggctctggccaagaagaagtacggccagtccgctggtaacgttggtgacgagggtggtgtcgctcccgatatccagactgctgaggaggctcttgacctcatcaccgaggccatcgagcaggccggctacaccggcaagatctccatcgccatggatgttgcctccagcgagttctacaagaccgacgccaagaagtacgatttggacttcaagaaccccgactccgaccccaccaagtggctcacctacgagcagctggccgatctctacaagtctctggctgccaagtaccccattgtctccatcgaggaccccttcgctgaggacgactgggaggcctggagctacttctacaagacctccgacttccagattgtcggtgatgatctgactgtcaccaaccccctccgcatcaagaaggccatcgagctcaagtcttgcaacgctcttctgctgaaggtcaaccagatcggtaccctgaccgagtccattcaggccgctaaggactcctacgccgacaactggggtgtcatggtctcccaccgttccggtgagaccgaggacgtcaccattgccgacattgctgtcggtctccgctccggccagatcaagaccggtgcccctgcccgttccgagcgtctggctaagctgaaccagatcctccgcattgaggaggagcttggcgagaatgccatctacgctggcaagaacttccgtacctccgtcaacttgtaaatgcagtttgcacttgcacggtgactgttggaagtaaggatgagcgagaaaaaaaagcgataactcgcccttttttatgattatgaattaataagatctctgaatgaaaaaaaaaaaaaaaa

SEQ ID NO: 4180 - protein, 438 aa, Penicillium citrinum
MPIAKVHARSVYVSRGNPTVEVDVVTETGLHRAIVPSGASTGQHEAVELRDGDKAKWGGKGVLKAVKNVNETIGPALIKENIDVKDQAKVDEFLNKLDGTANKGNLGANAILGVSLAIAKAAAAEKGVPLYVHISDLAGTKKPYVLPVPFQNVLNGGSHAGGRLAFQEFMIVPDTAESFSEGLRQGAEVYQKLKALAKKKYGQSAGNVGDEGGVAPDIQTAEEALDLITEAIEQAGYTGKISIAMDVASSEFYKTDAKKYDLDFKNPDSDPTKWLTYEQLADLYKSLAAKYPIVSIEDPFAEDDWEAWSYFYKTSDFQIVGDDLTVTNPLRIKKAIELKSCNALLLKVNQIGTLTESIQAAKDSYADNWGVMVSHRSGETEDVTIADIAVGLRSGQIKTGAPARSERLAKLNQILRIEEELGENAIYAGKNFRTSVNL

SEQ ID NO: 4181 - DNA, 1754 bp, Spinacia oleracea
  CDS (103)..(1437)
tatctgataccaaagagacaccatcaccaattctcttctctccaccaaccgtcttcttcccctcactctacttttatcacagagacacagatcgatttcgccatggttaccatcaagtccgtcaaagctaggcagatcttcgacagccgtggtaaccctaccgtcgaggctgatattcatctagatgatggaaccttcgctagagctgctgttccaagtggtgcatccactggtatctatgaagcccttgagctcagggatggaggcaaagactatatgggaaagggtgttttcaaggctgttcagaatgtaaatgagatcattggccctgctttggttggcaaggacccaactgagcagactgctattgacaacttcatggttcaagaactcgatggaaccacaaatgaatggggttggtgcaagcaaaagttgggagcaaatgccatcttggctgtgtctcttgctgtctgcaaggctggagcgcaagtcaagaaaatcccactataccagcacattgctgagatttctggtaacaagaagatggtcttgccagtaccagccttcaacgttatcaatggtgggtctcatgccggaaacaagcttgcaatgcaagagttcatgattttgcctacgggagcttcctcgttcagggaagcaatgaagatgggtagtgaagtgtatcaccacttgaagagtgtgatcaagaagaagtacggtcaagatgcgacgaatgttggtgatgaaggtggctttgctcctaacatccaggagaacaaggaaggtcttgagttgctgaagactgccattgagaaagctggatacactggcaaggtggtcattggaatggatgttgctgcagctgagttctacagtaaggacaagacctacgacttaaacttcaaggaagagaacaatgacggatcacaaaagatctctggggatgcccttaaggatctttacaagtcatttgtgtcagagtaccccatagtgtcaattgaagatccctttgaccaagatgactgggagcattatggcaagcttactgcagaaattggagacaaagtacaaattgtaggagatgatctcttggtcaccaaccccaagagggtggagaaggcaatcaatgggaagtcctgtaatgctcttcttctcaaggttaaccaaattgggtcagtgacggagagtattgaggccgtgaagatgtcaaaacgtgctgggtggggtgtgatggctagccaccgcagtggagaaaccgaagatactttcattgccgatctttctgttggactttctacgggtcaaatcaagactggagctccatgcagatctgagcgtcttgccaaatacaaccagctcttgcgtattgaggaggaactcggtgacaaagctatttacgccggagcagacttccgtgcaccagttgagccttactaaggtgtgaatttgcatgctgattttgagagaaggcttatccgttaataatagaccagaccctagggtgttgcggagcaactttgttgatgtttttgttgagggcttgagcagtaattaattaatgctatgttttttggaaaccggaatgctttggtttaagctttatgatttcatattattttatctttgatgcctgcttcccaggactgccacggtcatactctcttagctcttacaatatgggatctttatcttacccattgctaaatttatcgtatgaaatgagaaggtcgaatagatgtggaatctacttttgg

SEQ ID NO: 4182 - protein, 444 aa, Spinacia oleracea
MVTIKSVKARQIFDSRGNPTVEADIHLDDGTFARAAVPSGASTGIYEALELRDGGKDYMGKGVFKAVQNVNEIIGPALVGKDPTEQTAIDNFMVQELDGTTNEWGWCKQKLGANAILAVSLAVCKAGAQVKKIPLYQHIAEISGNKKMVLPVPAFNVINGGSHAGNKLAMQEFMILPTGASSFREAMKMGSEVYHHLKSVIKKKYGQDATNVGDEGGFAPNIQENKEGLELLKTAIEKAGYTGKVVIGMDVAAAEFYSKDKTYDLNFKEENNDGSQKISGDALKDLYKSFVSEYPIVSIEDPFDQDDWEHYGKLTAEIGDKVQIVGDDLLVTNPKRVEKAINGKSCNALLLKVNQIGSVTESIEAVKMSKRAGWGVMASHRSGETEDTFIADLSVGLSTGQIKTGAPCRSERLAKYNQLLRIEEELGDKAIYAGADFRAPVEPY

SEQ ID NO: 4183 - DNA, 1501 bp, Euglena gracilis
  CDS (37)..(1332)
tagacggggccgcgacgggggcccgtcgtttttgggatgcctgtcatcaagactgttaaagcgcgtcaaatcctcgactctcgagggaacccaactgtggaggttgatgtcatcctggacaatggactcctgggtcgcggtgctgtgccttctggagcttccaccggagagtacgaagccgttgagctccgtgatggggataaggcggtgtacctcggaaagggggttctgaagagcgtggaggccgtgaacaccattgtcgcacccaaactcgttgggttggatcccacagaacagctgaaaatcgacaacttgatgcgcgagctggacggcaccccaaacaagggaaagattggtgccaacggcattctgggtgtctccatggcggtttgccgtgctgcagctcttgtcaagggagttccattgtatcgccacattggcgatttgcatggaaataagaccttccaaatgcccgtcccaatgtgcaacatcatcaatggaggcaagcatgcagacaacaaaattgacttccaagagttcatggtcatgcccgtaggtgcggcaaacttcagtgaaggtcttcgctggtgtgcagagatcttccaccacttgaagagcatcctgaagaaagctggacatgtcacctcagttggtgatgagggtgggtttgctccaaatctcgataatgatgaggctttggactttgttattgccgccatcaaagctgctggtttcgagccaggcaagcagattgccatcgccctggactgcgcctcttcagagctgtttgatgaaggtgaccgcaagggatacaagtactggaagtccaaccccgaccggttgttcagtgctgccgagatgattgagaagtacgcaggctgggttgcaaagtatcccattgtttccattgaggaccctttggatcagaatgactgggatggatatgtgaacatgacaaagcagctgggtggtaagatccagattgtgggtgatgacttctttgtgaccaatcccacccgcttcaagaagggcattgaacttgcagcctgcaactccatccttatcaaggtaaaccaaattggaacggtttccgaaactttggaatgcatcaagatggcccaagcagcaggatacacggctgttgcttctcaccgctctggtgagacagaggatgcattcattgcagacctggccgttggcactgcagcgggacagatcaagactggttcgttgtcccgcacggaccgcatggccaagtacaaccagctcatccgcatcgaggaggagttggggggagaggccaagtggaccactgccatgctgcggaagtgagcatgttggaagacacaacagcaaaaacgttttgaaagttttcacacgaaccgtcaaacatcgctccacctgtggttatcgcctcattaccccggtgcatcacacgggatcactctgttgtgccgctccgccgttggactgccagaagaaaagggcctgttgaggttca

SEQ ID NO: 4184 - protein, 431 aa, Euglena gracilis
MPVIKTVKARQILDSRGNPTVEVDVILDNGLLGRGAVPSGASTGEYEAVELRDGDKAVYLGKGVLKSVEAVNTIVAPKLVGLDPTEQLKIDNLMRELDGTPNKGKIGANGILGVSMAVCRAAALVKGVPLYRHIGDLHGNKTFQMPVPMCNIINGGKHADNKIDFQEFMVMPVGAANFSEGLRWCAEIFHHLKSILKKAGHVTSVGDEGGFAPNLDNDEALDFVIAAIKAAGFEPGKQIAIALDCASSELFDEGDRKGYKYWKSNPDRLFSAAEMIEKYAGWVAKYPIVSIEDPLDQNDWDGYVNMTKQLGGKIQIVGDDFFVTNPTRFKKGIELAACNSILIKVNQIGTVSETLECIKMAQAAGYTAVASHRSGETEDAFIADLAVGTAAGQIKTGSLSRTDRMAKYNQLIRIEEELGGEAKWTTAMLRK

SEQ ID NO: 4185 - DNA, 1645 bp, Lupinus luteus
  CDS (58)..(1392)
gaattcggcacgagttcatttctcttcagtaaccgtaaatctcatctcaaatctgaaatggccacaatcgctaccatcaaggctagacaaatcttcgacagtcgtggcaatccaaccgttgaggtggatttgacattatccgatggtacttttgccagagctgctgttccaagtggtgcttccaccggtatatatgaggcccttgaattaagagatggaggatctgactaccttggaaaaggtgtatcaaaggctgttgacaatgtaaacacaattattgcccctgcattgattggaaaggatccaactgaacagacagctattgacaactttattgttcaagagcttgatggaactgttaatgaatggggttggggcaagcaaaagcttggtgcaaatgccatattggcagtgtctcttgcagtttgcaaagctggtgctagtgccttgaaaatccctctttacaagcatatcgcaaatcttgcgggtaacaagaatttggttttgcctgttcctgctttcaatgtcataaatggtggatcacatgcaggaaacaaacttgccatgcaggagtttatgattctcccagtgggagcttccactttcaaggaagccttgaagatcggtgtggaagtatatcacaatttgaagtctgtgattaagaagaaatacggtcaggatgcagtaaacgttggtgatgaaggtggctttgctcccaacattcaggaaaacaaagaaggtttggaattgctgaaatctgccattgccaaagctggttacactgataaggttgtcattggaatggatgttgccgcatctgaattctacacatcagacaagaaatacgttctgaacttcaaggaagataacaatgatggctcacagaagatctctggggaagaattgaaagaactctacaaatcatttgttgcagagtacccaatagcttcaattgaagatccttttgatcaggatgactgggagcactatggtaagataactaccgagattggaaccgaggtgcaaattgttggtgatgatctcttagttaccaacccaaagagggttcagaaggcaattgactcaaaatcatgcaatgctcttctgctcaaggtcaatcaaattggatcagtcaccgaaagtattgaagccgtcaagatgtccaaaaaagctggatggggtgtaatgaccagtcaccgaagtggagagactgaggataccttcattgctgatcttgctgttggtttgtcaacgggtcagattaaaactggagctccatgcaggtcagagcgtcttgctaaatacaaccagctgctgagaattgaggaggagcttggtgatgaagctgtgtatgctggcgtaaactaccgtaacccagttgagccatactaaagctttgaagtggaaaaacaccaaatgagttgagcaatgtagtatttggttgaggggggttttgttgtgtgatgaataagttaacaattaaaacttcagtgttgttgaaaaagacttttccaataactcttgagttttgatttacagggccaagactgttatgacttatgccctatatttaaaggctgtttaatgatatttaacttcagtaattgaagcttatttccaaaaaaaaaaaaaaaaaaaaaaaaaa

SEQ ID NO: 4186 - protein, 444 aa, Lupinus luteus
MATIATIKARQIFDSRGNPTVEVDLTLSDGTFARAAVPSGASTGIYEALELRDGGSDYLGKGVSKAVDNVNTIIAPALIGKDPTEQTAIDNFIVQELDGTVNEWGWGKQKLGANAILAVSLAVCKAGASALKIPLYKHIANLAGNKNLVLPVPAFNVINGGSHAGNKLAMQEFMILPVGASTFKEALKIGVEVYHNLKSVIKKKYGQDAVNVGDEGGFAPNIQENKEGLELLKSAIAKAGYTDKVVIGMDVAASEFYTSDKKYVLNFKEDNNDGSQKISGEELKELYKSFVAEYPIASIEDPFDQDDWEHYGKITTEIGTEVQIVGDDLLVTNPKRVQKAIDSKSCNALLLKVNQIGSVTESIEAVKMSKKAGWGVMTSHRSGETEDTFIADLAVGLSTGQIKTGAPCRSERLAKYNQLLRIEEELGDEAVYAGVNYRNPVEPY

SEQ ID NO: 4187 - DNA, 1290 bp, Leishmania major
  CDS (1)..(1290)
atgccgatccgaaaggtttacgcccgcgaggtgctcgactcccgcggcaacccgaccgttgaggtcgagttgatgacggaggccggcgttttccgctccgctgtgccttccggcgcgtcgactggcgtgcatgaggcgtgcgagctgcgcgacggcgacaaggcgcgctactgtggcgccggctgcacgcaggcggtgaagaacgtgaacgagatccttgcgccggcgcttgtgggcaaggaagagtcggaccaggccggcctcgacaagatgatgtgtgagctggacgggacaaagaacaagagcaagctcggcgcaaacgcgatcctgggctgctcgatggcgatcagcaaggccgccgcggcgaaggctggcgtgccgctgtacaggtacatcgcgagtctcgccgggacgaaggatatccgcctgcctgtgccgtgcttcaacgtgatcaacggtggcaagcacgccggcaacatcctgccgttccaggagttcatgattgcgccgacgaaggcgacgtcgttccgcgaggcgctgcgcatgggctcggaggtataccacgcgctcaaggtgatcatcaagagcaagtacggccaggacgccgtgaacgtcggcgacgagggcggcttcgcgccgccgatcaagcatatcgacgagccgctgccgatcctgatggaggcgattgagaaggctgggcacaagggcaagttcgcgatctgcatggactgcgcggcaagcgaagcgtatgacgcggagaggaagatgtacaacctgacattcaagaaccccgagccgacgtacgtgtccgcggcggagttgcaggcgacctatgagcgctgggtcgcggagtacccgctggtgtccatcgaggacccgttcgcggaagacaactttgacgagttctcggcgatcacgaaggcacttgccgggaaggctcagatcgtcggtgatgacctgacggtgacaaacgtgaagcgtgtgacgatggcgatcgagaagtctgcgtgcaactcgctgctactaaaaatcaaccagatcggcacgatcagcgagtcgatcgcagcggcgaagctgtgcatggagaacgggtggtctgtgatggtgtcgcaccgtagcggcgagacggaggacacgtacattgctgacctgtccgtgggcctgggaaccggccagatcaagaccggcgcgccgtgccgtggcgagcgcactgcgaagctgaaccagctgctgcgcatcgaggaggagatcgggtccactgctacgtacggctaccccggctgggcgtaa

SEQ ID NO: 4188 - protein, 429 aa, Leishmania major
MPIRKVYAREVLDSRGNPTVEVELMTEAGVFRSAVPSGASTGVHEACELRDGDKARYCGAGCTQAVKNVNEILAPALVGKEESDQAGLDKMMCELDGTKNKSKLGANAILGCSMAISKAAAAKAGVPLYRYIASLAGTKDIRLPVPCFNVINGGKHAGNILPFQEFMIAPTKATSFREALRMGSEVYHALKVIIKSKYGQDAVNVGDEGGFAPPIKHIDEPLPILMEAIEKAGHKGKFAICMDCAASEAYDAERKMYNLTFKNPEPTYVSAAELQATYERWVAEYPLVSIEDPFAEDNFDEFSAITKALAGKAQIVGDDLTVTNVKRVTMAIEKSACNSLLLKINQIGTISESIAAAKLCMENGWSVMVSHRSGETEDTYIADLSVGLGTGQIKTGAPCRGERTAKLNQLLRIEEEIGSTATYGYPGWA

SEQ ID NO: 4189 - DNA, 1284 bp, Chlorobium tepidum
  CDS (1)..(1284)
atgaaaattcaaaatgttaatgctatcgagattctcgattcgagaggaaacccaaccgttgaagtgaatttaaaacttgaagacggtactatttctcgtgcaatggttccaagtggagcatcaacgggagaaagagaagcaacagaacttagagatggcgacaaaaagcgctatggcggtaaaggtgttttaaaagctgtcgagaatgttaattcagccattgcaaaagccattgagaataaacactttaccaatcaacgagaattggactattttcttattgaacttgacgaaactaataacaaatctaaactaggggctaatgcgatacttggtgtttcaatggcttttgcccgtgcaaaagcgcaaagttcacgtactccgctatatcaatatttaggcggcagtaatgctcacattatgcctgttccctgtatgaatgtcatcaatggaggtaaacatgcagacaatacaatagactttcaggaatttatgattgctccacataacgctccatcgtttagagaatcaatccgtatgggcgaagaagtttttcacgccttgaaagctgtattaaagttaaaaggattaagcactggcgttggagatgaaggcggttttgctccagacttaaaatccaatgaacaagccgttgaaatgatattagaagggattactaaagctggttataagccaagtgtagatgttagtatttgtcttgacccggcttcaagtgaaatgtgggaaaatgggaaatacaaattctttaaaagtactcagaaattggtttccagtgatgaaatggtgaaattgtgggaaagctgggtaaatcaatacccaattgtattactagaagatggaatggctgaaaatgactgggaaggttggaaaaatcttacagatgtaatcggaaacaaaatcgagattgttggcgatgatttgttctgtactaataaatcaattttattaaatggtataaataaaggcgttgcaaattctatcctgataaaattgaatcaaataggtactgtgacagagactttagaaacgattgaacttgcatataaaaattcatataattgttttgtttcccatcggagtggagaaacggttgatagttttattgccgatttgacagtaggaattaatgctggacatcttaagagtggtagtggttgtcgaggagaaagaatagaaaaattcaatcaacttatgcggattgaaaatgaattgggtaaatcagctcaatttgcaggattgaaagcctttaaaaatgcaaaataa

SEQ ID NO: 4190 - protein, 427 aa, Chlorobium tepidum [sequence omitted]

SEQ ID NO: 4191 - DNA, 1651 bp, Hevea brasiliensis
  CDS (30)..(1367)
ctagatctaacgcaaccaagcttttatccatggcgattaccattgtctccgtcagggcgagacagatcttcgacagccgtggaaatccaaccgttgaggctgatgtgaaattatctgatggttatttggcaagagccgccgttccaagtggggcatccactgggatctatgaggccctcgaactaagggatggaggatcagactaccttggaaaaggtgtttccaaggctgttgagaatgttaacattattattggccctgcattggttggcaaggacccaactgatcaggttgggattgataacttcatggtgcaacaacttgatggaactgtaaatgagtggggttggtgcaaacaaaagcttggggcaaatgccatattagcagtgtctcttgcagtttgcaaggctggggctcatgtcaaggggattcccctttacgagcacattgctaacctcgctggtaacaagaatttggtgttgcccgttcctgctttcaatgtcatcaatggtggatcacatgccggaaataaacttgctatgcaggagttcatgattcttcctgtgggagcttcttcattcaaagaagctatgaagatgggtgctgaagtataccatcacttgaagtctgtgataaaaaagaagtatggtcaggatgcaacaaatgttggcgatgaaggtggttttgctcctaatattcaggaaaacaaggaaggacttgagttgctcaagactgccattgctaaagctggctacacaggaaaagtggttattggaatggatgttgctgcttcggaattttatggctcagatcaaacatatgatttgaacttcaaagaagagaacaataatggttcgcaaaagatctcaggtgaagctctcaaggacctctacaagtcatttgtagctgagtatcctattgtatcaattgaggatccatttgaccaagatgactgggcacactatgcaaagctaactagtgaaattggagagaaagtacaaattgtgggagatgatctcttagtcaccaatcctaagagggttgagaaggctatcaaagagaaagcttgcaatgctctccttctcaaggttaatcagattgggtctgtgactgagagcattgaagctgtgaagatgtccaagagagctggctggggtgtaatggcaagccaccgcagtggtgaaactgaggatactttcattgctgatttgtcagttggtttggccacgggtcagataaagacaggagcaccatgcaggtctgagcgccttgcaaaatataatcagctcctgcgaattgaggaagagcttggctctgaagctgtttacgctggagcaaacttccgcaaacctgtcgaaccctattagaatgtgaaaggttgtcagctgtcacgttggatctgagtagttgaaagattacatgaagtgaataagttttatgtaaactgggaccttttttgaataattttctaagaaattttgttctgaggttggaacagtattaaagcgaagttttttaaatttgaaatatgtgctaccaaaaccttagattgagttttataatttttttctagtcgggaacgtgtactttggatgcattgtaatcctaggtgaatgattttgctttgcatatcaaaatggtttggtttgct

SEQ ID NO: 4192 - protein, 445 aa, Hevea brasiliensis [sequence omitted]

SEQ ID NO: 4193 - DNA, 1287 bp, Pseudomonas syringae
  CDS (1)..(1287)
atggcaaaaatcgtcgacatcaaaggtcgtgaagttctcgactcccgtggcaatcccaccgtggaagcagatgtgctcctcgataacggcatcatcggcagcgcctgcgcgccgtccggtgcttcaaccggctcgcgcgaagcgctggagctgcgtgatggcgacaagagccgttacatgggcaagggtgttctgaaggctgttgcgaatatcaacggtccgatccgtgatctgctgctgggcaaagacccggttgaccagaaagcgctggatcacgcgatgatcgcgctggacgctaccgagaacaaggcaagtctgggcgccaacgcgatcctcgccgtctccctggcggcggccaaggcggctgcacaggatcaggacctgccactgtatgcgcacatcgccaacctcaatggcaccccgggcgtttattccatgccggttccgatgatgaacatcatcaacggtggcgagcatgccgataacaacatcgacatccaggaattcatgatccagccggtcggcgccaagagcttcgctgaagcgctgcgctggggtaccgagattttccatcacctcaaggccgtgctcaaggcgcgtggcctgaacaccgcggtcggtgatgaaggcggtttcgccccgaacctggcatccaacaaagaagcactcgaggctattgccgaagccgtcgccaatgcgggttacacgctgggcaccgacgtgaccctggcgctggactgcgcggcgagcgagttctataaaaacggcaagtacacgctcagcgaagaaggcgagtacagctctgccgagtttgccgaataccttgccgaactgacccgcaagcacccgatcatttccatcgaagacggtctggacgagtccgattgggacggctggaaagtcctcaccgagaagatcggcgagaaggtccagctggtcggtgacgacctgttcgtgaccaacaccaagatcctgaaagagggcatcgacaagaacattgccaactcgatcctgatcaagttcaaccagatcggcaccttgaccgaaacgctggaagccattcaaatggccaaggctgccggttacaccgccatcatctcccaccgctccggtgagaccgaagattcgaccatcgccgacctggccgtgggcacctctgccggtcagatcaagaccggttcgctgtgccgttccgaccgtgtttccaagtacaaccaactgctgcgcatcgaggagcaattgggctccaaagctgtgtatcgtggtcgtgccgagtttcgcggctga

SEQ ID NO: 4194 - protein, 428 aa, Pseudomonas syringae [sequence omitted]

SEQ ID NO: 4195 - DNA, 2016 bp, Toxoplasma gondii
  misc_feature (1715)..(1715): n is a, c, g, or t
  CDS (321)..(1655)
caacatactgtttccagctgcccattccctgagaacactcaggtgctccatgtacaaggtctttttcccagtcattgtacgtagcttcgcagtccgcaacaagctgctgtgtgccacgctttctgtcggatggtttgttagcactgtgcggtgcgcttggtagtgacatatcagagcttcctggaaagaacattcgagagcgaggaagggcaagtttgttgtaagcctcgagtagcttagcccccgatcatctgcagtgtcctgataatcaagctttggctggataaacgacgagttcactcatctacgcgcctgtcacgatggtggttatcaaggacatcgttgcacgcgagattttggattctcgcggcaatcccacaattgaagttgatgtatcaactgaaggaggtgtcttccgagctgcggttcctagtggagcgtctacgggtatttatgaggctctggagttgcgcgataaagatccgaaacggtacttggggaaaggcgtgctgaacgctgtagagattgtccgacaggaaatcaagccagcattgctgggcaaagatccgtgtgatcagaaaggtattgatatgcttatggtggagcagctggacggaacaaaaaacgagtggggctattccaagtcaaagctaggtgcaaatgccattttgggcgtgtcgatagcttgctgccgagcaggagcagcatcaaaaggcctaccactatacaaatacatcgctacacttgcagggaaaacgatcgataagatggttatgcctgtaccgtttttcaatgttatcaatggaggcgaacatgcaggcaatggcttggctcttcaagaattcctgatcgctcccgttggtgctccgaacatccgagaggcaattcgttatggatcagaaacgtaccaccacctgaaaaatgttataaagaacaagtatggcttggacgcgacgaatgttggcgatgagggcggctttgcaccgaacgtagccactgctgaagaggctctgaatctccttgttgaagccatcaaagctgcggggtacgagggtaagatcaagatcgcatttgacgcagctgcttcagagttctacaaacaagatgaaaaaaagtatgacctggattacaaatgtaagaccaagaatgcatccaaacacctgactggtgagaagctgaaggaggtttacgaggggtggctgaaaaagtatcccatcatatcggttgaagaccctttcgaccaagatgacttcgcaagtttctcagcttttactaaggatgtgggtgagaaaacacaggttataggggacgatattctggtaactaacattcttcgaattgagaaggcactcaaagacaaagcgtgcaattgcctgttactgaaggtaaaccagatcggctctgtaacagaggcaatcgaagcgtgcctccttgctcaaaaaagtggctggggggttcaggtttcccatagatccggtgaaacagaggattcatttattgccgatcttgtcgtgggccttcgctgtggccagatcaagagtgggtctccttgcaggtccgagcgactatgtaaatacaaccagcttatgcggattgaggagtccctaggagcggactgcgtatacgcgggagagagctttcgacacccaaaatgaagaaatgactcgcgaacgccgaaatggacttttcagcagagtgtcaaagccgaaccgtancatctcaagacggactacgsgtattgatgaacgcggatgtctctagaaaagcgagacctgrattagttcggatgccagttacatgtgacgccaagacagatgtgggcggcatcgtttcaggagtgcttttccacagtgtttgtgtggcaaacagcaatgtggtaggtgggtgtgcgtgaatatttccacaaactcaatgcatatcccacaaaacactcccaggtcgccaatgtccacactcctgccataaacgttaccaagtaaaaaaaaaaaaaaaaaaaaaaaaaaaaaaaaaaaaaaa

SEQ ID NO: 4196 - protein, 444 aa, Toxoplasma gondii
MVVIKDIVAREILDSRGNPTIEVDVSTEGGVFRAAVPSGASTGIYEALELRDKDPKRYLGKGVLNAVEIVRQEIKPALLGKDPCDQKGIDMLMVEQLDGTKNEWGYSKSKLGANAILGVSIACCRAGAASKGLPLYKYIATLAGKTIDKMVMPVPFFNVINGGEHAGNGLALQEFLIAPVGAPNIREAIRYGSETYHHLKNVIKNKYGLDATNVGDEGGFAPNVATAEEALNLLVEAIKAAGYEGKIKIAFDAAASEFYKQDEKKYDLDYKCKTKNASKHLTGEKLKEVYEGWLKKYPIISVEDPFDQDDFASFSAFTKDVGEKTQVIGDDILVTNILRIEKALKDKACNCLLLKVNQIGSVTEAIEACLLAQKSGWGVQVSHRSGETEDSFIADLVVGLRCGQIKSGSPCRSERLCKYNQLMRIEESLGADCVYAGESFRHPK

SEQ ID NO: 4197 - DNA, 1314 bp, Chlorobium tepidum
  CDS (1)..(1314)
atgtcagtcatcaccaggattcatgcccgccagataatggactcgcgaggaaacccgacggtcgaggtggatgttcatactgaaagttcttttggccgtgctgcggtgccaagcggcgcctcgacgggtgttcacgaagcggtcgagctgagggacaaggacaagagcgtttttctcggcaaaggggtgctcaaggctgtcgagaacgtcaacaccttgatcaatgatgctttgctgggcatggacgtgactgagcaggaggctatcgacgcgaagctcatcgagcttgacggtacgccgaacaagtcgaaactcggcgcgaacgccattcttggcgtttcactcgcctgcgcaaaagctggagccgaatattcagccctgccgctctaccgctacatcggcggaacgacggccaagaccctgcccgtgccgatgatgaacgtgctcaacggtggcgctcatgctgacaatacggttgatttccaggagttcatgattatgccgatcggcttcgagcgctattccgatgcgcttcggtgcggagccgaggtgtttcactcgctcaagtccctgctacacgatcgcggtctgagcacggcggtgggcgacgaaggcggatttgcgccgaacgtggagtccaacgaacaggccatcgagctggtgatcgaggccatcggcatggctggctacaaagctggtgcgccgactgacaggggaggcctcggcgatggtcatgtcatgatcgcactcgatccggccagctctgagttctacgacgccgaaaagaaaaagtacgttttcaagaaatcctccggacgcgaactttcgtcagaagagatggccagctactgggccgactgggcgagccgctatccgatcatctcgatcgaagatggcatggctgaggatgactgggaaggctggaagatgctgaccgacaagatcggcggccgtgtgcagcttgtgggtgatgacctgttcgtgaccaacagcaagcgccttgccgaaggtatcgagaagggcgtcggcaactcgattctcatcaaggtcaaccagatcggcactctgaccgaaacccttcaggccatcgagctggccaagcgcaacggctacacctcggtcatcagccatcgcagcggcgagaccgaagacaccaccattgcgcagatcgccgtggcgaccaacgccggacagatcaagaccggcagcatgtcgcgctccgaccgcatggccaagtacaacgagctgctcagaatcgaggaagagcttggcagcacggcgctctatccgggcatcggggccttccgggtctga

SEQ ID NO: 4198 - protein, 437 aa, Chlorobium tepidum [sequence omitted]

SEQ ID NO: 4199 - DNA, 1649 bp, Hevea brasiliensis
  CDS (28)..(1365)
ctagatctaacgcaccgagctttatccatggcgattaccattgtctccgtcagggcgagacagatcttcgacagccgtggaaatccaaccgttgaggctgatgtgaaattatctgatggttatttggcaagagccgccgttccaaggggggcatccactgggatctatgaggcccttgaactaagggatggaggatcagactaccttggaaaaggtgtttccaaggctgttgagaatgttaacattattattggccctgcattggttggcaaggacccaactgatcaggttgggattgataacttcatggtgcaacaacttgatggaactgtaaatgagtggggttggtgcaaacaaaagcttggggcaaatgccatattagcagtgtctcttgcagtttgcaaggctggggctcatgtcaaggggattcccctttacaagcacgttgctaacctcgctggtaacaagaatttggtgttgcccgttccggctttcaatgtcatcaatggtggatcgcatgccggaaataaacttgctatgcaggagttcatgattcttcctgtgggggcttcttcattcaaagaagctatgaagatgggtgctgaagtataccatcatttgaagtctgtgataaaaaagaagtacggtcaggatgcaacaaatgttggtgatgaaggcggttttgctcctaatattcaggaaaacaaggaaggacttgagttgctcaagactgccattgctaaagctgggtacacagggaaagtggttattggaatggatgttgctgcttctgaattttatggctcagataaaacatatgatttgaacttcaaagaagagaacaataatggttcacaaaagatctcaggagatgtgctcaaggacctctacaagtcatttgtaactgagtatcctattgtatcaattgaagatccatttgaccaagatgactgggagcactatgcaaagctaactagtgaaattggagtgaaagtgcaaattgtaggagatgatctcttagtcaccaatcctaagagggttgagaaggctatcaaagagaaagcttgcaatgctctcctcctcaaggttaatcagattggatctgtaactgagagcattgaagctgtgaagatgtccaagagagctggctggggtgtaatggccagccaccgcagtggtgaaacagaggatactttcattgctgatttgtcagtgggtttggccacgggtcagataaagacaggagcaccctgcaggtccgagcgccttgcaaaatataatcagctcctccgaatcgaggaagagcttggtgctgaagcagtttacgctggagctaacttccgcacacctgtcgaaccctattagaatgtgaaaggttgtcagctgtcacgttggatctgagtagttgaaagattacatgaagtgaataagttttatgtaaactgggaccttttttgaataattttctaagaaattttgttctgaggttggaacagtattaaagcgaagttttttaaatttgaaatatgtgctaccaaaaccttagattgagttttataatttttttctagtcgggaacgtgtactttggatgcattgtaatcctaggtgaatgattttgctttgcatatcaaaatggtttggtttgct

SEQ ID NO: 4200 - protein, 445 aa, Hevea brasiliensis
MAITIVSVRARQIFDSRGNPTVEADVKLSDGYLARAAVPRGASTGIYEALELRDGGSDYLGKGVSKAVENVNIIIGPALVGKDPTDQVGIDNFMVQQLDGTVNEWGWCKQKLGANAILAVSLAVCKAGAHVKGIPLYKHVANLAGNKNLVLPVPAFNVINGGSHAGNKLAMQEFMILPVGASSFKEAMKMGAEVYHHLKSVIKKKYGQDATNVGDEGGFAPNIQENKEGLELLKTAIAKAGYTGKVVIGMDVAASEFYGSDKTYDLNFKEENNNGSQKISGDVLKDLYKSFVTEYPIVSIEDPFDQDDWEHYAKLTSEIGVKVQIVGDDLLVTNPKRVEKAIKEKACNALLLKVNQIGSVTESIEAVKMSKRAGWGVMASHRSGETEDTFIADLSVGLATGQIKTGAPCRSERLAKYNQLLRIEEELGAEAVYAGANFRTPVEPY

SEQ ID NO: 4201 - DNA, 1284 bp, Pseudomonas syringae
  CDS (1)..(1284)
atgaaaacgcaaatccaggccattcatgcacgtgaaattctcgattcacgcggtaaccctaccgttgaagtcgacgtcaccttggagtgcggcgccatgggccgggcttcagtaccgtccggtgcctctacaggcgctcacgaagcagttgagttgcgtgacaaagatacacagcggtactccggcaagggagtgttaaaggccgttagcaatgtgaataccgaaatacttgagtctgtgaggggcatgaatgcgattgaccaggaacaaattgatcatttgatgattaagctggatggaacctctgataaatccaggcttggaggaaacgcgatcttgggcgtgagcctcgccgttgccagagcggcggcttctgcgctgaacttgcccttgttccaatatctgggcggcgagcaagcagcaagaatgcccgtcccgatgttcaatattctcaatggcggtgttcacgccaactggcaaggccctgactttcaggaattcatgattgcacctacaggggctggcagtttcaaggaagccttgcgatggggctccgaggtgtaccacgagctgaaagcggtgcttaaggacgccggctattcaacagcggtcggagatgagggcggctttgcgccggcactcaagaaaaactcagacgccattgagctgatcatcaaggcaatcgagagggctggttacacccctggatctcagatcgagatcgctatcgatccagcatccagcggcttctatgaaaacggcctttaccatctgcgctctgagggtcgtaaggtcgatgctcaagagctgattaatctctattcctcctgggtcgacaagtatccgattgcggtactggaagatggactcgcggaagacgattggtcaggctggaagctattgaatgcagctctgggtgaccggatcgagttggttggagatgacctatttgtcaccaatgtcgaacggattcagcgaggcatcacagaaaacgtcgccaatgccgtattgatcaaacctaatcaaatcggaacgctgactgagaccaaagccgccatcgaaatggcctatggggcaaattggggggcgatggtttctcatcgtagcggggagacggtggacagctccatcgctgatctgactgtcgcgatggggactggccatctcaagacaggagctccatgccggggggagcgggtcgagaaatacaatcagtttctgcgaatagaagaggatcttggcagccgtgcgttttatgcaggacatgatgcattcgtgcgctga

SEQ ID NO: 4202 - protein, 427 aa, Pseudomonas syringae [sequence omitted]

SEQ ID NO: 4203 - DNA, 1305 bp, Streptomyces coelicolor
  CDS (1)..(1305)
atgtccgcaacagcagtcgagcccgccgcggcgatcgagaccgtcaccgcccgccggatcatcgacagccgcggcaaccccacggtcgaggtcgacgtcgtcctggaagacgggtccctgggacgggcagccgtcccgtccggcgcctccaccggagcccgggaagcggtggagctgcgcgacgaagaccccacccgctggcacggcaagggcgtcgaccgcgcggtggcccatgtgaacggggagatcgcggcgtccgtgcgcggccgcgacgcggcggaccaggcgggtctcgacgccgcgctgatcgccctggacggcaccgccgcgaagtcccggctcggcgccaacgcgctcctcggtgtctccctcgccgccgccaaggccgccgccgcggcccgccgtcagcccctctaccgttacctcggcggcgccgacgcgcacctactgccgctgccgatgatgaacatcgtcaacggcggtgcccatgccgacaatccgctggacttccaggagttcatgatcgtgccggtgggtgcggacacgttcgccgaagccgtccgcatgggcagcgaggtcttccacaccctgcgccgggatctgctggccgccgggcactccaccggcgtgggcgacgagggtggcttcgcgcccgcgctgcgcaccgccgaggaggccctcgacttcgtggtggccgccatcgagcgcaccggctaccgcgccggcccggacatcggcctggtcatggacccggcgtcgtcggagttcttccgcgacggcgggtacgactacgcgggcgagggggtgcgccggtcccccgccgaacacgccgaccacctggccgggctcatcgacgcctacccggtcgtctccatcgaggacccgatggccgaggacgatctggacggctggcgcgaactgaccgaccgcgtcggcgaccggtgccagctcaccggcgacgacgtgttctgcaccgacgaggcacttgtgcgcgagggcatccgtaccggcgtcggcaactcggtcctggtcaaggtcaatcagatcggaaccctcaccgaggcactggcgaccgtggccacggcgcacgaggcgggctggaccgttgtcatgtcgcaccgctccggcgagacggaggacaccaccatcgcggatctcgcggtggcgacgggctgcggtcagatcaagaccggctcgctctcccgctccgaccgcacggccaagtacaaccgactcatccggatcgaggaggaactgggcgcctcggcacggttcgcgggccgctccgcgctgcgccgggtctga

SEQ ID NO: 4204 - protein, 434 aa, Streptomyces coelicolor [sequence omitted]

SEQ ID NO: 4205 - DNA, 1634 bp, Toxoplasma gondii
  CDS (27)..(1361)
tctaccgttactcaacttccaacaaaatggtggccatcaaggacatcactgctcgtcagatcctcgactcccgaggaaacccgaccgtcgaggttgacttgttgaccgatggcggctgcttccgtgccgctgtccccagcggcgcatccactggcatctacgaggcgcttgagctccgtgacaaggaccaaactaagttcatgggcaagggtgtgatgaaggccgtggagaacatccacaagattatcaagccggcgcttattggcaaggacccgtgcgaccagaagggtattgacaagctgatggtcgaggagctcgatggaactaagaacgagtggggctggtgcaagtcgaagctcggcgcgaacgcgatcctggccgtctcgatggcttgctgccgcgccggcgctgctgccaagggcatgcccctgtacaagtacattgccactttggctggaaacccgacagacaagatggtaatgcccgtcccgttcttcaacgtcatcaacggcggctcccacgcaggcaacaaggtcgcgatgcaggagttcatgatcgcccccgtcggcgcctccacaatccaagaggcgatccagatcggcgcggaagtgtaccagcacctgaaggtcgtcattaagaagaagtatggcctcgacgccacgaacgtcggcgacgagggtggcttcgcccccaacatcagcggcgccacggaggccctcgacttgctgatggaggccatcaaggtgtctggtcacgaaggcaaggtcaagattgccgccgacgtcgccgcttccgagttcttcctccaggacgacaaagtctatgacctagacttcaagactccgaacaacgacaagtcgcaacgcaagactggcgaagagcttcgcaacctgtacaaggacctgtgccagaagtatcccttcgtgtccatcgaggacccgttcgaccaggacgacttccacagctacgctcagctcaccaacgaggttggcgagaaggtccaaatcgtcggcgacgacctcctggtcaccaacccgacgcgcattgagaaggccgttcaggagaaagcgtgcaacggcctgcttctcaaggtgaaccagattggcacagtcagcgagtctatcgaggcctgccagcttgcccagaagaacaagtggggcgttatggtttctcaccgctccggtgagactgaggactccttcatcgctgacctcgtcgtcggtctccgcaccgggcaaatcaagactggcgccccgtgcagatccgagcgtctctgcaagtacaaccagctgatgcgtatcgaagagtcgctcggctccgactgtcagtacgccggcgctggcttccgccatcccaactaagtggaaacggagtttcgactacccaactgctcaattggggctgggtggtttgtccactctgcaacaagggcgtgacgagatcgttgcacatgcaactgccttttttgtgcttggtgggaaggagcactttcgcaggtgcagcaccgagttgcggttgatgggaatttcggaactgatttgtttcttgcatgccatcaccgaaggaacgagcagtttcgttgataatattggaaagtcttttgaaaaaaaaaaaaaaaaaaaaaaaaaaaaaaa

SEQ ID NO: 4206 - protein, 444 aa, Toxoplasma gondii
MVAIKDITARQILDSRGNPTVEVDLLTDGGCFRAAVPSGASTGIYEALELRDKDQTKFMGKGVMKAVENIHKIIKPALIGKDPCDQKGIDKLMVEELDGTKNEWGWCKSKLGANAILAVSMACCRAGAAAKGMPLYKYIATLAGNPTDKMVMPVPFFNVINGGSHAGNKVAMQEFMIAPVGASTIQEAIQIGAEVYQHLKVVIKKKYGLDATNVGDEGGFAPNISGATEALDLLMEAIKVSGHEGKVKIAADVAASEFFLQDDKVYDLDFKTPNNDKSQRKTGEELRNLYKDLCQKYPFVSIEDPFDQDDFHSYAQLTNEVGEKVQIVGDDLLVTNPTRIEKAVQEKACNGLLLKVNQIGTVSESIEACQLAQKNKWGVMVSHRSGETEDSFIADLVVGLRTGQIKTGAPCRSERLCKYNQLMRIEESLGSDCQYAGAGFRHPN

SEQ ID NO: 4207 - DNA, 1792 bp, Alligator mississippiensis
  CDS (49)..(1353)
gtcgtgtctgggcgctgccactgctgctgctgggtcccggtattcaaaatgtcgattctcaagatccacgctcgtgaaatctttgactcccgtgggaaccccactgttgaggtagatctctataccagcaaaggtctgttcagagctgctgttccaagcggtgcctcaactggaatctatgaggctctggagcttcgtgacaatgacaagactcgcttcatgggaaaaggtgtctcaaaagctgttgcgcacgtcaataaaacaattgcacccgcactgattagcaagaacatcagtgttgtggagcaggagaagattgaccgactgatgctggaaatggatggatcggagaataagtccaaatttggtgctaacgccattctgggcgtgtctctggccgtgtgcaaagctggtgctgctgagaagggtgtgcccctctaccgtcacattgctgatcttgctgggaatcctgaagtcatcctgccagttcctgctttcaatgtgatcaatggtggctcccatgctggcaacaagctggccatgcaggagttcatgatccttcctgttggtgctgagagcttcaaggaagccatgcgcattggtgctgaggtctaccacaacttgaagaatgtcatcaaggagaaatatggaaaggatgcgaccaatgtgggtgatgagggtggctttgctcccaacatcctggagaacaaagaagctctggagctacttaagaatgccatcaacaaggctggctacagtgacaaaattgtcattggcatggatgtggctgcctctgagttttaccgtgatggaaagtatgacttggacttcaagtctcctgatgaccccagcagatacatcactcctgaccagctggctgacctatacaagagctttgtcaagaactaccctgtggtgtccattgaagatccttttgaccaggatgactgggcagcttggaagaagttcactgcctctgtgggcatccaggttgttggtgatgacctgactgtaaccaaccctaaacgcattgctaaggctgtggacgacaaggcctgcaactgcctgttgctcaaagtcaaccagattggcagtgtgaccgagtccctgcaagcctgcaagcttgcccagtccaatggctggggtgtgatggtgagtcaccgttctggagagactgaagataccttcattgctgacctggtggttggtctctgcactggacagatcaagactggtgccccttgtagatctgagcgtctggctaagtacaaccagatcctgagaattgaagaggagcttggcagcaaggcgcgttttgctggcaggaacttcaggaacccccgcatcaactaagctgagcttgtcaggcagccgctgttccggataaaagcactagtcgcctaattagctcacaattccctgtactagaaggaagggcagctgaaggaacaagacctgtttgcaggtcctcttacccaagacaccctagatgacttcacctagtatgttttgttttgtttttttccccagctctgacctgttgttcttaagcacttctgcttttgtagaacagtccttgtgggggagtttctgtattaaaaaccctcttggaacaatgtttaaaggctccgctctgacctcgcgactgtgggcttaaaacactttcacccccatctcaatgtgtggagccttgtaacttggcagtgcagccccaggtacctgcaaacaaactgtagtgttcttgtgaggtaaaataaaagcatacgtaccgtaaaaaaaaaaaaaaaaaaaa

SEQ ID NO: 4208 - protein, 434 aa, Alligator mississippiensis
MSILKIHAREIFDSRGNPTVEVDLYTSKGLFRAAVPSGASTGIYEALELRDNDKTRFMGKGVSKAVAHVNKTIAPALISKNISVVEQEKIDRLMLEMDGSENKSKFGANAILGVSLAVCKAGAAEKGVPLYRHIADLAGNPEVILPVPAFNVINGGSHAGNKLAMQEFMILPVGAESFKEAMRIGAEVYHNLKNVIKEKYGKDATNVGDEGGFAPNILENKEALELLKNAINKAGYSDKIVIGMDVAASEFYRDGKYDLDFKSPDDPSRYITPDQLADLYKSFVKNYPVVSIEDPFDQDDWAAWKKFTASVGIQVVGDDLTVTNPKRIAKAVDDKACNCLLLKVNQIGSVTESLQACKLAQSNGWGVMVSHRSGETEDTFIADLVVGLCTGQIKTGAPCRSERLAKYNQILRIEEELGSKARFAGRNFRNPRIN

SEQ ID NO: 4209 - DNA, 1715 bp, Anas platyrhynchos
  CDS (28)..(1332)
gaacggaacgggtgcggggtgttcaagatgtccattctcaagatccatgcccgtgaaatctttgattcccgtgggaatcccactgttgaggtagacctctacaccaacaagggtctgttcagagctgctgttcccagcggtgcctcaactggaatttatgaagctctggaacttcgtgacaatgacaagacacgctacatggggaaaggtgtctcaaaagctgttgagcacatcaataaaacaattgcacccgcactgattagcaagaatgtcaatgtagtggagcaagacaagattgacaaactgatgctggacatggatggatcagagaacaaatctaaatttggtgccaacgccatcttgggtgtatctctggctgtatgcaaagctggtgctgctgagaagggtgtccccttgtaccgtcacattgctgaccttgctggaaacccagaagtcatcctgcctgttcccgctttcaacgtgatcaacggtggctcccatgctggcaataagctggctatgcaggagttcatgatccctccctgtggtgctgacagtttcaaggaggcaatgcgcattggtgcagaggtttatcacaatctaaagaatgtcatcaaggagaagtatggaaaggatgcaaccaacgtgggtgatgagggtggcttcgcccccaacatccttgagaataaagaagccctggagctgctgaagactgccatcggtaaggctggctactctgacaaggttgtcattggcatggatgtggctgcctcagagttctaccgcgatggaaagtatgacctggacttcaaatcccccgatgatcccagcagatacatttctcctgaccagctggctgacctgtacaagggctttgtgaagaactacccagtggtgtccatcgaggacccatttgaccaggatgactggggtgcctggaagaagtttactggcagcgttggcatccaagtggttggtgacgatctgactgtgaccaacccgaagcgtattgccaaggctgtggaggagaaagcctgcaactgcctcctcctcaaggtcaaccagattggatctgtgacagagtccctacaagcctgcaagcttgcccagtccaacggctggggcgtgatggtgagtcaccgctccggagaaacagaagataccttcattgctgacctcgtggtcgggctctgcactggtcagatcaaaactggtgccccctgccgatctgagcgtctagccaagtacaaccagctgctgaggattgaagaggagcttggcagcaaggcccgctttgctggaagaaacttcaggaacccccgtatcaactaagctgcgtggatcagacacccccgttctggtttatagcactagtcacctacttagatcacaattacttgtattagaaagatgagggcagctgaaggaaaaagaccagtttgcaggtcctctccctccctagatgactccttcacctagtgtttccaccagctctgatctgttacttgtaacgatctgcttttgtagaacaatcccagtgaggttttgtgttaaacatgctccggaaccgtgacccgttgacactgggcataagcaattcccttctctgcctgtctggtctttgatgtttggagctgtttgacttgcaggacagcaagaggtacctacaaacagctagtagtgtttttacatgtgataaataaaaagcatcaaac

SEQ ID NO: 4210 - protein, 434 aa, Anas platyrhynchos
MSILKIHAREIFDSRGNPTVEVDLYTNKGLFRAAVPSGASTGIYEALELRDNDKTRYMGKGVSKAVEHINKTIAPALISKNVNVVEQDKIDKLMLDMDGSENKSKFGANAILGVSLAVCKAGAAEKGVPLYRHIADLAGNPEVILPVPAFNVINGGSHAGNKLAMQEFMIPPCGADSFKEAMRIGAEVYHNLKNVIKEKYGKDATNVGDEGGFAPNILENKEALELLKTAIGKAGYSDKVVIGMDVAASEFYRDGKYDLDFKSPDDPSRYISPDQLADLYKGFVKNYPVVSIEDPFDQDDWGAWKKFTGSVGIQVVGDDLTVTNPKRIAKAVEEKACNCLLLKVNQIGSVTESLQACKLAQSNGWGVMVSHRSGETEDTFIADLVVGLCTGQIKTGAPCRSERLAKYNQLLRIEEELGSKARFAGRNFRNPRIN

SEQ ID NO: 4211 - DNA, 1305 bp, Bos taurus
  CDS (1)..(1305)
atgtccatcctgaaggtccacgccagagagatctttgactctcgtgggaatcccaccgttgaggttgatctcttcaccgcgaaaggtctcttcagagctgctgtgcccagtggcgcttcaactggaatctatgaggccctggagctccgggacaatgataagacgcgctacatggggaagggtgtctcaaaggctgttgagcacatcaataaaactattgcgcctgccctggttagcaagaagtcgaacgtcgtggagcaggagaagatcgacaagctgatgatagagatggatggcacagaaaaaaaatctaagtttggtgcgaacgccatcctgggcgtgtccctggctgtctgcaaagctggtgctgtggagaagggggtgcccctctaccgccacatcgccgacttggctggcaatgctgaggtcatcctgccagttccggctttcaatgtcatcaacggtggctctcatgctggcaacaagctggccatgcaggagtttatgatccttcctgttggggccgaaaacttccgggaggccatgcgcatcggagcagaggtttaccacaacctgaagaatgtcatcaaggagaaatatgggaaggatgccaccaacgtgggagatgagggcggctttgcccccaacatcctggagaacaaagaagccctggagctgctgaagaatgccatcggcaaggctggctacagcgacaaggtcgtcatcggcatggacgtagctgcctctgagttctacaggtcgggcaagtatgacctggacttcaagtcgcccgatgaccccagcaggtacatcacacccgacgagctggccaacctgtacaagtccttcatcagggactacccagtggtgtctatcgaagatcccttcgaccaagatgactgggaagcttggcagaagttcactgccagcgcagggatccaggtggtgggggatgatctcacggtgacaaccccaaagacgatcgccaagggcgtgaacgaaaaatcctgcaactgcctcctgctgaaagtcaaccagaatggctctgtgaccgagtctcttcaggggtgcaagctggcccatgccaacgggtggggcgtcatggtttctcatcgttcgggggagactgatgataccttcatcgctgaactggtggtggggctgtgcactgggcagatcaagaatggtcccccttgccgtactgagcgcttggccaagtacaaccagatcctcagaattgaagaggaattgggcagcaaggctaagtttgccggcaggaacttcagaaacccgttggccaagtaa

SEQ ID NO: 4212 - protein, 434 aa, Bos taurus
MSILKVHAREIFDSRGNPTVEVDLFTAKGLFRAAVPSGASTGIYEALELRDNDKTRYMGKGVSKAVEHINKTIAPALVSKKSNVVEQEKIDKLMIEMDGTEKKSKFGANAILGVSLAVCKAGAVEKGVPLYRHIADLAGNAEVILPVPAFNVINGGSHAGNKLAMQEFMILPVGAENFREAMRIGAEVYHNLKNVIKEKYGKDATNVGDEGGFAPNILENKEALELLKNAIGKAGYSDKVVIGMDVAASEFYRSGKYDLDFKSPDDPSRYITPDELANLYKSFIRDYPVVSIEDPFDQDDWEAWQKFTASAGIQVVGDDLTVTTPKTIAKGVNEKSCNCLLLKVNQNGSVTESLQGCKLAHANGWGVMVSHRSGETDDTFIAELVVGLCTGQIKNGPPCRTERLAKYNQILRIEEELGSKAKFAGRNFRNPLAK

SEQ ID NO: 4213 - DNA, 1727 bp, Gallus gallus
  CDS (35)..(1339)
gttgagccgggtgcggagcggagcggtgttcaagatgtccattctgaagatccacgcccgtgaaatctttgattctcgtgggaatcccactgttgaggtagacctctacaccaacaagggtctgttcagagctgctgttcccagcggtgcctcaactggaatctatgaagctctagaacttcgtgacaatgacaagacacgctacttgggaaaaggtgtctcaaaagctgttgagcacgtcaataaaacaattgcacctgcactgattagcaagaatgtcaatgtggtggagcaagaaaagatagacaaactgatgctggaaatggatggaacggagaacaaatctaaatttggtgccaatgccatcttgggcgtatctctggctgtttgcaaagctggtgctgctgagaagggtgtccccctgtaccgccacattgctgaccttgctggaaaccctgaagtcattctgcctgttcctgctttcaatgtcatcaacggtggctcccatgctggcaacaagctggctatgcaggagttcatgatcctccctgtgggtgctgacaccttcaaggaggcaatgcgcattggtgcagaggtctatcacaatctgaagaatgttatcaaggagaagtatggaaaggatgcaaccaacgtgggtgatgagggaggctttgcccccaatatccttgaaaataaagaagctctggagttgctgaagactgctattggcaaggctggctactctgacaaggttgtcattggcatggatgtggctgcctcagagttctaccgtgatggaaagtatgacctggacttcaaatcccctgatgatcccagcagatacatttctcctgaccagctggctgacctgtacttgggctttgtgaagaactacccagtggtgtccattgaagacccttttgaccaggatgactgggctgcctggaagaagttcactgccagtgttggcatccaagtggttggtgatgatctgactgtgaccaacccaaagcgtattgccaaggctgtggaggagaaatcttgcaactgcctgctccttaaggtcaaccagattggctctgtgacagagtctctgcaagcttgcaagcttgcccagtccaatggctggggtgtgatggtgagtcaccgctctggggaaacagaagataccttcattgctgatctggtggttggtctctgcactggtcagatcaaaactggtgccccttgccgatctgagcgcctagccaaatacaaccagctgttgagaattgaagaggagcttggcagcaaggcccgttttgctggaaggaacttcaggaaccctcgtatcaactaagctgtttggatcgtacaaccctgttctggtttaaagcactagtcacctgtttagatcagtttcctgtattagaaagataagggcagctgaaggaaaaagtcaagtttgcaggtcctctcccttccccctagatgactcctttacgtagtgttctcaccagctctgatttgttacttgtaatgctctgctgcttttctagaacagtctcagtggggttttgtgtggtaaacatcttctggaaccatgaccttttaatactgggcgtaaacacttctctgcctgtctgttcttcagtgtttggagctgtgacttgcaatgcagtaagaggtacctgcaaacagaaatagtagtgtttttacatgtgacaaataaaagcatccaacaaccc

SEQ ID NO: 4214 - protein, 434 aa, Gallus gallus
MSILKIHAREIFDSRGNPTVEVDLYTNKGLFRAAVPSGASTGIYEALELRDNDKTRYLGKGVSKAVEHVNKTIAPALISKNVNVVEQEKIDKLMLEMDGTENKSKFGANAILGVSLAVCKAGAAEKGVPLYRHIADLAGNPEVILPVPAFNVINGGSHAGNKLAMQEFMILPVGADTFKEAMRIGAEVYHNLKNVIKEKYGKDATNVGDEGGFAPNILENKEALELLKTAIGKAGYSDKVVIGMDVAASEFYRDGKYDLDFKSPDDPSRYISPDQLADLYLGFVKNYPVVSIEDPFDQDDWAAWKKFTASVGIQVVGDDLTVTNPKRIAKAVEEKSCNCLLLKVNQIGSVTESLQACKLAQSNGWGVMVSHRSGETEDTFIADLVVGLCTGQIKTGAPCRSERLAKYNQLLRIEEELGSKARFAGRNFRNPRIN

SEQ ID NO: 4215 - DNA, 1329 bp, Lactobacillus plantarum
  CDS (1)..(1329)
atgtctattattacagatatttatgctcgcgaagtcttagactcacgtggtaacccaactgttgaagttgaactttatactgaaagtggcgcatttggccgcggtatcgttccttcaggtgcctcaactggtgaacatgaagccgttgaattacgtgacggtgacaagagccgtttcatgggcaagggtgttactaaagccgttgacaatgttaacaagttaattgctaaggaaattgttggttacgatgtaactgaccaacgtgccattgaccaagctatgatcaagttagatggtactcctaacaaagctaagttaggcgctaacgctatcttaggtgtttccattgccgctgcacgtgctgctgctgacgaacttgaaatgcctttatacaactaccttggcggattcaacgctcacgttttaccaacaccaatgatgaacgttatcaatggtggggcccacgccaacaacgacgttgacttccaagaattcatgatcatgcctgttggcgcttcttcagttaaagaagctatccggatgggttcagaaactttccacaacttgaaagcgatcttgaacgaacgcggttactcaactgccgttggtgacgaaggtggttttgcgcctgacttgaagaacaacgaagaaccattcgaaatcttagttgaagctatcgaacgtgccggttacaagcctggtaaggatattgccattgcctttgactgtgccgcttcagaattctacaacgaagaaactggcaagtacgacttaaagggtgaaggcgaaaatggtcaatcatttactgccgaagaattcgttgacttacttgacagcattgttgacaagtacccaatcgtttctatcgaagatcctttggatgaaaacaactgggaagactggcaaatggcaactgccaagcttggtaagaaagttcaaatcgttggtgacgacttattcgttacgaacacggactaccttgcaaagggtatcaagatgggcgttgctaactcaatcttaatcaaggttaaccaaattggtactttaactgaaactgttgaagctatcgaaatggctaaagaagctggctacactgccatcgtttctcaccgttctggtgaaactgaagacacgaccattgctgacttagttgtcgcaatgaacgctggccaaatcaagactggttcaatgagccgtactgaacggattgctaaatacaatcaattaatgcggatcgaagaccaacttgaaagcacttcagaatacaaaggtatccacggtttctacaacttagacgaagctgcacggaacaccattactagcaagtaa

SEQ ID NO: 4216 - protein, 442 aa, Lactobacillus plantarum [sequence omitted]

SEQ ID NO: 4217 - DNA, 1527 bp, Python regius
  CDS (88)..(1392)
gattcggcacgaaaaaaaaaagcgctactattccaatttatttcttaggcgctgctgcagcggagagcttagccccagaccaataaaatgtccatcctcaagatccaagcccgtgaaatcttcgactcccgtgggaaccccaccattgaagtagacctctacaccaagaaaggtcttttccgagcagctgtccccagcggggcatcaactggcatctatgaagccctggaacttcgtgacaacgacaagacgcggttcctggggaaaggtgtctcaaaagctgtagagcacgtgaataaaacaattgcacccgcgctcgttaacaagaatgtaagtgtggtggagcaagaaaaaattgacaagctgatgattgaaatggatggatccgagaacaagtctaaatttggtgcaaatgcaattctgggagtctccctcgccgtgtgcaaggctggtgcggcggagaaggacatccctttgtatcgccacattgctgatcttgctgggaacaaagaagttattctgccggtccctgctttcaacgtgatcaatggtggctctcatgctgggaacaagctggcaatgcaggagttcatgattcttcctattggggcggaatgcttcaaggaagccatgcgcatcggcgcggaggtgtaccacaacctgaagaacgtcatcaaagagaagtatggcaaagatgccaccaacgtgggtgacgaagggggctttgcccccaacatcctggagaacaaggaagctctggagttgctcaagacggccatcagcaaggccggctacgcggacaagattgtcattggcatggacgtggcggcttccgaattttaccgtgacgggaagtacgacctggacttcaagtcccccgatgaccgcagccgatacatcactcccgatcagctggccgacctctacaagggctttgtcaagaattacccagtggtgtccatcgaagacccctttgaccaagacgactggcccgcgtggaagaagttcacggccgagtcggggatccaggtggtgggggatgacctgacggtgaccaaccccaagcgcattgccaaagctgtgcaggagaagtcctgcaactgccttctcctcaaagtgaaccagatcgggtcggtcaccgagtcactccaggcctgcaagctcgcccagtccaacggatggggtgtgatggtgagccatcgctccggagagacggaagacaccttcattgcagacttggtggtgggtctgtgcaccggacagatcaagactggtgctccctgccgatctgaacgtttagctaaatataaccaacttctgagaattgaagaggagctgggaagcaaggcccgttttgccggccggaatttcaggaacccccgggtcaactaaaaatgtggtactcggacgaggaatacgtttagtcccctctttctttagcacctgcatcttaagcaaagaagggcagctgatggaaccagtcgatgtttgcgagtcctcaatcctgtcattcccccccccccagga

SEQ ID NO: 4218 - protein, 434 aa, Python regius
MSILKIQAREIFDSRGNPTIEVDLYTKKGLFRAAVPSGASTGIYEALELRDNDKTRFLGKGVSKAVEHVNKTIAPALVNKNVSVVEQEKIDKLMIEMDGSENKSKFGANAILGVSLAVCKAGAAEKDIPLYRHIADLAGNKEVILPVPAFNVINGGSHAGNKLAMQEFMILPIGAECFKEAMRIGAEVYHNLKNVIKEKYGKDATNVGDEGGFAPNILENKEALELLKTAISKAGYADKIVIGMDVAASEFYRDGKYDLDFKSPDDRSRYITPDQLADLYKGFVKNYPVVSIEDPFDQDDWPAWKKFTAESGIQVVGDDLTVTNPKRIAKAVQEKSCNCLLLKVNQIGSVTESLQACKLAQSNGWGVMVSHRSGETEDTFIADLVVGLCTGQIKTGAPCRSERLAKYNQLLRIEEELGSKARFAGRNFRNPRVN

SEQ ID NO: 4219 - DNA, 1757 bp, Sceloporus undulatus
  CDS (94)..(1398)
tctagctgcaccccagtcctgcgctgcaagctctagctctgctcgttcgcgtggatcttttgcaggtgcccggctcagccccagacaagcaaaatgtccattctcaagctccatgctcgtgaaatctttgactcccgtgggaatcccaccgtggaggtagacctctacaccaacaagggtctcttcagagctgctgtaccaagtggcgcttccactggcatctatgaagccctggaactccgtgacaatgataagactcgtttcctggggaaaggtgtctcaaaagctgttgagcacgtcaataaaacaatagcacctgcactggttaacaagaaagtgaatgtggtggagcaagagaaaattgacaagctgatgctggagatggatggaacagaaaacaagtccaagttcggtgccaatgcaatcctgggcgtctccctggctgtttgcaaggctggagctgctgagaagggtgtccctttgtaccgccatattgctgaccttgcaggaaacgaggacgtcatcttgcctgtccctgctttcaacgtgatcaatggcggttcccatgctggtaataaactggccatgcaagaattcatgattctccctgtcggtgctgagaactttaaggaagccatgcgcattggtgccgaggtgtaccagaacttgaagaatgtcataaaggaaaagtatgggaaggacgccactaatgtgggtgatgagggtggctttgcgcccaacatcttggagaacaaggaagccctggagctgctgaagtctgccatcagcaaggctgggtacactgataagatagtcattgggatggacgtggctgcttcagaattctatcgcgatgggaagtatgacctggatttcaagtctcctgatgaccccagcagatacatcactcctgaccagctgtctgatttatataagggtttcatcaaaaattatccagtggtttccattgaggacccctttgaccaacatgactgggctgcttggaaaaaattcactgccagcgcaggcatccaggtggttggtgatgacctcaccgtgaccaacccaaggcgcattaccaaagcagtggaagagaagtcctgcaactgcctgctgctcaaagtgaaccagattggctcagtcacggagtcactgcaggcctgcaagcttgctcagaccaatggttggggtgtcatggtgagtcaccgctccggagagactgaggacaccttcattgcagacctggtggttggactctgcactgggcagatcaaaactggtgctccctgccgatctgaacgtctagccaaatataaccagattctgaggattgaagaggagctgggcagcaagggtcgttttgccggcagaaacttcagaaaccctcgtgtcaactaaaacccttgtgtttcagttgggccaccacgttcccctcctggttgagattgaaagcactagtcacctagctagaaccttcctctccctgtgctccccctccataatagtacctgtgtactgataaagggcagctgatggaaccagaccagtttgcaggtcctccctttttcaacgatcactcatccagtttgtgtcctcatttcatttctctcccccactcctgttccaactcccatctgttgcttttaaaagcactacttggctgctttttgtgggcaaacaatccccccttcattgggaatttgttgcatttttctgaatgaaacaggaaggaaacccttgggttaaaatttacccca

SEQ ID NO: 4220 - protein, 434 aa, Sceloporus undulatus
MSILKLHAREIFDSRGNPTVEVDLYTNKGLFRAAVPSGASTGIYEALELRDNDKTRFLGKGVSKAVEHVNKTIAPALVNKKVNVVEQEKIDKLMLEMDGTENKSKFGANAILGVSLAVCKAGAAEKGVPLYRHIADLAGNEDVILPVPAFNVINGGSHAGNKLAMQEFMILPVGAENFKEAMRIGAEVYQNLKNVIKEKYGKDATNVGDEGGFAPNILENKEALELLKSAISKAGYTDKIVIGMDVAASEFYRDGKYDLDFKSPDDPSRYITPDQLSDLYKGFIKNYPVVSIEDPFDQHDWAAWKKFTASAGIQVVGDDLTVTNPRRITKAVEEKSCNCLLLKVNQIGSVTESLQACKLAQTNGWGVMVSHRSGETEDTFIADLVVGLCTGQIKTGAPCRSERLAKYNQILRIEEELGSKGRFAGRNFRNPRVN

SEQ ID NO: 4221 - DNA, 1750 bp, Trachemys scripta
  CDS (48)..(1352)
cttccttctcctgcgctgctaacgccactgcggctcagatactcaaaatgtccatactcaagatctttgctcgtgaaatctttgactcacgtgggaaccccactgtggaggtagacctctataccagcaaaggtctgttcagagctgctgtacctagtggcgcctccactggaatctatgaggctctggaacttcgtgacaatgacaagactcgcttcctgggaaaaggtgtctcaaaagctgttgggcacgtcaataaaacaattgcacctgcactgattagcaagaacataaatgttgtggagcaagagaagattgacaaactgatgctggagatggatggatcagaaaacaagtccaagttcggggctaatgccattctgggtgtgtctctggctgtgtgcaaagctggtgctgctgagaagggggtccccctgtatcgtcacattgctgaccttgcaggaaacccagaagtcatcctgccagttcctgctttcaatgtgatcaatggtgggtcccacgctggtaacaagctggccatgcaggagttcatgatcctcccggttggtgctgagagcttcaaggaagccatgcgtattggtgctgaggtctaccacaacttgaagaacgtcatcaaggagaagtacggaaaggatgccaccaatgtgggtgacgagggtggttttgcacccaacatcttggaggacaaagaagctctggagctgctgaagactgcgatcagcaaggccggctatactgacaaggtggtcattgggatggatgtggctgcctcagagttctatcgcgatggaaagtacgacctggatttcaagtctcctgatgaccccagcagatacatcactcctgaccaactagctgatctgtacaagagctttatcaagagctacccattggtgtctgttgaagatccctttgaccaggatgactggtcagcttggaagaagttcactgccaccgtgggtgttcaggttgtgggtgatgacctgaccgtgaccaatccgaagcgtattgctaaacccgtggaggagaaatcatgcaactgcctgttgctccaagtgaaccagattggctctgtgacagagtccctgcaagcctgcaagcttgcccagtccaatggctggggtgtgatggtgagtcaccgttccggggagactgaagataccttcattgctgacctggtggttggtctctgcactggacagatcaagactggtgccccttgccgatctgagcgtctagctaagtacaatcagcttctgagaattgaggaggagctcggaagcaaggcccgctttgctggcaggaacttcaggaacccccgtatcaactaagctgtgtgggtcagacagcccctgttctggtttaaagcactagtcacctgattagatcattatttacctgtattagaaagaagggcagctgaaggaacaagaccagtttgcagggcctcaccctagactgtatttcacctagtgttccccagctctacctgttgctcttaagcgctttgctgcttttgtagaacagtccctctggggggtttgtgtattaaaaaattggaaccatgttttaagtccccactttgaccttgttgactgtgggcataaacatacttccccctgtttaagtgtgtggcgctgtgtaacttgcagtgcagcctgaggttcctgcaaacagaaatagtagtgttatgtgaggcaaataaaagcatcaaacaaccagcaaaaaa

SEQ ID NO: 4222 - protein, 434 aa, Trachemys scripta
MSILKIFAREIFDSRGNPTVEVDLYTSKGLFRAAVPSGASTGIYEALELRDNDKTRFLGKGVSKAVGHVNKTIAPALISKNINVVEQEKIDKLMLEMDGSENKSKFGANAILGVSLAVCKAGAAEKGVPLYRHIADLAGNPEVILPVPAFNVINGGSHAGNKLAMQEFMILPVGAESFKEAMRIGAEVYHNLKNVIKEKYGKDATNVGDEGGFAPNILEDKEALELLKTAISKAGYTDKVVIGMDVAASEFYRDGKYDLDFKSPDDPSRYITPDQLADLYKSFIKSYPLVSVEDPFDQDDWSAWKKFTATVGVQVVGDDLTVTNPKRIAKPVEEKSCNCLLLQVNQIGSVTESLQACKLAQSNGWGVMVSHRSGETEDTFIADLVVGLCTGQIKTGAPCRSERLAKYNQLLRIEEELGSKARFAGRNFRNPRIN

SEQ ID NO: 4223 - DNA, 1290 bp, Lactobacillus plantarum
  CDS (1)..(1290)
atggaaaaacaagttattgaaacggtaaaggctcgcgaaatttttgattcacggggtaatccaacagttgaggctgatgttattttgtcagatgggacgctaggacgcgcggaagtaccatcgggagcttcgactggagaaaaagaggcagttgaattacgcgatggtggtgatcgtttagccggcaaaggtgttcttaaggctgttaataatgttaatacggtcattaatcatgctttacatggtgctgacccatttaaccaagcccatattgatcaaatcatgattgacctagatggtacgcccaacaaagcgcgtctgggtgcgaatgctattttgggtgtttcaatggcaacggcacgagcggcggcaaacgcattacagcagccgctttatcgttacttaggtggcactgatttagagctaccccaaacatttcataacgtgatcaatggtggggagcatgcagataatggcattgatattcaagaattcatgattacaccggtcgaacgaaccagttttcgggatggttttgaaaagatcgtgaatacttatcatactttgaaaaaagttatcgaagatgccgggtacacgagtggtttaggtgatgaaggtggctttgcgcctgatcttaaaaactcagaagaagccttgcaaatgttacatgatgcgattattaaagctggttatacacctggtaaagaaattgcgattgcttttgacgcggcggcctcgtatttttataatcgaacgacccacaattatgactttgaaggcaaaacgtacacgccggcagctcttggcgattattatctgcagttattagcgaaatttccagaaatcgtttcaattgaggacccatacggggaagaggactgggataactttgcaagctttacagctgctcatggtgaccagcttcagattgtggctgacgatccggtttgcactaatccgcaattaattcggcaagcaattcagcgggggatggctaacaatattttaattaaattaaatcaaattgggaccgttaccgaaactttggccgcgattcggctagctcgcaaaaatggttatgccacgatgatgtcacaccgatctggcgaaactggtgatactttcgtcgctgatttcacagtggccaccaatgcggctcagctaaaagctggtgcgccagcccgctctgaacgcgttgaaaaatataatcaattattgcggattgaggaagaattaggtgctgacggtgctcggttggcacacttcccaaataacgtgatgtttgactaa

SEQ ID NO: 4224 - protein, 429 aa, Lactobacillus plantarum [sequence omitted]

SEQ ID NO: 4225 - DNA, 1655 bp, Alnus glutinosa
  CDS (139)..(1461)
ggtacggctccaattaacctgagcccctctacaaatacgtggcgcatgtcgtttcaccttaaccacgcaactaattgcaactctctcttctctctcagcacgcacacactctcagtgacaaagatctaaattccagctatggccgaaatcacgcacatcaaggcacgccagatcttcgacagccgtggcaatccgacggtcgaggcggaggtgacaacggcaaatggcgttgtttctagagccgctgttccaagtggtgcatccactggagtttacgaggcccttgaactaagagatggagggtcagactaccttggaaaaggtgttttaaaggctgttgacaatgtcaacaagatcatcggcccggccttgattggcaaggatgcaactgagcagactgctattgatattgattttatgttccaacaactcgatggaactgttaatgagtggggttggtgcaagcaaaagctcggagcaaatgccatactggcagtgtctcttgcagtctgcaaggctggggctagtgttaaaaaaatccctctttacaagcatattgcaaaccttgctggaaacccgaaattggtgttacctgttcctgctttcaatgtcattaatggtggatcacatgcaggaaacaagcttgcaatgcaggagttcatgattcttcctgtaggagcttcctctttcaaggaggccatgaagatgggtgtggaagtatatcaccacttaaaggctgtgattaagaagaaatatggtcaggatgcaacaaatgtcggtgatgaaggtggctttgctcctaatattcaggaaaacaaggagggtcttgaattgctcaaaactgccatcgctaaagctggttacgttgtcattggaatggatgttgctgcatctgaattttatgagaaggataaggatataactaacttcaaggaagagaacaatgatggttcacaaaagatctcggcagatcagctaaaagatttatacaagtcatttgtggatgaatatcctattgtatcaattgaagatccgtttgaccaagatgactgggaacactactcgaagctaaccgctgaaattggggagaaagtacaaattgtgggagatgatctcttggtcaccaatcccaagagggttgagaaggcaatcaaagagaaagcctgtaatgccctccttctcaaggtcaatcaaattggatctgtaactgagagcattgaagctgtaaaaatgtccaagcgagctggttggggtgtgatggcacaccgcagtggagagactgaggatactttcattgctgatctctctgtgggtttggccacgggtcaaattaagacaggagctccatgccggtcagagcgtcttgcaaaatataaccagctgttgcgtattgaagaggagcttggctcggaagcagtctatgctggagcaaatttccggacgcccgttgagccctattagtacttgaagcgttggatgagagaagttgttgtttacatgagatctgagaaaataagtttatatatatagaatggcttttagtcatggaacttgagaccttttcccaataatcttcacggctgttttgttccgagagcctagacagtgtcacagtgctgtactgaggaatttttcgaagttgaagcatgtttaat

SEQ ID NO: 4226 - protein, 440 aa, Alnus glutinosa
MAEITHIKARQIFDSRGNPTVEAEVTTANGVVSRAAVPSGASTGVYEALELRDGGSDYLGKGVLKAVDNVNKIIGPALIGKDATEQTAIDIDFMFQQLDGTVNEWGWCKQKLGANAILAVSLAVCKAGASVKKIPLYKHIANLAGNPKLVLPVPAFNVINGGSHAGNKLAMQEFMILPVGASSFKEAMKMGVEVYHHLKAVIKKKYGQDATNVGDEGGFAPNIQENKEGLELLKTAIAKAGYVVIGMDVAASEFYEKDKDITNFKEENNDGSQKISADQLKDLYKSFVDEYPIVSIEDPFDQDDWEHYSKLTAEIGEKVQIVGDDLLVTNPKRVEKAIKEKACNALLLKVNQIGSVTESIEAVKMSKRAGWGVMAHRSGETEDTFIADLSVGLATGQIKTGAPCRSERLAKYNQLLRIEEELGSEAVYAGANFRTPVEPY

SEQ ID NO: 4227 - DNA, 1484 bp, Alternaria alternata
  CDS (52)..(1368)
gcacgagcggcacgagacttgatcttacacatacaactacaatccttcatcatgaccatcaccaagatccacgcccgctccgtctacgactctcggggtaacccgactgtcgaggttgacattgtcaccgagaccggccttcaccgcgccatcgtcccctccggtgcctccacgggctcccacgaggcttgcgaactccgcgatggagacaagtccaagtggggtggtaagggtgtcaccaaggctgtcgccaacgtcaacgacaccattgcgcctgctctcatcaaggagaagctcgacgtcaaggaccagtccgccgtagacgcgttcctcaacaagctcgatggcaccacaaacaagaccaacctgggcgccaacgccattctcggtgtctcaatggccattgcaaaggctgccgctgccgagaagggtgtacctctctacgcccacatctccgacttggccggcaccaagaagccctacgttctccctgtacctttccaaaacgtcctcaacggtggctcgcacgctggtggccgtcttgctttccaagagttcatgatcgttccttgtgaggcccctaccttctccgaggccatgcgccagggagccgaagtctaccagaagctcaaggcccttgccaagaagacctacggacagtccgctggaaacgtcggtgacgagggtggtgttgcccctgacatccagaccgccgaggaggcccttgacctcatcaccaaggctattgaggaggctggctacactggcaagatcaagatcgccatggatgtcgcatcaagcgaattctacaaggccgacgagaagaagtacgatcttgacttcaagaaccccgacagcgacaagagcaagtggctcacatacgaacaactcgccgagatgtacaagtccctggccgagaagtaccccattgtcagcatcgaggaccccttcgctgaggatgactgggaggcttggtcttacttcttcaagacctacgacggccagatcgttggtgatgacttgaccgtcaccaaccccgagttcatcaagaaggccattgagctcaagtcttgcaatgctctcctcctcaaggtcaaccagatcggtaccatcactgaggccatccaggctgccaaggacgctttcggcgctggctggggtgtcatggtttctcaccgctctggcgagactgaggatgtcaccattgccgacattgtcgtcggactgcgatccggccagatcaagactggtgcacctgcccgatctgagcgtctcgctaagctcaaccagatcctccgtatcgaggaggagcttggtgacaacgccgtctacgccggtaacaacttcaggactgccgttaacttgtaagcgcttcttttgcagggtccggtagtgttagcgttgtgaggaaatgcgacgaataatgagttaagagcaaaggaaatatgtatacaaaatgcaacgatatatcctacaaaaaaaaa

SEQ ID NO: 4228 - protein, 438 aa, Alternaria alternata [sequence omitted]

SEQ ID NO: 4229 - DNA, 1392 bp, Bacteroides fragilis
  CDS (68)..(1357)
attaatagtgattcttccgcttcccataagtgagtaaatttgcagagactaaaaaacaagagaaacaatgaaaatagaaaaaattacaggacgagaaattctcgactcaagaggtaaccctacagtagaagtagacgtagtattggaatcaggcattatgggacgtgcatccgttccatcgggtgcatcgaccggtgaacacgaagcgcttgaactccgcgacggtgataaacatcgttatggcggcaagggtgtacagaaagcagtagagaacgtcaataaagtcattgctccgcatctgatcggtatgtcggccctcgaccaaataggcattgatcatgccatgttggcattggatggaacaaagacaaaagccaaactgggtgccaacgctattctgggtgtttcgcttgccgtagctaaagctgctgccaactatctcgatattcctctttacagatacatcggaggtacgaatacgtatgtattgcctgtaccaatgatgaacatcattaatggaggctcacacagtgatgctccgatagccttccaggagtttatgatccgtccggtaggtgcaagttcttttaaagaagggttgcgcatgggtgccgaagtattccatgctttgaaaaaagtattgaaagaccgtggtctgagtacagctgtcggtgatgaaggcggttttgctcccaacctggaaggaacagaagatgcacttaactctattcttgccgctatcaaagctgcaggctacgaaccgggcaaagatgtaatgattggcatggactgcgcctcttccgaattctatcatgacggtatttacgattacaccaaatttgaaggtgaaaaaggcaaaaaacgtacagctgacgaacaaattgactatttggaaaaacttatcaacgaatatccgattgattccattgaggatggtatgagcgaaaatgactgggaaggctggaagaaattgactcaacgcatcggggatcgctgtcagttagtaggcgacgatttattcgtaactaacgttgacttcctggcaaaaggtatcgaaaagggttgcgctaactctatcctgatcaaggttaatcaaatcggttcactgacagaaacactgaacgctattgaaatggcacaccgccatggatatacaacggtcacttcacaccgctcaggcgaaacagaagatgcaaccattgcagatattgccgtagcaaccaacagcggacaaatcaagaccggttctctaagtcgttcggaccgtatggcaaaatacaatcagctgcttcgtattgaagaagagttgggagaccgcgctgtatacggatataaacgaattgtagtaaaaggctaaacaaaatcatgatagcatagcatgataaaaggtta

SEQ ID NO: 4230 - protein, 429 aa, Bacteroides fragilis [sequence omitted]

SEQ ID NO: 4231 - DNA, 1269 bp, Bartonella henselae
  CDS (1)..(1269)
atgactataattgtcgatattattggacgtgaagtacttgatagccgaggtaatccaactgtagaagttgaagttcatttggaaaatggagctttgggccgtgctcttgttccctctggggcatcgacgggtgcccatgaagctgtagaactacgtgatggtggtacgcgctatcaaggaaaaggcgttaagaaagcgattgctgcaataaatggcgagattcttgaggaacttggtggacgagatgccagaaatcaaatcggcattgatcaagcaatgattgccttggatggaacaccaaacaaagcacgtcttggagctaatgcacttcttggtgtttcattggctgttgcaaaagcagcagcagagtcattgtctttacctctatatcgttatattggtggtacacaagcacatattcttccgacaccaatgatgaatattattaatggtggtgttcatgctgataacccgattgattttcaagaatttatgattattcctgtaggagcatctacgctaaaagaagcaattcgctatggtgctgaaatttttcatacgttaaaaaaacgtttaaaagatgcaggttataataccaatgttggtgatgagggtggctttgcacctcaatttaaaagcgccgagcaagcgattgattttattatggaatctataatagcatgtgggtataaaccaggtgaacaaattgcccttggtttagattgtgctgcaaccgaattttataaaaatggttcctatttttatgaaggtgaggggaaatatcgtgatgtgggggaacaggtagattatttagcacaacttattaaaacttaccctattatcacaattgaagatggtatggctgaggatgattgggaaggttggaagttactcactgactcgattggtaaaaaatgtcagcttgttggcgatgatttatttgtaacaaattctgcgcgtttgcgggatggtatcaaaatgggagcagccaattctattcttatcaaagttaatcagattggcacgctaagtgaaacgcttgatgctgtagaaacagcgcataaagcaggttatcgtgccattatatctcatcgttcaggtgaaacggaagattcttttattgcagatcttgccgttgcgaccaattgtgggcaaattaaaacgggttctcttgcacgttcggatagattagcaaaatataatcagcttattcgtattgaagaaatgctaggattgcaggcatgttatgcgggcaattggtattgttga

SEQ ID NO: 4232 - protein, 422 aa, Bartonella henselae [sequence omitted]

SEQ ID NO: 4233 - DNA, 1299 bp, Bifidobacterium longum
  CDS (1)..(1299)
atggcagtaattgaaagcgtgtacgcgcgtcagattctcgattcccgtggcaacccgaccgttcaggtcgttctggacaccgaagacggcgcccagggcctgggcctggttccgtccggcgcctccaccggtgaggctgaggcttgggagcgtcgcgatggcgacaagtccgtctacggcggcaagggtgttcttaacgcggtcaaggccgtgaacgaggtcatcgctccgaaggtcatcggcatggacgctgctgaccagcgcgctctggacgacctgatgatcgagctcgacggcaccccgaacaagggcaagctgggcgccaacgccatcttgggcgtctccctggctgctctgtacgcttccgccgagtccgccggcctgccgctgtaccgctacatcggcggtaccaacggccacatcctgccggtcccgaacatgaacatcatgaacggtggcgctcacgctgacttcgccaccgacattcaggagtacatgatctccccgtacggcttcgacacctactccgaggctctgcgcgctggcgttgaggtctaccacaccctgaagaacgtcctgaagaaggaaggcctgaacaccggcctcggcgacgagggcggcttcgccccgaagatgaagtccaacgaggactccctcaagtacatcatggacgctatctccgccgccggctacgagcctggcaagcagatcggcatctgcctggatgtcgcctcctccgagttctacaacaaggagaccggcaagtaccgcttcgacggtgaagagcgtgactccgcctacatgctcgactactacgagaacctcatcaacgagtacccgatcgtctccatcgaggacccgttcaacgaggaaggctgggaagactgggctgccatcaccgctcgcctcggcgatcgtctgcagttcgtcggcgacgacctgctggtcaccaacccggctcgtctgcagaaggccatcgacctcggcgccgccaactccctgctggtcaagctgaaccagatcggttccgtcaccgagaccctcgacgccatcgagctggccaccgccaacggctacacatccatggtttcccaccgctccggcgagaccccggacaccaccatctccgacctggctgttgctaagaacacccgccagatcaagaccggtgccccggcccgtggcgagcgcgttgccaagtacaaccgcctgctcgagatcgaggaggagctcggctccaccgctcagtacgccggctacagcgccttcaaggcctgcaagaagtacctggccaagtga

SEQ ID NO: 4234 - protein, 432 aa, Bifidobacterium longum [sequence omitted]

SEQ ID NO: 4235 - DNA, 1305 bp, Buchnera aphidicola
  CDS (1)..(1305)
atgtctaaaatattaaaaataattggtcgtgaaatcatcgattctagaggtaatcctaccatagaatgtgaagttttgcttgaaggaggttttgttggtttagcttcagtaccttccggagcatctacaggttcttttgaaacatgggaattaagagatcaagataaaaatcgatttatgggtaagggtgtgcaaaaagcagtagaaataataaataataaaattttctactctttaaaaaataaaaatgcaatagatcaatttgatatcgatcaaaccatgattaatttagatggtacagaaaacaaatctaatttaggttccaattcgattttgtcagtatctttagcaactgctaaagcagctgcatcttctaagggcatgcctttatatcaacacattgcagaaattaataatacaccaggcgtattttccatgcctttgccaatgattaatataattaacggtggaaaacacgcgaataataatattgatattcaagaatttatgatacaacctatttcagcaaaatccattacagaagctatacgtataggagcagaaatatttcattcattaggaaatttactaaaagataaaggaatgagtactacagtaggcgacgagggaggatatgctccaaattttaaatctaatgaagaagcattaaatgtaattcaagatgcagtacacaaaactaaatataagttaggaaaagatattacattagctatagattgcgcagcttctgagttatacaataaaactagaaaaaaataccaattcatcggagaaggaactgaatttagttcacaagaactaactcattatttaaaaaaattgtctaataaatatcctattatttctattgaagatggacaagacgaatcagattgggaaggttttttatatcaaacaaaagaattaggtaattcactgcaattagtaggagatgatttatttgttactaataaaaatatcttaaaaaaaggaataaaaaaaggtgttgcaaatgcaattttaataaaattaaatcaaattggaacattaactgaaacaattgaaactattaaaatagcaaaaaaatttaattatggtgttattatttctcatcgttcaggtgaaacagaagatacatcaatagcagatttatcagtaggaacagcatcagggcaaattaaaacaggatcaatgagtcgttctgatagaacttctaaatacaatcaattaatcagaatagaagaaatattaaataaaaaaagagcgcctttctacggactaaaagaagtaaaatcatctttttaa

SEQ ID NO: 4236 - protein, 434 aa, Buchnera aphidicola
MSKILKIIGREIIDSRGNPTIECEVLLEGGFVGLASVPSGASTGSFETWELRDQDKNRFMGKGVQKAVEIINNKIFYSLKNKNAIDQFDIDQTMINLDGTENKSNLGSNSILSVSLATAKAAASSKGMPLYQHIAEINNTPGVFSMPLPMINIINGGKHANNNIDIQEFMIQPISAKSITEAIRIGAEIFHSLGNLLKDKGMSTTVGDEGGYAPNFKSNEEALNVIQDAVHKTKYKLGKDITLAIDCAASELYNKTRKKYQFIGEGTEFSSQELTHYLKKLSNKYPIISIEDGQDESDWEGFLYQTKELGNSLQLVGDDLFVTNKNILKKGIKKGVANAILIKLNQIGTLTETIETIKIAKKFNYGVIISHRSGETEDTSIADLSVGTASGQIKTGSMSRSDRTSKYNQLIRIEEILNKKRAPFYGLKEVKSSF

SEQ ID NO: 4237 - DNA, 1296 bp, Buchnera aphidicola
  CDS (1)..(1296)
atgtcaaaaattaaaaaaataatttctcgagaaataattgattcccgaggatatccaacgatcgaatctgaagtacacttacaaaacggatctattggacttgcttcaattccttcaggagcttctacaggttcgagagaagcactagaattacgagataacgatccattacgatattttgggaaaggcgtaaaaacagctgtatctatagttaatacttctatatccagtgctatatataaccaagatgcatatgatcaagaaaacattgataaaattatgattaatttagatggaactaaaaataaatctaaaatcggtgctaattctattttatctgtatcaatagcaacggcaaaagctgctgcacaatctaaaaaaatacctttatatcaatacatttctgaattgcacggaatcaaagaagaattactgatgccattaccaatgatgaatattattaatggaggaaaacatgcagacaataacattgacatacaagagtttatgatacaacccattaaagcaaatacgattaaagaagctattcaaataggagctgaagttttttatacgttaggattgattctaaaaagaagaggttttaatactactgtaggagatgaaggaggatatgctccaaatttaaaatctaatgaatcagcatttttaatattatcagaagcagtttcacaatctggatacatgttaggcaaagacattactttttgtatagactgtgcagcttctgagctatacaatagcaaaactaaaacatataaactaacaagcgaacaaaaaaaatttacttcatatgaatttacaaattatttaagtgctttagttgataaatatcccattacatctatcgaagatgggctagatgaatcagattggaatggatttaaatatcaaacaaaaaaattaggaaaaaaaatacaattagtgggtgatgatttattcgtaactaatactaatatacttaaaaagggaatacaaaacaacattgctaatactattttaatcaaattaaatcagataggaacattaactgaaactttaaatgctataaaattagcacaaaattcaaattataatactgttatttcgcatagatccggagaaactgaagatacgacaatatctgatttagctgtaggaacaaactctggacaaataaaaactggttctgtctgtcgatcagaacgtacagctaaatataatcaactaatacgcatagaagaaaaattgggagcaaaaactaaaatatttaaaaatttttattttaatatttaa

SEQ ID NO: 4238 - protein, 431 aa, Buchnera aphidicola [sequence omitted]

SEQ ID NO: 4239 - DNA, 1305 bp, Caenorhabditis elegans
  CDS (1)..(1305)
atgccaatcaccaagatccacgctcgccaaatctacgactcccgcggaaacccaactgttgaggttgatcttttcactgagaaaggagtcttccgtgccgcagttccatctggagcttctactggagttcatgaggccctcgagcttcgtgacggtgacaaggctgttcacctcggaaagggggttctcaaggccgtctcgaacatcaacgagaagatcgctccagctctgatcgccaagggattcgatgtcactgcacagaaggacattgacgacttcatgatggctttggatggatcggaaaacaagggaaacctcggagctaacgccattctcggagtttcacttgctgtcgccaaggctggagccgtacacaagggactcccactctacaagtacatcgccgagcttgcaggaactggaaaggttgtgctccctgttccagccttcaacgtcatcaatggtggatctcacgctggaaacaagctcgctatgcaagaattcatgattcttccagttggagcttccagcttcgctgaagccatgcgcatgggatcagaagtctaccaccacttgaaggctgaaattaagaagagatatggactcgatgccaccgctgttggagatgaaggaggtttcgctccaaatattcaagacaacaaggaaggacttgaccttctcaacactgccatcgacaaggctggatacactggaaagatttccattggaatggatgtcgcagcatcggaattcttcaaggacggaaagtacgatttggatttcaaaaacccagcttcagactcctccaagtggctctctggagagcaactgaccgagctctaccaatctttcatcaaggagtatccagttgtctctattgaggatgctttcgatcaggatgattgggataactggggcaaattccacggtgccacttccattcagcttgtcggagacgatttgactgtaaccaatccaaagagaattcaaactgccatcgacaagaagtcatgtaactgcctccttctcaaggttaatcaaatcggatccgtcacagagtcaatcgaagcagccaagctctcccgtgccaatggatggggagttatggtctctcacagatccggagagactgaagacacttttatcgctgatctcgttgttggacttgccactggacaaatcaagactggtgctccatgccgttctgagcgtttggccaagtacaaccagcttctccgcatcgaagaggaactcggagctgatgctgtttacgctggacacaacttcagaaacccacaagtgtag

SEQ ID NO: 4240 - protein, 434 aa, Caenorhabditis elegans
MPITKIHARQIYDSRGNPTVEVDLFTEKGVFRAAVPSGASTGVHEALELRDGDKAVHLGKGVLKAVSNINEKIAPALIAKGFDVTAQKDIDDFMMALDGSENKGNLGANAILGVSLAVAKAGAVHKGLPLYKYIAELAGTGKVVLPVPAFNVINGGSHAGNKLAMQEFMILPVGASSFAEAMRMGSEVYHHLKAEIKKRYGLDATAVGDEGGFAPNIQDNKEGLDLLNTAIDKAGYTGKISIGMDVAASEFFKDGKYDLDFKNPASDSSKWLSGEQLTELYQSFIKEYPVVSIEDAFDQDDWDNWGKFHGATSIQLVGDDLTVTNPKRIQTAIDKKSCNCLLLKVNQIGSVTESIEAAKLSRANGWGVMVSHRSGETEDTFIADLVVGLATGQIKTGAPCRSERLAKYNQLLRIEEELGADAVYAGHNFRNPQV

SEQ ID NO: 4241 - DNA, 1275 bp, Chlamydophila caviae
  CDS (1)..(1275)
atgttagaagttgtcatttccgatatccaagctagagaaattttagactccagaggatatccaacattatatgttaaagtaactacagacgcaggcactttcggagaagcttgtgtgccttcgggagcttctacaggaataaaagaagctttagaacttcgtgatcaagatagttctcgattccaagggaaaggtgttttacaagctgtaaaaaatgtgaaagaagtacttctccctgtcttacaaggaatcagtatattcgatcaaatccttatcgattctatcatggtagaggctgatggcacaccaaataaagagaagctaggggcgaatgccattttaggagtttctttagcatctgcaaaagctgctgctgctacattaggacgttctttttaccgttatctaggaggatgtttcgctcatgtgcttccttgccctatgatgaatcttattaacggagggatgcacgcaaataacggtttgcaattccaagagtttatgattcgtcctatcggagcaacttctctaaaagaagctgtacggatgggcgctgatgtttttcattctttgaaaaatatcctcaatgaaaaaaacttagctacaggggttggtgatgaaggaggctttgctccacaactaaaatctaactctgaagcattagatcttcttgtacttgctatcgaaaaagcaggtttccaacctggagaagacatctccctagctctcgattgcgcagcttcttccttctatgatacgaaagcagaaacctatgatggaaagagctatgaagaacaagtgaacatacttgccgatctctgtgatcgctatcctatcgattctatagaagatggcctcgctgaagaagattttgacggttgggaattgctaacagcagaacttggcgaaagcattcaaatcgttggagatgatctctttgttaccaatcctgaattaatagctgatggcattagtagaggtcttgctaatgctgtgttaatcaaaccaaatcaaattggtacattaacagaaacttcagaagctatacagcttgcccatagccaagggtatacaactattctttctcacagatctggagaaaccgaagatacaacaattgcagatcttgctgtagctttcaatacaggacaaattaaaacaggatcgctatcacgttctgagcgtattgccaagtacaacaggcttatggcaatagaagaagaactcggtcctgaaggactatttaaagattctaatccattttctggagaatag

SEQ ID NO: 4242 - protein, 424 aa, Chlamydophila caviae [sequence omitted]

SEQ ID NO: 4243 - DNA, 1296 bp, Clostridium perfringens
  CDS (1)..(1296)
atgaaacaatatattgaaataattgacgtggtagcaagacaaattttagattcaagatgcttcccaacagtagaggttgaagtttatttagaagatggaacagttggaagagctgcagtaccttcaggagcttcaacaggtatatatgaagctgttgaattaagagatggagataaagataaatacctaggaaaaggtgttgaaaaggcagtagcaaatgttaatgatacaattgcagaagaaataataggattaaatgtattagatcaagcttacatagataaaactcttatagagttagatggaactaacaataaaggtaaattaggagctaacgcaatcttaggagtttctttagcagtagctcaagcagcagctaactatttaggaatgcctttataccaatacattggaggagtaaatgctaaagttttaccagttccaatgatgaacataataaacggaggaagccatgctgataactcagtagatatccaagagtttatgattatgccagtaggctttgattgctttgaaagagctgtaagagcttgtgcagaagtttaccatgcattaaagaaaactttaaattcaaagggatactcaactggtgttggtgatgaaggtggatttgctccaaacttaaaatcaaatgcagaagcaatagaagttatattagaagctattgaaaaagcaggttatgagccaggaaaagaattcttcatagcaatagatgcagcttcatctgagtactacaaagatggaaaatatgttttagagcatgaaggaaaaactttaacagctgctgaaatggttgacttctttgaagattgggttaataaatatccaataatctcaattgaagatggtatggctgaagaagactgggaaggttggaagctaatgactgaaagacttggtaaaaaagttcaattagttggtgatgacctatttgttacaaatacagaaagattaaaaactggtatagaaaaaggaattgctaactcaattctaataaaacttaaccaaataggaacattaacagaaacattaaatgctatagaaatggctaacagagcaggatatacagctgttgtttctcatagatcaggagaaactgaagatacaactatagcagatttagttgttgcagttaatgcaggtcaaataaaaactggtgctccagctagaagtgaaagagtagctaaatacaaccaattaatcagaataaatgaagaattaggtgaagtagctgaatacagaggaagaaatgcattcttcaacctttcaaaataa

SEQ ID NO: 4244 - protein, 431 aa, Clostridium perfringens [sequence omitted]

SEQ ID NO: 4245 - DNA, 1278 bp, Corynebacterium efficiens
  CDS (1)..(1278)
atggctgaaatcatgcacgtatttgctcgcgagatcatggattcccgcggtaacccgaccgtcgaggcagaggttttcctggatgacggttcccacggcgttgccggcgttccctccggagcgtccaccggtgtccacgaggcgcacgagctgcgtgacggcggagatcgttacctgggcaagggtgttctcaaggctgttgagaacgtcaacgaggagatcggcgacgagctggccggcctggaggccgacgatcagcgtctcatcgatgcggccatgatcaagctggacggcaccgagaacaagtcccgcctgggcgccaacgccatcctgggtgtctccatggctgtggccaaggccgccgcggattccgcaggtctgcccctgttccgttacatcggtggcccgaacgcccacgtgctgcccgtcccgatgatgaacatcatcaacggtggcgcacacgccgactccggtgtggatgtccaggagttcatgatcgccccgatcggtttcgactccttctccgaggccctgcgcgcaggcgcggaggtctaccacgcactgaagaaggtcatcaacgagaagggcctgtccaccggtctgggcgatgagggcggcttcgccccgtccgtcgagtccacccgtgcagccctggacctcatcgtcgaggccatcaagaaggccggcttcgagccgggcaaggacatcgccctggccctggatgttgcttcctccgagttcttcaaggacggcaaataccacttcgagggtggcgagcacaccgccgaggagatggcgaacgtctacgccgagcttgtcgacgagtacccgatcgtctccatcgaggatccgctgcaggaggacgactgggatggctacgtcgcactgaccgcccagatcggtgacaaggttcagatcgtcggcgatgacttcttcgtcaccaacccggcccgtctgaaggagggcatcgccaagaaggccgccaactccatcctggtcaaggtcaaccagatcggtaccctcaccgagaccttcgacgccgtcgacatggcacaccgcgcaggttacacctccatgatgtcccaccgttccggtgagaccgaggacaccaccatcgccgatctggctgtcgcgctgaactgcggccagatcaagaccggtgcaccggcacgttccgaccgtgtggccaagtacaaccagctgctgcgcatcgagcagctgctgggtgacgcagccgtctacgccggccgttccgcgttcccacgtttccagggctag

SEQ ID NO: 4246 - protein, 425 aa, Corynebacterium efficiens [sequence omitted]

SEQ ID NO: 4247 - DNA, 1278 bp, Corynebacterium glutamicum
  CDS (1)..(1278)
atggctgaaatcatgcacgtattcgctcgcgaaattctcgactcccgcggtaacccaaccgtcgaggcagaggttttcctggatgacggttcccacggtgtcgcaggtgttccatccggcgcatccaccggcgtccacgaggctcatgagctgcgtgacggtggcgatcgctacctgggcaagggcgttttgaaggcagttgaaaacgtcaacgaagaaatcggcgacgagctcgctggcctagaggctgacgatcagcgcctcatcgacgaagcaatgatcaagcttgatggcaccgccaacaagtcccgcctgggtgcaaacgcaatccttggtgtttccatggctgttgcaaaggctgctgctgattccgcaggcctcccactgttccgctacatcggtggaccaaacgcacacgttcttccagttccaatgatgaacatcatcaacggtggcgctcacgctgactccggtgttgacgttcaggaattcatgatcgctccaatcggtgcagagaccttctctgaggctctccgcaacggcgcggaggtctaccacgcactgaagtccgtcatcaaggaaaagggcctgtccaccggacttggcgatgagggcggcttcgctccttccgtcggctccacccgtgaggctcttgaccttatcgttgaggcaatcgagaaggctggcttcaccccaggcaaggacatcgctcttgctctggacgttgcttcctctgagttcttcaaggacggcacctaccacttcgaaggtggccagcactccgcagctgagatggcaaacgtttacgctgagctcgttgacgcgtacccaatcgtctccatcgaggacccactgcaggaagatgactgggagggttacaccaacctcaccgcaaccatcggcgacaaggttcagatcgttggcgacgacttcttcgtcaccaaccctgagcgcctgaaggagggcatcgctaagaaggctgccaactccatcctggttaaggtgaaccagatcggtaccctcaccgagaccttcgacgctgtcgacatggctcaccgcgcaggctacacctccatgatgtcccaccgttccggtgagaccgaggacaccaccattgctgacctcgcagttgcactcaactgtggccagatcaagactggtgctccagcacgttccgaccgtgtcgcaaagtacaaccagcttctccgcatcgagcagctgcttggcgacgccggcgtctacgcaggtcgcagcgcattcccacgctttcagggctaa

SEQ ID NO: 4248 - protein, 425 aa, Corynebacterium glutamicum
MAEIMHVFAREILDSRGNPTVEAEVFLDDGSHGVAGVPSGASTGVHEAHELRDGGDRYLGKGVLKAVENVNEEIGDELAGLEADDQRLIDEAMIKLDGTANKSRLGANAILGVSMAVAKAAADSAGLPLFRYIGGPNAHVLPVPMMNIINGGAHADSGVDVQEFMIAPIGAETFSEALRNGAEVYHALKSVIKEKGLSTGLGDEGGFAPSVGSTREALDLIVEAIEKAGFTPGKDIALALDVASSEFFKDGTYHFEGGQHSAAEMANVYAELVDAYPIVSIEDPLQEDDWEGYTNLTATIGDKVQIVGDDFFVTNPERLKEGIAKKAANSILVKVNQIGTLTETFDAVDMAHRAGYTSMMSHRSGETEDTTIADLAVALNCGQIKTGAPARSDRVAKYNQLLRIEQLLGDAGVYAGRSAFPRFQG

SEQ ID NO: 4249 - DNA, 2167 bp, Desulfovibrio vulgaris
  CDS (376)..(1680)
cccgggacatcgcgcgggtgagcagctgtttcgaccacgtcaggcccgaccttttgctgcagggcctgcggctgttgtatctggaacgcgacgcacgctagggtttgcggcgcgccgcgtcggggccggattttcgacgtgccgcatggcggcatgggtatttgctgatatgacgacgctctgcgtctgattgcacgtttcgacgctccgcgtcaggcatgactcacgacgcttcgcgtctggcagcacgtaacgacgctcagcgtctggcatgacttatgacgcttcgcgtctggcatgacttgcgacgcacagcgtctggcatcgacattccgaccgaaacccgacgaacatgaaaggaccaaggagatgcagatgagcaccatcgtatccgtctgggcgagggaaatccttgactcccgcgggaaccccaccgtcgaggtggaagtctccctggaatcgggccacaccggccgcgccgccgtaccttccggcgcctctaccggctcccgtgaagcgctggaaatgcgcgacggcgacaagggccgctacaagggcaaaggcgttgagaaggccgtggacaacgtgatgggtgaaatcgccgaagccatcgtggggctggattccctgcgtcaggtgcaggtggacaacaccctgctggacctcgacggcaccgacaacaagtcgcgtctgggcgccaacgccatgctgggcgtgtccctggccaccgcgcgcgccgcgtccagctttctgggcctgccgctgtaccagtacctgggcggcgtgaacgccaaggtgctgcccgtgccgctgatgaacatcatcaacggcggcgcccacgcgcccaacaatctggatatccaggaattcatgatcatgcccatcggcgcggccaccttccgcgatgcgctgcgcatgggcgccgagaccttccacaccctgaaggcgctgctggccgccgacggccacgtgaccagcgtgggcgacgagggcggctttgcccccaacctgaagaaccacgacgaggccttccgctacatcatgaaggccatcgaggaagctggctacattcccggcgcggaaatcgcgctggccatcgacgctgctgcttccgagttccacaaggacggcaagtacgtgctggcgggtgaaggcaagaacctgtccaattccgagatggtggagtggctgggcgagttcaccacccgctacccgctgatctccatcgaggacggcctggccgaagccgactgggacggctggcgcgagctgacctacaagctgggcgacaccatccagctggtgggcgacgacatcttcgtgaccaacccggacatcctggccgagggcatcgacgagggcgtggccaactccattctcatcaagctgaaccagatcggtaccctgaccgagaccctggacaccatcgagatggccaagcaggccgcctacaccacggtgatttcgcaccgttcgggcgagaccgaggaccacttcatctcggatctggccgtgggcctgaacgccgggcagatcaagaccggctccttgtgccgcagcgaccggctggccaagtacaaccagctgctgcgcatcgaggaagacctggacgatacgggcatctacttcgggcccatgatgagctcgcacttcggcttcgaggaagaaggcgaggagtagcgggctgtcgcgtacatcgggggagggggcctgcgtggctccctcccttttgctttcgggcggtgggagaaaggccggaaagccggaggaagcgccgagtgcgtggtggcggcagtcacggattgcttgcgggccggcagaaaatttcagtttgaacccgccctcaggacaggggggaaggggggcatgctcccccggcgggtacggggcagcgccccgatatttcgaaggccgcccgctctcacacggagaagcagggccgcgacacatggcggatgcgaccggaacgcaggacggtgccgggcagcggaatcagacaggcggcgcgcacgcgcgccggatttcgggaggttggagacatgttgctgctcgacggcaaggcgacggctgcggccattcgcgcggagctgaaggaagaagtggcggcggggcttgcggcggcgggccgcgcgccggggttggcggtcattctggtgggtgaggatcc

SEQ ID NO: 4250 - protein, 434 aa, Desulfovibrio vulgaris [sequence omitted]

SEQ ID NO: 4251 - DNA, 1469 bp, Eimeria tenella
  CDS (27)..(1364)
ctttcaagccgacagtcccagcgaagatggtggccatagtcgaggtcaaggccagggaaatcttggactctcgggggaacccgacggtggaggtggacctgaagactgagcagggctgcttccgcgccgcagtgccctcgggggcctcgacgggcatttacgaggcgctggagctgcgcgacggcgacaagacccgctacaacggcaagggggtgctgaaggccgtggagaacgtgaacaaggtgctggcgccggcgctggtggggaaggactgccgcgagcaggcagcgctggaccggctgatggtggaggagctggacggcagcaaaaacgagtggggctggagcaaaagcgtgctgggcgccaacgcaatcctcgccgtgtcgatggccctgtgcagggccggggccgcggcgaaaggcatccccctgtacaagtacgtggcgcagctcgcgggccacgaggcgcccgagttcgtgctgccagtgccctgcttcaacgtgctgaacggcggcaagcacgcgggcaacagcctggccatgcaggagttcatggtggcgccggtgggcgcgcgcagcttcggcgaggcgctgcgcatgggcgcggaggtctaccaggcgctgcagcggctgctgaaggccaagttcgggctcgcggccaccaacgtgggcgacgaggggggctttgcgccggacatcaaggaccccagggaggcgctggggctgctggtcgaggccattcgcgctgcgggccacgagggcaaggtcaagatcatggcggacgtcgccgcctccgagttctacagcaaggaggccaagagctacgacttggacttcaagagccccgccgccgacgcccacaggctcttgactggcgaccagctcaaggacctgttcaaggagtggtctgaggagttcccgatagtgtcgatcgaagaccccttcgaccaggacgacttcagttcgtacgcggcgctgactgcggagatcggcagcaaagtgcaggtggtgggagacgacctgctggtgacgaaccccgcgcggatccgcaaggcgctgcagcacaaggcctgcaacgcgctgctgctgaaggtgaaccagattggctccatcaccgaggccatcgaggcctgcaagctggcccaggccagcggctggggggtgatggtgtcccacaggtccggcgagactgaagactccttcatagcggacctcgtggtgggcctccgcactggccagatcaagacgggggccccctgcaggtccgagcgcctctgcaagtacaaccagctgctgcgcatagaggagcagctccagggccgctgcacctacgccggcgagaacttccgaaacccctccaactagctgctgctgctgctgcggggtgagggatggctgccgcgcgcgctgctgcccacgatttgtccacagactcgactcttttagctgtttctttcgaaaaaaaaaaaa

SEQ ID NO: 4252 - protein, 445 aa, Eimeria tenella
MVAIVEVKAREILDSRGNPTVEVDLKTEQGCFRAAVPSGASTGIYEALELRDGDKTRYNGKGVLKAVENVNKVLAPALVGKDCREQAALDRLMVEELDGSKNEWGWSKSVLGANAILAVSMALCRAGAAAKGIPLYKYVAQLAGHEAPEFVLPVPCFNVLNGGKHAGNSLAMQEFMVAPVGARSFGEALRMGAEVYQALQRLLKAKFGLAATNVGDEGGFAPDIKDPREALGLLVEAIRAAGHEGKVKIMADVAASEFYSKEAKSYDLDFKSPAADAHRLLTGDQLKDLFKEWSEEFPIVSIEDPFDQDDFSSYAALTAEIGSKVQVVGDDLLVTNPARIRKALQHKACNALLLKVNQIGSITEAIEACKLAQASGWGVMVSHRSGETEDSFIADLVVGLRTGQIKTGAPCRSERLCKYNQLLRIEEQLQGRCTYAGENFRNPSN

SEQ ID NO: 4253 - DNA, 1317 bp, Enterococcus faecalis
  CDS (1)..(1299)
atgtcaattattactgatatttacgcacgcgaagtcttagactcacgcggtaacccaacaatcgaagtagaagtttacactgaaagcggagctttcggccgtggaatggttccttcaggagcttcaactggtgaatacgaagcagttgaattacgtgatggcgacaaagctcgttacttaggtaaaggtgttactaaagctgtagataacgtaaacaacatcattgctgaagcaatcatcggttacgatgtacgcgatcaaatggctatcgataaagcaatgatcgatttagatggaactcctaacaaaggtaaattaggtgctaacgctattcttggtgtgtctatcgccgtagctcgtgctgctgctgattacctagaagtgcctttatatcattacttaggcggattcaatacaaaagtattaccaactccaatgatgaacatcatcaatggtggatcacatgctgacaacagtattgacttccaagaattcatgattatgcctgtaggtgcgcctacattcaaagaagctttacgtatgggtgcagaagtattccacgcattagcttcaatcttaaaaggccgcggcttagctacttcagtaggtgacgaaggtggtttcgctcctaacttaggttcaaacgaagaaggtttcgaagtaatcatcgaagctatcgaaaaagctggctatgttcctggtaaagacgttgttcttgctatggatgctgcttcttcagaattctacgacaaagaaaaaggcgtttacgttttagctgactcaggcgaaggcgaaaaaacaactgaagaaatgatcgcgttctacgaagaattagtttctaaatacccaatcatttcaatcgaagacggcttagacgaaaacgactgggacggattcaaaaaattaactgaagtattaggcgacaaagttcaattagttggtgacgatttattcgtaacaaacacaactaaattagctgaaggtatcgaaaaaggtatcgctaactcaatcctaatcaaagttaaccaaatcggtactttaactgaaacatttgaagcaatcgaaatggctaaagaagctggctacactgcagttgtatctcaccgttctggtgaaacagaagattcaacaatctctgatatcgctgttgcaacaaacgctggccaaatcaaaactggttcattaagccgtactgaccgtattgctaaatacaaccaattattacgtattgaagatcaattaggcgatgtagctgaatacaaaggcttaaaatctttctacaacttaaaaaacaaataattcattaaatgaataacg

SEQ ID NO: 4254 - protein, 432 aa, Enterococcus faecalis [sequence omitted]

SEQ ID NO: 4255 - DNA, 1305 bp, Enterococcus hirae
  CDS (6)..(1304)
tccttatgtccattattactgatgtttacgcacgcgaaatcttagactcacgcggtaacccaacaatcgaagtagaagtatacacagaaagcggagcttttggccgtggaatggttccttcaggtgcttcaactggtgaatacgaagccgttgaattacgtgatggagacaaagctcgttatggcggtaaaggtgtaactaaagctgttgacaacgtaaacaacatcattgctgaagcaatcattggctacgatgtacgtgaccaaatggcaatcgataaagctatgatcgctttagacggaactcctaacaaaggtaaattaggtgcgaacgcaattttaggtgtatctatcgctgttgctcgtgcagctgctgactacctagaagtacctttataccactacctaggcggattcaatacaaaagttttaccaactccaatgatgaacatcatcaacggtggatcacatgcggataactcaatcgacttccaagaattcatgatcatgcctgttggcgctccaacattcaaagaagctctacgtatgggtgctgaagtattccacgcattagcagcaatcttgaaatctcgtggattagctacttctgttggtgacgaaggtggattcgctcctaaccttggttcaaacgaagaaggttttgaagtaatcatcgaagcaatcgaaaaagctggctatgtacctggtaaagacgttgttcttgctatggatgctgcttcttcagaattctacgacaaagaaaaaggtgtttacgtattagctgattcaggcgaaggcgaaaaaacaactgacgaaatgatcaaattctacgaagaattagtttctaaatatccaatcatctcaatcgaagacggattagacgaaaacgactgggacggattcaagaaattaactgacgtattaggcgacaaagttcaattagttggtgacgacttgttcgtaacaaacactcaaaaattatctgaaggtattgaaaaaggaatcgctaactcaatcctaatcaaagttaaccaaatcggtactttgacagaaacttttgaagcaatcgaaatggctaaagaagctggctacacagcagttgtttctcaccgttcaggtgaaacagaagattcaacaatctctgatattgctgttgcaacaaacgctggtcaaatcaaaactggttctctatcacgtactgaccgtattgctaaatacaaccaattactacgtatcgaagaccaattaggcgaagttgctgaatacaaaggtttgaaatctttctacaacttaaaagctgcataga

SEQ ID NO: 4256 - protein, 432 aa, Enterococcus hirae
MSIITDVYAREILDSRGNPTIEVEVYTESGAFGRGMVPSGASTGEYEAVELRDGDKARYGGKGVTKAVDNVNNIIAEAIIGYDVRDQMAIDKAMIALDGTPNKGKLGANAILGVSIAVARAAADYLEVPLYHYLGGFNTKVLPTPMMNIINGGSHADNSIDFQEFMIMPVGAPTFKEALRMGAEVFHALAAILKSRGLATSVGDEGGFAPNLGSNEEGFEVIIEAIEKAGYVPGKDVVLAMDAASSEFYDKEKGVYVLADSGEGEKTTDEMIKFYEELVSKYPIISIEDGLDENDWDGFKKLTDVLGDKVQLVGDDLFVTNTQKLSEGIEKGIANSILIKVNQIGTLTETFEAIEMAKEAGYTAVVSHRSGETEDSTISDIAVATNAGQIKTGSLSRTDRIAKYNQLLRIEDQLGEVAEYKGLKSFYNLKAA

SEQ ID NO: 4257 - DNA, 1299 bp, Leptospira interrogans
  CDS (1)..(1299)
atgtctcatcactctcaaattcagaaaattcaagctcgggaaattatggactcccgtggaaatcctacggtcgaagtggacgtaatccttttagatggttcttttggaagagcggcggttccttccggagcgtctactggagaatacgaagccgtagaacttagagacggagataaacatcgttatcttggaaaaggggtacttaaggcggtagaacacgtaaacctgaaaattcaggaagtattgaaaggagaaaatgcgatcgatcaaaatagaatcgaccaactcatgttagacgctgatggaaccaaaaacaaaggtaaactaggtgcgaatgcaattttaggaacttctctcgcggtagccaaggctgctgctgctcattctaaacttccattatatcgttatataggaggaaactttgccagagaactacccgttcctatgatgaatatcatcaacggaggcgctcatgcggataacaacgtagactttcaagaatttatgattcttcccgtaggagccaaaagttttcgagaagctcttcgtatgggggcggaaatatttcattctttaaaatcagtactcaaaggaaagaaattgaacactgccgtcggagatgaaggtggatttgctccagatctgactagtaatgtggaagcgatcgaagttattctacaagctattgaaaaagcaggatataaacctgaaaaagacgttttactcggtttggatgcggcttcttccgaattttatgacaaaagtaaaaagaaatacgtactcggtgccgaaaataataaagagttctccagtgccgaactcgtggattattatgcgaatttggtttccaaatatccgattattacgatcgaagacggtttggacgaaaatgactgggatggttggaaacttctttccgaaaaattaggaaagaaaattcagctcgtaggagacgacctttttgtgacaaatatagagaaactctccaaaggaatttcttccggagttggaaattcgattctgatcaaggtaaatcagatcggttctctttctgaaactctctcttctatcgaaatggcgaaaaaagcgaaatatacaaacgtcgtaagccatagaagtggggaaacggaagacgttacgatttctcatattgcagttgcgactaacgcaggacagattaaaaccggttctctttctagaacggatagaattgcaaaatataacgaacttctaaggatcgaagaagaactcggaaagtcagcagtttataagggtagggaaactttttataatttataa

SEQ ID NO: 4258 - protein, 432 aa, Leptospira interrogans [sequence omitted]

SEQ ID NO: 4259 - DNA, 1515 bp, Loligo pealeii
  CDS (67)..(1371)
acttcacgcacgagcatcgtcttcagaccacattcttaggactgtagccgtcgcagatcagtcaaaatggttatcaagaaggttcattcccgtcaaatctttgacagtcgtggcaacccaactgtcgaggttgatttgtggactgacaagggcatgttccgtgctgcagtccccagtggtgcatcaactggcatctatgaggctcttgaaatgagagataaagatgctaaaaattaccatggcaaaactctattcaatgctgttggtaatgtaaataaaatcattgctcctgctttggttgataaaaaaatggatgagaaagatcaaacagcagttgataactttcttcttgcacttgatggtacagagaacaaaaacaagcttggagctaatgcgattcttggagtatctcttgctgtctgcaaagctggtgctgctgctaagggtgttccactttaccgccatattgctgatttagctggaaacaaggaagtaatcctccctgtacctgccttcaatgttatcaatggtggtagccatgccggtaacaaattggccatgcaggagtttatgatccttccaactggggccaagaattttacagaggccatgaaaatgggtactgaagtttaccatcatttgaaatctgtcatcaagaagaaatatggtcaagatgcttgcaatgttggtgatgagggtggttttgctccaaacattctggacaacaaagagggtctggaactgttgaagactgccattgcaaatgccggctatactgccgaaattgaaattggcatggatgttgctgcttctgagttctgtaaggaaaagaagtatgacttggatttcaaaaaccctgactctaaccccaatgattggcttacctctgaccagttggctgatgtttacaaagactttgttaagaattatccagttgtatccattgaggatccctttgaccaagatgactgggaagcttacacaaaaatgaccaaggatatggacatccagattgttggagacgatcttttggtcactaaccccaagagagtacagaagggaattgacttgaaggctgccaatgccctcctccttaaagttaaccagattggctcagttactgaatcaattcaggcatgcaaaatgtctcaagatgctggctggggagtgatggtatctcatcgtagtggtgagactgaggatacatttattgctgatttggtagtcggtctctgcactggacagatcaaaactggtgctccttgccgatcggaacgtctggccaagtacaaccagattcttcgtattgaagaggaattgggtgacaaagctgtctttgctggcaagaaattccgcaaccccctcaagtaagcttccagctttccccttccctcgtctaagtcaactttaactctattacctcttattcctaaggttggcatgcaagtatatgttctgtaatgtacaaaatataataaagtatctgtaagccaaaaaaaaaaaaaaaaaaaaaaa

SEQ ID NO: 4260 - protein, 434 aa, Loligo pealeii [sequence omitted]

SEQ ID NO: 4261 - DNA, 1515 bp, Mastigamoeba balamuthi
  CDS (31)..(1350)
ccgggctgcaggcaaacaccccaagcaacaatgtcgaccatcaagagcgtcttcgcccgcgagatcctggactctcgtggcaaccccaccgtcgaggttgacctgaccaccgagaagggcctcttccgctcggccgtcccctctggtgcctcgactggcatctatgaggcctgcgagctccgtgacggcgacaagtcgcgctacctcggcaagggtgtgctgaaggccgtcgagaacgtcaacaagatcctggcgcccaagctgatcggcctcgacgtcaccaagcagggcgagatcgacaggctcatgctccagatcgacggcactgagaacaagacccacctgggcgccaacgccatcctcggctgctcgatgtcggtctgccgtgcggccgccgcgttcaggggcctgcccctctaccgctacatcgcggagctgtcgggcaacaagtcgcccatgctgcctctgccctgcttcaacgtcatcaacggcggtgagcacgcgggcaacaagctcgccatgcaggagttcatgatctgccccacgggcgcgacctcgttccacgaggccctgcgcatggccgccgagacgtaccacaacctgaagctcgtcatcaagaagaggtacggcatggacgcgaccaacgtcggcgacgagggtggcttcgcccccaacatccaggccaaccacgagggcctcgagctcatcgttgaggccatcaagcaggccggctacactggcaagatcgagatcggcatggacgttgccgcctcgtcgttctgggacgccaaggagtcgaagtacgacctcggcttcaaggtccccgccgacaagaagacccccgacatgctcgtctcgggcgagggcctgatcaagctctacgaggagtggacctcgaagtacccgatctggtcgatcgaggaccccttcgaccaggacgactgggccacctacaccaggttcaccgagctgatccgcaacaggatccagatcgtcggcgacgacctgctggtcaccaaccccaagcgcatcgtcgaggcccgcaacaagaaggcctgcaacgcgctgctgctcaagctcaaccagatcggctcggtcagcgaggccgtcgaggcgtgccgcctggcccgcgaggtcaactggggcgtcatggtgtcgcaccgctcgggcgagactgaggacgcgttcatcgccgacctcgtcgtcggtctgggctgcggccagatcaagactggtgccccctgccgctcggagcgcctcgccaagtacaaccagctcctccgcatcgaggaggagctcggcgccaacgcccactacgccgccaagaccctctcgggcgtcggccactagatgactcgagatcttcgcggggcctcccctgtgcacaagcctcgcccgccgtgccctgtccagcacgggcggattaactgcacgacactgacttggggtctcttctgcaacaatgtcggtttttgaaacaaaaaaaaaaaaaaaaaaaaaaaaaaaaaaaaaaaa

SEQ ID NO: 4262 - protein, 439 aa, Mastigamoeba balamuthi [sequence omitted]

SEQ ID NO: 4263 - DNA, 1290 bp, Methanosarcina acetivorans
  CDS (1)..(1290)
atgatgtcgtatatcggtttacagcaggattctggagaatataagatccaaaagatacatgctcgggagatcctggactcaaggggaaatcccacaattgaagtagatgtgtttacaccaaagggatttggcagagcaagtgtcccttcaggagcttcgacgggtacgaatgaagccctagaactgcgtgatgcggaccccaacagatacggtggaaaaggagttctgactgcggtcaagaacgtaaataccattatccagaaggaattgcttggacttgatgtgcgaaaccagcgggaaatcgatgagctgatgatcgagctcgacgaaaccgaaaacaaatcaaaccttggagccaactccattcttggtgtctccatggcggttgcaaaagccgcagctgattcccttaacatgcccctttaccgctacttcggcgggtctaacgcttttacccttccggtacctacaatgaatgtcctgaatggaggcaaacatgcaggaaacgagcttgcaattcaggaattcatgatccagcccaaaggtgcagaaaccttctacgaagcccttcagatcggggcagagatctaccatgtacttgggaagtacctggagaaaaaatacggacgctcttctacaaatgtaggctatgaaggcgggtatgcgcccaaaatgagcgagtctacagaagctcttgacgccctcgtacaggcaattgaagaagcaggctataccgaatccgaagttacaatagggcttgacgccgcagcaaccgagttctacgaagaagagttctataatattgacggaaagaaactggctgctccggaactgcttgactactatgtggagcttgtaaactcctaccccatcctttctatcgaggatcccttctacgaagaagccttcgaggactttgaagccctgaccaacgaactctgggacacgatcattgtgggggacgacctctttgtcacaaacatcgaaaggctctccagaggcgtggacatgggagctgcaaatgcccttctcctcaaagtcaaccagataggctcaatctccgaagccttcgatgccgcaagcatggcttccagaaacggttacaccgtaattgtaagccaccgctctgccgaaaccgaagataccaccatctcagatctcgcagttgccataggtgcagaaatgatcaagaccggtgccccggcccgtggcgagaggactgcaaaatataaccagcttctcagaattgaagaagatctcggtgaagttgcacattacgtgcagctctaa

SEQ ID NO: 4264 - protein, 429 aa, Methanosarcina acetivorans [sequence omitted]

SEQ ID NO: 4265 - DNA, 1272 bp, Methanococcus jannaschii
  CDS (1)..(1272)
atggatgagagatttgaaattaaagatattgttgcaagagaagtaattgactcaagaggaaacccaacagttgaagtggaagttataacaaaagggaatggttacggttcagcaattgttccaagtggtgcatcaactggaacacatgaggcattagagttgagggataaagaaaagagatttggtggaaaaggagttttaatggctgttgaaaatgtaaattcaataattagaccagagattttaggttatgatgcaagaatgcagagagaaatagatacaataatgatagaattagatggtactccaaataaatcaagattgggagctaatgccatattggctgtttctttagctgtagcaaaggcagcagcagcaacagcaaaaatccctctctataaatacttggggggatttaactcctatgtcatgccagttccaatgatgaacgttataaatggaggaaaacacgctgggaatgatttagatttgcaagagttcatgataatgccagttggagctacatcaatttctgaagctgtaaggatgggttcagaagtttatcatgtcttaaaaaatgtcatcttagaaaaatatggaaaaaatgctgtaaatgttggagatgagggaggttttgctccaccattaaaaacatcaagggaggctttagatttattaactgagagtgttaaaaaggctgggtatgaggatgaggttgtctttgcattagatgctgctgcctcagagttttataaagatggatattattacgttgaaggtaaaaaattaacaagagaggagcttttagattactataaagcattagttgatgaatatccaatagtctcaattgaagacccattccatgaggaagattttgaaggctttgcaatgataactaaagaattagatatacagatagttggagatgacttgtttgttacaaatgttgaaaggcttagaaaaggtattgagatgaaggctgctaacgctctgcttttgaaagtcaatcagattggaactttaagtgaggcagttgatgctgctcaattggcatttagaaatggttatggtgtagttgtttcacatagaagtggagagactgaggatacaacaatagctgatttgtcagttgctttgaactctggacaaataaagactggagctccagcaagaggggagagaacagctaaatacaatcagttgataagaattgagcaagagttaggattaagcaaatatgctgggagaaactttagatgtccattttaa

SEQ ID NO: 4266 - protein, 423 aa, Methanococcus jannaschii [sequence omitted]

SEQ ID NO: 4267 - DNA, 1284 bp, Methanopyrus kandleri
  CDS (1)..(1284)
atgcccagaatagtctccgtgaaggccagggaagtgttagactcacgcggagaacccacggtggaagtggaggtggaactcgaagacggtaccgtcggtcgggccatggtcccatccggagcttccacgggcacgtacgaagcgctggagctgagggacggcgacgatcgttacggaggtaagggagtacgccgtgccgtcaggaacgtggaggagatcatcgccccggagatcgagggactcgacgcgacggcccaacctgacatcgaccgcacgatgatcgagctcgacggcaccgagaacaagtctcacctcggagcgaacgcgatcctgggagtctcgctggcggtcgcccgggcggcggccaagtcgctggggataccgttgtaccgatacctaggtggtccgacggcgcgccgactgcccgtgccgttcatgaacgtgatcaacggcggcgagcacgcgggtaacgaactcgacttccaggagcacatgatcgtcccgcacggcttcgagtcgttctccgaggctcttcgagccggtgtggagacgtaccacgtcctcggggagctactggaggaggagtacggacctatcgccacgaacgtgggtgacgagggcggttacgctccaccgatgaaggatacggtggaaccactggacgtcctcgtggaggccatcgaggaggccggatacgcacccggcaaggagatcgcgttggccctggacgcagccgcgagcgagttctacgacgaggactcggggacgtacagggcgtacggtcagaagtatacccgcgacgagctgatcgacgtgtacaaggatctggtaagccagtacccgatcgtttccatagaggacccgctgcacgaggaggacttccggggcttcgccaagatcaccgaggagctaggcgataaggtccaaatcgtgggtgacgacctgttcgtgacgaacccggaccgcctgcggaaggggatcgaaatgggggcggcgaacgccctgctcctgaaggtgaaccagatcggaaccctgacggaggccgtggaggcgggtgagctcgcgcttcaacacgggtacggtgtgatggtgagccaccggagcggcgacaccgaggacccgttcatcgccgacctggccgtggccctagggtgcggacagatcaagaccggagcgcccgcccgtagctctaggacggccaagtacaaccgcctgctccggatcgaggaagacttagccggggcggcggagttcggaccccggaacgacttcttcctcccctaa

SEQ ID NO: 4268 - protein, 427 aa, Methanopyrus kandleri [sequence omitted]

SEQ ID NO: 4269 - DNA, 1287 bp, Methanosarcina mazei
  CDS (1)..(1287)
atgtcgtatatcggtttacagcaggattctggagaatataagatccaaaagatacatgctcgggagatcctggactcaaggggaaatcccacagttgaagttgatgtgtttacacctaaaggatttggcagggcaagtgttccttcaggagcttccacgggtactaacgaagcccttgaactgcgtgatgcagatcctaacaggtacggaggaaaaggagtcctgaccgcagtcaagaacgtaaataccattatccagaaggaactgcttggacttgatgtgcgaaaccagcgggaaatcgacgagcttatgatagagctcgatgagaccgaaaacaaatctaaccttggagcaaatgccattcttggcgtatccatggcagttgcaaaagctgcagctgactctcttaatataccgctttaccgttatttcggcggctccaacgcttttaccctcccagtgcccacaatgaatgtcctgaatggaggaaaacatgcaggaaacgagcttgcaattcaggaattcatgattcagccgaaaggcgcagagaccttctacgaagctcttcagatcggggctgagatttaccagaccctcgggaagttcctggagaataaatacggacgctcttctactaacgtgggttacgaaggcgggtacgctccaaaaatgggcgagtccacagaagcccttgatgcgctcgtacacgcaattgaagaagcaggctataccgagtctgaggtcacaataggtcttgatgccgcagcaaccgagttttatgaagaggaattctataacattgacgggaagaaactggctgctcctgaactgcttgactattatgtggagcttgtaaactcttacccgatcctttctattgaagaccccttctatgaggaagccttcgaagactttgaagcgcttaccaatgaactctgggacacaatcattgtaggtgacgacctctttgtcacaaacattgaaaggctgtcaaaaggagtggacatgggagcagcaaatgccctccttctcaaagttaaccagattggctcaatctcggaagcttttgatgccgcaagcatggcttccagaaacggctacacagtaattgtaagccatcgctctgcagaaactgaagatacgaccatttcagacctcgcggttgcaataggagctgaaatgataaagaccggtgcaccggcacgcggcgagagaactgcaaaatacaaccagcttctcagaatagaagaagaccttggcgaagttgcacattatgtgcagctctaa

SEQ ID NO: 4270 - protein, 428 aa, Methanosarcina mazei
MSYIGLQQDSGEYKIQKIHAREILDSRGNPTVEVDVFTPKGFGRASVPSGASTGTNEALELRDADPNRYGGKGVLTAVKNVNTIIQKELLGLDVRNQREIDELMIELDETENKSNLGANAILGVSMAVAKAAADSLNIPLYRYFGGSNAFTLPVPTMNVLNGGKHAGNELAIQEFMIQPKGAETFYEALQIGAEIYQTLGKFLENKYGRSSTNVGYEGGYAPKMGESTEALDALVHAIEEAGYTESEVTIGLDAAATEFYEEEFYNIDGKKLAAPELLDYYVELVNSYPILSIEDPFYEEAFEDFEALTNELWDTIIVGDDLFVTNIERLSKGVDMGAANALLLKVNQIGSISEAFDAASMASRNGYTVIVSHRSAETEDTTISDLAVAIGAEMIKTGAPARGERTAKYNQLLRIEEDLGEVAHYVQL

SEQ ID NO: 4271 - DNA, 1290 bp, Mycobacterium leprae
  CDS (1)..(1290)
atgccggttatcgagcaggtcggggcccgcgagatcctcgattcccgcggcaaccccacggtcgaagtcgaggtggtgctgattgacggaaccttcgcccgcgcagcggtgccttcgggcgcatcgaccggcgagtatgaggccgtcgagttacgtgacggcgacggtcgttacggtggcaagggtgtgaaaagggccgtggatgctgtgctcgacgagatcggtccagtggtgatcggcctcaacgccaatgaccagcggctgatcgatcaggagctgctggacctcgacggcacccccgacaagtcccgattgggtggtaacgcgatcctgggtgtctcgctggccgtcgccaaggcagccgccgattcagcggaattgccgctgttccgttatattggagggtctaacgcacatatccttccggtgcctatgatgaacattctcaacggcggcgcgcacgccgacactgctgttgatgtgcaggagttcatggtggcaccgatcggggcacccagtttcgttgaggcgctgcgttggggcgccgaggtatatcacgctctcaaatcggttctgaagaaaaaagggttaagcaccggcctgggtgatgagggtggctttgcccctgaagtggccggaaccaccgcggcgctggacttggtcaccttagctattgaagcggcgggttttaagccgggtgccgatgtggcattggcccttgatgcggcagccaccgagttctacacggacggcatcggctaccatttcgagggcatgacccacactgccgaccagatgactgagttttatgccgacttgctgggttcatacccactggtgtccatcgaagatccgctgtccgaagatgattgggacggttgggctgctctgacggcgtcgataggggaacaggtgcagatcgtcggggacgacatctttgccaccaatcctgagagactggaggagggcatcggtcgcggtgtggcaaacgcgttgctggtcaaggtgaaccagataggcacgttgaccgagacgctcgaagctgttgcgttggcacatcacagcggatatcgcacgatgatcagccaccgcagtggcgagaccgaggacacgatgatcgctgacctggtcgtggctctcggtagcgggcaaattaagacgggagcgcccgcccgcagtgagcgcgtcgctaaatataaccagctgctgcggattgaagaggagctcggcgacgccgcccgctatgccggcgatctggcatttctgcgatacgtcgtggaaacgagataa

SEQ ID NO: 4272 - protein, 429 aa, Mycobacterium leprae [sequence omitted]

SEQ ID NO: 4273 - DNA, 1353 bp, Mycoplasma penetrans
  CDS (1)..(1353): transl_table=4
atgttcggtagtaaatttaaaatttgtaagattgaagcttacgaagtaattgattcaagagggttccctacagttgctgcaaaagtatatgctaagaatggtgtatttgcaaaagctatggttccatctggtgcttctactggtgaaagagaagctgttgaattaagagatggtgacaaagaaagatttaacggtaaaggtgttttaaaagctgttaacaatgttaatacaatcattgctcctaaagttgtaggaatggattgtagacaacaaactaagattgatgaattaatgattagtcttgatggaacacctaacaaagctaaactaggtgctaatgctattttggctgtttctttagcagttgcaaaattagctgcaatgatagaagaaaaaccattatacaaatacattagacaaaacatcatgggagatagcagtgattcatgaacaatgcctgttcctatgttaaacgttattaatggtggtgcacatgctgataacactattgatttccaagaatttatgttcatgccagttggagctaaatctttaaaagaagctgtaagaatggcatctgaatgtttccactcattacaatcaattttaaaatctaaaaaattagatactaacaaaggtgatgaaggtggatttgcacctaacttaaaaaatgctgatgaagcattaaagttaatggttgaagctgttgaaaaagcaggatacaaaccaggagttgatgcagatgttgcttttgcattagacccagcaacttcagaattatttgatgctgataaaaaaacatatacttttgaaaaagctttaaaagctaaaatcttaacagcaaaagatgcagttaaaaaatcagaagatatggttaaatattgagatggattatgtaaaaaatatccaatcatctcaattgaagatggattagctgaaaatgactgagatggattccaattaatggttaaagacttaggaagcagagttcaaattgttggtgatgacttattctgtacaaatcctaaaattgttaaagaaggaatttctaaaggagttgcaaactctgtattaattaaagttaaccaaattggtactttaactgaaactattgaaactattaaagcagcacatgcagctggttgaacttgtgtagtttctcatagatctggtgaaactgaagatactacaattgctgatattgcagttggtttaagtacaggacaaattaaaactggttcaatgtctagatctgaaagaattgctaaatataacagattaatcgaaattgaaaatgaattagggtcaaaagctcattaccctggtaaaagtacatttaaatcaattaaatag

SEQ ID NO: 4274 - protein, 450 aa, Mycoplasma penetrans [sequence omitted]

SEQ ID NO: 4275 - DNA, 1311 bp, Neocallimastix frontalis
  CDS (1)..(1311)
atggctattactaaggttcacgctcgtcaaattttcgattcccgtggtaacccaactgttgaagttgaagttactaccgacaagggtctcttccgtgctgccgttccatctggtgcttccactggtgttcacgaagctcttgaactccgtgatggaattaaggctgattacgttggcaagggtgtcttaaaggctgttgaaaacgttaacaagactattgccccagctcttgttgctgccaatcttgatgttaagaaccaaaaggctgtcgatgacttccttcttaagttagatggtactccaaacaagagtaagcttggtgctaacgccatccttggtgtttcccttgctgttgcccgtgctggtgctgctgataagggtgtcccactttaccaacacttaggtgaattagccggtaacaagggtccatggattcttccagttccatccatgaacgtccttaacggtggttctcacgctggtaacaagcttgccatgcaagaattcatgattcttccaactggtgctaagagtttcactgaagcccttaagatgggttctgaagtttaccacgctcttaagtctgtcatcaaggccaagtacggtcaagatgcctgtaacgttggtgatgaaggtggtttcgctccaaacattcaagataataaggaaggtcttgaactcttaaacgaagctattgctaaggccggttacactggtaaggttaagattggtatggatgttgcctcctctgaattctacaaggatggtaagtacgatcttgacttcaagaatccaaactctgacccatccaagtggatctctggtgaagaacttggtcaattctacaaggaaatcacttctgaatacccaattgtttctattgaagatccatacgaccaagatgatttcgaatcatggtctaagttcagagctgatatgcaagataagattcaaattgttggtgatgatcttactgtcactaacccaaagcgtattgctatggctattgaaaagaaggcctgtaacggtcttttattaaaggttaaccaaatcggtaccgtttctgaatctattcaagctgctcttgatgctttcaacgacggttggggtgttatggtttctcaccgttctggtgaaactgaagacactttcattgctgatcttgttgttggtcttaagagtggtcaaattaagactggtgctccatgccgttccgaaagattagctaagtacaaccaacttctccgtattgaagaagaacttggtgctaacgctacctacgcaggtgaaaacttccgtcgtccattctaa

SEQ ID NO: 4276 - protein, 436 aa, Neocallimastix frontalis [sequence omitted]

SEQ ID NO: 4277 - DNA, 1287 bp, Nitrosomonas europaea
  CDS (1)..(1287)
atgagtgcaatcgtagatgtaatcgcccgtgaaattatcgactctcgtggtaacccaaccatagaagccgatgtattgctggaatcgggcgtgcttgggcgcgcttcagtgccatctggcgcatctgtcggcacacgcgaagccgttgagctgcgcgatggagatgcacagcgctactatggaaaaggggtattgaaggcagttgaaagcgtcaatggtgaaatttctgaaacgatcatggggctggatgccatggagcagtgtttcattgataagaccctgatcgagcttgacggcagtgaaaacaaatccagactgggtgccaatgccatactcgccgtttcgcttgcagtggccaaagcagcagcagaagaatccggtctccccctttatcgctatctgggaggaatcaatgccaagtggttgcctgtaccgatgatgaatctggttaatggcggcgtgcacgcaaacaaccgtctggatatgcaggaattcatgattataccgctgggcttgccaaacctgcgtgaggccgtgcgttgtggcgcagaggtattcagcacactcagaacgttgctcaacaaaagaaatctgcccacgacagtgggtgatgaaggcgggtttgctcccagctttgctcgcaacgaagaggcactggctctgatcgtgcaggccatagatgaagcaggttatcaacccggctccgaggtggcgatcggagtggattgcgccagttccgaatttttccgggagggaaaatatcatctcgatgtagacggactcggtcttacctcggctcagtttgtagattatcttgccacctgggtggagaaatatccgatcatcagtatcgaagatggcatgagtgaacaagattgggagggctggggactgttgacggaaaggctgggtaaaacagttcagctggttggtgatgatgtgtttgtcaccaatacccgaattcttaaagagggtatcagtcgcaatattgccaattccattctgatcaagatcaatcagattggtacgcttaccgagacactgaacgcaatcgaaatggcaaagtgtgcgggctataccgccatagtttcccatcgttccggcgaaactgaggatacgaccattgctgacatagcagttgccaccaatgccttgcagatcaaaacaggttcactctcgcgttcggatcgactggccaagtacaatcaattgttgcgtatcgaggaagatctgggcgagatggcgcaatatgccggaagatcggcattctaccagttgaagccatga

SEQ ID NO: 4278 - protein, 428 aa, Nitrosomonas europaea [sequence omitted]

SEQ ID NO: 4279 - DNA, 1290 bp, Oceanobacillus iheyensis
  CDS (1)..(1290)
atgccatatattacagatgtttatgctagagaagtcttagattcaagaggtaacccaaccattgaagttgaaattttcacagagtcaggagcatttggttcagcaatcgtaccaagtggtgcatcaactggtgagtatgaagcagtagaacttcgtgatggtgacaaagatcgttatttaggtaaaggagttcaaaaagcagttgaaaatgtaaatgatctaattgcgcctgaacttattggtattgatgttacgcgtcaaaacattattgatgctttaatgatcgacctagatggaacggaaaacaaaggtaaactaggtgcgaatgcaatccttggagtatccatggcagcagcacatgcagcagcaaactatttagaagtacctctatacaactatttaggtgggttcaatgcaaaaacacttccaacaccaatgatgaacatattaaatggtggagagcatgcggataacaacgtagatattcaagaatttatgattatgcctgttggtgctccaacatttaaagaagcattgcgcactggtgctgaaattttccatgcgttgaaaaaagtactaacttcaaaaggctataacactgcagtaggtgatgaaggtggttttgcgccaaacctaggctctaatgaagaagcactacaaactatcgtagaagcaattgaagctgctggttataagccgggtgaagaagttaaacttgcaatggacgtagctgcttctgaaatctacagtgatggtaaatataacctaaaaggtgagggagttgttcgttcatctgaggaaatggttgactggtatgaagaaatgatttctaaatacccaattatctctattgaagatggattggatgaaaatgattgggatggtttcaaaatcctaactgatcgtcttggtgataaagttcaattagttggagatgacttgttcgtaaccaacacgaataaactttctaaaggtatcgatcaaggtattggtaactctatcttaatcaaagtaaaccaaatcggaactctaacagaaacatttgaagcaattgaaatggcaaaacgcgctggttatacagctgttatctctcaccgttctggtgaaacagaagatgttacgattgcagatattgcagtagcaacaaatgctggacaaatcaaaacaggtgcaccatctcgtacggaccgtgtagctaaatataaccaactacttcgcattgaagatgaattagctggtatgggtgagtatggtggattagcttcattctacaacttagctaacaaataa

SEQ ID NO: 4280 - protein, 429 aa, Oceanobacillus iheyensis
MPYITDVYAREVLDSRGNPTIEVEIFTESGAFGSAIVPSGASTGEYEAVELRDGDKDRYLGKGVQKAVENVNDLIAPELIGIDVTRQNIIDALMIDLDGTENKGKLGANAILGVSMAAAHAAANYLEVPLYNYLGGFNAKTLPTPMMNILNGGEHADNNVDIQEFMIMPVGAPTFKEALRTGAEIFHALKKVLTSKGYNTAVGDEGGFAPNLGSNEEALQTIVEAIEAAGYKPGEEVKLAMDVAASEIYSDGKYNLKGEGVVRSSEEMVDWYEEMISKYPIISIEDGLDENDWDGFKILTDRLGDKVQLVGDDLFVTNTNKLSKGIDQGIGNSILIKVNQIGTLTETFEAIEMAKRAGYTAVISHRSGETEDVTIADIAVATNAGQIKTGAPSRTDRVAKYNQLLRIEDELAGMGEYGGLASFYNLANK

SEQ ID NO: 4281 - DNA, 1302 bp, Pasteurella multocida
  CDS (1)..(1302)
atggcaaaaatcgttaaagtgatcggccgtgaaatcatcgattctcgtggtaacccaactgttgaagcagaagtccatttagaaggtggctttgtgggtctagccgccgcaccatcaggcgcatcaactggttcacgcgaagcattagaattacgtgacggtgacaaagcacgtttcttaggtaaaggtgtgttaaaagctgttgctgcagtgaacaacgaaattgcacaagctctcgttggtaaagatgcgacaaaccaagctgaaatcgaccaaattatgatcgatttagatggcacagaaaacaaatctaaattcggtgcaaacgccattttagcggtttctttagctaacgcaaaagcagcggcggcggcaaaaggtatgccattatttgcttggattgcagaacttaacggtacgccaggtcaatactctatgccattaccaatgatgaacatcatcaacggtggtgagcacgcagacaacaacgttgatatccaagaatttatgattcaaccagtgggtgcgaaaaccttaaaagaagcccttcgtatcggtgcggaagtattccacaaccttgcgaaagtattaaaaggcaaaggcttaagcacagcagtcggtgacgaaggtggttttgcacctaacttagaatctaacgcagcagcgcttgcttgtatcaaagaagccgtagaaaaagcgggttatgtgttaggtaaagatgtcacattagcaatggactgtgcatcatctgagttctataacaaagaaaatggtatgtacgaaatgaaaggtgaaggtaaatcattcacttctcaagaattcacacactacttagaagaattatgtaaagaatacccaatcgtgtctatcgaagatggtcaagatgagtcagactgggaaggtttcgcctaccaaactaaagtattaggcgacaaagttcaattagttggtgatgacttattcgtaacgaataccaaaatcttaaaagaaggtatcgaaaaaggtatcgcgaattcgatcttaatcaaattcaaccaaatcggttcattaactgaaacgttagcggcaatcaaaatggcgaaagacgcaggttacacggcggtgatttcacaccgttctggtgaaacagaagatgccactattgcagatttagccgttggtaccgcagcaggtcaaatcaaaacgggttcaatgagccgttctgaccgtatcgcgaaatacaaccaattaatccgtatcgaagaagcattaggtgataaagcaccattcttaggtttaaaagcggttaaaggtcaagcataa

SEQ ID NO: 4282 - protein, 433 aa, Pasteurella multocida
MAKIVKVIGREIIDSRGNPTVEAEVHLEGGFVGLAAAPSGASTGSREALELRDGDKARFLGKGVLKAVAAVNNEIAQALVGKDATNQAEIDQIMIDLDGTENKSKFGANAILAVSLANAKAAAAAKGMPLFAWIAELNGTPGQYSMPLPMMNIINGGEHADNNVDIQEFMIQPVGAKTLKEALRIGAEVFHNLAKVLKGKGLSTAVGDEGGFAPNLESNAAALACIKEAVEKAGYVLGKDVTLAMDCASSEFYNKENGMYEMKGEGKSFTSQEFTHYLEELCKEYPIVSIEDGQDESDWEGFAYQTKVLGDKVQLVGDDLFVTNTKILKEGIEKGIANSILIKFNQIGSLTETLAAIKMAKDAGYTAVISHRSGETEDATIADLAVGTAAGQIKTGSMSRSDRIAKYNQLIRIEEALGDKAPFLGLKAVKGQA

SEQ ID NO: 4283 - DNA, 1290 bp, Pseudomonas putida
  CDS (1)..(1290)
atggcaaaaatcgtcgacatcaaaggtcgtgaagttctcgattcgcgtggcaaccccactgtggaagccgacgtactgctcgacaacggcatcatcggcagcgcttgcgcgccgtccggtgcttctaccggctcgcgcgaagcgctggagctgcgtgatggcgacaagagccgttacctgggcaagggcgtgctgaaggccgtcgccaacatcaacggcccgatccgtgacctgctgctgggcaaggatccttccgatcagaaggctctggaccgcgccatgatcgaactggacggtaccgagaacaaggccaagctgggcgccaacgccatcctggctgtttccctggctgccgccaaagctgctgcccaggaccaggacctgccgctgtacgcgcacatcgccaacctgaacggcaccccgggccagtactcgatgccggttccgatgatgaacatcatcaacggtggcgagcacgccgacaacaacgtcgacatccaggagttcatggttcagccggttggcgccaagaccttctctgacggcctgcgcatgggtaccgaaatcttccaccacctcaaggctgtactgaaggcccgtggcctgaacaccgccgtaggtgatgaaggtggtttcgcccctaacctggcatccaacgaagacgccctgggcgccatcgctgaagctgtcgaaaaagccggctacaagctgggcaccgacgtgaccctggccctggactgcgcggcttccgaattctacgaagacggcaagtacaacctgtccggcgaaggcaagtcgttcgacgccgaaggcttcgccgactacctgaaaggcctgaccgagcgtttcccgatcatttcgatcgaagacggcctggacgagtccgactgggctggctggaaaatcctcactgacaagatcggtgaaaaagtccagctggtcggtgacgacctgttcgtgaccaacaccaagatcctcaaggaaggcatcgagaaaggcatcggtaactcgatcctgatcaagttcaaccagatcggctcgctgaccgaaaccctggaagccatccagatggccaaggctgctggttacactgcagtgatctcgcaccgttccggtgaaaccgaagactcgaccattgccgacctggctgtgggtactgctgctggccagatcaagacaggctcgctgtgccgttccgaccgcgtttccaagtacaaccagctgctgcgcatcgaagagcaactgggcgccaaagcggtttaccgcggtcgtgccgagtttcgcggctaa

SEQ ID NO: 4284 - protein, 429 aa, Pseudomonas putida
MAKIVDIKGREVLDSRGNPTVEADVLLDNGIIGSACAPSGASTGSREALELRDGDKSRYLGKGVLKAVANINGPIRDLLLGKDPSDQKALDRAMIELDGTENKAKLGANAILAVSLAAAKAAAQDQDLPLYAHIANLNGTPGQYSMPVPMMNIINGGEHADNNVDIQEFMVQPVGAKTFSDGLRMGTEIFHHLKAVLKARGLNTAVGDEGGFAPNLASNEDALGAIAEAVEKAGYKLGTDVTLALDCAASEFYEDGKYNLSGEGKSFDAEGFADYLKGLTERFPIISIEDGLDESDWAGWKILTDKIGEKVQLVGDDLFVTNTKILKEGIEKGIGNSILIKFNQIGSLTETLEAIQMAKAAGYTAVISHRSGETEDSTIADLAVGTAAGQIKTGSLCRSDRVSKYNQLLRIEEQLGAKAVYRGRAEFRG

SEQ ID NO: 4285 - DNA, 1287 bp, Pyrococcus abyssi
  CDS (1)..(1287)
atggagaacccctatgaaattgtggccgttattgcaagggagattctcgacagtaggggcaacccaacggttgaagttgacgtccacacgccaatttccatgggaagggccgcggttccaagcggtgcctcaaccggaactcacgaggccgttgaactgagggatggcggaaagaggtaccatggaaaaggtgttaggagagcagttgagaacgtgaacaagataatagccccagaattagttggaatggatgttagatggcagagggagatagatagacttctaatagaacttgatggaaccgagaacaagagcaaccttggagcaaacgcaattctagcagtttcattagcagttgcaaaagcagcggccaatgcgctcgagttacccttataccagtatcttggtggcgtaaatgcatacgtccttcccgttccactaagcaacgtcatcaacggtggtgttcatgctggcaatgaccttgactttcaagagttcatgataatgccaataggagcaaactcgttcagggaagcgataagatgggtcagcgaaacgtaccacgtgttgaagaaggtaatagcagaaaagtacggaaagaatgcagtgaacgttggagatgagggtggatttgctcctccgatgaaggaggtaaccgaaccattagacgttcttataaaggcaatagaggaggcaggttataaacctggtgaggaaatagcgctcgcgttagatgcagcttccagcgaattctataaggatgggaagtatatagttagcggaaaagagtacacgagggaagagctgctagagctgtacaaggagctaacatcgacatatcccatagtttccatagaagatccattccacgaggaggactgggaaggattcgtgatgataactagggaactagggaagaaggttcagatagttggagacgacctcttcgtgacgaatccgaagagactaaagaagggaatagagatgggagcggcaaatgccctgctcttaaaggtcaaccagataggaacgttaaccgaggcaatggacgcagcatacatggcatttagggctggatatggagttgtagtttcccatagaagtggagagacagaagatgcaacgatagcagatttggcagttgcactaaatgcgggccagataaagactggagcacctgctaggagcgatagaaatgctaagtacaaccagcttataaggatagaggaagagcttgaaggggttgcagtttacgcgggcaagaacttcaggaaggtattcttctga

SEQ ID NO: 4286 - protein, 428 aa, Pyrococcus abyssi [sequence omitted]

SEQ ID NO: 4287 - DNA, 1293 bp, Pyrococcus furiosus
  CDS (1)..(1293)
atggagaacccttatgaaattgttggtgtagtggcaagagaaatactagacagcaggggaaatccaacagtagaagttgacgtttatacacatgttggtatgggcagagccgctgtcccaagtggagcttctacaggaactcatgaggccctagagcttagggatggcggaaagaggtatcatggaaaaggagttagaagggcagtggaaaacgtcaacaaaataattgctcctgagcttataggaatggacgttagatggcagagagaaatagatgctcttctcttagagcttgatggaacagaaaacaagagcaacgtgggtgcaaatgccattttggcagtctctcttgccgttgcaaaggccgctgcgaactcccttgaactaccactctatcaatacttgggaggagtaaacgcttacgttctcccagtcccacttagcaacgttataaacggaggagttcacgcaggaaatgacttagacttccaagaatttatgataatgccaattggggcagattccttcagagaggcaattagatgggtatcagagacctaccacgtccttaagaaagtcattatggagaagtacggaaagaatgccgtaaacgttggagatgagggaggatttgcacctccaatgaaggaagttaccgaacccctagatgtgcttattaaggcaatagaagaagctggatataaacccggagacgagattgcattggccttagacgttgcatcaagcgaactcttcaacgaggagactggaaaatacgtagttggtgggaaagaatacgacagaggagagcttctcgaactttacaaagacctaacatcgacatatccaattgtctcaattgaagacccattccacgaagaagactgggaaggattcgtgatgataactaaagaacttgggcacaaggttcaaattgttggtgatgacctcttcgtcacaaatccaaagagactaagaaaaggaattgaacttggagctgcaaacgcactcctgctcaaagtgaaccagatagggacgttgagtgaggccatggatgccgcatttacagcattcagagcaggatatggggtaatagtctcccacaggtccggagaaacggaagatgctaccattgccgacttagcagtagcattaaatgctggtcaaataaaaacgggggccccagccagaagcgacagaaatgccaagtacaaccagctaattagaattgaggaagagcttgaaggtgttgcagtctacgctgggaagaggtttaggaaggtcttcttctga

SEQ ID NO: 4288 - protein, 430 aa, Pyrococcus furiosus
MENPYEIVGVVAREILDSRGNPTVEVDVYTHVGMGRAAVPSGASTGTHEALELRDGGKRYHGKGVRRAVENVNKIIAPELIGMDVRWQREIDALLLELDGTENKSNVGANAILAVSLAVAKAAANSLELPLYQYLGGVNAYVLPVPLSNVINGGVHAGNDLDFQEFMIMPIGADSFREAIRWVSETYHVLKKVIMEKYGKNAVNVGDEGGFAPPMKEVTEPLDVLIKAIEEAGYKPGDEIALALDVASSELFNEETGKYVVGGKEYDRGELLELYKDLTSTYPIVSIEDPFHEEDWEGFVMITKELGHKVQIVGDDLFVTNPKRLRKGIELGAANALLLKVNQIGTLSEAMDAAFTAFRAGYGVIVSHRSGETEDATIADLAVALNAGQIKTGAPARSDRNAKYNQLIRIEEELEGVAVYAGKRFRKVFF

SEQ ID NO: 4289 - DNA, 1284 bp, Ralstonia solanacearum
  CDS (1)..(1284)
atgagtgccatcgtagatatcatcgggcgcgaagtgctggactcgcgcggcaatcccaccgtcgaatgcgacgtgctgctggaatcgggcgtgatgggccgcgcggcggtgccgtcgggcgcctccaccggctcgcgtgaagccatcgagctgcgcgacggcgacaagggccgctatctgggcaagggcgtgctgaaggccgtcgagcacatcaacaccgagatctccgaagccatcatgggcctggacgcctccgagcaggcgttcctggaccgcacgctgatcgacctggacggcaccgagaacaagggccgcctgggcgccaacgccacgctggccgtgtcgatggccgtggccaaggccgccgccgaggaagccggcctgccgctgtaccgctacttcggcggttcgggcgcgatgcagatgccggtgccgatgatgaacatcgtcaacggcggcgcgcacgccaacaacagcctggacatccaggaattcatggtgatgccggtcggccagcagagcttccgtgaagccctgcgctgcggcgccgagattttccacgcgctcaagaagatcatcgccgacaagggcatgagcacggcggtgggcgacgagggcggctttgccccgaacttcgccagcaacgaagagtgcctgaacaccatcctgtcggcgatcgaaaaggccggctaccgtccgggcgaagacgtgctgctggcgctggattgcgctgcctccgagttctaccgcgacggcaagtaccacctggacggtgaaggcctgcagctgtcgtcggtggacttcgccaactacctggcgaacctggccgacaagttcccgatcgtctcgatcgaagacggcatgcacgagagcgactgggacggctggaaggtcctgaccgaaaagctcggcaacaaggtccagttggtgggcgacgatctgttcgtcaccaacacgcgcatcctgaaggaaggcatcgaaaagggcatcgccaactcgatcctcatcaagatcaaccagatcggcacgctgaccgagacgttcgccgccatcgagatggccaagcgggccggctacaccgctgtgatctcgcaccgctcgggcgagaccgaggacagcaccatcgccgatatcgcggtgggcaccaacgccggccagatcaagaccggctcgctgtcgcgctcggaccgcatcgccaagtacaaccagctgctgcgcatcgaggaagatctgggcgacatcgccagctacccgggcaagtcggcgttctataacctgcgataa

SEQ ID NO: 4290 - protein, 427 aa, Ralstonia solanacearum [sequence omitted]

SEQ ID NO: 4291 - DNA, 1275 bp, Rhizobium loti
  CDS (1)..(1275)
atgaccgccatcatcgacattgtcggacgtgaaatcctggacagccgtggaaacccgaccgtcgaggtcgatgttgtacttgaagacggttcgatgggccgcgccgcggtgccgtcgggcgcctcgaccggcgcccatgaagccgtcgagcttcgcgacggcggcgcccgctatctcggcaagggcgtgctcaaggccgtagaggcggtcaatggcgagctgttcgaagcgatcggcggcatggaagccgaaaaccagatccatatcgatcagaccatgatcgagcttgatggcacgcccaacaagagccggctcggcgccaatgccattctcggcgtttcgctggcggtggccaaggccgcggccgatgccgccggcctgccgctctatcgctatgtcggcggcaccaaggcgcacattctgcctgtgccgatgatgaacatcatcaatggcggcgcccatgccgacaatccgatcgacttccaggaattcatgatcctgccggtcggcgcgccgactttgcgtgaaggcgtgcgctggggctcggaaatcttccacacgctgcgcaagaagctgaaggatgccggccacaacaccaatgtcggcgacgagggcggctttgccccgaacctgaagagcgcgccggtggcgctcgatttcatcatggaatcgatcgagaaggccggcttcaagccgggcgaggaaatcgcgctcggcctcgattgcgccgcgaccgagttcttcaaggacggcaattacgtctatgaaggcgagaagaagacgcgcgatcccaaggcccaggccaagtaccttgccaagctcgccgccgactatccgatcgtctcgatcgaggacggccttgccgaggacgactgggaaggctggaaatatctgaccgacttgatcggcaagaagacacagctggtcggcgacgaccttttcgtcaccaacacggcgcggctgcgcgacggcatccgcatgggcgttgccaattcgatcctggtcaaggtcaaccagatcggctcgctgacggaaacgctcgatgccgtcgagaccgcgcacaaggctggctacaccgccgtcatgtcgcaccgttcgggcgagaccgaggattcgaccatcgccgatctcgccgtcgccaccaattgcgggcagatcaagaccggctcgctgtcgcgctccgaccgcatggccaaatacaaccagctgatccgcatcgaggaagagcttggcaagcaggcgcgttacgccggcaagtcggtgatcaagggctga

SEQ ID NO: 4292 - protein, 424 aa, Rhizobium loti
MTAIIDIVGREILDSRGNPTVEVDVVLEDGSMGRAAVPSGASTGAHEAVELRDGGARYLGKGVLKAVEAVNGELFEAIGGMEAENQIHIDQTMIELDGTPNKSRLGANAILGVSLAVAKAAADAAGLPLYRYVGGTKAHILPVPMMNIINGGAHADNPIDFQEFMILPVGAPTLREGVRWGSEIFHTLRKKLKDAGHNTNVGDEGGFAPNLKSAPVALDFIMESIEKAGFKPGEEIALGLDCAATEFFKDGNYVYEGEKKTRDPKAQAKYLAKLAADYPIVSIEDGLAEDDWEGWKYLTDLIGKKTQLVGDDLFVTNTARLRDGIRMGVANSILVKVNQIGSLTETLDAVETAHKAGYTAVMSHRSGETEDSTIADLAVATNCGQIKTGSLSRSDRMAKYNQLIRIEEELGKQARYAGKSVIKG

SEQ ID NO: 4293 - DNA, 1275 bp, Rhizobium meliloti
  CDS (1)..(1275)
atgactgcaatcatcgacatcatcggccgagagatcctcgacagccgcggcaacccgaccgtcgaggtcgatgtccatctcgaggatggcagtttcggtcgcgcggcggttccctcgggcgcctccaccggtgcgcatgaagcggttgagctgcgcgatggcggcacgcgttatctcggcaagggcgtcgagcgcgccgtcgatgcggtgaacggcgagatattcgaggcgatcggcggcctcgacgctgaaaatcagatccagatcgaccgtaccatgatcgagctcgacggcacgccgaacaagtcgcgcctcggcgccaacgccattctcggcgtttcgctcgccgtcgcgaaggccgctgcggaagcctccggcctgccgctctaccgctatgtcggcggcccgaacgcgcatctcctgcccgttccgatgatgaacatcatcaatggcggcgcgcacgccgacaatccgatcgacttccaggaattcatgatcatgccggtcggcgccgagaccctgaaggacgccgtccgcatgggttcggaagtcttccacacgctgaagaagcagctcgctgcggatggccataacaccaatgtcggcgacgaaggcggctttgcgccgggcctcgcctcggcgcctgcagccctcgacttcatcatgaagtcgatcgagaaggccggttacaaacctggcgaggacatgtatgtcgccctcgactgcgcttcgaccgaattcttcaaggacggcaaatacgtgctcgagggtgagggccgtacgctggagccgggcgccatggccgagtatctcgccgagctcgccggcaaatatccgatcatctcgatcgaggacggcatggctgaagacgattgggacggctggaaatccctgaccgacctcgtcggcaacaagtgccagcttgtcggcgacgacctgttcgtcaccaattctgcgcgcctgcgtgacggcatcaagatgggcgtcgcgaactccatcctcgtcaaggtcaaccagatcggatcgctttcggaaacgctcgatgcggtcgagaccgcgcacaaggcgcgttataccgccgtcatgtcgcaccgctccggcgagaccgaggattcgacgattgccgacctcgcggtcgccaccaattgcggtcagatcaagaccggctcgctcgcacgttccgaccggctcgccaagtacaaccagttgatccgtatcgaagaacagctcggcccgcaggcgcaatatgccggccgctcggtcctgcgtggatga

SEQ ID NO: 4294 - protein, 424 aa, Rhizobium meliloti
MTAIIDIIGREILDSRGNPTVEVDVHLEDGSFGRAAVPSGASTGAHEAVELRDGGTRYLGKGVERAVDAVNGEIFEAIGGLDAENQIQIDRTMIELDGTPNKSRLGANAILGVSLAVAKAAAEASGLPLYRYVGGPNAHLLPVPMMNIINGGAHADNPIDFQEFMIMPVGAETLKDAVRMGSEVFHTLKKQLAADGHNTNVGDEGGFAPGLASAPAALDFIMKSIEKAGYKPGEDMYVALDCASTEFFKDGKYVLEGEGRTLEPGAMAEYLAELAGKYPIISIEDGMAEDDWDGWKSLTDLVGNKCQLVGDDLFVTNSARLRDGIKMGVANSILVKVNQIGSLSETLDAVETAHKARYTAVMSHRSGETEDSTIADLAVATNCGQIKTGSLARSDRLAKYNQLIRIEEQLGPQAQYAGRSVLRG

SEQ ID NO: 4295 - DNA, 1497 bp, Rhodotorula rubra
  CDS (102)..(1421)
attgacatcaattgtttgtttttttttttaatttatcttataaatacttgtttcttaaaaaaagaaaacccccaattgaattcagcaaactataattaacaatggctatttcaaagatccactccagatacgtctacgactccagaggaaacccaactgttgaggttgaattgaccactgaaaagggtacttttagatcaattgtcccatccggtgcttccactggtgtccacgaagccttggagttgagagacggtgacaaatcaaaatggttgggtaaaggtgtcttgaaggccgttgccaacgttaacgacacaattgccccagccttgattgaggccaacattgatgttgctgaccaagccaagattgacgaattcttgttgaaattggacggtactccaaacaaggccaagttgggtgccaacgccatcttgggtgtctcattggctgccgctaaagccggtgccgctcaaaaagatgtcccattgtacaagcacattgctgacatttcaaaggccaaggaaggcaaatttgtcttgccagttcctttccaaaacgtcttgaacggtggttcccacgctggtggtgacttggctttccaagaatttatgattgtcccatccggtgctccatcattctctgaaggtttgagaatcggttcagaagtttaccaccacttgaaatcattgaccaagaagaagtacggtcaatccgcaggtaacgttggtgacgaaggtggtgttgctccagatatcaaaaccgctaaggaagctttggacttgatcgtttcagctattgaagctgctggttacaccggtcaagttgacattgccatggatgttgcatcatccgaattctacaaggatggattgtacgacttggactttaaaaatccaaactctgacaagtcgaaatggatcactggtccacaattggctgaattgtacgagcaattgttgaatgaatacccaattgtctccattgaagacccattcgctgaggatgactgggaagcttggagccactttttctccaaggttgaaggtaagacccaaatcgttggtgatgacttgaccgttaccaacccaattagaattaagaaggccatcgagaccaaggctgctgacgccttgttgttgaaggttaaccaaatcggtactttgaccgaatcaatccaagctgccaatgactcatacgctgccggttggggtgttatggtctcccacagatcaggtgagaccgaagacacctttatcgctgacttgtccgtcggtattagatcaggtcaaaccaagactggtgctccagctagatccgagagattggccaaattgaaccaaatcttgagaatcgaggaagagttgggtgacaaggccatctacgccggtaaggacttccacaaagcccactctttataagcagtttataggttatcagtctgggcactttgataagtgttaattgattgaggtgaagtaaaaaaaaaaaaaaaaa

SEQ ID NO: 4296 - protein, 439 aa, Rhodotorula rubra
MAISKIHSRYVYDSRGNPTVEVELTTEKGTFRSIVPSGASTGVHEALELRDGDKSKWLGKGVLKAVANVNDTIAPALIEANIDVADQAKIDEFLLKLDGTPNKAKLGANAILGVSLAAAKAGAAQKDVPLYKHIADISKAKEGKFVLPVPFQNVLNGGSHAGGDLAFQEFMIVPSGAPSFSEGLRIGSEVYHHLKSLTKKKYGQSAGNVGDEGGVAPDIKTAKEALDLIVSAIEAAGYTGQVDIAMDVASSEFYKDGLYDLDFKNPNSDKSKWITGPQLAELYEQLLNEYPIVSIEDPFAEDDWEAWSHFFSKVEGKTQIVGDDLTVTNPIRIKKAIETKAADALLLKVNQIGTLTESIQAANDSYAAGWGVMVSHRSGETEDTFIADLSVGIRSGQTKTGAPARSERLAKLNQILRIEEELGDKAIYAGKDFHKAHSL

SEQ ID NO: 4297 - DNA, 1462 bp, Schistosoma japonicum
  CDS (7)..(1311)
gggaaaatggcaattatagcgattcacgcccgtcaaatcttcgacagccgagggaatcccacagttgaggttgatctaaaaacagcaaaaggtttgttccgcgcagccgttccaagtggggcttcaacaggtgttcatgaggctcttgaattacgtgatacaaattcaaaggcttatatgtgcaaaggggttttgacagcagttagtaatgtgaataatatcatcgctccagctctgctgaagaaacaaattcctgtaaccaatcaatcggaggttgaccaatttatgatcgaactcgatggcaaagaaaacaaagggaatctcggagcgaatgctatattaggcgtatctttggctgtatgcaaggcgggtgcagctgaattaaatttacctctctataggtatattgcaaagttagctggccataaggatgtcataatgccggttcctgcatttaatgtcattaatggtggcagtcatgctggcaacaagctagcgatgcaggagtttatgattttacctactggggctagctcattcactgaggcaatgcaaatgggttctgaggtgtaccacaatttaaaggctgttatcaaacgtgagtttggattagatgcatgtaacgttggtgacgagggtggttttgcaccgaatattcaggataatatgaaaggtcttcaacttcttgaagaggctataaaaattgctggatatactggaaaagtagagattggtatggattgcgcggcttctgaatattataagaaggggaagtatgatttggatttcaagaatcctcaatctgccgaatctcattggcttagtcctgatgaaatggctaatgtttacaaggaaatgattcagaagtacccaatagtgagcattgaggacccgtttgatcaagatgattgggatgcgtggcctaaattgactgcgtcaactaacattcagattgtcggcgacgacttaacagtcaccaatccgaaacgcattgaaaaggccatcaaagtaaaagcttgcaattgccttcttttgaaagtaaaccagataggttcaataaccgagtctattgaagcttgcaaaatggcacaaaaagcaggctggggtgttatggtttcacatcgatcaggtgaaacggaagataatttcatcgctgatcttgtcgttggtctttgtactggacagatcaaaacaggtgcaccttgtcgatctgaacgtcttgcgaagtacaaccaactcttgcgtattgaagaggaattaggatcaacagcaaagtatgccggaaaacacttccgccatcctcaaatctgaacaaataataatattaacatttcaatgtcttttgaaggactgcattgatttagtttattgtcttatcatgtagactgttatttaaaagaaattaaatgtctgaattgttcccacatttatattaatagagcgtcgaagttatctgtttggt

SEQ ID NO: 4298 - protein, 434 aa, Schistosoma japonicum [sequence omitted]

SEQ ID NO: 4299 - DNA, 1461 bp, Schistosoma mansoni
  CDS (40)..(1344)
aaccgtcacggttttactcttgtgatttgttgcatgaaaatgtccattttaacgatccacgctcgtcaaattttcgatagtcgggggaatcccacagttgaggtggatttgaaaacatctaaaggtttgttccgcgctgccgttccaagtggagcttcgacaggtgtccatgaggctcttgagttacgtgatacaaattcaaaggcttatatgaagaaaggggttttaacagcagtcagtaatgtgaataaaattattgctccagctctaataaacaaaaatattcccgtaacaaatcaggcagctattgacaaatatatgattgatcttgatggtacggaaaacaaggaaaaacttggagccaatgctatattgggagtgtctttggccgtgtgcaaagctggtgcagctgaagccggtttacctctctataggtatattgcgaggttagctgggcatgaagatgttataatgcctgttccagcattcaatgtcattaatggtggcagtcatgccggcaacaagctagccatgcaagaatttatgattctgcctactggggccagctctttcactgaagcaatgcaaatcggtactgaggtgtaccacaatttaaaagctgttatcaaacgtgaatatggactggatgcatgcaacgttggtgacgaaggtggttttgcaccaaatatacaggataatatgaaaggtcttcagctgcttgaagaggccataaaaattgctggctatactgggaaagtagagattggtatggattgtgcggcttctgagttccataagaatgggaaatatgatttagatttcaagaaccctcattctgcagaatcaacctggcttagtcctgatgcaatggctaatatgtacaagcaaatgataagcaaatttccaattgtgagcattgaagatccatttgatcaggatgattgggaaacctggcccaaactaacttcttcaacaaatattcaaattgttggagacgatttgactgttaccaatccaaagcgcattaaacaggccatcgcttcaaaggcttgcaattgtcttcttttgaaagtaaaccagataggttcattaaccgagtccatcgaagcttgcaagttagcacaagactcaggttggggtgtcatggtttcgcatcgatctggtgaaacggaagatactttcattgctgatctagttgttggactttgcactggacagataaagacgggtgcaccatgtcgttctgatcgtttggccaaatacaaccaacttttacgtattgaagaagagttaggaacagcggcaaaatatgccgggaaaaacttccgccatcccaaagtataagaataattaataaaattaacacttcaatgtcttttggagaactaaattgatttagtttattgtcttattatgtagactgttatttaagaataaaatatttcagttctttaaaaaaaa

SEQ ID NO: 4300 - protein, 434 aa, Schistosoma mansoni
MSILTIHARQIFDSRGNPTVEVDLKTSKGLFRAAVPSGASTGVHEALELRDTNSKAYMKKGVLTAVSNVNKIIAPALINKNIPVTNQAAIDKYMIDLDGTENKEKLGANAILGVSLAVCKAGAAEAGLPLYRYIARLAGHEDVIMPVPAFNVINGGSHAGNKLAMQEFMILPTGASSFTEAMQIGTEVYHNLKAVIKREYGLDACNVGDEGGFAPNIQDNMKGLQLLEEAIKIAGYTGKVEIGMDCAASEFHKNGKYDLDFKNPHSAESTWLSPDAMANMYKQMISKFPIVSIEDPFDQDDWETWPKLTSSTNIQIVGDDLTVTNPKRIKQAIASKACNCLLLKVNQIGSLTESIEACKLAQDSGWGVMVSHRSGETEDTFIADLVVGLCTGQIKTGAPCRSDRLAKYNQLLRIEEELGTAAKYAGKNFRHPKV

SEQ ID NO: 4301 - DNA, 1296 bp, Shewanella oneidensis
  CDS (1)..(1296)
atggctaagattattaacgtgattggtcgcgagattatggattctcgtggtaacccaacagttgaagccgaagtgcatttagaaggtggttttatcggtatggcggctgcgccttctggtgcgtctaccggtagccgtgaagcgctagaactgcgtgatggcgataaaagccgttacttaggcaaaggtgtattaactgctgtggctaacgtaaacggtccaatccgtactgcgttaatcggtaaagatgcgactgcacaagccgaacttgatcaaatcatgatcgacttagacggcactgaaaacaaagacaagttaggagctaacgcgattttagctgtgtctttagcggcggctaaagcggctgcagcattcaaaggcatgcctttatacgctcacattgcggaattaaacggcacacctggccaatacgctatgccagtaccgatgatgaacatcctcaacggtggtgagcacgcagataacaacgttgatatccaagaattcatggttcaacctgttggcgcgaaaaatttccgcgaagctttacgtatgggcgctgagattttccacaccctgaaaaaagttctgcacggtaaaggtttaagcacttctgtaggtgacgaaggtggttttgcacctaacctgtcttcaaacgctgatgcattagcggtaatcaaagaagcggttgaattagcgggttacaagctgggtactgacgtgactctggcactagactgcgccgcttccgagttctacaaagacggtaaatatgacttggctggcgaaggcaaagtattcgattcaaacggtttctctgacttcctgaagtcactgactgagcaataccctatcgtatctatcgaagacggtctggacgagtcagattgggatggctgggcatatcaaactcagattatgggcgacaagatccaattagtgggcgacgatttattcgtcactaacactaagatcttaacccgtggtattgagaacggcatcgctaactcaatcctgatcaagtttaaccaaatcggttcattaactgaaaccttagcggctatccgtatggcaaaagcggcgggttacactgcggttatttcacaccgtagtggtgaaactgaagacgccactatcgctgatttagcggtaggtactgcggctggccaaatcaagaccggttcactgtgccgttctgatcgtgttgctaaatacaaccaattgctgcgtatcgaagagcaattaggtgaaaaagcaccttaccgcggtttgaaggaaatcaaaggtcaggcgtaa

SEQ ID NO: 4302 - protein, 431 aa, Shewanella oneidensis
MAKIINVIGREIMDSRGNPTVEAEVHLEGGFIGMAAAPSGASTGSREALELRDGDKSRYLGKGVLTAVANVNGPIRTALIGKDATAQAELDQIMIDLDGTENKDKLGANAILAVSLAAAKAAAAFKGMPLYAHIAELNGTPGQYAMPVPMMNILNGGEHADNNVDIQEFMVQPVGAKNFREALRMGAEIFHTLKKVLHGKGLSTSVGDEGGFAPNLSSNADALAVIKEAVELAGYKLGTDVTLALDCAASEFYKDGKYDLAGEGKVFDSNGFSDFLKSLTEQYPIVSIEDGLDESDWDGWAYQTQIMGDKIQLVGDDLFVTNTKILTRGIENGIANSILIKFNQIGSLTETLAAIRMAKAAGYTAVISHRSGETEDATIADLAVGTAAGQIKTGSLCRSDRVAKYNQLLRIEEQLGEKAPYRGLKEIKGQA

SEQ ID NO: 4303 - DNA, 1305 bp, Staphylococcus epidermidis
  CDS (1)..(1305)
atgccaattattacagatgtttacgctcgcgaagtcttagactcacgtggtaacccaacagttgaagttgaagtattaactgaaagtggtgctttcggacgtgcattagtaccttctggtgcttctactggtgaacatgaagcagttgaattacgtgatggagataaatcacgttatttaggtaaaggtgtgactaaagcggtagaaaatgttaacgaaatgatcgcaccagaaatcgttgaaggtgaattttcagttttagatcaagtatctattgataaaatgatgattcaattagacggtacacacaacaaaggtaaattaggtgcaaatgccattttaggtgtttctattgccgtagctcgtgcagctgctgacttattaggtcaaccattatataaatatttaggtggatttaatggtaaacaattgccagtacctatgatgaatattgttaatggtggttctcactcagatgcaccaattgctttccaagagttcatgattttacctgtaggtgctgagtcattcaaagaatcattacgttggggtgcagaaatcttccataaccttaaatcaatcttaagtgaacgcggtttagaaactgcagtaggtgatgaaggtggtttcgcacctagatttgaaggcactgaagacgctgtagaaactattattaaagctatcgaaaaagcaggatacaaaccaggtgaagatgtattcttaggatttgactgtgcttcttctgaattctatgaaaatggtgtttatgattacactaaattcgaaggtgaacacggtgctaaacgtagtgcagcagagcaagttgactacttagaagaattaattggtaaatatccaatcatcactattgaagatggtatggatgaaaacgattgggaaggttggaaacaattaactgatcgtatcggtgataaagttcaattagttggtgatgatttattcgtaactaacactgaaattttatctaaaggtatcgaacaaggtattggtaactcaatcttaatcaaagtaaaccaaatcggtacattaactgaaacattcgatgctattgaaatggctcaaaaagctggatatactgcggttgtatctcaccgttctggtgaaactgaagatactacaattgctgatatcgcagttgctacaaatgcaggccaaattaaaacaggttcattatctagaactgaccgtattgctaaatacaatcaattattacgtattgaagatgaattatacgaaacagctaaatttgaaggaattaaatctttctacaatttagataaataa

SEQ ID NO: 4304 - protein, 434 aa, Staphylococcus epidermidis
MPIITDVYAREVLDSRGNPTVEVEVLTESGAFGRALVPSGASTGEHEAVELRDGDKSRYLGKGVTKAVENVNEMIAPEIVEGEFSVLDQVSIDKMMIQLDGTHNKGKLGANAILGVSIAVARAAADLLGQPLYKYLGGFNGKQLPVPMMNIVNGGSHSDAPIAFQEFMILPVGAESFKESLRWGAEIFHNLKSILSERGLETAVGDEGGFAPRFEGTEDAVETIIKAIEKAGYKPGEDVFLGFDCASSEFYENGVYDYTKFEGEHGAKRSAAEQVDYLEELIGKYPIITIEDGMDENDWEGWKQLTDRIGDKVQLVGDDLFVTNTEILSKGIEQGIGNSILIKVNQIGTLTETFDAIEMAQKAGYTAVVSHRSGETEDTTIADIAVATNAGQIKTGSLSRTDRIAKYNQLLRIEDELYETAKFEGIKSFYNLDK

SEQ ID NO: 4305 - DNA, 1308 bp, Streptococcus agalactiae
  CDS (1)..(1308)
atgtcaattattactgatgtttacgcacgcgaagtccttgactcacgcggtaacccaacacttgaagtagaagtttatacagaatcaggtgctttcggacgtggtatggttccttcaggagcttctactggtgaacacgaagcagttgaacttcgcgacggcgacaagtctcgttacggtggtcttggaacacaaaaagctgttgacaatgtaaataacgttattgcagaagcaatcattggttatgatgtacgcgaccaacaagctatcgaccgtgctatgatcgctcttgacggaactcctaataaaggtaaattaggtgcaaatgctattcttggtgtttctattgccgtagcacgtgctgcagctgattaccttgaagtaccactttacagctaccttggtggattcaacactaaagttcttccaactccaatgatgaacatcatcaacggtggttctcactcagacgctccaatcgcattccaagaattcatgattatgccagttggtgcaccaactttcaaagaagcacttcgttggggtgctgaagtattccatgctcttaagaaaatccttaaagaacgtggtcttgaaacagctgttggtgatgaaggtggatttgcacctaaatttgaaggtactgaagatggcgtagaaactattcttaaagctattgaagcagctggttacgaagctggcgaaaacggaatcatgattggttttgactgtgcttcatcagagttctacgatgcggaacgtaaagtatacgactacagtaaattcgaaggtgaaggtggagcagttcgtactgctgcagaacaaatcgattaccttgaagagttggttaacaaatacccaatcatcactattgaagatggtatggatgaaaacgactgggatggttggaaagctcttacagaacgccttggtggacgtgtacaattagttggtgacgatttcttcgttacaaatactgattacttagcacgtggtatcaaagaagaagctgctaactcaatccttatcaaagttaaccaaatcggtactttgacagaaactttcgaagctattgaaatggctaaagaagctggttacactgcagttgtatcacaccgttcaggtgaaactgaagattcaacaatcgctgatatcgcagttgcaactaacgctggtcaaattaaaacaggttcattatcacgtactgaccgtattgctaaatacaaccaattacttcgtatcgaagaccaacttggtgaagttgctcaatacaaaggtatcaaatcattctacaacttaaaaaaatag

SEQ ID NO: 4306 - protein, 435 aa, Streptococcus agalactiae
MSIITDVYAREVLDSRGNPTLEVEVYTESGAFGRGMVPSGASTGEHEAVELRDGDKSRYGGLGTQKAVDNVNNVIAEAIIGYDVRDQQAIDRAMIALDGTPNKGKLGANAILGVSIAVARAAADYLEVPLYSYLGGFNTKVLPTPMMNIINGGSHSDAPIAFQEFMIMPVGAPTFKEALRWGAEVFHALKKILKERGLETAVGDEGGFAPKFEGTEDGVETILKAIEAAGYEAGENGIMIGFDCASSEFYDAERKVYDYSKFEGEGGAVRTAAEQIDYLEELVNKYPIITIEDGMDENDWDGWKALTERLGGRVQLVGDDFFVTNTDYLARGIKEEAANSILIKVNQIGTLTETFEAIEMAKEAGYTAVVSHRSGETEDSTIADIAVATNAGQIKTGSLSRTDRIAKYNQLLRIEDQLGEVAQYKGIKSFYNLKK

SEQ ID NO: 4307 - DNA, 2197 bp, Streptococcus intermedius
  CDS (8)..(1312)
gtaaaaaatgtcaattattactgatgtttacgctcgcgaagtcctagactcacgcggtaacccaacacttgaagtagaagtttatactgaatcaggtgctttcggacgtggtatggttccatctggagcttctactggtgaacacgaagcagttgagcttcgtgatggtgacaaatctcgttacggtggtcttggtacacaaaaagctgttgacaacgtaaacaatatcattgctgaagcagttattggttatgacgttcgcgatcaacaagctattgaccgtgcaatgattgcacttgatggtactccaaataaaggtaaattgggtgcaaatgcaatccttggtgtatctattgctgtggcacgtgctgctgctgattaccttgaaattccactttatagctaccttggcggattcaatactaaagttcttccaactccaatgatgaacatcatcaacggtggttctcactctgacgctccaatcgctttccaagaatttatgatcgtacctgctggtgcacctacattcaaagaagctcttcgttggggtgctgaaattttccatgctcttaagaaaatccttaaatctcgtggtcttgcaacagctgttggtgacgaaggaggatttgctcctcgttttgatggaactgaagatggtgtagaaacaattcttgctgctattgaagctgctggttatgttcctggtaaagatgtattccttggattcgactgtgcatcatcagaattctatgacaaagaacgtaaagtttatgattacactaaattcgaaggtgaaggagctgcagttcgtacagctgatgaacaaattgactaccttgaagaattggtgaacaaatatccaattatcactattgaagatggtatggatgaaaatgactgggatggttggaagaagcttactgaacgtcttggtaaaaaagtacaacctgttggtgatgacttcttcgtaacaaatacttcatatcttgaaaagggtatcaatgaagcttgtgctaactcaatccttatcaaagtgaaccaaattggtacccttactgaaacattcgacgctattgaaatggcgaaagaagctggttacactgccgttgtatcacaccgttcaggtgaaactgaagattcaacaatcgctgacatcgcagtcgcagctaacgcaggacaaattaagactggttcactttcacgtacagaccgtattgctaaatacaaccaattgcttcgtatcgaagaccaacttggtgaagtagctgaatatcgtggtttgaaatctttctataacttgtcaaaataattcagttataatacgaatcggctagtgaaactagtcgattttttctttattgtgtcgataaattttaggaggataatatggataaaattgaagaacttgctcgtattattcgaaatagccaaaatatagtattttttggtggtgcaggtgtttcaaccgaatctgccattccagattttcgtagttctaatggtatttacaatattgaattaaatcaacacttcacagcagaacaactagtttcctatacaatgtttgaacattatccaaagcagttttttgatttttacaagaaatatctcatttatcctgatgctaaccaaatgtagcacatatctatttagctcatttagagaatgtaggaaaactcaagcgattatcacacaaaatattgatagtttacacgagatggcaggaagtaaaaatgtattgaaactacatggtagtgtagaccgtaattattgtaccaattgtccatcgtttttatgatttagaggattttttgaaattgtttggaagtattccttattgcgagacttgtggccacattgtaaagccagatgtgactctttatgaggaatctctggatatgaccgtttttaatcaggcaattcaggctattagtcgagcagatctgctcattattggtggaacttcattagttgtttatctgcggctagtttggttcagtattttcaaggaagacagctagtcattatcaataaaagtaaagtggtacatgataatcaagctagcttaatcatcgagggcaagattggtgaggtactcagtaaagtatggaaattaacggataattaattcgaaaatcagtgaatgtatggcatttagctgtattttcaaaaaaagtaaaatttaaaaaatgtc

SEQ ID NO: 4308 - protein, 434 aa, Streptococcus intermedius
MSIITDVYAREVLDSRGNPTLEVEVYTESGAFGRGMVPSGASTGEHEAVELRDGDKSRYGGLGTQKAVDNVNNIIAEAVIGYDVRDQQAIDRAMIALDGTPNKGKLGANAILGVSIAVARAAADYLEIPLYSYLGGFNTKVLPTPMMNIINGGSHSDAPIAFQEFMIVPAGAPTFKEALRWGAEIFHALKKILKSRGLATAVGDEGGFAPRFDGTEDGVETILAAIEAAGYVPGKDVFLGFDCASSEFYDKERKVYDYTKFEGEGAAVRTADEQIDYLEELVNKYPIITIEDGMDENDWDGWKKLTERLGKKVQPVGDDFFVTNTSYLEKGINEACANSILIKVNQIGTLTETFDAIEMAKEAGYTAVVSHRSGETEDSTIADIAVAANAGQIKTGSLSRTDRIAKYNQLLRIEDQLGEVAEYRGLKSFYNLSK

SEQ ID NO: 4309 - DNA, 1299 bp, Streptococcus mutans
  CDS (1)..(1299)
atgtcaattattactgatgtttacgctcgcgaagtccttgactcacgcggtaacccaacacttgaagtagaagtttacactgaatcaggtgcattcggacgtggtatggttccttcaggagcttctactggtgaacacgaagcagttgaacttcgcgatggagataaatcacgttatggtggtcttggtactcaaaaagctgttgataatgtaaacaatattattgctgaagcacttatcggatatgatgttcgtgatcaacaagctattgataaagcaatgatcgcacttgacggtactccaaacaaaggtaaacttggtgctaatgctattcttggtgtttctattgctgtagctcgtgctgctgctgatttccttgaaattccactttacagctaccttggtggatttaacactaaagttctgccaactccaatgatgaacatcatcaacggtggttctcactcagatgctccaatcgctttccaagaatttatgattgtacctgctggtgcacctacattcaaagaagctcttcgttggggtgctgaaatcttccatgcacttaagaaaattcttaaggaacgcggacttgaaacagctgttggtgacgaaggtggattcgctcctaagtttgatggaactgaagacgctgtagaaacaattatcaaagctattgaaacagctggttacaaaccaggtgaagaagtcttccttggatttgactgtgcgtcatcagaattctatgataatggtgtttatgactacactaaattcgaaggtgaaaaaggtgctaagcgttcagctgcagaacaaattgattatattgaagaattggttaacaaatacccaattatcacaattgaagatgctatggacgaaaatgactgggatggctggaaagcattgactgctcgccttggtgaccgtgtacaattggttggtgacgacttcttcgttacaaatacggactaccttgctcgtggtatcaaagaaggtgctgcaaactcaatccttatcaaagttaaccaaatcggtactttgactgaaacatttgaagctatcgaaatggctaaagaagctggttatactgccgttgtatcacaccgttcaggtgaaactgaagattcaacaatcgctgatatttcagttgcaaccaacgctggacaaatcaagactggttcattgtcacgtacagatcgtattgctaaatacaaccaattgcttcgtatcgaagatcaacttggtgaagtcgctgaataccgtggtcttaaatcattctacaacttgaaaaaataa

SEQ ID NO: 4310 - protein, 432 aa, Streptococcus mutans
MSIITDVYAREVLDSRGNPTLEVEVYTESGAFGRGMVPSGASTGEHEAVELRDGDKSRYGGLGTQKAVDNVNNIIAEALIGYDVRDQQAIDKAMIALDGTPNKGKLGANAILGVSIAVARAAADFLEIPLYSYLGGFNTKVLPTPMMNIINGGSHSDAPIAFQEFMIVPAGAPTFKEALRWGAEIFHALKKILKERGLETAVGDEGGFAPKFDGTEDAVETIIKAIETAGYKPGEEVFLGFDCASSEFYDNGVYDYTKFEGEKGAKRSAAEQIDYIEELVNKYPIITIEDAMDENDWDGWKALTARLGDRVQLVGDDFFVTNTDYLARGIKEGAANSILIKVNQIGTLTETFEAIEMAKEAGYTAVVSHRSGETEDSTIADISVATNAGQIKTGSLSRTDRIAKYNQLLRIEDQLGEVAEYRGLKSFYNLKK

SEQ ID NO: 4311 - DNA, 1308 bp, Streptococcus pyogenes
  CDS (1)..(1308)
atgtcaattattactgatgtatacgctcgcgaagtccttgactcacgcggtaacccaacacttgaagtagaagtttatacagaatcaggtgcattcggacgtggtatggttccttcaggagcttcaactggtgaacatgaagccgttgaacttcgtgatggtgacaaatctcgttaccttggtctaggtactcaaaaagcagttgataacgttaataacattatcgctgaggcaatcatcggttacgatgttcgcgatcaacaagctatcgaccgtgcaatgatcgctcttgacggtactcctaacaaaggcaaacttggtgctaatgctattcttggtgtttctatcgctgttgctcgtgcagctgctgactatcttgaagtgccactttacacttaccttggcggattcaacactaaagttcttccaactcctatgatgaacatcatcaacggtggatcacactcagatgccccaattgcattccaagagttcatgatcatgccagttggtgcacctactttcaaagaaggtcttcgttggggtgctgaagttttccacgctcttaagaaaattcttaaagaacgcggacttgttacagctgtaggtgacgaaggtggatttgctcctaaatttgaaggaactgaagacggtgtagaaactatccttaaagctattgaagcagctggttacgaagctggtgaaaacggcattatgatcggttttgactgtgcatcatcagaattctacgacaaagaacgtaaagtttacgactatactaaatttgaaggtgaaggcgctgctgttcgtacatctgcagaacaagttgattaccttgaagagttggttaacaaatacccaattattactatcgaagatggtatggatgaaaacgactgggatggttggaaagttcttactgaacgcctaggcaaacgtgttcaattggttggtgacgacttcttcgttacaaacactgaataccttgctcgtggtatcaaagaaaatgcagctaactcaatccttatcaaagttaaccaaatcggtactttgactgaaacgtttgaagctatcgaaatggctaaagaagctggatatactgccgttgtatcacaccgttcaggtgaaactgaagattcaacaatcgctgacatcgcagttgcaacaaacgctggccaaatcaaaacaggttcattgtcacgtacagaccgtattgctaaatacaaccaattacttcgtatcgaagatcaacttggtgaagttgctcaatacaaaggtatcaaatcattctataacttaaaaaaatag

SEQ ID NO: 4312 - protein, 435 aa, Streptococcus pyogenes
MSIITDVYAREVLDSRGNPTLEVEVYTESGAFGRGMVPSGASTGEHEAVELRDGDKSRYLGLGTQKAVDNVNNIIAEAIIGYDVRDQQAIDRAMIALDGTPNKGKLGANAILGVSIAVARAAADYLEVPLYTYLGGFNTKVLPTPMMNIINGGSHSDAPIAFQEFMIMPVGAPTFKEGLRWGAEVFHALKKILKERGLVTAVGDEGGFAPKFEGTEDGVETILKAIEAAGYEAGENGIMIGFDCASSEFYDKERKVYDYTKFEGEGAAVRTSAEQVDYLEELVNKYPIITIEDGMDENDWDGWKVLTERLGKRVQLVGDDFFVTNTEYLARGIKENAANSILIKVNQIGTLTETFEAIEMAKEAGYTAVVSHRSGETEDSTIADIAVATNAGQIKTGSLSRTDRIAKYNQLLRIEDQLGEVAQYKGIKSFYNLKK

SEQ ID NO: 4313 - DNA, 1269 bp, Streptococcus thermophilus
  CDS (1)..(1269)
atgacagtcacaatcgaaaacatccacgcgagagaaatttttgattctagaggaaatccaaccgttgaggtagatgttagattaacagatggaacactaggacgtgcagcagtaccctcaggagcatcaaccggagaccgtgaagcagttgaattaagagatggcggagcccgccttcaagggaaaggcgtttctaaagccgtcgcaaatgtcaatggcgaaatttatgaagccttgaaaggacaatcaccatttaatcaagcaaaattagatcatttgatgattgagcttgacgggacagaaaataaatcttgtttaggggctaatgcaattttaggggtttcaatggctatttttcgtgcggcagcgaatagtgaaaaaattccactttatcgctattttgggggagttgatttggaacttccacaaccatttttcaatgtcattaatggtggagtacatgccgattcaggaattgacgttcaagaatttttgattacaccagtcaaacgggacagctttcgtgatggtttaaaaaaaattgcaaatatctaccatactctgaaaaaaattttatctgacaaagggctaaaaacacccgtaggtgatgaaggtggctttgcccctaaacttggtactactgaaaatgcaattgctatactttatcaaccaattgacagtgcaggatattttcctggtgaaaaaattgcgattgccattgactcatcttcaattgaattttatgatgataaaaaaaaattttatcgttttgaagggaaaaatttgacttctaaagaactattgacttactatgacaatttagttgaaaaatatccagcacttatttccattgaagatggattttctgaacatgactgggagggctttgcagctcaaacgaaagctcgaggtcaaaaaattcaattagtaggtgatgatatttttgtgacaaatcccacaattttcaaagaaggaattaaaaagaacgtagcaaatgctattttgattaaacttaatcaaatcggaacagtaactgaaacgattgaaaccattagtttagcgagaaaagcaggctataagacaatgatttctcaccgttcaggtgaaacagttgatagctacattgccgatttttccgtagccatgcatgctggtcagataaaatcaggttcaatggctcgaagtgaacgggttgaaaaatataatcaattgttgcgaattgaagaagatttaggaaaagatgtagctcttgctcaatttccaggatag

SEQ ID NO: 4314 - protein, 422 aa, Streptococcus thermophilus
MTVTIENIHAREIFDSRGNPTVEVDVRLTDGTLGRAAVPSGASTGDREAVELRDGGARLQGKGVSKAVANVNGEIYEALKGQSPFNQAKLDHLMIELDGTENKSCLGANAILGVSMAIFRAAANSEKIPLYRYFGGVDLELPQPFFNVINGGVHADSGIDVQEFLITPVKRDSFRDGLKKIANIYHTLKKILSDKGLKTPVGDEGGFAPKLGTTENAIAILYQPIDSAGYFPGEKIAIAIDSSSIEFYDDKKKFYRFEGKNLTSKELLTYYDNLVEKYPALISIEDGFSEHDWEGFAAQTKARGQKIQLVGDDIFVTNPTIFKEGIKKNVANAILIKLNQIGTVTETIETISLARKAGYKTMISHRSGETVDSYIADFSVAMHAGQIKSGSMARSERVEKYNQLLRIEEDLGKDVALAQFPG

SEQ ID NO: 4315 - DNA, 1281 bp, Synechococcus elongatus
  CDS (1)..(1281)
atgatggatacggcgatcgcaaccattcgtgcccgcgaaattctcgactcgcggggtcgccccacggtagaagcagaagttgaactggagtgtggcattgtcggactggctcaggttcctagtggtgcctcaacagggagttttgaggcccatgaattgcgggacggtgatcccaagcgctatggtggcaaaggcgtcctcagcgccgttgaaaacattgaaaccaggattctcagtgcccttgtcgatctcaacgccctggatcaaacggtgattgaccagtgcctcttggaactggatggcagtgagaataaatccaacctcggtgccaatgccattctggcggtttcccttgccacggctaaagccgccgctgaatatcttggtcaacccctctaccgctacttgggggggcctctggccaatgtcctacccgtgcccatgatgaatgtgatcaatggcggggcccacgcggccaacaacattgattttcaggaattcatgatcatgcccattggtgcccctagttttcgggagggtttgcgctggggggcagaggtttttgctgctctgagtaaggtgctggctgataagggtttactgactggtgtgggggatgaaggggggtttgcgcccaacctagactccaaccaagcagctttggatattttgctgcaggcgattgaaacagcgggttacagacccggcactgacgtggccctagccctcgatgttgccgccaatgagttttatgaagacggcaaatatgtgtttgataataccagccgtacggcctctgagttaatccgctactacgaccaattggtaagcacctatcccattatttccattgaggatgggctgcaggaggaggactgggacaactgggcactcttgacggaaaccctggggagtcgcattcaactagtgggggatgatctgtttgtcaccaatcccaagcgtttgcaacggggaattgacaatggcgtggccaatgccatcttgattaagcttaaccagattggttcgttaactgaaactctgcaaaccattgatctggcaacccgcaagggttaccgcgccgtgattagccaccgctctggggaaacagaagatactacgattgcggatttagctgtagctacccgtgcgggtcaaattaaaacgggttccctgtgtcggagtgaacgggtggccaagtacaatcgcctgctgcgcattgaagcagaactgggggatcaggcggtctatgcccccaaggtgggcttggggccgcgctag

SEQ ID NO: 4316 - protein, 426 aa, Synechococcus elongatus [sequence omitted]

SEQ ID NO: 4317 - DNA, 1290 bp, Thermoanaerobacter tengcongensis
  CDS (1)..(1290)
atgtcatcaattattgatatttatgcgagggaaatattagattctcgtggcaatcctacgattgaggtagaagttgaattagacagtggtgcagtgggaagagctgctgtaccgtctggggcttctactggggcttttgaagcaattgagttaagagatggagataagtcaagatacttaggaaaaggcgtattgaaagcagtacagaatgtaaatgacattattgcgccagaattaattggtatggaagcacaggaccaggtagcaattgataaagctatgattgaactggatggaacgcccaataaaagcaagttaggagcaaatgctattttaggtgtgtctttggcagttgcaaaagcggcagcagaagagctgggtcttcctctgtaccagtatttagggggcgtaaatgctaagacacttcctgttccaatgatgaacatactaaatggcggaaagcatgctgacaacaatgtagatatacaagagtttatgattatgcctgtaggagctcccaattttaaagaggctttaaggatgtgttcagaagtttatcacagcctgaaaaatgtgcttcactccaagggattgagcactacagttggcgatgagggaggttttgcgcctaaccttacatcgaatgaagaggcaattaaagtaatacttgaggctatagaaaaagccggatatgtacctggggaagacatagttttagcgttggaccctgcggccactgaaatgtacaaagaagatgggaaataccattttgaaggagagggaattgtgagaacttctgaggaaatgatagagttctgggagcagctcgtcagcaaataccccattgtttctatagaagatggacttgcagaggaagactggaacggatggaaactcttaactgaaagattgggcaaaaaggtgcagctagtaggagacgacctatttgtgacgaatacggaaaggctctcaaaaggcattaacatgggagttgcaaattcaatactcataaagctcaatcagataggtactctgacagagacattggatgccattgaaatggctaaaagggcaggctacactgctatcgtatctcacaggtcaggagagacggaagatacaactattgctgatttagtagtagctacaaatgtaggtcagatcaaaacaggtgctccagcaaggaccgatagagttgcaaaatataaccaattattaagaatagaagaagcattgggaagcgtggcccagtatcctggaaaaaatgctttctacaacatcagaaaataa

SEQ ID NO: 4318 - protein, 429 aa, Thermoanaerobacter tengcongensis [sequence omitted]

SEQ ID NO: 4319 - DNA, 1302 bp, Vibrio parahaemolyticus
  CDS (1)..(1302)
atgtctaagatcgttaaagttctaggtcgtgaaatcatcgactcacgtggtaacccaactgtagaagctgaagtacacctagaaggcggtttcgtaggtatggcggcagctccatctggcgcatctactggttctcgcgaagctcttgagctacgtgacggtgacaaagcacgtttcctaggtaaaggtgttcttaaagcaattgaagctgtaaacggcccaatcgctgaagctctagttggcaaagacgctaaagaccaagctgcaatcgacgcagtaatgatcgaactagacggcactgaaaacaaatctaaattcggtgcgaacgctatcctagcagtttctctagcaaacgctaaagctgcagcagcagctaaaggcatgcctctatacgagcacatcgctgagctaaacggtactgctggtcagttctctatgcctctaccaatgatgaacatcatcaacggtggtgagcacgcagacaacaacgttgacatccaagaattcatgattcaaccagttggcgctgcaactcttaaagaagctgtacgcatgggtgcggaagtattccacaacctagctaaagttcttaagtctaaaggctacaacacagctgttggtgacgaaggtggtttcgctcctaaccttaaatctaacgctgaagctctagaagttatcgcagaagctgttgctgctgctggttacgagctaggcaaagacgttactctagctatggactgtgctgcatctgagttcttcgacaaagaagctggcatctacaacatgaaaggtgaaggcaaaactttcacttctgaagagttcaaccactacctagctggtctagttgagcaattcccaatcgtatctatcgaagacggtctagacgagtctgactgggatggtttcgcacaccaaactcaacttctaggcgacaagatccaactagttggtgacgatctattcgttacaaacactaagatcctagctgaaggtatcgagaaaggcatcgctaactctatcctaatcaagttcaaccaaatcggttctctaactgagactctagctgcaatcaagatggctaaagacgcaggttacacagcagtaatctctcaccgttctggcgaaactgaagatgcaactatcgctgacctagcggtaggtacagctgcaggtcaaatcaaaactggttctatgagccgttctgaccgtgttgctaagtacaaccaactaatccgtatcgaggaagctctaggtgagcgcgctcctttcaacggtcttaaagaagttaaaggccaagcttaa

SEQ ID NO: 4320 - protein, 433 aa, Vibrio parahaemolyticus
MSKIVKVLGREIIDSRGNPTVEAEVHLEGGFVGMAAAPSGASTGSREALELRDGDKARFLGKGVLKAIEAVNGPIAEALVGKDAKDQAAIDAVMIELDGTENKSKFGANAILAVSLANAKAAAAAKGMPLYEHIAELNGTAGQFSMPLPMMNIINGGEHADNNVDIQEFMIQPVGAATLKEAVRMGAEVFHNLAKVLKSKGYNTAVGDEGGFAPNLKSNAEALEVIAEAVAAAGYELGKDVTLAMDCAASEFFDKEAGIYNMKGEGKTFTSEEFNHYLAGLVEQFPIVSIEDGLDESDWDGFAHQTQLLGDKIQLVGDDLFVTNTKILAEGIEKGIANSILIKFNQIGSLTETLAAIKMAKDAGYTAVISHRSGETEDATIADLAVGTAAGQIKTGSMSRSDRVAKYNQLIRIEEALGERAPFNGLKEVKGQA

SEQ ID NO: 4321 - DNA, 1302 bp, Vibrio vulnificus
  CDS (1)..(1302)
atgtctaagatcgttaaagttctaggtcgtgaaatcatcgactcacgtggtaacccaactgttgaagctgaagtacacctagaaggcggtttcgtaggtatggcggcagctccatctggcgcatctactggttctcgcgaagcgcttgagctacgtgacggtgacaaagcacgtttcctaggtaaaggtgttcttaaagcgattgaagcggtaaacggtgcaatcgctgacgcgctagttggtaaagatgcgaaagatcaagcagcgatcgacgctatcatgatcgagctagacggcactgaaaacaaatctaagtttggtgcgaacgcaatcctagctgtttctctagctaacgctaaagcagcggctgcttctaaaggcatgcctctatacgagcacatcgctgagctaaacggtactgctggtcagttctctatgcctctaccaatgatgaacatcatcaacggtggtgagcacgctgacaacaacgttgacatccaagagttcatgatccaaccagttggcgcaaaaactctgaaagaagcagttcgcatgggtgcggaagtattccacaacctagctaaagttcttaagtctaaaggctacaacactgctgttggtgacgaaggtggtttcgctcctaaccttaagtctaacgctgaagcgctagaagttatcgcagaagcagttgcagcagcgggttacgtactaggtaaagacgttactcttgctatggactgtgcagcatctgagttcttcgacaaagaagctggcatctacaacatgaaaggtgaaggcaaaacgttcacttctgaagagttcaaccactacctagctggtctagttgagcaattcccaatcgtatctatcgaagatggtctagacgagtctgattgggctggtttcgcacaccaaactcaacttctaggcgacaagatccaactagttggtgacgatctattcgttacaaacactaagatcctagctgaaggtatcgagaaaggcattgctaactctatccttatcaagttcaaccaaatcggttctctaactgagactctagctgcaatcaagatggctaaagacgcaggttacacagcagtaatctctcaccgttctggcgaaactgaagatgcaactatcgctgacctagcggtaggtactgcagcaggtcaaatcaagactggttctatgagccgttctgaccgtgttgctaagtacaaccaactaatccgtatcgaggaagctctagctggtcgtgctcctttcaacggtcttaaagaagtgaaaggccaagcttaa

SEQ ID NO: 4322 - protein, 433 aa, Vibrio vulnificus
MSKIVKVLGREIIDSRGNPTVEAEVHLEGGFVGMAAAPSGASTGSREALELRDGDKARFLGKGVLKAIEAVNGAIADALVGKDAKDQAAIDAIMIELDGTENKSKFGANAILAVSLANAKAAAASKGMPLYEHIAELNGTAGQFSMPLPMMNIINGGEHADNNVDIQEFMIQPVGAKTLKEAVRMGAEVFHNLAKVLKSKGYNTAVGDEGGFAPNLKSNAEALEVIAEAVAAAGYVLGKDVTLAMDCAASEFFDKEAGIYNMKGEGKTFTSEEFNHYLAGLVEQFPIVSIEDGLDESDWAGFAHQTQLLGDKIQLVGDDLFVTNTKILAEGIEKGIANSILIKFNQIGSLTETLAAIKMAKDAGYTAVISHRSGETEDATIADLAVGTAAGQIKTGSMSRSDRVAKYNQLIRIEEALAGRAPFNGLKEVKGQA

SEQ ID NO: 4323 - DNA, 1332 bp, Wigglesworthia glossinidia brevipalpis
  CDS (1)..(1332)
atgtcaaaaataataaaagtaattggtagagagataattgattctagagggtatcctactgtagaagcagaagtccatttattaggaggaattattggaagagcatcatctccttctggaatatctattggatctagagaagctcatgaagttcgtgatagagataattcaagatttttaggagaaggagttacaaaagcagtaaaatctataaataacaaaatatctaaatctttaatatcaaaaaatgcacaaaaacaaaaagatatagatcaaattatgatcaacttagatggaactaaaaataaatctaatttaggagcgaatgctattttagctgtatccttagctaacgctaaggctgcgtctaaaataaaaaatattccattatataaacacatatcagaaataaataacactcctggaattttttccatgcctcttcctatgattaatataattaatggcggaaaacatactaataataatattgatattcaagaattcatgatacaaccaattggagcaaaaagcataaagcaagctattcaaatgggatctgagatatttcataacttaggtaaaattttaaatgaaaaaggaatgagtacttcaataggggatgaaggtggatattctccaaatttaaaatcaaattcaaatgcttttgttttaattaaagaagcagtaaaaagatcaaaataccatataggaagagacataacttttgctattgactgcgcagcatctgaattttttgaagaatctactcagtcttattatttaaaaagtgaaaataattttttttcatcttatgaatttgtactttttttaaaaaaacttacagaagaatatccaattctttcaatagaagatggattgcacgaaaatgattgggaaggtttttctatgctgactaattatttaggaaataagatccaattagttggagatgatttatttacaactaatcctaaatttctaaaatatgggataaaaaaaggtattgctaattctattttaattaaaccaaaccaaattggttctcttacagaaactttagaagtaattaaaattgcaaaaaaatatggatatgctacaattatttctcatagatcaggagaaaccgaagatgttacaatagctgatttatcagtaggaacttcatctggtcaaataaaaactggatcaatgagtagatctgatagaacagctaaatataatagattaataagaatagaagaagaacttggatcaaacgctatatttcatggaaaaatggaaataaagaaccaatttatttatagtaataataatttaaaaaatttttag

SEQ ID NO: 4324 - protein, 443 aa, Wigglesworthia glossinidia brevipalpis [sequence omitted]

SEQ ID NO: 4325 - DNA, 1293 bp, Xanthomonas campestris
  CDS (1)..(1293)
atgaccactatcgccaagattctcgcccgtgaaatcctcgactcccgcggcaatcccacgctggaggcggaagtcacgctggcagacggctcgttcggccgcgccgccgtgccctcgggcgcctcgaccggcaccaaggaagcggtggaactgcgcgacggcgacaagacccgttacctgggcaagggcgtgcgcaaggccgtggaaaacgtcaacggcaccatcgccgagacgctcaaggacttcgatgccgccgaccagcagggcctggaccgtcgcctgatcgacctcgacggcaccgagaacaagggccgcctgggcgccaacgcgctgctgggtgtgtcgctggctgccgcgcatgcggtcgccgcctcgcgcaagcagccgctgtggcagtacctgtcgaccatcaccgaatccgatgtcgccctgccggtgccgatgatgaacatcatcaacggcggcgcgcatgccgacaacaatgtcgacttccaggaattcatggtgctgccggtgggctgcagctcgttttccgaagcgctgcgcgcaggcaccgagatcttccattcgctgaagtcggtgctcaagggccacggcctcagcacggcggtgggtgacgagggcggcttcgccccggacttccgcagcaatgtcgaagcgctggacaccattctcgaagcgattggcaaggccggttacaccgctggcgaagacatcctgctgggcctggatgtggcctcgtcggagttctacgacaacggcaagtacaacctggtgggcgaaaacaagcgcctgaccagcgagcagttcgtcgacttcttggccgattgggtggcgcagtacccgatcatcagcatcgaagacggcctggccgaagacgactgggccggctggaagctgctgaccgatcgcgtcggcaagaaggtgcagctggtgggcgacgatctgttcgtcaccaacccgaagatattcaaggaaggcatcgacagcggcaccgccaacgcgatcctgatcaaggtcaaccagatcggcacgctgactgagacgctggaagccattgccatggcgcatgcggccaactacgcctcgatcgtgtcgcaccgttcgggcgagaccgaagacaccaccatcgccgatatcgccgtggccaccaccgccacccagatcaagactggctcgctgtgccgcagcgaccgcgtcgccaagtacaaccagttgctgcgcatcgagcaggcactggggtccggcgcgcgttacgccggccgcgacgcgttcgtttcgctcaagcgataa

SEQ ID NO: 4326 - protein, 430 aa, Xanthomonas campestris
MTTIAKILAREILDSRGNPTLEAEVTLADGSFGRAAVPSGASTGTKEAVELRDGDKTRYLGKGVRKAVENVNGTIAETLKDFDAADQQGLDRRLIDLDGTENKGRLGANALLGVSLAAAHAVAASRKQPLWQYLSTITESDVALPVPMMNIINGGAHADNNVDFQEFMVLPVGCSSFSEALRAGTEIFHSLKSVLKGHGLSTAVGDEGGFAPDFRSNVEALDTILEAIGKAGYTAGEDILLGLDVASSEFYDNGKYNLVGENKRLTSEQFVDFLADWVAQYPIISIEDGLAEDDWAGWKLLTDRVGKKVQLVGDDLFVTNPKIFKEGIDSGTANAILIKVNQIGTLTETLEAIAMAHAANYASIVSHRSGETEDTTIADIAVATTATQIKTGSLCRSDRVAKYNQLLRIEQALGSGARYAGRDAFVSLKR

SEQ ID NO: 4327 - DNA, 1293 bp, Xylella fastidiosa
  CDS (1)..(1293)
atgaccgttattgccaaaatttatgctcgtgagattcttgattcccgtggcaaccctactcttgaagcggaggtcactctggagaatgctgtctgtggccgtgccgcagtcccctcaggtgcttcgactggtaccaaggaagcggtggaattacgtgatggtgacaagacacgttacttaggcaagggggtgcgtgcagcggtggataacgtcaatggtgttattgctgcggcgttggtgggtttcgatggagctgaccaaacaggcttggaccatcgtttaatcaatctggacggcaccgagaataaggggcgtttgggcgctaacgcgctgctcggtgtttcgttagcaaccgcacatgcggttgccgccgcgcgtaaacagccgctatggatgtatttgtccacccttggtgaatccaagttatcgttgccggtgccaatgatgaacatcatcaatggtggtgcgcatgcggataacaacgttgatttccaggagtttatggtgttgcccgttggttttgcttcgttttccgaagcactgcgtgccggtaccgagatctttcatgcgctaaagtcagtgctgaagggacagggtttaagtactgcggtgggtgatgaagggggctttgctccggacttccgcagtaatgttgaggcactggatgccattcttgaggcaataggtagggctggttatatcgctggagaggatgtgttgttaggtttggatgttgcttcttccgagtttcgcaacaacggtaagtacaacttggttggtgagaacaagcgtctgaccagtgagcagtttgttgatttcttggatgatttggttgcgcagtacccaatcatcagtattgaggatggtttagccgaggatgattgggtgggttggaagcaattgactgaacgtatcggccataaagtacagttggtgggcgatgatctgtttgtgactaatcctaaggttttccaggaaggcatcacttctggcatcgcgaatgcgatccttataaaacttaaccaaatcggtacgttgacggagactctggaatcaattgcgatggctcaccgtgctcagtacgctgctatcgtctcgcatcgatcaggcgagactgaggatacatcaattgcggacattgcggtggcgactacggcaactcaaatcaagactggctcgttatgccgttctgatcgtgttgccaagtacaaccagttgttacgcattgagcaggcgcttggtgttggtgcgcgttatgctggtcgtgatgcgttcgtttccctgaagtcctga

SEQ ID NO: 4328 - protein, 430 aa, Xylella fastidiosa
MTVIAKIYAREILDSRGNPTLEAEVTLENAVCGRAAVPSGASTGTKEAVELRDGDKTRYLGKGVRAAVDNVNGVIAAALVGFDGADQTGLDHRLINLDGTENKGRLGANALLGVSLATAHAVAAARKQPLWMYLSTLGESKLSLPVPMMNIINGGAHADNNVDFQEFMVLPVGFASFSEALRAGTEIFHALKSVLKGQGLSTAVGDEGGFAPDFRSNVEALDAILEAIGRAGYIAGEDVLLGLDVASSEFRNNGKYNLVGENKRLTSEQFVDFLDDLVAQYPIISIEDGLAEDDWVGWKQLTERIGHKVQLVGDDLFVTNPKVFQEGITSGIANAILIKLNQIGTLTETLESIAMAHRAQYAAIVSHRSGETEDTSIADIAVATTATQIKTGSLCRSDRVAKYNQLLRIEQALGVGARYAGRDAFVSLKS

SEQ ID NO: 4329 - DNA, 1734 bp, Brachydanio rerio
  CDS (98)..(1399)
cgcaactgcagacgcaggttgtaactgttagtttgaacttagtttcaactcatcctgtcgttaatttatatcgtttcactaagatttttaaagaaagatgtctattctgaagatacacgctcgtgagatttttgattctaggggcaaccccactgtggaggtggacctctacacagaaagaggtttgtttcgagctgctgtccccagtggagcttctactgggatctatgaagcgctggagctcagagacaatgataagtcccgctacctgggcaaaggtgtatcaaaggctgttgagaatgtgaaccaacatattgcacctgctctcattggccagggaattcctgttgttgagcaagaaaagattgaccagttcatgctggaactggacggaactgagaataagtcccgatttggtgccaatgccatcctgggtgtgtccctggcggcgtgtaaggcaggagctgcggagaaaggtgttcctctgtaccgtcacattgctgaccttgctggaaacccagaggtcattctgcctgtgccggcctttaatgtgatcaatggcggctctcatgctggcaataaattggccatgcaggagttcatgattctgccggtcggggccagcagctttaaggaagccatgcgcattggtgcagaggtgtatcacaatctgaagaacgttattaagcagaaatatggccaggatgccaccaatgttggtgacgagggaggatttgcaccaaacattcttgagaacaaagaagctctagagctgctgaagaatgccatcagtaaagctggatacactgatgaagttgtgatagggatggatgtggcagcatctgaattctatcgtgacggacagtacgacttggactttaagtctcccgatgaccccgatcgatacatcagccccgatgagcttgctgacctttacaagagtttcatagaggattatccagtggtctctattgaggatccctttgatcaagatgactgggaggcctggaccaatttcaccaacagcacagaaatccaggtggtgggagatgatctcactgttaccaatcccaagcgcatagctactgcagtggagaacgaggcttgcaactgcctgttgctcaaagttaaccagattggtactgtgacagagtctctgcaggcatgtaacatggctcagtccagtggctggggagtgatggtgagccatcgctcaggggaaactgaggacacattcattgcagaccttgttgtgggactgtgcactggacagattaaaacaggagccccatgccgttcagagcgtctggccaagtacaaccagatcctcagaattgaagaggaactgggggagaaagctcgctttgctgggaagaacttcagaaatccactgaactgagaccaccacagtacagttagaagtatttaacctcatccagtaaatatactaatagtatatgttttaacttatgattaaagaataggttgatgctgagaccatatcatcaaggacactaaaacaagaatcataatcgttatgtgggtgaccatttggatgagtgtcacgtgtacttgtgtcatgatgattatattgcaaagaaagtgcaaacagtgttttcctgtaaatgctgcgtagcagatttttgaggactgtgcttgtaatagtggatactgttaaaataaaaacatcacctcaactaaaaaaaaaaaaaaaaaaaaaaaaaaaaaaaaaaa

SEQ ID NO: 4330 - protein, 433 aa, Brachydanio rerio
MSILKIHAREIFDSRGNPTVEVDLYTERGLFRAAVPSGASTGIYEALELRDNDKSRYLGKGVSKAVENVNQHIAPALIGQGIPVVEQEKIDQFMLELDGTENKSRFGANAILGVSLAACKAGAAEKGVPLYRHIADLAGNPEVILPVPAFNVINGGSHAGNKLAMQEFMILPVGASSFKEAMRIGAEVYHNLKNVIKQKYGQDATNVGDEGGFAPNILENKEALELLKNAISKAGYTDEVVIGMDVAASEFYRDGQYDLDFKSPDDPDRYISPDELADLYKSFIEDYPVVSIEDPFDQDDWEAWTNFTNSTEIQVVGDDLTVTNPKRIATAVENEACNCLLLKVNQIGTVTESLQACNMAQSSGWGVMVSHRSGETEDTFIADLVVGLCTGQIKTGAPCRSERLAKYNQILRIEEELGEKARFAGKNFRNPLN

SEQ ID NO: 4331 - DNA, 1792 bp, Brachydanio rerio
  CDS (74)..(1372)
gccttctctgctctgcaccacggtccacactcgactgcccttgcgctggttaggccagataagaaactgcaacatgtctatcctgaagatccatgctcgtgaaatctttgactcccgtggaaaccccactgtggaggttgatctgtacaccaaaaaaggtctcttcagagctgcagtgcccagtggtgcctccactggtatctatgaagcccttgaacttcgtgacaatgacaagacacgctatctgggcaaaggtgtctcaaaagcagttgagcatatcaataaaacaattgcacctggtctggttagccagaacgtgtcagtcttggaacaggagaagattgataagctgatgctcgatatggatggcacagacaacaagtcaaagtttggtgctaatgccatcctgggcgtttccctggctgtgtgcaaggctggtgctgcagagaagggcgtccccctttaccgccacatcgcagacctcgctggcaaccctgaagtcattctcccagtgcctgccttcaacgttatcaacggcggctctcatgccggcaacaagctggccatgcaggagttcatgatcctgcccgtcggtgccagcaactttaaagaggccatgcgcatcggtgctgaagtctatcacaacctgaagaatgtcatcaaggagaagtacggcaaagatgccaccaatgtgggcgatgaaggcggtttcgcccccaacatccttgagaacaaagaagctctggagctgctgaagaatgccatcagcaaagccggctacaccgacaagattgtgatcggcatggatgtggccgcctctgagttctacaagggtggcaaatacgacctggacttcaaatcacctgatgaccccagccgttacatcagccctgacaagctggctgacctctacaagagctttgtcaaggattatcctgtggtctccatcgaggatccatttgaccaggatgactgggaggcctggaccaacttcaccgccaccactaacatccaggtggtgggtgatgacctcacagtgaccaaccccaagcgcatcgctaaagccgtgtctgataaggcctgcaactgcctgctgttaaaggtcaaccagatcggctcggtcaccgagtccctgcaggcctgtaagatggcccagactaatggatggggtgtgatggtcagtcaccgttctggagagacggaggacaccttcatcgctgaccttgtagtcggactctgcactggccagattaagactggagctccctgccgatctgagcgtctggccaagtacaatcagctgctgaggattgaggaggagctaggagacaaggctcgcttcgctggcaagaacttcaggaaacccatctgaagcactgacccgtcctgagtctcggcgtgttcatcctgctttactgtcccacacataaacgccacgcaaagccacatcctgtagaatggagattagatggaaaagcagtgaaacgaaaggtccagatcaatagcgtatggcgcagaacactgccagatctccatctgtgctttggtatccaaatagcatcagtcccttaatcgtgtctctgtgttgtgtgagagatctttgtttagtttcttgtgatttgtagtgattctggtgctccactcaatattttagcagagatcaagccatttaatgtgctgcgacgtgcagcgtcagtatgtgcgttgtgttgcttttgagaagtgttagttctatatgcgtggcataacaaataaattatacctattgaaatggaaaaaaaaaaaaaaaaaa

SEQ ID NO: 4332 - protein, 432 aa, Brachydanio rerio
MSILKIHAREIFDSRGNPTVEVDLYTKKGLFRAAVPSGASTGIYEALELRDNDKTRYLGKGVSKAVEHINKTIAPGLVSQNVSVLEQEKIDKLMLDMDGTDNKSKFGANAILGVSLAVCKAGAAEKGVPLYRHIADLAGNPEVILPVPAFNVINGGSHAGNKLAMQEFMILPVGASNFKEAMRIGAEVYHNLKNVIKEKYGKDATNVGDEGGFAPNILENKEALELLKNAISKAGYTDKIVIGMDVAASEFYKGGKYDLDFKSPDDPSRYISPDKLADLYKSFVKDYPVVSIEDPFDQDDWEAWTNFTATTNIQVVGDDLTVTNPKRIAKAVSDKACNCLLLKVNQIGSVTESLQACKMAQTNGWGVMVSHRSGETEDTFIADLVVGLCTGQIKTGAPCRSERLAKYNQLLRIEEELGDKARFAGKNFRKPI

SEQ ID NO: 4333 - DNA, 1761 bp, Xenopus tropicalis
  CDS (38)..(1342)
ggaagagaacggttgtacctacaagtagaaagtaaaaatgtctatcaagaagatccttgcacgtgaaatttttgactctcgtggtaacccaacagtggaggttgacctgtacacatgcaaaggtctcttccgtgctgctgttccaagcggagcctccactggcatttatgaagcactagaactccgggacaatgataagactcgctacatgggaaagggtgtcggaagagctgtcaaatatataaatgagtttctgggacctgcattatgcacccagaatctaagtgttgtggagcaggaaaagatcgacaacctcatgattgaaatggatgggactgagaataaatccaaatttggtgctaatgcactcttgggagtgtccctagcagtgtgtaaagctggagctgcagagaaaggagtcccactgtaccgtcatatcgctgacctggctgggaacccagaggtcatccttcctgtaccggcatttaatgtgataaacgggggttctcatgctggaaacaagctggctatgcaagaattcatgatcttgcctgtgggtgcagacacctttaaggaggccatgcgcataggagcagaggtgtatcataacctaaagaatgtcatcaaggctaaatatggacaagatgccactaatgttggtgatgaaggaggctttgctcccaatatcttggagaataaggaagccctggagcttctgaaaactgccatcaacaaggctggctacccagataaagttgtaattggaatggatgttgcagcatctgaattctaccgtgacgggaaatatgacttggacttcaagtcccctgatgaccctaaaagacacatctcccctgacgagctggctgagttgtacatgagctttgtcaagaattatccagtggtgtccattgaagatccctttgatcaggatgactgggaagcctggaaaaagtttactgcatcttcgaatatccaggtagttggtgatgacttgacagtgaccaaccctaaacgtattgccaaggctgtggatgagaagtcttgtaactgtctgcttctgaaggtcaaccagatcggcacagtgacagaatccctgcaggcgtgcaagctggctcagtcaaatggctggggtgtgatggtcagtcatcgctctggggagacagaagatactttcattgctgacctggtggttggtctccgcactggacagatcaagacaggtgctccatgcagatctgagcgacttgcaaaatacaaccaattgctcaggattgaagaagagcttggcagcaaggcccgctttgctggaagaaatttcagaaaacctgttttcaactaaatggaggcatccttaggctctcacccaactgatgtagtagctgtgcacctaggagagactacaggaggtcttacatgtcactgctgagccctcatttaatttcaggcacttccagcaatgttagatgttacagcctctcccagcataaccttgctgtctttccagtttaaaagctttgctgcttaggattattccaaattcagtgtcacactggtgcctgcatgtagtccttgtcttttctattgtggcagtggtcctggtcatgtcaactttgtagtcttgtgttctcatcctattgcagtttcagactagataatggtttgtcacactctagacacgaagaggcaataaactcttttgaaggtgaaaaaaaaaaaaaaaaaaaaaaaaaaaaaaaaaaaaaaaaaaaaaaaaaaaaa

SEQ ID NO: 4334 - protein, 434 aa, Xenopus tropicalis
MSIKKILAREIFDSRGNPTVEVDLYTCKGLFRAAVPSGASTGIYEALELRDNDKTRYMGKGVGRAVKYINEFLGPALCTQNLSVVEQEKIDNLMIEMDGTENKSKFGANALLGVSLAVCKAGAAEKGVPLYRHIADLAGNPEVILPVPAFNVINGGSHAGNKLAMQEFMILPVGADTFKEAMRIGAEVYHNLKNVIKAKYGQDATNVGDEGGFAPNILENKEALELLKTAINKAGYPDKVVIGMDVAASEFYRDGKYDLDFKSPDDPKRHISPDELAELYMSFVKNYPVVSIEDPFDQDDWEAWKKFTASSNIQVVGDDLTVTNPKRIAKAVDEKSCNCLLLKVNQIGTVTESLQACKLAQSNGWGVMVSHRSGETEDTFIADLVVGLRTGQIKTGAPCRSERLAKYNQLLRIEEELGSKARFAGRNFRKPVFN

SEQ ID NO: 4335 - DNA, 26 bp, Artificial sequence
  Primer sequence
atgtccaaaatcgtaaaaatcatcgg

SEQ ID NO: 4336 - DNA, 24 bp, Artificial sequence
  Primer sequence
ttatgcctggcctttgatctcttt

SEQ ID NO: 4337 - DNA, 1419 bp, Escherichia coli K12
  CDS (1)..(1419)
atgagtcagaatgtttatcaatttatcgacctgcagcgcgttgatccgccaaagaaaccgctgaagatccgcaaaattgagtttgttgaaatttacgagccgttttccgaaggccaggccaaagcgcaggctgaccgctgcctgtcgtgcggcaacccatactgcgagtggaaatgcccggtacacaactacatcccgaactggctgaagctcgccaacgaggggcgtatttttgaagcggcggaactgtcgcaccagaccaacaccctgccggaagtttgcggacgagtctgcccgcaagaccgtctgtgcgaaggttcctgcactctgaacgatgagtttggcgcggtgaccatcggcaacattgagcgctatatcaacgataaagcgttcgagatgggctggcgtccggatatgtctggtgtgaaacagaccggtaaaaaagtggcgattatcggcgcaggcccggcaggtctggcgtgtgcggatgtcctgacgcgtaacggcgtaaaagccgttgtcttcgaccgtcatccagaaattggcgggctgctgaccttcggtattccggccttcaagctggaaaaagaggtaatgacgcgtcgccgtgaaatcttcaccggcatgggtattgaattcaaactcaataccgaagtgggccgcgacgtacagctggacgatctgctgagtgattacgatgccgtgttccttggcgtcgggacttatcagtcaatgcgcggcgggctggaaaacgaagacgccgatggcgtgtacgcagcgctgccgttcctcatcgccaacaccaaacagttaatgggctttggtgaaacccgcgacgaaccgttcgtcagcatggaaggcaaacgcgtggtggtccttggcggtggcgacactgcgatggactgcgtgcgtacgtccgtgcgccagggagcgaagcacgttacctgtgcctatcgtcgtgatgaagagaacatgccgggttcccgccgcgaagtgaaaaacgcgcgggaagaaggcgtagagttcaaattcaacgtccagccgctgggtattgaagtgaacggtaacggcaaagtcagcggcgtaaaaatggtgcgtaccgaaatgggcgaaccggacgccaaaggccgtcgccgcgcggagatcgttgcaggttccgaacatatcgttccggcagatgcggtgatcatggcgtttggtttccgtccacacaacatggaatggctggcaaaacacagcgtcgagctggattcacaaggccgcatcatcgccccggaaggcagcgacaacgccttccagaccagcaacccgaaaatctttgctggcggcgatatcgtccgtggttccgatctggtggtgaccgctattgccgaaggtcgtaaggcggcagacggtattatgaactggctggaagtttaa

SEQ ID NO: 4338 - protein, 472 aa, Escherichia coli K12
MSQNVYQFIDLQRVDPPKKPLKIRKIEFVEIYEPFSEGQAKAQADRCLSCGNPYCEWKCPVHNYIPNWLKLANEGRIFEAAELSHQTNTLPEVCGRVCPQDRLCEGSCTLNDEFGAVTIGNIERYINDKAFEMGWRPDMSGVKQTGKKVAIIGAGPAGLACADVLTRNGVKAVVFDRHPEIGGLLTFGIPAFKLEKEVMTRRREIFTGMGIEFKLNTEVGRDVQLDDLLSDYDAVFLGVGTYQSMRGGLENEDADGVYAALPFLIANTKQLMGFGETRDEPFVSMEGKRVVVLGGGDTAMDCVRTSVRQGAKHVTCAYRRDEENMPGSRREVKNAREEGVEFKFNVQPLGIEVNGNGKVSGVKMVRTEMGEPDAKGRRRAEIVAGSEHIVPADAVIMAFGFRPHNMEWLAKHSVELDSQGRIIAPEGSDNAFQTSNPKIFAGGDIVRGSDLVVTAIAEGRKAADGIMNWLEV

SEQ ID NO: 4339 - DNA, 3951 bp, Homo sapiens (man)
  CDS (82)..(3159)
gctgtcacttggctctctggctggagcttgaggacgcaaggagggtttgtcactggcagactcgagactgtaggcactgccatggcccctgtgctcagtaaggactcggcggacatcgagagtatcctggctttaaatcctcgaacacaaactcatgcaactctgtgttccacttcggccaagaaattagacaagaaacattggaaaagaaatcctgataagaactgctttaattgtgagaagctggagaataattttgatgacatcaagcacacgactcttggtgagcgaggagctctccgagaagcaatgagatgcctgaaatgtgcagatgccccgtgtcagaagagctgtccaactaatcttgatattaaatcattcatcacaagtattgcaaacaagaactattatggagctgctaagatgatattttctgacaacccacttggtctgacttgtggaatggtatgtccaacctctgatctatgtgtaggtggatgcaatttatatgccactgaagagggacccattaatattggtggattgcagcaatttgctactgaggtattcaaagcaatgagtatcccacagatcagaaatccttcgctgcctcccccagaaaaaatgtctgaagcctattctgcaaagattgctctttttggtgctgggcctgcaagtataagttgtgcttcctttttggctcgattggggtactctgacatcactatatttgaaaaacaagaatatgttggtggtttaagtacttctgaaattcctcagttccggctgccgtatgatgtagtgaattttgagattgagctaatgaaggaccttggtgtaaagataatttgcggtaaaagcctttcagtgaatgaaatgactcttagcactttgaaagaaaaaggctacaaagctgctttcattggaataggtttgccagaacccaataaagatgccatcttccaaggcctgacgcaggaccaggggttttatacatccaaagactttttgccacttgtagccaaaggcagtaaagcaggaatgtgcgcctgtcactctccattgccatcgatacggggagtcgtgattgtacttggagctggagacactgccttcgactgtgcaacatctgctctacgttgtggagctcgccgagtgttcatcgtcttcagaaaaggctttgttaatataagagctgtccctgaggagatggagcttgctaaggaagaaaagtgtgaatttctgccattcctgtccccacggaaggttatagtaaaaggtgggagaattgttgctatgcagtttgttcggacagagcaagatgaaactggaaaatggaatgaagatgaagatcagatggtccatctgaaagccgatgtggtcatcagtgcctttggttcagttctgagtgatcctaaagtaaaagaagccttgagccctataaaatttaacagatggggtctcccagaagtagatccagaaactatgcaaactagtgaagcatgggtatttgcaggtggtgatgtcgttggtttggctaacactacagtggaatcggtgaatgatggaaagcaagcttcttggtacattcacaaatacgtacagtcacaatatggagcttccgtttctgccaagcctgaactacccctcttttacactcctattgatctggtggacattagtgtagaaatggccggattgaagtttataaatccttttggtcttgctagcgcaactccagccaccagcacatcaatgattcgaagagcttttgaagctggatggggttttgccctcaccaaaactttctctcttgataaggacattgtgacaaatgtttcccccagaatcatccggggaaccacctctggccccatgtatggccctggacaaagctcctttctgaatattgagctcatcagtgagaaaacggctgcatattggtgtcaaagtgtcactgaactaaaggctgacttcccagacaacattgtgattgctagcattatgtgcagttacaataaaaatgactggacggaacttgccaagaagtctgaggattctggagcagatgccctggagttaaatttatcatgtccacatggcatgggagaaagaggaatgggcctggcctgtgggcaggatccagagctggtgcggaacatctgccgctgggttaggcaagctgttcagattcctttttttgccaagctgaccccaaatgtcactgatattgtgagcatcgcaagagctgcaaaggaaggtggtgccaatggcgttacagccaccaacactgtctcaggtctgatgggattaaaatctgatggcacaccttggccagcagtggggattgcaaagcgaactacatatggaggagtgtctgggacagcaatcagacctattgctttgagagctgtgacctccattgctcgtgctctgcctggatttcccattttggctactggtggaattgactctgctgaaagtggtcttcagtttctccatagtggtgcttccgtcctccaggtatgcagtgccattcagaatcaggatttcactgtgatcgaagactactgcactggcctcaaagccctgctttatctgaaaagcattgaagaactacaagactgggatggacagagtccagctactgtgagtcaccagaaagggaaaccagttccacgtatagctgaactcatggacaagaaactgccaagttttggaccttatctggaacagcgcaagaaaatcatagcagaaaacaagattagactgaaagaacaaaatgtagctttttcaccacttaagagaagctgttttatccccaaaaggcctattcctaccatcaaggatgtaataggaaaagcactgcagtaccttggaacatttggtgaattgagcaacgtagagcaagttgtggctatgattgatgaagaaatgtgtatcaactgtggtaaatgctacatgacctgtaatgattctggctaccaggctatacagtttgatccagaaacccacctgcccaccataaccgacacttgtacaggctgtactctgtgtctcagtgtttgccctattgtcgactgcatcaaaatggtttccaggacaacaccttatgaaccaaagagaggcgtacccttatctgtgaatccggtgtgttaaggtgatttgtgaaacagttgctgtgaactttcatgtcacctacatatgctgatctcttaaaatcatgatccttgtgttcagctctttccaaattaaaacaaatatacattttctaaataaaaatatgtaatttcaaaatacatttgtaagtgtaaaaaatgtctcatgtcaatgaccattcaattagtggcataaaatagaataattcttttctgaggatagtagttaaataactgtgtggcagttaattggatgttcactgccagttgtcttatgtgaaaaattaactttttgtgtggcaattagtgtgacagtttccaaattgccctatgctgtgctccatatttgatttctaattgtaagtgaaattaagcattttgaaacaaagtactctttaacatacaagaaaatgtatccaaggaaacattttatcaataaaaattacctttaattttaatgctgtttctaagaaaatgtagttagctccataaagtacaaatgaagaaagtcaaaaattatttgctatggcaggataagaaagcctaaaattgagtttgtggactttattaagtaaaatccccttcgctgaaattgcttatttttggtgttggatagaggatagggagaatatttactaactaaataccattcactactcatgcgtgagatgggtgtacaaactcatcctcttttaatggcatttctctttaaactatgttcctaaccaaatgagatgataggatagatcctggttaccactcttttactgtgcacatatgggccccggaattc

SEQ ID NO: 4340 - protein, 1025 aa, Homo sapiens (man)
MAPVLSKDSADIESILALNPRTQTHATLCSTSAKKLDKKHWKRNPDKNCFNCEKLENNFDDIKHTTLGERGALREAMRCLKCADAPCQKSCPTNLDIKSFITSIANKNYYGAAKMIFSDNPLGLTCGMVCPTSDLCVGGCNLYATEEGPINIGGLQQFATEVFKAMSIPQIRNPSLPPPEKMSEAYSAKIALFGAGPASISCASFLARLGYSDITIFEKQEYVGGLSTSEIPQFRLPYDVVNFEIELMKDLGVKIICGKSLSVNEMTLSTLKEKGYKAAFIGIGLPEPNKDAIFQGLTQDQGFYTSKDFLPLVAKGSKAGMCACHSPLPSIRGVVIVLGAGDTAFDCATSALRCGARRVFIVFRKGFVNIRAVPEEMELAKEEKCEFLPFLSPRKVIVKGGRIVAMQFVRTEQDETGKWNEDEDQMVHLKADVVISAFGSVLSDPKVKEALSPIKFNRWGLPEVDPETMQTSEAWVFAGGDVVGLANTTVESVNDGKQASWYIHKYVQSQYGASVSAKPELPLFYTPIDLVDISVEMAGLKFINPFGLASATPATSTSMIRRAFEAGWGFALTKTFSLDKDIVTNVSPRIIRGTTSGPMYGPGQSSFLNIELISEKTAAYWCQSVTELKADFPDNIVIASIMCSYNKNDWTELAKKSEDSGADALELNLSCPHGMGERGMGLACGQDPELVRNICRWVRQAVQIPFFAKLTPNVTDIVSIARAAKEGGANGVTATNTVSGLMGLKSDGTPWPAVGIAKRTTYGGVSGTAIRPIALRAVTSIARALPGFPILATGGIDSAESGLQFLHSGASVLQVCSAIQNQDFTVIEDYCTGLKALLYLKSIEELQDWDGQSPATVSHQKGKPVPRIAELMDKKLPSFGPYLEQRKKIIAENKIRLKEQNVAFSPLKRSCFIPKRPIPTIKDVIGKALQYLGTFGELSNVEQVVAMIDEEMCINCGKCYMTCNDSGYQAIQFDPETHLPTITDTCTGCTLCLSVCPIVDCIKMVSRTTPYEPKRGVPLSVNPVC

SEQ ID NO: 4341 - DNA, 1239 bp, Escherichia coli
  CDS (1)..(1239)
atgccgcaacaaaattatctggatgaactcactccggcttttacgtctttactggcgattaaagaagcctctcgctgtttattatgtcacgacgctccctgtagtcaggcttgcccggcacagaccgatccggggaaatttattcgctcaatctactttcgtaattttaaaggcgctgccgagacaattcgcgaaaataatgccctcggtgccgtttgtgccagagtgtgcccgacggagaaattatgccaaagcggttgtacccgtgccggtgttgatgctcccattgatatcggccgcttacagcgttttgttactgattttgaacaacaaaccggaatggaaatttatcagcccggtactaaaacgctcggcaaagtcgcgattattggcgcaggtcctgccggattgcaggccagtgtgacactgacaaaccagggttatgacgtcacgatttatgagaaagaagcgcaccccggtggctggttgcgtaacggtattccgcaattccggttaccgcaatcagtgctggatgcagagatcgcccgtattgaaaaaatgggcgtgaccattaagtgcaacaacgaagtcggtaacacactcacccttgagcagctgaaagcagaaaaccgcgcggtactggtcaccgtggggttatcaagcggttccgggctaccgctgtttgagcatagtgacgttgagattgccgtcgacttcttgcaacgtgcacgacaggcgcaaggcgatatcagcattccacaaagcgcattaattatcggcggcggtgatgtcgcgatggacgtagccagcacgctgaaagttctcggctgtcaggcggtaacttgcgtagcgcgtgaagagttagatgagtttccggcaagcgaaaaagagtttaccagcgcccgggagctgggcgtttcgatcatcgatggattcacgccagtagccgtggaaggcaataaagtcacgtttaagcatgtacggttatcgggcgaactgacgatggcggcagataaaattattctcgccgtcggtcagcatgccagactagatgcctttgcggagttagagccgcagcgtaacaccatcaaaacacaaaattaccagacccgcgacccgcaagtctttgctgctggcgatattgttgagggtgacaaaaccgtggtctatgccgtgaaaaccgggaaagaagccgccgaggcgattcatcactatttagagggagcttgctcatgttaa

SEQ ID NO: 4342 - protein, 412 aa, Escherichia coli
MPQQNYLDELTPAFTSLLAIKEASRCLLCHDAPCSQACPAQTDPGKFIRSIYFRNFKGAAETIRENNALGAVCARVCPTEKLCQSGCTRAGVDAPIDIGRLQRFVTDFEQQTGMEIYQPGTKTLGKVAIIGAGPAGLQASVTLTNQGYDVTIYEKEAHPGGWLRNGIPQFRLPQSVLDAEIARIEKMGVTIKCNNEVGNTLTLEQLKAENRAVLVTVGLSSGSGLPLFEHSDVEIAVDFLQRARQAQGDISIPQSALIIGGGDVAMDVASTLKVLGCQAVTCVAREELDEFPASEKEFTSARELGVSIIDGFTPVAVEGNKVTFKHVRLSGELTMAADKIILAVGQHARLDAFAELEPQRNTIKTQNYQTRDPQVFAAGDIVEGDKTVVYAVKTGKEAAEAIHHYLEGACSC

SEQ ID NO: 4343 - DNA, 1431 bp, Aquifex aeolicus
  CDS (1)..(1431)
atggcaaagaagattcgctaccttgacaggaataaagaacccactctcccgccagaagaaagggtaaaaaccttcagggagtttgaactcggatactccgtaaatttagcccttgacgaggcacagcgctgtttattttgtaaagacgccgaacagaggtgcataaagggctgtcccgttcacgtggacattcccggctttataaagaaaataacggaaggtgatttggtgggtgcgtacaaagtaataactcaatccgatatatttccctcaatatgcgggagagtttgccctcaggaaaggcagtgtgaaggttcatgcatcctttactacgacacggtcaggaatagaaagaacaaaggtcttccggttgcaatcggagcacttgagaagttcgtaggagactttataaggatatctggaatagaaatagaagaagaaaaggaaccccctacgggatttagggttgcggtaataggggcgggaccagcggggctttcctgtgcccatgagcttgcaaaaaaaggacacgaagtgcacgtttacgaagctctcccgaagcccggcggtgttatgtactacggaattcccaacgccagactggacaagagcataatagagtgggaagtcaagagacttgaaaaactcgggataaagtttttttacggatacttaataggaaagaacataacccttcaggaattgagggagaaatacgacgctgtattcatagcggttggtgcgggacgaggaaaactcggacttccgggggaccacctgaaaggggtttattccgcgatagactttttgatgagggtaaacctctacaaggcaaacgagtttcctaaaaagggagttcccgtagaactcgggaagagaaccgtaataataggcggtggatttactgcggtagactgtgccataactgcaaacagactgggagttgagacccacgtagtttacaggagaaccagagaaacctcttccgcaagacaggaagagtgggatcaccttatggaagaaggagtgaagatacactggctaacccagcccgtggaagttatagggaacgaaaaaggagaagttgtagggctcaagtgtataaagatggaactgggtgagcccgacgagagcggaagaccgagacccgttccagtacctaattccgaacacattattgagtgcgactcggttatcttcgcgatagggcagagggcaaacccaatagcctacgaaggaagcggaataaaaacgacgaagtgggggacgattgaggtgaacgaaaggtacgagaccaatttagagggagtatttgcgggaggagacgttataaacggcggtgacagggtagtagttgcccttgctcatggaaaagaagctgcaaagtacatacacgaatacttaatgagtaacaaggaggtaaggaaatga

SEQ ID NO: 4344 - protein, 476 aa, Aquifex aeolicus
MAKKIRYLDRNKEPTLPPEERVKTFREFELGYSVNLALDEAQRCLFCKDAEQRCIKGCPVHVDIPGFIKKITEGDLVGAYKVITQSDIFPSICGRVCPQERQCEGSCILYYDTVRNRKNKGLPVAIGALEKFVGDFIRISGIEIEEEKEPPTGFRVAVIGAGPAGLSCAHELAKKGHEVHVYEALPKPGGVMYYGIPNARLDKSIIEWEVKRLEKLGIKFFYGYLIGKNITLQELREKYDAVFIAVGAGRGKLGLPGDHLKGVYSAIDFLMRVNLYKANEFPKKGVPVELGKRTVIIGGGFTAVDCAITANRLGVETHVVYRRTRETSSARQEEWDHLMEEGVKIHWLTQPVEVIGNEKGEVVGLKCIKMELGEPDESGRPRPVPVPNSEHIIECDSVIFAIGQRANPIAYEGSGIKTTKWGTIEVNERYETNLEGVFAGGDVINGGDRVVVALAHGKEAAKYIHEYLMSNKEVRK

SEQ ID NO: 4345 - DNA, 1488 bp, Bacillus halodurans
  CDS (1)..(1488)
atggggaaaccaacaggatttatggaatataagcgggaaacacctccaaagaaagacccctttgaacgctcaaaaaactggcaagagtttacccttcttatgccggagagtgcattgagacaacaaggggcacgatgtatggattgtggtgttccattttgtcaaacagggacgtcaatggatggttctggggagattggttgccccgtctataacttgattccagaatggaatgacctcgtgtatcgcggtcactggaaggaagcgttagaacgtctacacaaaacgaataactttccagaatttacaggacgagtttgtcctgctccgtgtgaaggctcgtgtacggttgcgatcagcgacgacgctgttgcaataaagagcatggaattccatattgtagaacgtggattccaggaaggttggattgtgcctaaccctcctagatcgagaacaggcaaaaaagtagctgtcgtcggtagcggtcctgcaggcttagcagcagcggctcaattgaacaaagccggtcattgggtaacggtttttgaacgagaagatcgcatcggcgggctgttgacgtatggaattcctgatgtaaagcttccgtatcacgtagtggaacgtcgaatcaaccttttaaaagaagaagggattgaattccgcaccaatgttgaaattggaaaagatgtttcagcaaagcagttaaaagacgactttgacgcggtcgttttatgtacaggtgcgacaaagccacgtgatgtaaatgttaagggcagagagctcaaaggtattcacttcgccatggacttcttaacagcaaatacgaaaagcctattaaactcgaaccatcaagatggtaactatatttccgcaaaagggaagcatgtcgttgtgatcggtggtggagatacgggggctgattgtattacaacctctgtccgtcatggggcaaaatcgattacgcaatttgatattaatcgtgaaaaatcaaacgaacggcctgacaataacccatggcctttgttcccaatcgtccatacggtagaggacggccataaagaagcggcggctgtttatggaaaggacccgagagcttatcaagtcatgacgacaaaatttgtcggtgatgctgaaggtcatgtgaaggaaattcatacgatttctgtggaaacaaccgtgcatcctgatggaagcaaaacccgtgttgaaattccaggcaccgagaaagtttggccagctgaccttgtgtttctagctgtaggatttacggggccagaagaacagcttgttcgtgaactagagttggaaactgatacacgttcgaacattaaagctgagtatggtaaatatgagacgagcttagaaggtgtttttgctgccggtgataatcgccgtggacagagccttgttgtttgggcgatccacgaaggtcgtgaagcggcacgagaatgtgataaatatttgatgggagcctcgaatttaccgtaa

SEQ ID NO: 4346 - protein, 495 aa, Bacillus halodurans
MGKPTGFMEYKRETPPKKDPFERSKNWQEFTLLMPESALRQQGARCMDCGVPFCQTGTSMDGSGEIGCPVYNLIPEWNDLVYRGHWKEALERLHKTNNFPEFTGRVCPAPCEGSCTVAISDDAVAIKSMEFHIVERGFQEGWIVPNPPRSRTGKKVAVVGSGPAGLAAAAQLNKAGHWVTVFEREDRIGGLLTYGIPDVKLPYHVVERRINLLKEEGIEFRTNVEIGKDVSAKQLKDDFDAVVLCTGATKPRDVNVKGRELKGIHFAMDFLTANTKSLLNSNHQDGNYISAKGKHVVVIGGGDTGADCITTSVRHGAKSITQFDINREKSNERPDNNPWPLFPIVHTVEDGHKEAAAVYGKDPRAYQVMTTKFVGDAEGHVKEIHTISVETTVHPDGSKTRVEIPGTEKVWPADLVFLAVGFTGPEEQLVRELELETDTRSNIKAEYGKYETSLEGVFAAGDNRRGQSLVVWAIHEGREAARECDKYLMGASNLP

SEQ ID NO: 4347 - DNA, 1236 bp, Clostridium acetobutylicum
  CDS (1)..(1236)
atggataaccctaatttattgtcagaagaggcaaacagatgcctactatgcaaaaaccctagatgtaaagcaaattgccctattaatacacccataccagaaattataagcctttataaagaaggaaaaattatggaagcaggagaaattttatttaataacaatcctctttcagtaatatgctcattggtctgtattcatgaggatcaatgtaagggaaattgtgtaagaggaataaaaagcgagccaataaaatttcacgagatagaagaagagatatcagagaagtacttaaaagaggccaagcttaagaatgttcagaaggacaaggatagaattgcaatagttggaggaggtccagcaggaatcacagttgcatttgtacttgctaataaaggctataatgttaccatttttgaggctcacgataaaataggaggagtacttagatatggtattccagagtatagattgactaagaaattagtggataagcttgaagaaagacttatagaggttggagtgaaaattagacctaatactgttattggaccagttatttctttggacaggttacttgaagattcatataaggcagtatttattggaactggagtatggaatccaaaaaccttagatgtaaagggagaaactttaggaaatgttcattttgctattgattatttaaaatctcctgaaagctatagattaggaaaaaaagtagctgtaataggagcaggtaatgttgccatggatgctgcaagaactgctaagagaaatggtgctgaggtaacaatactttatagaaaaagctttaatgagatgccagcatcaaaacaagaaataagagaaactaaagaagatggagtagagtttaaattatttagagcaccaattgaaataacagaagagggtattaaagtagcatttacagaaaatgttacagatgcagaaggaaaaataagaactaaaattattgaaggaaaagaagagttttttgagtgtgattcagtagttgttgccgtaagtcaagcacctaaggataatatagtatctaatacaacaggcttagatactaaatggggattaatagtaacagatgaaaaaggcaatacaactaaaaaaggaacctttgcatgtggagatgtagttacaggagcaaaaactgtagttgaagctgcagcacaagcaaaagtagttgcagaaactattgatgagtattgcaagaataattaa

SEQ ID NO: 4348 - protein, 411 aa, Clostridium acetobutylicum
MDNPNLLSEEANRCLLCKNPRCKANCPINTPIPEIISLYKEGKIMEAGEILFNNNPLSVICSLVCIHEDQCKGNCVRGIKSEPIKFHEIEEEISEKYLKEAKLKNVQKDKDRIAIVGGGPAGITVAFVLANKGYNVTIFEAHDKIGGVLRYGIPEYRLTKKLVDKLEERLIEVGVKIRPNTVIGPVISLDRLLEDSYKAVFIGTGVWNPKTLDVKGETLGNVHFAIDYLKSPESYRLGKKVAVIGAGNVAMDAARTAKRNGAEVTILYRKSFNEMPASKQEIRETKEDGVEFKLFRAPIEITEEGIKVAFTENVTDAEGKIRTKIIEGKEEFFECDSVVVAVSQAPKDNIVSNTTGLDTKWGLIVTDEKGNTTKKGTFACGDVVTGAKTVVEAAAQAKVVAETIDEYCKNN

SEQ ID NO: 4349 - DNA, 1419 bp, Salmonella enterica subsp. enterica serovar Typhi
  CDS (1)..(1419)
atgagccagaatgtttatcaatttatcgacctgcagcgcgttgatccgccgaagaaaccgctgaagctccgtaagatcgagtttgttgaaatctacgaaccgttttctgaaggtcaggcgaaagcccaggcggatcgctgtttgtcctgcgggaacccctactgcgagtggaaatgtccggtacataactacatcccgaactggctgaaactggctaacgaagggcgtatttttgaggcggctgagctatcgcaccagaccaacaccctgccggaagtgtgtggccgcgtctgcccgcaggaccgcctgtgcgaaggctcctgtacgctgcacgatgagttcggcgcagtgaccatcggtaacattgagcgctatatcaacgataaagcgttcgaaatgggctggcgcccggatatgaccggcgtgcgccagacggacaaacgggtagcgattatcggcgctggtccggcagggctggcgtgcgccgacgtgctgacccgcaacggcgtgaaggcggtggtctttgatcgccatccggaaatcggtggtctgctgaccttcggtattccagctttcaaactggaaaaagaggtgatgacccgtcgtcgcgagatcttcaccggcatgggtattgagttcaaacttaataccgaagtgggtcgtgatgtacagcttgaagatctgctgaaagattacgatgcggtattccttggcgtcggcacctatcagtcgatgcgcggcgggctggaaaatgaagatgcggacggggttttcgacgctctaccgttcctgatcgccaatacgaagcagatcatggggtttggcgaaaccagcgacgaaccatatgtcagcatggaaggcaaacgcgtggtggtgctgggcggcggcgataccgcaatggactgcgtacgcacttccatacgccagggcgcaacgcacgtaacctgtgcttatcgtcgtgatgaagagaacatgccgggttccagacgcgaagtgaaaaacgcgcgcgaggaaggtgtcgagtttcagtttaacgttcaaccgctgggcattgaagtcaatgccaacggcaaagtgagcggcgtaaaaatggtgcgtactgaaatgggcgaaccggatgccaaaggccgtcggcgggcggagatcgtcgccggttccgagcatgtggttccggctgatgcggtggtgatggcgtttggttttcgtccacacagcatggaatggctggcgaaacacagcgtggaactggactcgcagggacgaattatcgcgccggaacgcagcgataatgctttccagaccagcaacccgaaaatcttcgccggtggcgacatcgtgcgcggttccgatctggtggtgacggcgattgccgaaggccgtaaagcggctgacgggattatgaactacctcgaagtgtaa

SEQ ID NO: 4350 - protein, 472 aa, Salmonella enterica subsp. enterica serovar Typhi
MSQNVYQFIDLQRVDPPKKPLKLRKIEFVEIYEPFSEGQAKAQADRCLSCGNPYCEWKCPVHNYIPNWLKLANEGRIFEAAELSHQTNTLPEVCGRVCPQDRLCEGSCTLHDEFGAVTIGNIERYINDKAFEMGWRPDMTGVRQTDKRVAIIGAGPAGLACADVLTRNGVKAVVFDRHPEIGGLLTFGIPAFKLEKEVMTRRREIFTGMGIEFKLNTEVGRDVQLEDLLKDYDAVFLGVGTYQSMRGGLENEDADGVFDALPFLIANTKQIMGFGETSDEPYVSMEGKRVVVLGGGDTAMDCVRTSIRQGATHVTCAYRRDEENMPGSRREVKNAREEGVEFQFNVQPLGIEVNANGKVSGVKMVRTEMGEPDAKGRRRAEIVAGSEHVVPADAVVMAFGFRPHSMEWLAKHSVELDSQGRIIAPERSDNAFQTSNPKIFAGGDIVRGSDLVVTAIAEGRKAADGIMNYLEV

SEQ ID NO: 4351 - DNA, 1860 bp, Salmonella enterica subsp. enterica serovar Typhi
  CDS (1)..(1860)
atgaatcgttttattatggccaatagccagcagtgtctgggatgccatgcctgcgaggtcgcctgcgtaatggctcacaatgatgagcgacatgttctgacgccacagcgctatcagccccgaattactgtcatcaaacatcagcgccagcgcagcgcggttacatgtcaccattgcgaagatgcgccctgcgcccgtagctgtccgaacggcgcgatcgcgcatattaacgacagcgtgcaggtcaatgcgcagaagtgcatcggctgtaagtcctgcgtcgtcgcctgcccattcggcaccatgcagatggtattgacgcccgtcgcgccaaaccagttcaaagccagcgcgcataaatgcgatctgtgtcagggacgtgaacagggtccggcctgtgtggaaaattgcccggcggatgcgctgcaactggtcaccgaagactcgttgacccgtctggctaaaacgcgacggctgcgtaccgcccggcaggagattcgcccctggcataccgtggatacacaacacagtgggacagcatgcagcaaagtcgagcgtatgcaggcgacgccgccgcgcggcgaaccggataaactggcgattgaagcgcgtaaaaccacctttgaggaaatttatctgccgtttcgcgccgcgcaggcggagcgtgaagcggcccgctgcctcacatgcggggaacacagtatctgcgaatggacctgtccgctgcataaccatattccccagtggatcgaactggtgaaagccggcgatattgatgcggcggtagagctttcccaccagaccaactgtctgccggaaattaccgggcgcgtctgtccgcaggatcggctatgcgaaggcgcgtgtacactccgcgatgagtatggcgcggttaccatcggcaacattgagcgctatatctccgatcgcgctctgagcaaaggctggcgtcccgacctgtcggacgtacagaagagcgataagcgcgtggcgattatcggcgcggggccggcaggtcttgcctgcgctgacgtgctggcgcgccgtcgggaaatcttcagcgcgatggggattcgtttcgaacttaactgcgaagtagggaaagatatttctctggagacgctgctggagagttatgacgccgtctttgtcggggtaggaacctatcgttccatgaaggctgatttaccgaatgaagacgcgccgggggtatatgatgcgttgccattcctcatcgccaataccaaacaggtgatggggcttccggcgttgcctgacgagccgtttattgatactgcgggccttaacgtggttgtgctgggcggcggtgacaccgcaatggactgcgtacgtacggcgttgcgtcatggcgctgccaacgtcacctgcgcttatcgccgcgatgaggccaatatgccagggtcgaaaaaagaggtgaaaaacgcgcgggaagagggcgcgaactttgaatttaacgttcagccagttgagttggtgctggatacgcacgggcgcgccagcggtattcgctttttgcgtacgcggcttggcgaaccggatggtcaggggcgacgccgtccggtacctgtaccggacagcgagttcgtgatgccggcggatgcggtcattatggcgtttggttttcatccgcatggtatgtcgtggctggaatcgcatggcgtgaaggtggataactggggacgtattgccgccagcgtcgagagcgagtttcgttaccagacgtccaacccgaaaattttcgctggcggcgatgcggtgcgcggcgccgatctggtggtgacggcgatggcagaaggccgacatgccgcgcaggggatactcgactggttagctaaataa

SEQ ID NO: 4352 - protein, 619 aa, Salmonella enterica subsp. enterica serovar Typhi
MNRFIMANSQQCLGCHACEVACVMAHNDERHVLTPQRYQPRITVIKHQRQRSAVTCHHCEDAPCARSCPNGAIAHINDSVQVNAQKCIGCKSCVVACPFGTMQMVLTPVAPNQFKASAHKCDLCQGREQGPACVENCPADALQLVTEDSLTRLAKTRRLRTARQEIRPWHTVDTQHSGTACSKVERMQATPPRGEPDKLAIEARKTTFEEIYLPFRAAQAEREAARCLTCGEHSICEWTCPLHNHIPQWIELVKAGDIDAAVELSHQTNCLPEITGRVCPQDRLCEGACTLRDEYGAVTIGNIERYISDRALSKGWRPDLSDVQKSDKRVAIIGAGPAGLACADVLARRREIFSAMGIRFELNCEVGKDISLETLLESYDAVFVGVGTYRSMKADLPNEDAPGVYDALPFLIANTKQVMGLPALPDEPFIDTAGLNVVVLGGGDTAMDCVRTALRHGAANVTCAYRRDEANMPGSKKEVKNAREEGANFEFNVQPVELVLDTHGRASGIRFLRTRLGEPDGQGRRRPVPVPDSEFVMPADAVIMAFGFHPHGMSWLESHGVKVDNWGRIAASVESEFRYQTSNPKIFAGGDAVRGADLVVTAMAEGRHAAQGILDWLAK

SEQ ID NO: 4353 - DNA, 1470 bp, Listeria innocua
  CDS (1)..(1470)
atgggaaaagcaactggatttatggaatatgatcgaattccttcgccaggacgtgatccgaaaagtcggacgcgtgactggaatgaatatagtttaccgatgccggtagcagatttaactttacaagccgctcgctgtatggattgtggtgtgccattttgtagtgtaggaatggaaattaaaaatggtgtgtcaggctgtccgctgcataatttaattcccgagtggaacgatgccgtttaccggggtgactggtatgaagcgttacaactgcttctaaaaacaaataattttccagagtttactggtcgaatttgtccggccccgtgtgagggtggttgtacagtagctatttctgaacctgctgtcggcattaaatcaattgaaaaagcaattattgatcgtggttttgaggaaggttggattaaaccgcaacctcctaagaaacgtaccggcaaacgtattgctgtgattggctctggaccagctggacttgcctgtgccgatcaattaaataaagctggtcatagtgtaacagtcatcgagaaaagtgatcgaattggtggcttattgatgtatggtattccaactatgaaactagaaaaagaacaagtgacacgccgagtgaacttgatggcggaagaaggaattgaatttgtaacaggtgttgcagcaggtactgatgttacttttgctgaactgcgcgctgaatatgattcgattgttcttgcgactggggctggtaatgcacgagatataccgcttgctggacgtgatgcggctgggattcacttcgccgttccgtatttgacacaaagcacgcgtgataatttagataatggcggagttcaaacactttctgctaaagataaaaatgttgttattattggtggcggagatacaggggctgactgtgtggcaactgcgcttagacaaggcgctaaaagtatttatcaattcggtattcaagataaattacccgaattaagaaatggtgaaaatccatggccgcaatatccacgtgttttcaaaatggattatgcgcatgaagaagcagaagcagtgtacggcagagatccacgtgagtatctcatcaatactacttctttcgaaaaagatgcagcaggaaatcttgttgggcttcacacggtagaagttacagaagataaagagacgagacaatatacaccagtagaaggtagcgagaaatattttgaagtagatatggttttaattgctattggcttttcgggtacgacagaagatatatttactaatttcggtgtaggaaaaacagagcgccatacaattgacgctgctaaaggattttaccgcacaagtgaagaaggcgtgtttgcttgtggggatgcacgtcacggtcaaagtttagttgtaaccgcgattgcagaaggaagagaagcagcacgagaagttgacttttacttgatgggagaaacatttttaccataa

SEQ ID NO: 4354 - protein, 489 aa, Listeria innocua
MGKATGFMEYDRIPSPGRDPKSRTRDWNEYSLPMPVADLTLQAARCMDCGVPFCSVGMEIKNGVSGCPLHNLIPEWNDAVYRGDWYEALQLLLKTNNFPEFTGRICPAPCEGGCTVAISEPAVGIKSIEKAIIDRGFEEGWIKPQPPKKRTGKRIAVIGSGPAGLACADQLNKAGHSVTVIEKSDRIGGLLMYGIPTMKLEKEQVTRRVNLMAEEGIEFVTGVAAGTDVTFAELRAEYDSIVLATGAGNARDIPLAGRDAAGIHFAVPYLTQSTRDNLDNGGVQTLSAKDKNVVIIGGGDTGADCVATALRQGAKSIYQFGIQDKLPELRNGENPWPQYPRVFKMDYAHEEAEAVYGRDPREYLINTTSFEKDAAGNLVGLHTVEVTEDKETRQYTPVEGSEKYFEVDMVLIAIGFSGTTEDIFTNFGVGKTERHTIDAAKGFYRTSEEGVFACGDARHGQSLVVTAIAEGREAAREVDFYLMGETFLP

SEQ ID NO: 4355 - DNA, 1470 bp, Listeria monocytogenes
  CDS (1)..(1470)
atgggaaaagcaactggatttatggaatatgaccgaattccctctccaggacgtgatccgaaaagccggacacgtgactggaacgaatatagtttaccaatgccggtagcagatttaacaatacaagccgctcgatgtatggattgtggtgtgccgttttgtagcgtagggatggaaattaaaaatggcgtatcaggttgtccattgcataatttaattcctgagtggaacgacgccgtataccggggtgactggtatgaagcgttacaactacttttaaaaacaaataattttccagagtttactggtcgtatttgtccggcgccgtgtgaaggtggctgtacggtggctatttcggaacctgctgtagggattaaatccattgaaaaagcgattattgaccgaggttttgaagaaggctggattaaaccggctcctcctaaaaaacgtaccggtaaacgaattgctgtgattggatcaggaccggctggacttgcctgcgcggatcaattaaataaagctggccatagcgtaacggtcattgaaaaaagtgatcgcattggtgggttattaatgtacggtattccaacgatgaaactggaaaaagaacaagtaacgcgccgagtgaacttgatggcggaagaaggaatcgaattcgtcacaggtgttgcagcagggacagatgttacttttgcagaactacgcgaagagtatgattctatcgttcttgcgacaggagcaggaaatgcgcgcgatatcccacttgctggacgtgacgcagctggtattcacttcgctgttccgtatttatctcaaagtacgcgtgataatctggataacggcgggatacaaacactttctgctaaaggtaagaatgttgtgattatcggtggtggagatacaggtgctgactgtgtggcaactgcgctcagacaaggcgcaaaaagtatttatcaatttggtattcaagataaactacctgaattgcgtgatggcgaaaacccttggccgcaatatccacgtgttttcaaaatggattatgcgcacgaagaagcggaagcagtgtatggaagagatccacgtgagtaccttattaatacaacttcttttgaaaaagatgaagcaggaaatcttattggattgcatactgtagaagtagaagaaaataaggcagaaagaaaatatacacctgtagaaggaagcgaaaaatactttgaagtagatatggttttaatcgcgattggttttgcaggaacaactgaagatatttttacaaactttggtgtaggaaaaacagatcgtcatacgattgatgcagccaaaggattttaccgtactagtgaagagggcgtattcgcttgcggagatgcgcgtcacggtcaaagtttagttgtaaccgcgattgcagaaggacgagaagcagctcgtgaagtagacttttacttgatgggtgaaacatttttaccataa

SEQ ID NO: 4356 - protein, 489 aa, Listeria monocytogenes
MGKATGFMEYDRIPSPGRDPKSRTRDWNEYSLPMPVADLTIQAARCMDCGVPFCSVGMEIKNGVSGCPLHNLIPEWNDAVYRGDWYEALQLLLKTNNFPEFTGRICPAPCEGGCTVAISEPAVGIKSIEKAIIDRGFEEGWIKPAPPKKRTGKRIAVIGSGPAGLACADQLNKAGHSVTVIEKSDRIGGLLMYGIPTMKLEKEQVTRRVNLMAEEGIEFVTGVAAGTDVTFAELREEYDSIVLATGAGNARDIPLAGRDAAGIHFAVPYLSQSTRDNLDNGGIQTLSAKGKNVVIIGGGDTGADCVATALRQGAKSIYQFGIQDKLPELRDGENPWPQYPRVFKMDYAHEEAEAVYGRDPREYLINTTSFEKDEAGNLIGLHTVEVEENKAERKYTPVEGSEKYFEVDMVLIAIGFAGTTEDIFTNFGVGKTDRHTIDAAKGFYRTSEEGVFACGDARHGQSLVVTAIAEGREAAREVDFYLMGETFLP

SEQ ID NO: 4357 - DNA, 1419 bp, Yersinia pestis
  CDS (1)..(1419)
atgagtcagaacgtttatcagtttatcgacttacagcgcgtcgatccgcctaaaaaaccgctgaagatccgtaaaattgaatttgttgaaatttacgagccattctcagaaacacaagccaaagcacaggccgatcgctgcctgtcctgcggcaatccgtactgtgaatggaaatgcccggttcataactacatccctaactggctgaaactggccaacgaggggcggattatggaagcggctgatctggcacaccaaacgaacagcctaccggaggtctgtggccgtgtttgtccacaagatcgcttgtgtgaaggatcttgtactctgaacgacgaatttggtgccgtgaccatcggcaacatcgagcgttatatcagtgacaaagccattgcgatgggctggaaaccggatatgtcacatgttcaccctaccggtaaacgtgtggccgtgatcggggccggccctgccgggctggcctgtgctgatgtattagcacgtaacggtgttcaggctgtggtctttgaccgccatccagaaattggggggttactgaccttcggtatcccagcgtttaagctggaaaaagaagtgatgattaaacgccgtaagatcttctccgagatgggaattgaattccaactgaatactgaagtaggcaaagacatcaccatggaagcactgctgaaagattacgacgccgtgttcctgggggttgggacctaccaatctatgcgtggtggtttggaaaacgaagaggctaacggtgtatatgatgccttgcctttcctgattgctaatactaaacagctaatgggctatgaagcgacggctcacgaaccgtatatcaacatgcaaggtaaacgcgtcgtggtgcttggtggcggtgataccgcaatggactgtgtgcgctcctcaattcgtcagggggcaaccgatgtggtttgcgcctatcgccgcgatgaagtgaatatgccgggttccaagcgggaagtgaaaaacgcccgtgaagaaggggtagaatttaaattcaacctgcaaccattaagcattgaagtgaacagcaatggcaaagtctgtggtgtcagaatggtccgcacccagttgggcgcgccagatgcacagggccggcgcatggctgaacagatccctggctcagaacatgtattgccagcagatgccgtagtgatggcatttggtttccgcccacacagtatggaatggctggccgctcacgatgtgaagctggataagcaaggccgggtgattgcaccggaaagcactgataatgccttccagaccagtaacccgaaaatctttgcgggcggcgatattgtccgtggttccgatttagtggttaccgccattgccgaaggccgtaaagccgcagacggcatcatgaattatctggaagtctaa

SEQ ID NO: 4358 - protein, 472 aa, Yersinia pestis
MSQNVYQFIDLQRVDPPKKPLKIRKIEFVEIYEPFSETQAKAQADRCLSCGNPYCEWKCPVHNYIPNWLKLANEGRIMEAADLAHQTNSLPEVCGRVCPQDRLCEGSCTLNDEFGAVTIGNIERYISDKAIAMGWKPDMSHVHPTGKRVAVIGAGPAGLACADVLARNGVQAVVFDRHPEIGGLLTFGIPAFKLEKEVMIKRRKIFSEMGIEFQLNTEVGKDITMEALLKDYDAVFLGVGTYQSMRGGLENEEANGVYDALPFLIANTKQLMGYEATAHEPYINMQGKRVVVLGGGDTAMDCVRSSIRQGATDVVCAYRRDEVNMPGSKREVKNAREEGVEFKFNLQPLSIEVNSNGKVCGVRMVRTQLGAPDAQGRRMAEQIPGSEHVLPADAVVMAFGFRPHSMEWLAAHDVKLDKQGRVIAPESTDNAFQTSNPKIFAGGDIVRGSDLVVTAIAEGRKAADGIMNYLEV

SEQ ID NO: 4359 - DNA, 1242 bp, Salmonella enterica subsp. enterica serovar Typhi
  CDS (1)..(1242)
atgccgcaacaaaattatctggatgaactcacgcctggttttacgccattactggcaataaaagaggcttcccgttgtttattatgtcacgatgcgccctgtagtcaggcttgcccggcgcaaaccgatccggggaaatttattcgttctatttactttcgcaattttaaaggcgcagcggaaactatccgggaaaataatgcgcttggcgccgtctgcgccagagtctgtccgacggaaaaattatgccagcgcggatgtacacgttccggaatagataaacctattgatattgcacgcctgcaacgttttattaccgattttgaacagcagactgccatgcagatttatcagcccgggagtaaaacacgcgggaaagtcgcgattattggcgcgggtccggcaggtttgcaggcaagcgtgacgctcacacatttaggctatgacgtcaccatttacgaaaaacagccgcagcccggcggatggctgcgtcacggcatcccggcatttcgtctgccgcaaagcgtactcgatcaggaaattgcccgcattgtagaaatgggcgtcaatattaaatgtaattgtgacgtgggcgggtcgctatcgcttgcgcaactcaaagccgaatatcgcgccgtgctgatgaccgtcgggatgtcctgtggctctgatttaccgttatttgagcaagccagtcacgtagagattgccgttgattttttacagcgcgcccgtcaggccgacggcgatattagcgttccgcgtagcgcattaattattggcggcggcgacgtagcgatggatgtcgccagtacgttaaaaattctcggctgtccttccgtcacctgcgtggcgcgggaagaattagccgaattccccgccagcgaaaaagaatttaccagcacgcaggcattaggcgtatcgattattgatggttttacgcctgtcgccgtcagcggaaataaagtgaccttccaccatgtacgccactcaggagaactgacgctggaagcggaaaatattattttggccgtggggcagcacgcgcgactggataactttgcggagataaaagcgcagcataatattatcgacacgcacaattatcaaaccgacgacccggcgatctttgccgctggcgatattgttaaaggtgataagaccgtcgtttatgcggtaaaaaccggaaaagaagccgctcaggctattcatcattatttagaggaggcctgctcatgttaa

SEQ ID NO: 4360 - protein, 413 aa, Salmonella enterica subsp. enterica serovar Typhi
MPQQNYLDELTPGFTPLLAIKEASRCLLCHDAPCSQACPAQTDPGKFIRSIYFRNFKGAAETIRENNALGAVCARVCPTEKLCQRGCTRSGIDKPIDIARLQRFITDFEQQTAMQIYQPGSKTRGKVAIIGAGPAGLQASVTLTHLGYDVTIYEKQPQPGGWLRHGIPAFRLPQSVLDQEIARIVEMGVNIKCNCDVGGSLSLAQLKAEYRAVLMTVGMSCGSDLPLFEQASHVEIAVDFLQRARQADGDISVPRSALIIGGGDVAMDVASTLKILGCPSVTCVAREELAEFPASEKEFTSTQALGVSIIDGFTPVAVSGNKVTFHHVRHSGELTLEAENIILAVGQHARLDNFAEIKAQHNIIDTHNYQTDDPAIFAAGDIVKGDKTVVYAVKTGKEAAQAIHHYLEEACSC

SEQ ID NO: 4361 - DNA, 1467 bp, Deinococcus radiodurans
  CDS (1)..(1467)
atgtccaaaatcaccggctttctagaacaaccccgcgtcaaggagcagtacgcgccgattgacgcccggctcaagcactaccacgaattcatgctgccgctcgattcggcctcggcccgcctgcaagcgacgcgctgtatggactgcgggattccgttctgtaacaacggctgcccggtcaacaacatcatccccgacttcaacaacctggtgttcgaggacgactggaaagcggcgctcgacgtgctgcacgccaccaacaacttccccgagttcaccgggcgtatctgccccgccccgtgcgaggccgcctgcacgctgaacatcagcgaggacccggtgggcatcaagtccatcgaactcgccattatcgagcgcggctggcaggaaggctgggttagacctacgcccgccgaagtcaagaccggcaagaaagtcgccgtggtgggctccggccctgctgggctggccgccgcgcagcaactcgcccgcgccgggcacgacgtgacggtgttcgagaagaacgaccgagtgggcgggctggtgcgttacggcattcccgacttcaagctcgacaagtcgcacatcgaccgccgcatagagcagatgcaggccgagggcgtcaccttccgcaccggcgtcctggtgggcgactgggacgagaacagcaagatcaccaacctcagcaaagagcgcgtgacgcccgccgagctgcgcgaacagttcgacgcggtggtcctcgcgggcggcagcgaaacgccgcgtgacctgccggcaccgggccgtgagctgaacggcatccactacgcgatggagttcctgccgcagcaaaaccgggtgaacgcgggcgacaagttcaagggccagattcgcgccgacggcaagcacgtggtcgtcatcggcggcggcgacaccggcagcgactgcgtgggcaccagcaaccgccacggcgcggcgggcgtcacgcagttcgaagtgatgccgcagcctcccgagcaggaaaacaagccactcacgtggccctactggccgatgaaactccgcaccagcaccagccacgaggaaggcgccgtgcgcgagttcgccatcgccaccaaggaatttatcggcaagggcggcaaggtcacgggcgtgaggaccgtgcgggtggaaatgaaggacggcaagctggaggaaatccccggctccgaggaaacccacaaggctgacctggtgctgctggcgatgggctttaccaacccgatgcagagcgtgctcgacgcgtttggcgtggacaaagacccgcgcggcaacgtgctggcgggcaccgaggagcacggcggctacctgaccagcgttcccggcgtcttcgcggcgggcgacatgcggcgcgggcagagcctcgtcgtgtgggccatccgcgagggtcggcaagcggcgcgggcggtggaccagttcctgatgggcgagagcgtactcccgcgctga

SEQ ID NO: 4362 - protein, 488 aa, Deinococcus radiodurans
MSKITGFLEQPRVKEQYAPIDARLKHYHEFMLPLDSASARLQATRCMDCGIPFCNNGCPVNNIIPDFNNLVFEDDWKAALDVLHATNNFPEFTGRICPAPCEAACTLNISEDPVGIKSIELAIIERGWQEGWVRPTPAEVKTGKKVAVVGSGPAGLAAAQQLARAGHDVTVFEKNDRVGGLVRYGIPDFKLDKSHIDRRIEQMQAEGVTFRTGVLVGDWDENSKITNLSKERVTPAELREQFDAVVLAGGSETPRDLPAPGRELNGIHYAMEFLPQQNRVNAGDKFKGQIRADGKHVVVIGGGDTGSDCVGTSNRHGAAGVTQFEVMPQPPEQENKPLTWPYWPMKLRTSTSHEEGAVREFAIATKEFIGKGGKVTGVRTVRVEMKDGKLEEIPGSEETHKADLVLLAMGFTNPMQSVLDAFGVDKDPRGNVLAGTEEHGGYLTSVPGVFAAGDMRRGQSLVVWAIREGRQAARAVDQFLMGESVLPR

SEQ ID NO: 4363 - DNA, 1980 bp, Escherichia coli
  CDS (1)..(1980)
atgaatcgttttattatggccaacagtcagcaatgtctgggttgtcatgcttgtgaaatcgcctgtgtcatggctcacaatgatgagcaacatgtcctgagccaacaccattttcatccccgaattacggttatcaaacatcaacagcaacgtagtgcagtgacctgtcaccattgtgaagatgcgccctgcgcccgtagctgccctaatggcgcaatcagccacgttgatgacagcattcaggtcaatcagcaaaagtgtattggctgtaaatcctgcgtggtggcctgtccttttggtacgatgcaaatcgtcctgacacccgtcgcggcaggaaaagtaaaagccacggcgcataaatgcgacctttgtgcggggcgcgaaaacggtcctgcctgtgttgagaattgcccggcggacgcgctgcaactggtcactgacgtcgcactctccggcatggcgaaatcccgccgcttgcgcaccgcgcgtcaggaacatcaaccgtggcatgccagtaccgcggcgcaagaaatgccggtaatgagtaaagtcgaacaaatgcaggcaacgcccgcgcgtggcgagccggataaactggcgattgaagcgcgcaaaaccggttttgatgaaatttatctgccatttcgcgccgaccaggcacaacgggaagcctcgcgctgccttaagtgcggcgagcacagcgtttgtgaatggacctgcccgctgcataaccatataccgcagtggattgaactggtgaaagccggaaacatcgacgccgccgtcgagctttctcaccagaccaacaccctgccggaaattaccggacgcgtttgtccgcaagaccgtttgtgtgaaggtgcctgtactattcgcgatgagcacggcgcggtaactatcggcaacattgaacgctacatttcagatcaggcgttggcgaaaggttggcgtcctgacttaagccatgtcaccaaagtggacaagcgggtggcgattatcggtgcaggtccggcagggctggcctgtgcggatgttctgacccgcaatggcgtgggggtgacggtgtacgatcgccatccagaaatcggtggcttgctcactttcggcattccttctttcaaactggataaatccctgctggcacgccgtcgggaaatcttcagcgcgatggggattcacttcgaactcaattgtgaagtgggtaaagatgtctctttggattcgcttttggaacaatacgacgcggtcttcgttggcgtaggcacttaccgttccatgaaagcgggtttacccaatgaagatgcgccgggcgtttatgacgcgctgccgttcctcattgccaacactaaacaggtgatggggctcgaagagctaccggaagagccgtttatcaataccgccggacttaacgtcgtggtactgggcggcggcgacaccgcgatggactgtgtgcgtaccgcactgcgccacggcgcgagtaacgtcacctgcgcttatcgtcgtgatgaagctaacatgccaggctcgaagaaagaagtgaagaacgcccgcgaagagggggccaacttcgaatttaacgtccagccggtggcgcttgagctgaatgaacaaggtcacgtctgcgggattcgtttcctgcgcacgcgtcttggagagccggatgcccaggggcgtcggcgtccagtgccggtggaaggcagtgaatttgtcatgccagccgacgcggtgattatggcgtttggcttcaatccgcacgggatgccgtggctggagtcgcacggtgtaacggtagacaaatggggccgcatcatcgcggatgtggaaagccagtaccgttaccagaccaccaatccgaaaatcttcgctggtggtgacgccgtgcgtggtgcggatctggtggttaccgcaatggcagaaggacgtcatgcggcacaggggattattgactggctgggggtaaaatcagtcaaatctcactga

SEQ ID NO: 4364 - protein, 659 aa, Escherichia coli
MNRFIMANSQQCLGCHACEIACVMAHNDEQHVLSQHHFHPRITVIKHQQQRSAVTCHHCEDAPCARSCPNGAISHVDDSIQVNQQKCIGCKSCVVACPFGTMQIVLTPVAAGKVKATAHKCDLCAGRENGPACVENCPADALQLVTDVALSGMAKSRRLRTARQEHQPWHASTAAQEMPVMSKVEQMQATPARGEPDKLAIEARKTGFDEIYLPFRADQAQREASRCLKCGEHSVCEWTCPLHNHIPQWIELVKAGNIDAAVELSHQTNTLPEITGRVCPQDRLCEGACTIRDEHGAVTIGNIERYISDQALAKGWRPDLSHVTKVDKRVAIIGAGPAGLACADVLTRNGVGVTVYDRHPEIGGLLTFGIPSFKLDKSLLARRREIFSAMGIHFELNCEVGKDVSLDSLLEQYDAVFVGVGTYRSMKAGLPNEDAPGVYDALPFLIANTKQVMGLEELPEEPFINTAGLNVVVLGGGDTAMDCVRTALRHGASNVTCAYRRDEANMPGSKKEVKNAREEGANFEFNVQPVALELNEQGHVCGIRFLRTRLGEPDAQGRRRPVPVEGSEFVMPADAVIMAFGFNPHGMPWLESHGVTVDKWGRIIADVESQYRYQTTNPKIFAGGDAVRGADLVVTAMAEGRHAAQGIIDWLGVKSVKSH

SEQ ID NO: 4365 - DNA, 1419 bp, Pyrococcus horikoshii
  CDS (1)..(1419)
atgcctaagcttattaaggagagagttccaactcccgagaggcccgttgaggaaaggattaaggatttcaaggaggtgaacttgggttatacctttgagcttgccaagaaggaagcagagcgttgcctccagtgtccaccggaatatgccccctgtattaagggatgtccagttcacataaacattccggcttttatagctaagataaaggagggtgacatcaagggggcccttaggattatttggaatgacaacacattacccgctattactggtagggtttgtccgcaggaggatcagtgtgagggtgcttgtgtagttggtaaggttggtgatcccgtaaacatcggaaaactagagaggttcgtagcagactacgcaagagaacacggaatagaggaagaattgctccgcgaattcactgagaagtgtgatgggagcaaaggtaaagtagcggtagttggtgctggacccgctggcctaacatgtgcaggtgagctagccaagatgggatataaggttacgatctttgaggcccttcataaacccggtggagttctagcctacggaattccggagtttagattacccaaggagatattggatcacgagctaaagaagcttaaaatgctaggagtcgagataaggactgatcacgtagtaggaaagactgtaacattggatgagttgctccaggaatacgatgctgtcttcataggaactggagcaggaacgccaaagctacttaacattcctgggatactcttagataggatatactcagcaaacgagttcctcacgaggatcaacctcatgaaggcctacgaattcccagagtatgacactccgatagctgtggggaagaaggtaatagtgatcggagctggaaacactgcgatggatgcagctagatcagcattaaggcttggtgcagaggttacaatagcttacagaaggggaagggaagacatgaccgctagggaggaggagataaagcacgctgaagaggagggggtaaagttcgaattcttcctgcaacccgtcgaattcattggagatgagaacggaagagtcaaagccgttaaattcgaaaggacaaagccactagaagagcgtgatagcaaaggaaagaggaagatagtcggaaccggagagtacgtaacgttagaagccgataccgtaataatagccataggacttgagccgaacaagattataaccgaggatgggaggcttaagactaatccggatggaacgatagtagtggacgagaatcttatgacttctattcctggggttttcgctggtggtgatgcaattaggggagaagccacggtaatcctagcaatgggagatggaaagagagcggctaaagcaatagatgaatatataaggaggaagagaggtcagaattcctaa

SEQ ID NO: 4366 - protein, 472 aa, Pyrococcus horikoshii
MPKLIKERVPTPERPVEERIKDFKEVNLGYTFELAKKEAERCLQCPPEYAPCIKGCPVHINIPAFIAKIKEGDIKGALRIIWNDNTLPAITGRVCPQEDQCEGACVVGKVGDPVNIGKLERFVADYAREHGIEEELLREFTEKCDGSKGKVAVVGAGPAGLTCAGELAKMGYKVTIFEALHKPGGVLAYGIPEFRLPKEILDHELKKLKMLGVEIRTDHVVGKTVTLDELLQEYDAVFIGTGAGTPKLLNIPGILLDRIYSANEFLTRINLMKAYEFPEYDTPIAVGKKVIVIGAGNTAMDAARSALRLGAEVTIAYRRGREDMTAREEEIKHAEEEGVKFEFFLQPVEFIGDENGRVKAVKFERTKPLEERDSKGKRKIVGTGEYVTLEADTVIIAIGLEPNKIITEDGRLKTNPDGTIVVDENLMTSIPGVFAGGDAIRGEATVILAMGDGKRAAKAIDEYIRRKRGQNS

SEQ ID NO: 4367 - DNA, 1431 bp, Pyrococcus horikoshii
  CDS (1)..(1431)
atgcctaagcttattaaggagagagttccaactcccgagaggcccgttgaggagagaataaaagattttgatgaagttaatcttggttacacctgggagctagctttaaaggaggccgagcgttgcctccaatgtccggttgagtacgctccctgtattaaggggtgccccgtaaatattaacattcctgggtttatcaaagccttgagggagaacaaagataatccaagaaaggccgtgaaggaagccttaagagttatttgggcttgcaattctcttcctgctattactggtagggtttgtccgcaggaggatcagtgtgagggtgcttgtgtagttggtaaggttggtgatcccgtaaacatcggaaaactagagaggttcgtagcagactacgcaagacaacatgggattgatgatgaactgttaatggaggagattaagaatatcaagaagaatggaaagaaagttgccgttattggggccgggcccgctggcttaacatgtgccgctgaattggctaaaatgggttacgatgttaccatttatgaagcccttcatgaaccaggaggagttttagcatatggaattccagaattcaggttaccaaaagaaatactaagaaaagaactcaagaagcttagcattttgggagttaaaataaagaccgatcatatagtgggtagaactgtcacgattcctgagttattaaaggagtacgatgccattttcataggaactggagcaggaacaccaaagctattaaagatacccggtataaacttgaatggaatttattcagcaaatgaatttctgaccagaattaatctaatgaaagcttacaagttcccagagtacgataccccaataatcgtaggtaagagagttattgtgataggggctggaaacactgcaatggatgccgctagatcagcattaaggcttggagcagaggttataatcgcatatagaagaggagaagaagacatgacagcaagaatagaggaggttcagcatgccaaggaggaaggagtgaagttcatgttctttgtgaatcccgtcgaattcattggggatgagaacggaagggtcaaagctgtaaagttcgaaaagatgaagccattagaagagcgtgatagcagaggaaagaggaagataatcggaactggtgaatatgtaacggttgagacggataccgttgtcatagctataggtcagacccccaacaggataatctggaaaaccaccccaggactcaaggtaagggagaacggtactatcgttgttgatgaaaatcttatgacttctattcctggggtttttgctggtggtgatgcaattaggggagaagccacggtaatcctagcaatgggagacggaaggaaagcagctaaagcaatccatgaatacctaagcaaaaagagtgcctga

SEQ ID NO: 4368 - protein, 476 aa, Pyrococcus horikoshii
MPKLIKERVPTPERPVEERIKDFDEVNLGYTWELALKEAERCLQCPVEYAPCIKGCPVNINIPGFIKALRENKDNPRKAVKEALRVIWACNSLPAITGRVCPQEDQCEGACVVGKVGDPVNIGKLERFVADYARQHGIDDELLMEEIKNIKKNGKKVAVIGAGPAGLTCAAELAKMGYDVTIYEALHEPGGVLAYGIPEFRLPKEILRKELKKLSILGVKIKTDHIVGRTVTIPELLKEYDAIFIGTGAGTPKLLKIPGINLNGIYSANEFLTRINLMKAYKFPEYDTPIIVGKRVIVIGAGNTAMDAARSALRLGAEVIIAYRRGEEDMTARIEEVQHAKEEGVKFMFFVNPVEFIGDENGRVKAVKFEKMKPLEERDSRGKRKIIGTGEYVTVETDTVVIAIGQTPNRIIWKTTPGLKVRENGTIVVDENLMTSIPGVFAGGDAIRGEATVILAMGDGRKAAKAIHEYLSKKSA

SEQ ID NO: 4369 - DNA, 1557 bp, Treponema pallidum subsp. pallidum (syphilis spirochete)
  CDS (1)..(1557)
atgacatctgtacaaaatgtcgtaagcgatgccaagacgtgtgacgtaccggttgagtcagaaccagaagcgcgtacgtatcggccgcacgcactgctccaggaagaagcgtgccagcgcctggcgcagctccagggtaaagagctgaagatgaaggatcgcacgcagatccctttgcagcgtatgcgtatgctgccgccaaaaaagcggtcgctcctcatgcaggaggcggcgctgggttttacagagcagcaggcactggttgagtctcagcgttgtttgaattgtaaaaccaagccgtgcgtaaagggttgtccggtaggagtgccgattcctgagtttattgcgtgtgtccaaaggggagcctttaaggaagcagttgatatcattaagacgacgagtttactccctgcaatttgcggtcgtgtgtgcccgcatgagcgtcagtgtcaattgcagtgtaccgtgggaaagatgtttaaggatgtgtccaaggcggtgtcgattggtgcgcttgagcgttttgtcgctgactgggagcggcagcatggtcaaattacagttccgtactgtgcgccgtctacgcacaagaaagtggccgtcatcgggtcagggcctgcaggtcttgcagttgcctcagatacggcgcgtgcaggccattcggtaacggtgttcgaagcgctccacaaaccgggtggagtggtgacctatggtattcctgagtttcgcctgccgaaagaagtggtagtgacggaaattgaaacactcaagaaaatgggggtgacgttccggatgaactttttggtgggcagaacagcaacgctggaacagctgttctcgcagtacggttttgatgcagtttttatcgggaccggtgcgggattgccgcgctttatgaatattgagggtgaggaattgtgcggggtgtttgcagcaaacgactacctaacgcgtgcgacgctgatgaaggcgtatgacactgcgcatgcggacacgccggtgtatgcggcaaagtcagtggtggtagtcggtggagggaatgtggcggtagattcctcgcgtacggcgctccgtttaggggctgagcaggtgcactgtctgtacagaaaaacgcgtgcggatatgaccgcctgtgtggaggaaattgcacaggcagaagatgagggggtgacgtttcactttttgtgtcagaccacccgcattttgggggatgaagaggggaacgtgcgcgcggtagtgttccgcgattgtcaggaacagattgatgcaggagaacgtgtgtttctgccctgcggcgatgctgagtgtaaacttgctgcagacgcggtgatcgttgccgttgggaatggttcaaatccgctcatggcaaagacaacgcgcagtcttgcagtgagcgagcggggtactatcgtggtggacgaggatcaacggacgagcattccgggagtgtgggctgggggagacattgtcttaggagcggcaacggttattcgtgcgatggggcaggggcggcgtgcagcggcgtctataaacgcgtaccttgcgcaaaaagcgtaa

SEQ ID NO: 4370 - protein, 518 aa, Treponema pallidum subsp. pallidum (syphilis spirochete)
MTSVQNVVSDAKTCDVPVESEPEARTYRPHALLQEEACQRLAQLQGKELKMKDRTQIPLQRMRMLPPKKRSLLMQEAALGFTEQQALVESQRCLNCKTKPCVKGCPVGVPIPEFIACVQRGAFKEAVDIIKTTSLLPAICGRVCPHERQCQLQCTVGKMFKDVSKAVSIGALERFVADWERQHGQITVPYCAPSTHKKVAVIGSGPAGLAVASDTARAGHSVTVFEALHKPGGVVTYGIPEFRLPKEVVVTEIETLKKMGVTFRMNFLVGRTATLEQLFSQYGFDAVFIGTGAGLPRFMNIEGEELCGVFAANDYLTRATLMKAYDTAHADTPVYAAKSVVVVGGGNVAVDSSRTALRLGAEQVHCLYRKTRADMTACVEEIAQAEDEGVTFHFLCQTTRILGDEEGNVRAVVFRDCQEQIDAGERVFLPCGDAECKLAADAVIVAVGNGSNPLMAKTTRSLAVSERGTIVVDEDQRTSIPGVWAGGDIVLGAATVIRAMGQGRRAAASINAYLAQKA

SEQ ID NO: 4371 - DNA, 1446 bp, Campylobacter jejuni
  CDS (1)..(1446)
atgggaaatgcaagaggttttttggactttaaaagaatggattttaaaaaaattgctcctaaagaaaggattttaaattacaaagaatttactatacctttggataaaaaagaacaagaagttcaaggtggacgatgtatggattgtggggtagctttttgtcatacgggtgtgatgagcgaaggaaaagatgtgggctgtcctttaaacaatctcattcctgaatggaacgatcttgtttatcgttctttatggaaagaagcttatgaaagacttgatcttaccaatccttttcctgaatttaccggtcgtgtttgccctgctccttgtgaggattcttgtgtgtgtgcgataaatggtgttagtgtgagcataaaaaataatgaattatccattatagaaaatgcttttaaggaaaatttagtaagagtaaataaacctaagcaatacaatggcaaaaaaatcgctgtcataggaagtgggcctgctgggcttgcttgtgccaatactttaaattcactaggttataaagtaagtgtttttgaaagaagcgataaaataggcggacttttgatgtatggcatccctgatatgaagcttgataaaagtatagttcaaagacgggtggatttgcttaaaaaaagtgggattgaatttaaagtgaatgaaaatatagacagcaaagataaggtttcaaaacttctaaaagaatttgatgctttggtgctttgtacaggagcaagtaagcctatagatcttgatatagaaggtagaaagctaaaaggggttgaatttgcccttgattttttaacgcaaaataccaaaactttgttaaaaacaggcaagggtgcagatatggccaaaggtaaaaatgtcttggttataggaagcggggatacaagtgtggattgtatcgctgtagcgacaagacaaggggctaaatctatagtgcgttttgaaagaagtccaaaaagacctttgcaaagaagccaaaacaatccttggcctttaaaagctgacatttttactactgattatggtttagaagaagccattgctgtatatggcaaagatcctagggaatatcaaaaaatgacaaagaaatttttaggaaaaactcatgtagaaggtgttgaagcaaatgatttaaaacgcgagtttaaagaaggcaaagctataaatgtcgaaatttcaaattctaaaaaaacttataaagcggatttagtgcttttagctatgggttttagcgggtgcgaagaagctatctctaaaaattttggagtgaaattagatgagaaaaacaacataagcacagaaaatttccaaaccactcataaaaaaatctttgcttgtggagatgctagaaaaggacaatctttagttgtttgggctataaaagatggtatagaatgtgctttgagtttgcatcaaaatttagcaaaataa

SEQ ID NO: 4372 - protein, 481 aa, Campylobacter jejuni
MGNARGFLDFKRMDFKKIAPKERILNYKEFTIPLDKKEQEVQGGRCMDCGVAFCHTGVMSEGKDVGCPLNNLIPEWNDLVYRSLWKEAYERLDLTNPFPEFTGRVCPAPCEDSCVCAINGVSVSIKNNELSIIENAFKENLVRVNKPKQYNGKKIAVIGSGPAGLACANTLNSLGYKVSVFERSDKIGGLLMYGIPDMKLDKSIVQRRVDLLKKSGIEFKVNENIDSKDKVSKLLKEFDALVLCTGASKPIDLDIEGRKLKGVEFALDFLTQNTKTLLKTGKGADMAKGKNVLVIGSGDTSVDCIAVATRQGAKSIVRFERSPKRPLQRSQNNPWPLKADIFTTDYGLEEAIAVYGKDPREYQKMTKKFLGKTHVEGVEANDLKREFKEGKAINVEISNSKKTYKADLVLLAMGFSGCEEAISKNFGVKLDEKNNISTENFQTTHKKIFACGDARKGQSLVVWAIKDGIECALSLHQNLAK

SEQ ID NO: 4373 - DNA, 1446 bp, Caulobacter crescentus
  CDS (1)..(1446)
atggccgagcgcatgctgaaattcacgacggtggcccgcaagacgcctgaaaagcgcgcggccgctgagcgttcgggcgactttcacgagatctacgccgacttcatcgacgcaaaggccaccgagcaggcctcgcgttgctcgcagtgcggcgtgccgttctgtcagacgcactgcccgctgcacaacaacatccccgactggctgcggatgaccgccgaaggccgtctggaagaagcctacgccctgtcgcaggcgaccaattcgatgccggaggtctgcggtcgaatttgcccccaggatcgcctgtgcgaaggcaactgcgtgatcgaacagtcgggtcacggcacggtgaccatcggttcggtcgagcgctacctgaccgacaaggcctgggagatgggctgggtcaagccgctggccgccggtccggcgcgcggtcagtcggtcgggatcgtgggcgcgggccccgcaggcctggccgccgccgagaagctgcgtgaggccggctacgacgtcaccgtctatgaccgccacgatcgcgccggcgggctgctgatctatggcatccccggcttcaagctggagaaggacgtcgtcgagcgccgcacccagcgcctagccgacggcggcgtcgtcttcaagctgggcttcgaggtcggcaaggacgccacgctcgaggacctgcgcgcccagcatgacgcggtgctgatcgccgtcggcgtctacgccgcgcgcgacctgaccgttccgggcggcggcagcaagggcgtggttccagccctcgactatctgatcacctccaaccgcctgtccctgggcgacagcgttccggcctacgactcgggcgaactgaacgccgagggcaaggacgtggtcgtggtcggcggcggtgacaccgccatggactgcgtgcgcacggccatccgtcagggcgccaagtcggtcacctgcctctatcgccgcgacaaggccaatatgcccggctcgatgcgcgaagtggccaacgccgaggaagaaggcgtcaccttcgaatggctggccgcgccgcgcgccctgtctggcgaggccgaggccgtcaccggcgtgcgcgccatccgcatgcgcttgggcgcgccggacgcctcgggccgccagagccccgaggaaatccccggcggtgacttcgaccgtccggcccagctggtcgtcaaggccctgggcttcgagcccgagaacctgccagagcagtggtccgccccggacctgaaggtgacccgttggggcaccgtcaaggccgacgtccggaaccagatgaccaatctcgacggcgtgttcgccgccggcgacatcgtgcgcggcgcttcgctggtggtctgggcgatcaaggacggccgcgacgccgccgacgccatccaccgctacctgctggccaaggcgtcctcgacgctgatcgccgccgaatag

SEQ ID NO: 4374 - protein, 481 aa, Caulobacter crescentus
MAERMLKFTTVARKTPEKRAAAERSGDFHEIYADFIDAKATEQASRCSQCGVPFCQTHCPLHNNIPDWLRMTAEGRLEEAYALSQATNSMPEVCGRICPQDRLCEGNCVIEQSGHGTVTIGSVERYLTDKAWEMGWVKPLAAGPARGQSVGIVGAGPAGLAAAEKLREAGYDVTVYDRHDRAGGLLIYGIPGFKLEKDVVERRTQRLADGGVVFKLGFEVGKDATLEDLRAQHDAVLIAVGVYAARDLTVPGGGSKGVVPALDYLITSNRLSLGDSVPAYDSGELNAEGKDVVVVGGGDTAMDCVRTAIRQGAKSVTCLYRRDKANMPGSMREVANAEEEGVTFEWLAAPRALSGEAEAVTGVRAIRMRLGAPDASGRQSPEEIPGGDFDRPAQLVVKALGFEPENLPEQWSAPDLKVTRWGTVKADVRNQMTNLDGVFAAGDIVRGASLVVWAIKDGRDAADAIHRYLLAKASSTLIAAE

SEQ ID NO: 4375 - DNA, 1425 bp, Pyrococcus abyssi
  CDS (1)..(1425)
atgcccaagcttattaaggagcgtgttcctactcctgagaggtctgttgaggaaaggattagagattttaatgaggttaatcttggctatacttgggagttggctcttagggaggccgagcgttgtttacaatgtccaaaggagtacgccccgtgtattaaaggctgcccagtaaacatagacattcctgggtttattagggctttaagggagaatagagatgacccagacaaagcagtaagagaagctttaaaaataatatgggactcaaactccctcccggcaattactggtagggtttgtcctcaagaagaccaatgtgagggtgtttgcgttgtggggaaagtcggtgacccagtaaacataggaaaactcgaaagattcgtagcggattatgcaagacaacatggaatcgaagatgaactacttgaagagcaaatcaggggtattaagaggaatgggaagagggttgctgttattggtgctgggcccgctggtttaacttgtgccgccgaattggcgaagatgggttacgaagtgacaatcttcgaagccctccatgaaccaggaggagtcctagcctacggaatcccagaatttaggcttccaaaagagatagtgaagaaagaagttgagaagttgaagaggctaggggttaaaatagaaaccaacgttctcgtaggaaagacggtgacctttgaggaactaagagaggagttcgacgctatattcataggaaccggagccggaactcctaggatatatccatggccaggagttaacttaaacggtatttattcggctaatgagtttctaactagaataaacctgatgaaagcttacaagttcccagagtatgacacacccataaagattgggaagagagtggctgtaataggtgcaggaaacactgcaatggatgccgcaaggtcagccctaaggttaggagcggaggtttggatcctatatagaagaacaaggaaagagatgacagctagggaggaagaaatcaaacatgctgaggaagaaggagtcaaattcatgttcctagtttcaccaaagagattcatcggagatgaaaacggaaaccttaaggcgatagagctagaaaagatgaaacttggagagccggatgagactggaaggagaagaccgataccaactggagagacgtttgtcatggagttcgatacagcgataatagcgatagggcagactccgaacaagacattcctccagacggttccagagttgaaagtggacgagaagggaaggataatagttgatgagaatttgatgacttctattcctggggtttttgctggtggtgacgctattaggggtgaagctaccgtaatcttggcaatgggagacggaagaaaagcagcaaaagcaatacacaagtacctttcctcttcctcttaa

SEQ ID NO: 4376 - protein, 474 aa, Pyrococcus abyssi
MPKLIKERVPTPERSVEERIRDFNEVNLGYTWELALREAERCLQCPKEYAPCIKGCPVNIDIPGFIRALRENRDDPDKAVREALKIIWDSNSLPAITGRVCPQEDQCEGVCVVGKVGDPVNIGKLERFVADYARQHGIEDELLEEQIRGIKRNGKRVAVIGAGPAGLTCAAELAKMGYEVTIFEALHEPGGVLAYGIPEFRLPKEIVKKEVEKLKRLGVKIETNVLVGKTVTFEELREEFDAIFIGTGAGTPRIYPWPGVNLNGIYSANEFLTRINLMKAYKFPEYDTPIKIGKRVAVIGAGNTAMDAARSALRLGAEVWILYRRTRKEMTAREEEIKHAEEEGVKFMFLVSPKRFIGDENGNLKAIELEKMKLGEPDETGRRRPIPTGETFVMEFDTAIIAIGQTPNKTFLQTVPELKVDEKGRIIVDENLMTSIPGVFAGGDAIRGEATVILAMGDGRKAAKAIHKYLSSSS

SEQ ID NO: 4377 - DNA, 1440 bp, Lactococcus lactis subsp. lactis
  CDS (1)..(1440)
atggctgatccaaatggatttttaaattatccaagaaatgataatccttaccgtgaattagcggagcggataaaggattttgctgaactgcaagttcccttatctactgaagaacgacaaaaacaagcggcacgttgtatgcattgtgatgttcctttttgccatcaagggatattttatgggggcaaacgggctgtctcaggttgtccaaatgataatcatattccagagtggaatgatttgatttatcgaggactacaaagaaaagcctatgaacgtttgattttaaccaatccttttccagagtttactggcagagtctgtcctgctccttgtgaaaaatcttgtgccgaggccttaaacggtgcaggagtaaccattaaagataatgaacgtttcttgggtgatttaggaaatgatgaaggttgggtggctgaaattggcaaagctgcggagccgacaggttataaaatagcgattattgggtctggacctgccggtctgtcagctgcttggcgtcttaatcaattgggacatagcgttactgtttttgaaaaatcagatcgtttgggcggcttattgatgtacggcattccaaatatgaaattggataaaaaagtcgttcaaaaacgaattgatttaatgacagaacttggtgtgacttttgtcaccaatactgagattggaaagacaatcagttacgaagacctgtcagtaaattttgatagaattattttggcgattggcgcaggaattccacgtgatttaaatatttcaggccgtgaagcagttggaattcgatttgccattgattttctgacagaaacgactaaaactgtccttgaagagggcgaagataatattagtcaatcattaaaaggaaaaaaagtagtagtcattggtggtggagatacagggaacgattgtatcggaacggcagttcgtttaggagcagcttcggtttctcaattagaaatcacaccaagtttacccactgatcgtttagataacaacccttggcctgagtggccaatgaccttgagagcaggttatgggcaaaaagaagcagaatttgtgggaaatactgatttgataacctatcaaatgactgcaacagcttttcaaacaaatgctgaaggtcaacttacgggtttaaaagtagccaaagttggacctgacttcaaggcattagaagggactgaacaagtaattgaagcggatttagtcttacttgctatgggatttgttgggactgacacaggattactggataaatttggtattcaagaaatttatgatgactatcgaacaaataatgacaaagttctagttgcaggcgatgccagacgaggtccatctttggttatttgggcaatccgtgaaggaagaaaaacagccgaaattgttgatgaacaattaataaaagtcgctacagcataa

SEQ ID NO: 4378 - protein, 479 aa, Lactococcus lactis subsp. lactis
MADPNGFLNYPRNDNPYRELAERIKDFAELQVPLSTEERQKQAARCMHCDVPFCHQGIFYGGKRAVSGCPNDNHIPEWNDLIYRGLQRKAYERLILTNPFPEFTGRVCPAPCEKSCAEALNGAGVTIKDNERFLGDLGNDEGWVAEIGKAAEPTGYKIAIIGSGPAGLSAAWRLNQLGHSVTVFEKSDRLGGLLMYGIPNMKLDKKVVQKRIDLMTELGVTFVTNTEIGKTISYEDLSVNFDRIILAIGAGIPRDLNISGREAVGIRFAIDFLTETTKTVLEEGEDNISQSLKGKKVVVIGGGDTGNDCIGTAVRLGAASVSQLEITPSLPTDRLDNNPWPEWPMTLRAGYGQKEAEFVGNTDLITYQMTATAFQTNAEGQLTGLKVAKVGPDFKALEGTEQVIEADLVLLAMGFVGTDTGLLDKFGIQEIYDDYRTNNDKVLVAGDARRGPSLVIWAIREGRKTAEIVDEQLIKVATA

SEQ ID NO: 4379 - DNA, 1440 bp, Clostridium acetobutylicum
  CDS (1)..(1440)
atgggaaaggtaactggatttaaagaatacgatagagaagagtcgccatctcgtccaatcgatgagagaataaaggactacaaagatgttcatatgggacttgacaaggaaaagctgaaaattcaaggtgcaagatgtatggaatgtggtactccattttgttcatggggctgccctcttggaaatttaatgcctgactttaatgacatggtatataaaggtgagtggaaaaaggcttatgaaaggatatctttgacaagctgtttccctgaattcacaggacgtatttgtccagctttatgtgaaggttcgtgtacattaagttacaattctgatgctgtttcaataaaagaaattgaacttggaattatagaggaagcctttaaaaatggatgggtaaagcctaagattccaaaggttagaacaggcaaaagaattgcagtaataggatcaggcccagcaggactttcggcagcagaagaacttaattctgttggacacagcgtggtggtatttgaaagagctgataaggtaggaggacttttaagatacggcattcctgattttaaacttgaaaagcatgtaatagatagaagaattgacgttatggaaaagtctggaatagagtttaaaacctctactaatgtaggttttgatgtgagtgcagaagaattacttaatgattttgatgtagttcttcttacaggaggctctaccatacctagagatttaaaagttgaaggaagagagaatattaaaggggtgcattttgctgttgattacttaaaacagcagaatatgagaaatgctggaatggaaattaaagaagaggaaataactgcaaaggataaagttgttgtggtaattggaggaggagatactggttcagactgtattggtactgcaataaggcagggtgctaaaaaggtatatcagtacgagataatggataaacctccagctcaaagggatgaaactatgccttggcctttatttcctagagtgtttaaaaccactacatctcatgaagagggctgtgaaagattattcggtgtttcaactaaaaagctagaaggaaaagacggtaagcttgaactccttaaaggtgtacaagttaagtgggaaaaagatgaaaatggaaaaatgtccatgaaagagatagagggctcagagtttgaaaagaaggtggatttgatacttattgctatgggatttgtacatcctcagcataagggtatagttgaagatttacagctgaaattagattctagaggaaatgtttttactgatgaaaactttatgacaagccgagaaaatgtttttgcagcaggggatatgagaagaggtcaatcacttgtagtatgggctatgcatgagggaagacaatcagcaaaagaaatagataaataccttatgggagaaacttctcttagaggatag

SEQ ID NO: 4380 - protein, 479 aa, Clostridium acetobutylicum
MGKVTGFKEYDREESPSRPIDERIKDYKDVHMGLDKEKLKIQGARCMECGTPFCSWGCPLGNLMPDFNDMVYKGEWKKAYERISLTSCFPEFTGRICPALCEGSCTLSYNSDAVSIKEIELGIIEEAFKNGWVKPKIPKVRTGKRIAVIGSGPAGLSAAEELNSVGHSVVVFERADKVGGLLRYGIPDFKLEKHVIDRRIDVMEKSGIEFKTSTNVGFDVSAEELLNDFDVVLLTGGSTIPRDLKVEGRENIKGVHFAVDYLKQQNMRNAGMEIKEEEITAKDKVVVVIGGGDTGSDCIGTAIRQGAKKVYQYEIMDKPPAQRDETMPWPLFPRVFKTTTSHEEGCERLFGVSTKKLEGKDGKLELLKGVQVKWEKDENGKMSMKEIEGSEFEKKVDLILIAMGFVHPQHKGIVEDLQLKLDSRGNVFTDENFMTSRENVFAAGDMRRGQSLVVWAMHEGRQSAKEIDKYLMGETSLRG

SEQ ID NO: 4381 - DNA, 3099 bp, Escherichia coli
  CDS (1)..(3099)
atgggggatattatgcgtcccattccgtttgaggaacttttgacgcgcatatttgatgaataccaacaacaacgctcaatctttggtattcccgagcaacagttttactcacctgtaaaaggtaaaactgttagcgtcttcggtgaaacctgtgccactcccgtcggccctgccgctggcccgcacacgcagctcgcgcaaaatattgtcacttcctggctgactggcggacgcttcatcgaactaaaaaccgtccaaattcttgaccgcctggagctggaaaagccctgtatcgatgccgaagacgagtgctttaacaccgaatggtctaccgagtttaccctgcttaaagcctgggatgaatacctcaaagcctggtttgccctgcaccttctcgaagcgatgttccagccttctgattccggtaaatcgttcatctttaatatgagcgtcggttacaacctcgaaggtattaagcaaccgccgatgcaacagttcatcgacaatatgatggacgcatctgaccatccgaaattcgctcaatatcgcgatacgctgaataaattactccaggatgacgcatttttagctcgccacggattgcaggaaaaacgcgaaagcttgcaagccttacccgctcgcatccccaccagtatggtgcatggcgtcaccctctccaccatgcacggctgtcctccgcatgaaatcgaagccatttgccgctacatgctggaagaaaaagggctcaacacctttgtgaaacttaacccgaccttactggggtacgcgcgtgttcgtgagatcctcgatgtctgcggtttcggttacataggcttaaaagaagagtcatttgatcacgacctcaagctgacgcaagcactggaaatgctggaacgcctgatggcactggcaaaagaaaaatcactcggctttggcgtaaaactgactaacactctcggcaccatcaacaataaaggcgcactgcctggtgaagagatgtatatgtcaggccgtgcgctgttcccgctctccatcaatgttgcagcagttctctctcgcgcctttgacggcaaactgcccatttcttattccggtggtgccagtcagctgactatccgcgatatttttgatacaggtattcgccctattactatggcaaccgacctgctgaaacctggcggctatctgcgcttaagtgcctgcatgcgcgagctggaaggctccgacgcctggggacttgaccatgttgacgtcgaacgactgaacagactggcagcagatgcgttaaccatggaatacacccagaaacactggaagccagaagagcgtattgaagtggcagaagacctgccgctgaccgactgctacgttgccccctgtgttactgcctgcgctatcaagcaagatattccggaatacatccgtctgcttggcgaacaccgctatgccgacgcgctggaactcatctaccaacgcaacgctctgcccgccattaccggtcatatttgcgatcaccagtgccaatacaactgtacccgcctggattacgacagtgcgctgaatatccgcgaactgaaaaaagtcgcgctggaaaaaggttgggatgaatataagcaacgctggcacaaaccagccggttctggttcacgccatccggttgccgtgattggtgcaggtccggcgggtctggcagcaggttacttccttgccagagcgggccatccggttacgctgtttgaacgcgaagccaatgcgggcggcgtggtgaaaaatatcattcctcagttccgtattcctgcagagttaattcagcacgatatcgattttgttgccgctcacggcgtgaaatttgagtatggctgctcacccgatttaaccattgagcagttaaaaaatcagggcttccactatgttctgattgccaccggcactgataaaaatagcggtgtgaaactggcgggcgacaaccaaaatgtctggaaatcactccccttcctgcgtgaatacaacaagggtacagcgctcaagctgggcaaacatgtggtcgttgtcggggcgggtaacaccgcaatggactgcgctcgtgcggcgttacgcgttccaggcgtagaaaaagcaacgatcgtttaccgtcgttcactacaagagatgcccgcatggcgcgaagagtatgaagaagcgttgcacgacggcgtagagttccgtttcctgaataatccggaacgtttcgatgctgatggcaccttaaccttgcgcgttatgtcgcttggcgaaccggatgagaaaggtcgtcgtcgtccggttgaaaccaatgaaacagtaacactgcttgtagacagcctgatcaccgccattggtgaacagcaggatactgaagccctgaatgcgatgggcgtgccgctggacaaaaacggctggccagacgtcgaccataatggcgaaactcgtctgactgacgtctttatgatcggcgacgtacagcgcggaccatcctccattgtcgctgctgtcggaaccgcgcgtcgggcgaccgatgccatccttagtcgggaaaatatccgttcccaccagaacgataaatactggaacaacgtcaatccagcggaaatctatcaacgtaaaggcgatatctctatcacgctggtgaacagtgacgatcgtgacgcgtttgtcgcccaggaagccgctcgctgcctcgaatgtaactacgtttgcagcaagtgtgtggatgtctgcccgaaccgcgccaacgtctccattgcggtcccaggcttccagaaccgtttccagacgctgcacctcgacgcttactgtaacgaatgcggcaactgcgctcagttctgtccgtggaacggtaaaccgtacaaagacaaaatcaccgtcttcagcctggcgcaagactttgataacagcagcaacccaggcttccttgtggaagattgccgggtacgagtacgtctgaataaccaaagctgggtgttaaacatcgacagcaaaggtcagtttaacaacgtaccaccggagctgaacgatatgtgccgcatcatcagccatgtccaccagcatcatcattatctgctgggccgcgtggaggtgtaa

SEQ ID NO: 4382 - protein, 1032 aa, Escherichia coli
MGDIMRPIPFEELLTRIFDEYQQQRSIFGIPEQQFYSPVKGKTVSVFGETCATPVGPAAGPHTQLAQNIVTSWLTGGRFIELKTVQILDRLELEKPCIDAEDECFNTEWSTEFTLLKAWDEYLKAWFALHLLEAMFQPSDSGKSFIFNMSVGYNLEGIKQPPMQQFIDNMMDASDHPKFAQYRDTLNKLLQDDAFLARHGLQEKRESLQALPARIPTSMVHGVTLSTMHGCPPHEIEAICRYMLEEKGLNTFVKLNPTLLGYARVREILDVCGFGYIGLKEESFDHDLKLTQALEMLERLMALAKEKSLGFGVKLTNTLGTINNKGALPGEEMYMSGRALFPLSINVAAVLSRAFDGKLPISYSGGASQLTIRDIFDTGIRPITMATDLLKPGGYLRLSACMRELEGSDAWGLDHVDVERLNRLAADALTMEYTQKHWKPEERIEVAEDLPLTDCYVAPCVTACAIKQDIPEYIRLLGEHRYADALELIYQRNALPAITGHICDHQCQYNCTRLDYDSALNIRELKKVALEKGWDEYKQRWHKPAGSGSRHPVAVIGAGPAGLAAGYFLARAGHPVTLFEREANAGGVVKNIIPQFRIPAELIQHDIDFVAAHGVKFEYGCSPDLTIEQLKNQGFHYVLIATGTDKNSGVKLAGDNQNVWKSLPFLREYNKGTALKLGKHVVVVGAGNTAMDCARAALRVPGVEKATIVYRRSLQEMPAWREEYEEALHDGVEFRFLNNPERFDADGTLTLRVMSLGEPDEKGRRRPVETNETVTLLVDSLITAIGEQQDTEALNAMGVPLDKNGWPDVDHNGETRLTDVFMIGDVQRGPSSIVAAVGTARRATDAILSRENIRSHQNDKYWNNVNPAEIYQRKGDISITLVNSDDRDAFVAQEAARCLECNYVCSKCVDVCPNRANVSIAVPGFQNRFQTLHLDAYCNECGNCAQFCPWNGKPYKDKITVFSLAQDFDNSSNPGFLVEDCRVRVRLNNQSWVLNIDSKGQFNNVPPELNDMCRIISHVHQHHHYLLGRVEV

SEQ ID NO: 4383 - DNA, 1470 bp, Vibrio cholerae
  CDS (1)..(1470)
atgggtaaagcaaccggatttttagaatttggtcgtgaactgccgaaaaaaatcgacccggcagagcgcatcaaaaacaacaaagagtttgtccttaaccaagagtttggtaagaagatcaatcagcaagcttcacgttgtatggattgtggcgtgccgttttgtcataacggctgcccgattggcaacatcattcccgagtttaacgatgcagtgtatcgcgacagttgggaagaggcttggaatattctgagctcgaccaacaacttcccagagtttaccggtcgtgtctgccctgcaccttgtgaaaccgcctgtgtgcttggcatcaaccaagatccgatcaccatctgtaacattgaaaaaaccattgtggaacgtgcttaccaagaaggctatgccaagccgaaaacgccacgttcacgcaccggaaaaacggtcgcgatcattggctcaggccctgcggggctggccgcggcggagcagttgaatgccgcgggtcatagcgtcaccgtgtttgagcgggatgaaaaagtcggcggcttgctgcgctttggcattcccgatttcaaactcggtatggatgtgattgatcgcaaaatcaatctgatggaacaagcgggcgttaagttcgtggtcaatgcgcatatcggtgtagacatcaacgctcaacagttgcgtcaggagtttgatgcggtattgctgacgggcggctcaaccgtaccacgtgatctgagcattcccggacgtgatctgaaaggcgtttacttcgcgatgcagttcctcgcgcaaaataaccgccgagccaatggcatggatctgaaaggtgaagagatccacgctaaaggcaaacatgtggtagtgatcggaggcggcgatactggctccgactgtgtcggcacctctaaccgccacggcgctgcgagtatcactcaagtggagatcatgccgatcccaccgcaaaagcgcccagtgaatatgccttggccgcaatatccgatgattctgcgcacctctacctctcatgaagaaggctgtgagcgtcattggaacatcctcaccaaagagttcattggtaatgaacaaggtgaagtgacgggtctacgcatcgctgacatcgtttggaaagatgcagcccccggtgagcgaccaagctttgacgaagtggtgggcagtgaacgcgtcattccttgtgatatggcatttctggcgatgggcttcttgcatccagagccacacggcgtgcttgctcagttggggattaagcttgatgagcgcggcaatgtggcgacgcaagattttgcgaccaaccaaaaaggcgtattcgccgcaggtgatatgcgcacaggccaatccttggtggtgcgctgtatcaacgaaggtcgcgaatgtgcgcgagccgttgacaccttcttgatgggcaatacccatcttgaggcaaaagcggactcactcatgctgtcagcataa

SEQ ID NO: 4384 - protein, 489 aa, Vibrio cholerae
MGKATGFLEFGRELPKKIDPAERIKNNKEFVLNQEFGKKINQQASRCMDCGVPFCHNGCPIGNIIPEFNDAVYRDSWEEAWNILSSTNNFPEFTGRVCPAPCETACVLGINQDPITICNIEKTIVERAYQEGYAKPKTPRSRTGKTVAIIGSGPAGLAAAEQLNAAGHSVTVFERDEKVGGLLRFGIPDFKLGMDVIDRKINLMEQAGVKFVVNAHIGVDINAQQLRQEFDAVLLTGGSTVPRDLSIPGRDLKGVYFAMQFLAQNNRRANGMDLKGEEIHAKGKHVVVIGGGDTGSDCVGTSNRHGAASITQVEIMPIPPQKRPVNMPWPQYPMILRTSTSHEEGCERHWNILTKEFIGNEQGEVTGLRIADIVWKDAAPGERPSFDEVVGSERVIPCDMAFLAMGFLHPEPHGVLAQLGIKLDERGNVATQDFATNQKGVFAAGDMRTGQSLVVRCINEGRECARAVDTFLMGNTHLEAKADSLMLSA

SEQ ID NO: 4385 - DNA, 1467 bp, Mycobacterium leprae
  CDS (1)..(1467)
atggctgatccggctggctttttgaaatacacacagcgagaattaccgaggcgacggcctgtcccgctacggctgcgtgactggaaggaattatacgaggaattcgataaagagactttgcggaatcaggcgtcccgttgcatggactgcggtattcctttctgtcacaatgggtgtcctttgggaaatttgatcccggaatggaatgacttggtgcgtcgcggccgttggcacgatgcggttgaacgtctgcacgccacaaacaattttcccgatgtcactggccggctatgtccggcgccatgcgagtcggcgtgtgtgctcggcattaaccaggatccggtgacgatcaagcagatcgagctagagatcatcgacaaggccttcgacgaaggttgggtgcaaccactgccgccgcagcagttgaccggtaagacggttgccgtggtgggttcggggccagctggacttgctgctgcccaacaactcacccgtgcgggtcatcgcgtgacggtcttcgaacgcgacgatcgcatcggcgggttgctgcggtatggcatcccggaattcaagatggaaaagcgcttcctggagcggaggctagaccagttgcgggctgaaggcaccgaattccggtctggcgtcaacgtcggagttgacatcactgccgatcagctgtgcgctgattttgatgcggtcgtgctggccggcggcgcggccacttggcgcgaactgcccattccgggacgtgagttagatggcgttcaccaggcgatggagttcctgccctgggtcaaccgtgtccaggagggagatgacgtcctcggagacgacgggcagccgcctatcactgctaaggacaaaaaggtggtcatcatcggtggtggcgacaccggggcagactgcttgggcgcggtgcaccggcaaggtgcgatccacgtgcaccagctcgagataatgccgcgtccgccggatgcccgcgctgcatccacgccgtggccaacttacccactgatgtatcgggtatcgccggcccacgaagaaggtggcgagcgggtgttctcagttaacaccgaggagttcgtcggcaagaacgggcgggtgcacgcgctcaaggctcatgaagtgacgatgcaagacggccggtttgtcaaggttgagaactccgttttcgagctcgaggccgatctagtgttgctggcgatgggattcgttggtccggaaaagccgggcctgctcaccgacctgggtgtgaagttcaccgaccgcggcaacgtcgcacgtggcgccgactttgatacttcggttcctggtgttttcgttgcgggcgacatgggacgtggccagtcgttgatcgtttgggcgattgctgagggtcgggctgccgcggcggctgtggatcgatttttgatgggcgcaaccgcgttgccggcacccgtcaagccgtcgtctttaccacttcagtag

SEQ ID NO: 4386 - protein, 488 aa, Mycobacterium leprae
MADPAGFLKYTQRELPRRRPVPLRLRDWKELYEEFDKETLRNQASRCMDCGIPFCHNGCPLGNLIPEWNDLVRRGRWHDAVERLHATNNFPDVTGRLCPAPCESACVLGINQDPVTIKQIELEIIDKAFDEGWVQPLPPQQLTGKTVAVVGSGPAGLAAAQQLTRAGHRVTVFERDDRIGGLLRYGIPEFKMEKRFLERRLDQLRAEGTEFRSGVNVGVDITADQLCADFDAVVLAGGAATWRELPIPGRELDGVHQAMEFLPWVNRVQEGDDVLGDDGQPPITAKDKKVVIIGGGDTGADCLGAVHRQGAIHVHQLEIMPRPPDARAASTPWPTYPLMYRVSPAHEEGGERVFSVNTEEFVGKNGRVHALKAHEVTMQDGRFVKVENSVFELEADLVLLAMGFVGPEKPGLLTDLGVKFTDRGNVARGADFDTSVPGVFVAGDMGRGQSLIVWAIAEGRAAAAAVDRFLMGATALPAPVKPSSLPLQ

SEQ ID NO: 4387 - DNA, 1935 bp, Escherichia coli
  CDS (1)..(1935)
atgaaagggatgcaaatgaataagtttattgctgctgaagctgcggaatgtataggctgtcatgcttgtgaaattgcctgtgcggtggcacacaatcaagaaaactggccgctgagtcacagtgactttcgaccgcgtatccacgttgtagggaaaggccaggctgcgaatccggtggcctgccatcactgcaacaatgccccttgcgttacggcttgtccggttaatgctctgactttccagtccgatagcgtacaactggacgagcaaaaatgtattggttgtaaaagatgcgcaatcgcttgcccctttggcgtcgttgagatggtcgatacgattgcgcagaaatgcgacctttgtaaccagcgcagttccggcacgcaagcctgtattgaagtttgcccaacacaggcgttacgactgatggacgataaagggttgcagcagataaaggtggcccgccagcgcaaaacggcagcaggaaaagcgtcatcagacgctcagccatctcgcagtgcagcgttgctccccgttaactcgcgtaaaggcgcagataaaatttcagcgagtgaacggaaaacccactttggcgaaatatattgcgggctggatccacaacaagcgacttatgagagtgaccgctgtgtttattgtgccgaaaaagctaactgcaactggcattgcccgctgcataacgctattccggattacatccgtctggtacaggaaggaaagattattgaagcggcagaactttgccaccagaccagttccttaccagaaatttgcggcagggtatgtccacaggaccgtctttgtgaaggcgcatgtactttgaaagatcactcgggcgcagtctctatcggtaatctggaacgctacatcaccgataccgcgctggcgatgggctggcgtcccgatgtcagcaaagttgttccccgtagcgaaaaagtggcggtgattggcgctgggcctgcagggttagggtgtgctgatattctggcgcgcgcaggagttcaggtcgatgtctttgatcgccatccagaaattggcggtatgctgacttttggcattcctcctttcaaactcgataaaacggtattaagccagcggcgagagatattcaccgcaatgggaatcgactttcatcttaactgtgaaattggccgcgatattacctttagcgatttaacttctgaatatgatgcagttttcatcggcgtggggacttacgggatgatgcgagcagatctgccgcatgaagatgcgcccggtgtcattcaggctctaccgttcctgactgcccatacccgccagctcatgggattgccggagtctgaagagtatccgctgacggacgtggaaggtaagcgagtcgtggtattgggcggtggcgatacgacaatggattgtttgcggacttccatccgcctcaatgccgccagcgtgacctgcgcgtatcgtcgtgatgaagtcagtatgccgggctcgcgcaaagaggtggttaatgcgcgcgaggaaggtgtcgagtttcagttcaatgttcaaccgcaatatatcgcttgtgacgaagatgggcgtttaactgcggtgggcctgattcgtaccgccatgggtgagccggggccggatggtcgccgtcgtcctcgtccggtagcgggttcagagtttgaattgcccgccgatgttctgattatggcctttggtttccaggcgcatgccatgccgtggttgcagggcagcggaattaaactcgataaatggggcctgattcaaaccggtgacgtcgggtatttacctacccagacgcatctgaaaaaagtctttgctggtggtgatgcagttcatggcgcggatctggttgtcactgcaatggccgcaggaaggcaggcggcgcgcgatatgttaactctgtttgatacgaaggcatcgtga

SEQ ID NO: 4388 - protein, 644 aa, Escherichia coli
MKGMQMNKFIAAEAAECIGCHACEIACAVAHNQENWPLSHSDFRPRIHVVGKGQAANPVACHHCNNAPCVTACPVNALTFQSDSVQLDEQKCIGCKRCAIACPFGVVEMVDTIAQKCDLCNQRSSGTQACIEVCPTQALRLMDDKGLQQIKVARQRKTAAGKASSDAQPSRSAALLPVNSRKGADKISASERKTHFGEIYCGLDPQQATYESDRCVYCAEKANCNWHCPLHNAIPDYIRLVQEGKIIEAAELCHQTSSLPEICGRVCPQDRLCEGACTLKDHSGAVSIGNLERYITDTALAMGWRPDVSKVVPRSEKVAVIGAGPAGLGCADILARAGVQVDVFDRHPEIGGMLTFGIPPFKLDKTVLSQRREIFTAMGIDFHLNCEIGRDITFSDLTSEYDAVFIGVGTYGMMRADLPHEDAPGVIQALPFLTAHTRQLMGLPESEEYPLTDVEGKRVVVLGGGDTTMDCLRTSIRLNAASVTCAYRRDEVSMPGSRKEVVNAREEGVEFQFNVQPQYIACDEDGRLTAVGLIRTAMGEPGPDGRRRPRPVAGSEFELPADVLIMAFGFQAHAMPWLQGSGIKLDKWGLIQTGDVGYLPTQTHLKKVFAGGDAVHGADLVVTAMAAGRQAARDMLTLFDTKAS

SEQ ID NO: 4389 - DNA, 1857 bp, Thermotoga maritima
  CDS (1)..(1857)
atgagaaaaatggcagtccagaagctaccagaaaaggatttctttgctcctctgaaggcatggaaatttcttgtcagaaaaccggttacaatagaggttccaaacaaaatcaggagagaagcttcggaaagatacagaggattccacgtgaacgactggggaaagtgcatagggtgcggtacatgcgcaaagatctgcccaaccgatgccataaccatggtggaggtcccggatctcactcaagaagatggaaaacttccgcaaagacccgtcatagattacggcaggtgttctttctgtgcgctctgcgttgacatctgcacaacgggttcactcaagatgacgagggaatacatccacatctcggaagatccggaagacttcatctttatgccaacggataagggattgaacgcgaaaaaaggtctctacgaatttggaaaggcacccctcggctgggtgagggatgagaactctgagctgctcgatctcgaaagaatagaaatgcccgtggaaccaccggaagtcaggatcaaatctttcatagaaatcgtgaaaggatacagtagagaacaggccatgcaggaggccgccaggtgtgtggagtgcggtgtgtgtacctacacctgtcccgaacacatggacataccccagtacataaaatccgtgtacgaggacaatctggaagaaggactgagatggctctacagaacgaatcctctctcaatggtctgtggaagggtctgtactcacaggtgtgaaaccgcctgttctgtgggagtcagaggagaacccgttgcgattcagtggttgaaaaggtacatagtggacagcattcctctcgagagatacggagagatcctggacataaaaccggagagaaaaggaaagagtgtgggaatcataggatcgggtcccgctgggctcgccgcagcctactttcttgccaccatgggatacgatgttaccatatacgaatcggaatcaaaacctggtggtgtgatgaggtacggtattccaaaataccgacttcccgatgaagcgctggacaaggatatcgcattcatcgaggcgctcggggtgaaaattctactcaacacgagagtcgtccaggatgtgtctttcgaagatgtcagaaagagacacgatgttgtctttcttgcaacaggcttcggtcttggaaggtcaacgggtgttccggggaccgatcacccagatgtgaaacaggcactccccttgctcaagatgataagggactacctgaggggagatggtccaaagccaccggtcccagagagactcgttgtcatcggtggaggaaacgtcgcgatggatatctccaggtcgatggcaagacttcagttcatggagtacggaagggtgaacgttcaggtgctttcacttgaaggatgcttcgaggacatgccggctgatatggaagaaatagaagaggctctcgaagagggtatcgtcataaatccaggatggggaccgatggaagtcgtgatagagaacgacaggataaaaggtgtgaaattcaaaaaatgtgtcagtgtgttcgacggcgaaggacggttcaatccacagtttgacgaaaaagaacaaatctttgtagaagcggacatggtcgtagaagcgattggacaggcaccagattattcctacttacccgaagaaatacgaagcaaactcgaatttttcagaggaagaatcaaaacaaacgagtacaatcagacctctgtggaatggttgtttgcaggaggagacatcgttcacggaccggatatcattcacggtattgcagatggatacgccgcggcaaaagggatagacatgtacctgagaaaggaaaaatga

SEQ ID NO: 4390 - protein, 618 aa, Thermotoga maritima
MRKMAVQKLPEKDFFAPLKAWKFLVRKPVTIEVPNKIRREASERYRGFHVNDWGKCIGCGTCAKICPTDAITMVEVPDLTQEDGKLPQRPVIDYGRCSFCALCVDICTTGSLKMTREYIHISEDPEDFIFMPTDKGLNAKKGLYEFGKAPLGWVRDENSELLDLERIEMPVEPPEVRIKSFIEIVKGYSREQAMQEAARCVECGVCTYTCPEHMDIPQYIKSVYEDNLEEGLRWLYRTNPLSMVCGRVCTHRCETACSVGVRGEPVAIQWLKRYIVDSIPLERYGEILDIKPERKGKSVGIIGSGPAGLAAAYFLATMGYDVTIYESESKPGGVMRYGIPKYRLPDEALDKDIAFIEALGVKILLNTRVVQDVSFEDVRKRHDVVFLATGFGLGRSTGVPGTDHPDVKQALPLLKMIRDYLRGDGPKPPVPERLVVIGGGNVAMDISRSMARLQFMEYGRVNVQVLSLEGCFEDMPADMEEIEEALEEGIVINPGWGPMEVVIENDRIKGVKFKKCVSVFDGEGRFNPQFDEKEQIFVEADMVVEAIGQAPDYSYLPEEIRSKLEFFRGRIKTNEYNQTSVEWLFAGGDIVHGPDIIHGIADGYAAAKGIDMYLRKEK

SEQ ID NO: 4391 - DNA, 1416 bp, Vibrio cholerae
  CDS (1)..(1416)
atgatgagccaaaacgtttaccaatttatcgatgtcaatcgtgtggatccggccaaaaaaccgctgcacatccgcaaaattgagtttgtcgaaatttacgagccctttactaagcaacaagccactgcgcaggccgatcgctgcctcgattgtggtaacccttactgtgaatggaagtgcccagtacacaactacattccgcagtggttaaagctcgccaatgaaggacgcatcctcgaagcggccgatttggcgcaccagaccaacagcctgcctgaagtgtgtggccgagtttgcccgcaagataggctgtgcgaaggttcatgtaccttgaatgcggatttcggtgccgtcaccattggcaacatcgaaaaatacattacggataccgccttcgaaatgggctggaaacccgacatgtccaacgtggtctggaccgacaaaaaagtcgcgatcatcggcgcgggcccagctggtcttgccgccgcggacattctggttcgcaacggtgtacgacctgtcgtgtttgatcgctatcccgaaatcggcggtctgctcacctttggcattccctcattcaaacttgaaaaaggggtgatggaaaatcgtcgccgcatttttagcgagatgggtatcgagtttcgtctcaatgtcgaagtcggccaagacatcacactgcaacaactgctggatgagtacgatgcggtttttctcggcgtcggcacttatcaatatatgcgtgctggcttagccaacgaagacgcccccggcgtttatgatgcactgccgtttttgatctccaacacctataaagtgatggaacttaacaacgaggcgccattcattgatatggcaggaaaaaatgtcgtagtgctcggcggtggtgatacggcgatggactgcgtgcgcacctcgattcgccaaggcgcatctcgcgtgatttgtgcttatcgccgtgacgaagaaaacatgcccggctcacgccgtgaagtgaaaaacgccaaagaagaaggcgttgaatttatgtttaacttgcagccgctgggaattgaagtgaatgcccaaggccaagtgactggcgtgaaagtggtcaaaaccgcgcttggagaaccggatgcggcaggtcgtcgcaaacctgaaccggtcgcaggcagcgagcacgtcttgcctgccgatgccgtcatcatggcgtttggtttccaaccgcacaaaatggcttggttagagccgtttgatgtcgagctcgatcagtggggacgcatcaaagcccctgccaagcagacttaccagtatcaaaccaccaatcccaagatttttgctggtggtgatgcggttcgcggctcggatctggtggtcacggccattgatgaaggacgcaaagctgccgagggaattctcgactatcttggagtctag

SEQ ID NO: 4392 - protein, 471 aa, Vibrio cholerae
MMSQNVYQFIDVNRVDPAKKPLHIRKIEFVEIYEPFTKQQATAQADRCLDCGNPYCEWKCPVHNYIPQWLKLANEGRILEAADLAHQTNSLPEVCGRVCPQDRLCEGSCTLNADFGAVTIGNIEKYITDTAFEMGWKPDMSNVVWTDKKVAIIGAGPAGLAAADILVRNGVRPVVFDRYPEIGGLLTFGIPSFKLEKGVMENRRRIFSEMGIEFRLNVEVGQDITLQQLLDEYDAVFLGVGTYQYMRAGLANEDAPGVYDALPFLISNTYKVMELNNEAPFIDMAGKNVVVLGGGDTAMDCVRTSIRQGASRVICAYRRDEENMPGSRREVKNAKEEGVEFMFNLQPLGIEVNAQGQVTGVKVVKTALGEPDAAGRRKPEPVAGSEHVLPADAVIMAFGFQPHKMAWLEPFDVELDQWGRIKAPAKQTYQYQTTNPKIFAGGDAVRGSDLVVTAIDEGRKAAEGILDYLGV

SEQ ID NO: 4393 - DNA, 1434 bp, Pseudomonas aeruginosa
  CDS (1)..(1434)
atgtctgaacgtctgaattccgaccgcctgaacaacgacttccagttcatcgaagtcgggcgcaaggacccgaagaagaagctgctgcgccagcgcaagcgcgagttcgtggagatccacgacctgttcaagccgcagcaggccgccgaccaggcccaccgctgcctgggctgcggcaacccgtactgcgagtggaaatgcccggtgcacaacttcatccctaactggctgaagctggtttccgaaggcaacatcctggccgccgccgaactgtcgcaccagaccaacaccctgccggaagtctgcggccgggtctgcccgcaggatcgcctctgcgagggcgcctgcaccctcaacgacggttttggcgcggtgaccatcggctcggtggagaagtacatcaccgatacggccttcgccatgggctggcgtccggacctgtccaaggtcaagccgaccggcaggcgcgtcgcggtgatcggcgccggcccggccggcctcggctgcgccgacgtgctggtgcgcaacggcgtgaccccggtggtgttcgaccgcaacccggagatcggcggcctgctgaccttcggcattcccgagttcaagctggagaagcacgtcctcagccgtcgccgcgaggtgttcaccggcatgggcatcgagtttcgcctgaacaccgagatcggcaaggacgtgaccatggagcagttgctcgatgagtacgatgccgtgttcatggggatgggcacctacacctacatgaagggcggtttccccggcgaggacctgccgggcgtacacgacgccctggacttcctgatcgccaacgtgaaccgcaacctcggcttcgagaagtcggccgaggacttcgtcgacatgaagggcaagcgcgtggtggtcctgggcggcggcgacaccgcgatggactgcaaccgcacttcgatccgccagggcgccaagtcggtgacctgtgcctatcgccgtgacgaagaaaacatgccgggctcgcgcaaggaagtgaagaacgccaaggaagagggcgtgaagttcctcttcaaccgccagcccatcgccatcgtcggcgaggaccgggtggaaggcgtgaaggtggtcgagacccgtctcggcgagccggacgcccgcggccgccgcagccccgaaccgatccccggttccgaggagatcatcccggcggaagccgtgctgatcgccttcggcttccggccgagtccggcgccgtggttcgagcgcttcgagatcgccaccgacagccagggccgcgtggtggctccggcgcaggcgcagttcaagcaccagaccagcaacccgaagatcttcgccggtggcgacatggtccgtggttccgacctggtggtgacggcgatcttcgaaggacgtaccgcggccgaaggcatcctcgactaccttggcgtctga

SEQ ID NO: 4394 - protein, 477 aa, Pseudomonas aeruginosa
MSERLNSDRLNNDFQFIEVGRKDPKKKLLRQRKREFVEIHDLFKPQQAADQAHRCLGCGNPYCEWKCPVHNFIPNWLKLVSEGNILAAAELSHQTNTLPEVCGRVCPQDRLCEGACTLNDGFGAVTIGSVEKYITDTAFAMGWRPDLSKVKPTGRRVAVIGAGPAGLGCADVLVRNGVTPVVFDRNPEIGGLLTFGIPEFKLEKHVLSRRREVFTGMGIEFRLNTEIGKDVTMEQLLDEYDAVFMGMGTYTYMKGGFPGEDLPGVHDALDFLIANVNRNLGFEKSAEDFVDMKGKRVVVLGGGDTAMDCNRTSIRQGAKSVTCAYRRDEENMPGSRKEVKNAKEEGVKFLFNRQPIAIVGEDRVEGVKVVETRLGEPDARGRRSPEPIPGSEEIIPAEAVLIAFGFRPSPAPWFERFEIATDSQGRVVAPAQAQFKHQTSNPKIFAGGDMVRGSDLVVTAIFEGRTAAEGILDYLGV

SEQ ID NO: 4395 - DNA, 1368 bp, Pseudomonas aeruginosa
  CDS (1)..(1368)
atgatcgattccctgaaccacctcccccgtccggacgccggcgcggacacgctcgccgagcgcttcgccgacctcgcgccgccgctcaacgcccgccaggccgccctggaaagcgcccgctgcctgtactgctacgacgcgccctgcgtcaacgcctgcccgaccgagatcgacatccccgggttcatccgcagcatcgcccaggagaatgtccagggcgcggcgcagaagatcctctcggcgaacatcctcggcggcagctgcgcccgcgtctgccccacggaaatcctctgccagcgggcctgcgtacgcaacaacgcccaggaatgcgcaccggtgctgatcggccagttgcaacgctacgccctcgaccacgccggcttcgacgaacatccgttcaagcgctcgccggccaccggcaagcgcatcgccgtggtcggcgccgggccggccgggctgtcctgcgcccaccgcctggccatgcacggccacgacgtggtgctcttcgaggcccgcaccaaggccggcggcctcaacgagtacggcatcgcccgctacaagctggtggacgacttcgcccggcgcgaagtggaattcctcctgcagatcggcggtatcgaactgcgccacggccagcgtctcggcgacaacctggcgctcggcgccctgcacgacgagtacgacgcggtgttcctcggcatcggcctggccgccagcaagcgcctcggcctggaagacgaggacgcccccggcctgctcgccgccaccgactacatccgcgaactgcggcagagcgacgacctgctcgacctgcccgtcgccgaccgttgcatcgtcatcggcgccggcaacaccgccatcgacatggcggtgcagatgagccggctcggcgcccgcgacgtcaacctggtctaccgccgtggcttcgaggaaatgggcgccaccggccatgagcaggagatcgccaaggccagccaggtgcgcctgctgacctgggcccgaccggaacgggtactgctcgacgagcacggccgggtgcgcggcatgcgcttcgcccgcacgcgcctggagaacggtcgcctgggcgacaccggcgagcacttcgaactggccgccgacgccatcttcaaggccatcggccaggccttcgaaggcgccagcctgggcgatccgctggcagcgcaactgcggcgcgacggcgagcgcatccaggtcgacggacagatgcgcaccagcatccccggcatctacgccggcggcgactgcgtggcgctcggcgaggacctcaccgtgcaggcggtgcagcacggcaaactggcggcggaagcgatccacgcccaactcatgctcaacgtggaggctgcgtga

SEQ ID NO: 4396 - protein, 455 aa, Pseudomonas aeruginosa
MIDSLNHLPRPDAGADTLAERFADLAPPLNARQAALESARCLYCYDAPCVNACPTEIDIPGFIRSIAQENVQGAAQKILSANILGGSCARVCPTEILCQRACVRNNAQECAPVLIGQLQRYALDHAGFDEHPFKRSPATGKRIAVVGAGPAGLSCAHRLAMHGHDVVLFEARTKAGGLNEYGIARYKLVDDFARREVEFLLQIGGIELRHGQRLGDNLALGALHDEYDAVFLGIGLAASKRLGLEDEDAPGLLAATDYIRELRQSDDLLDLPVADRCIVIGAGNTAIDMAVQMSRLGARDVNLVYRRGFEEMGATGHEQEIAKASQVRLLTWARPERVLLDEHGRVRGMRFARTRLENGRLGDTGEHFELAADAIFKAIGQAFEGASLGDPLAAQLRRDGERIQVDGQMRTSIPGIYAGGDCVALGEDLTVQAVQHGKLAAEAIHAQLMLNVEAA

SEQ ID NO: 4397 - DNA, 1455 bp, Agrobacterium tumefaciens
  CDS (1)..(1455)
atgggcaaggttacaggttttctggagatcgaccggcaggtgggcaagtatcagcccgcatcggatcgtatccgccatttccgcgaattcaccattccgatgtcggatgccgaggtgcagaagcaggcggcgcgctgtatggattgcggaattccctactgtcacggcccgacgggctgtcccgtgcacaaccagatcccggactggaacgatctggtctataacaacaattgggaagaggcgatccgcaacctccattccaccaacaacttcccggaatttaccggccgcgtctgtccggcaccctgcgaagaagcgtgcacgctgaatctcgaggatgcgccggtcgccatcaagacggtcgagcaggctatcgcagacaaggcttatgagctgggcttcatcgtgccgaagccggcgacgatccacaccggcaagaaggtcgccatcatcggttccggcccctcgggcatggcggctgcgcagcagcttggccgcgccggtcacgaggttcacgtttatgagcgtgaatcgaaggctgggggcctgctgcgttacggcattccggacttcaagatggagaagaacttcatcgaccgccgcgtcgagcagatcaagggtgaaggcgtcaccttccattgcggcgttaatgtcggtgtggatgtgacggtcgaagcgcttctggccgatcatgatgccgttctttattgcggcggttcggaaaccccgcgcccggccggcatcggtggcgccgattttaatggcgtttatgatgccatgccttacctcgtgcagcagaaccgccgcgtcggccgcgaaaacatcgacagcgtcggctggcccgccgatccgatccttgctggcggcaagcatgtcgtggtcgtcggcggcggcgataccgcatctgactgcgtcggcacggcgttccgtcaaggtgcggtaaaggtcacccaactcgacatccgtccgatgccgccggaaaaggaagacaagcttgcggtctggcccttctgggcaaccaagatgcgtacctcgtcctcgcaggccgaaggcgcgattcgcgagttccaggtggcgacgcttgaattcgtcggcgaagacggcgtgttgacgggcgtgaaatgctgtcaggtagatgaccgccgcaagccgatcgccggcacggaattcatcatcaaggccgatctcgccttcatcgccatcggcttctccggtcccttcaccgatagcgtgctgaaggaaatggaaggcaagctgacgctcaacaccgatcgtcgcggctccacaaatgttgtcgccaacgaaacggactacaggacctcggtcgataagctgtggacggcgggcgacgttcgccgtggtcagtcgctggtggtctgggcgatccgcgaaggccggcaggcggcacgggcaatcgatgaagcgctgatgggagccaccgttctgccgcgctga

SEQ ID NO: 4398 - protein, 484 aa, Agrobacterium tumefaciens
MGKVTGFLEIDRQVGKYQPASDRIRHFREFTIPMSDAEVQKQAARCMDCGIPYCHGPTGCPVHNQIPDWNDLVYNNNWEEAIRNLHSTNNFPEFTGRVCPAPCEEACTLNLEDAPVAIKTVEQAIADKAYELGFIVPKPATIHTGKKVAIIGSGPSGMAAAQQLGRAGHEVHVYERESKAGGLLRYGIPDFKMEKNFIDRRVEQIKGEGVTFHCGVNVGVDVTVEALLADHDAVLYCGGSETPRPAGIGGADFNGVYDAMPYLVQQNRRVGRENIDSVGWPADPILAGGKHVVVVGGGDTASDCVGTAFRQGAVKVTQLDIRPMPPEKEDKLAVWPFWATKMRTSSSQAEGAIREFQVATLEFVGEDGVLTGVKCCQVDDRRKPIAGTEFIIKADLAFIAIGFSGPFTDSVLKEMEGKLTLNTDRRGSTNVVANETDYRTSVDKLWTAGDVRRGQSLVVWAIREGRQAARAIDEALMGATVLPR

SEQ ID NO: 4399 - DNA, 1482 bp, Bacillus subtilis
  CDS (1)..(1482)
atggggaaaccaactggatttatggagatcaaacgagaaaaacctgcggagcgggaccctctcactcgcttaaaggattggaaagaatattctgctcctttttcagaagaagcatcgaaacggcaaggggcgcggtgtatggattgcggtacaccgttttgccagatcggtgcggacattaacggatttacatccggctgtccgatttacaacttaattcctgaatggaatgatcttgtctaccggggcagatggaaggaagcattggaacgtctgttgaaaacaaacaactttcctgaattcacagggcgggtatgccccgctccttgtgaaggatcatgcactttagcgatttcagatccggccgtatcaattaaaaacatcgagcggaccattatcgataaaggatttgagaacggctggattcaacctagaattccaaaaaaacgaacaggcaaaaaagtggccatcgtcgggtcaggcccagccggactggcgagtgctgaccagctgaatcaagcgggacattccgtcactgtttttgaacgagcagacagagcgggcggccttttaacatacggcattccaaacatgaagcttgagaagggcattgtagaacgccgaattaaattgctgacgcaagagggaattgattttgtcacgaacacagaaatcggtgttgacattacagctgatgagctaaaggagcaatttgatgctgtgatcttatgcacaggcgctcaaaaacagcgggacctcttaatcgaaggacgcgactcaaaaggagtccattacgcaatggactacctcacacttgcaacaaaaagctatttagattctaattttaaagacaagcaattcattgatgccaaagggaaagatgtcatcgtaatcggaggcggagatacaggagctgactgtgtggctaccgctctgcgtcaaaaagccaaaagcgtgcaccaattcggcaaacacccgaaacttccgccagcccgcacgaatgacaatatgtggcctgaacagccacacgtctttacgcttgaatatgcatacgaggaacgagaagcaaaattcggaagagatccgagagaatactccattcaaacgacaaaaatggtcgcggataaaaacggaaagctgaaagagcttcataccatccaaatggaaaaagtgaaaaatgagcatggaaaatacgagttccgcgagctgcctggaacggaaaaagtatggcctgctcagcttgtctttatcgctatcggctttgaaggcacagaacagccgctgttgaaacagttcggtgttaattcagtaaataacaaaatcagtgcagcatatggggattatcaaacaaatatcgatggtgtattcgccgcaggggatgcaagaagagggcaaagcttaatcgtatgggcgattaatgaaggccgtgaagtggcgcgtgaagtggatcgatatttgatggggagttcagttcttccgtaa

SEQ ID NO: 4400 - protein, 493 aa, Bacillus subtilis
MGKPTGFMEIKREKPAERDPLTRLKDWKEYSAPFSEEASKRQGARCMDCGTPFCQIGADINGFTSGCPIYNLIPEWNDLVYRGRWKEALERLLKTNNFPEFTGRVCPAPCEGSCTLAISDPAVSIKNIERTIIDKGFENGWIQPRIPKKRTGKKVAIVGSGPAGLASADQLNQAGHSVTVFERADRAGGLLTYGIPNMKLEKGIVERRIKLLTQEGIDFVTNTEIGVDITADELKEQFDAVILCTGAQKQRDLLIEGRDSKGVHYAMDYLTLATKSYLDSNFKDKQFIDAKGKDVIVIGGGDTGADCVATALRQKAKSVHQFGKHPKLPPARTNDNMWPEQPHVFTLEYAYEEREAKFGRDPREYSIQTTKMVADKNGKLKELHTIQMEKVKNEHGKYEFRELPGTEKVWPAQLVFIAIGFEGTEQPLLKQFGVNSVNNKISAAYGDYQTNIDGVFAAGDARRGQSLIVWAINEGREVAREVDRYLMGSSVLP

SEQ ID NO: 4401 - DNA, 1407 bp, Thermotoga maritima
  CDS (1)..(1407)
atgaaaaacagaaaaactccgatgaaggaacaatcgccggaatcgaggagaaggaacttcgaggaagtggcgctcggctacacgctcgaagaggctttggaggaggctcagaggtgtcttcagtgtcccacacatccgtgcgtctccggctgtcctgtggaaatcgacattcccggcttcataaggaaactcagagatggaaaactcgaggaatcttacagaattctcaaaagctacaacaaccttcccgcagtctgtggaagagtctgtccccaggaagttcagtgtgagtcgaggtgtgtcgtgggaaagatgaaagacagcgaacccgttgcgatcggaagactggaacgattcgttgcggactgggcggctgagaacctcgaggaggatgtgaaacctctggccgggtcaaaaaaggagaaagtcgccgtcgttggttcaggtcccgcgggactgacagccgcagcggatctcgcgaagatgggataccacgttgacatcttcgaagcttttcacaaaccgggtggtgttctcgtgtatggaattccggagtttcgtcttccaaagaggatcgtcgaaagagaagtcagctacataaggaaactcggggttaacttccacctcaacacggtcgttggtaagaccgtcaaggtgaaagagctcctttcggagtacgacgccgtcttcataggtaccggtgcggggacaccgaagttcatgggaattccgggaacgaatctgaacggggtatactccgcaaacgagtttctcacgagggtcaatctcatgaaagcctatctctttcctgagtacgacacacccatccgtgtgggaaagaaggtagctgtgataggagctggaaacactgctatggatgcggcaagaagcgctctcagattgggagccgaaaaggtgtacattgtctacaggagaacggaacgtgagatgcctgccagaagagaggaataccaccatgcacttgaggaaggaatcgagtttctgtggctcaccctcccgatacggtacatcggtgacgccaacggaaacgtggaagccatggagtgcgtaaggatggagctgaaagaagcagacggttcgggaaggccaagacccgttcccatcgagggaagcaatttcgttctcgaggttgacatggtgatagaggccatagggcagggtccaaacagggtgcttctctctgagttcccaggcttggaactgaatgagcgtggatacatcaaagcagacgaggacacaggagcaacgagcgtgaaaggcgtcttcgcaggtggagatatcgtgacgggtgcagcgacggtgataaaggctatgggagctggaaagaaagcggcgcagttcatccactcttacctcacgggggaatggaatccgtggcaaaagtga

SEQ ID NO: 4402 - protein, 468 aa, Thermotoga maritima
MKNRKTPMKEQSPESRRRNFEEVALGYTLEEALEEAQRCLQCPTHPCVSGCPVEIDIPGFIRKLRDGKLEESYRILKSYNNLPAVCGRVCPQEVQCESRCVVGKMKDSEPVAIGRLERFVADWAAENLEEDVKPLAGSKKEKVAVVGSGPAGLTAAADLAKMGYHVDIFEAFHKPGGVLVYGIPEFRLPKRIVEREVSYIRKLGVNFHLNTVVGKTVKVKELLSEYDAVFIGTGAGTPKFMGIPGTNLNGVYSANEFLTRVNLMKAYLFPEYDTPIRVGKKVAVIGAGNTAMDAARSALRLGAEKVYIVYRRTEREMPARREEYHHALEEGIEFLWLTLPIRYIGDANGNVEAMECVRMELKEADGSGRPRPVPIEGSNFVLEVDMVIEAIGQGPNRVLLSEFPGLELNERGYIKADEDTGATSVKGVFAGGDIVTGAATVIKAMGAGKKAAQFIHSYLTGEWNPWQK

SEQ ID NO: 4403 - DNA, 1485 bp, Xylella fastidiosa
  CDS (1)..(1485)
atgagtcgcaagcacgctttccaatttctcgatttgcctcggcagatgcctcaacgcatcccggtggagctgcgtacttccggggattggcgggagttatacggtaagttcgataaggccgaagcgcagtaccaagccggtcgctgtttggactgcggtaatccatattgcagttggaagtgtccggtgcataacgccatcccgcagtggttgcagttagtgcaggaaaatcgcattgatgaggccgcagcgttgtgccatgcaaccaacccgcttcctgaagtgtgcggtcgggtgtgtccgcaggaccgtctctgtgaaggcagttgcacgctggaggagtttggtgcggttaccatcggtgcggtggaaaagtacattgtggataccgcgttgcagcaggggtggcgtcccgatttgagccatgtgcaaccgacgggttggcgtgtggcggtggtcggtgcagggcctgccggccttgcatgtgcggatcggttggcgcgtgctggggttcaggcggtggtgtatgaccgctatgagcagatcggtgggttgctgcagttcgggattcccagttttaagcttgataaggcggtgatgagtacgcgccgcaaagtgcttgagggcatgggcgtagagtttcgattgggtgtggagattggaaaggatctggggattgaagcgttgctggagcactacgatgcagtgttccttggcgtcggtgcgtatcgctacacggacggtggcttgccgggtcaggacttgaaaaacgtgttgccggcattaccgtttttggttcagaacggacgtatcgtttctggcaatgatccgtatggccgtccgattgccggttgggaggatcaggtgcagttgccggatgtgacggggaagtctgtggttgtactcggtggcggtgataccggcatggattgtgtacggagtgcgatccgtttaggtgcaactaaagtcacctgtatctatcggcgtgatgaggcgaatatgcctggttcggcgcgcgaggttgctaacgcgcgggaagagggggtgcgctttctgttcaatcgtcagccattgtcgattcaatccggtaccgacaaacaagccattggtgtcactgtggtggaaacgaagcttgccgagccggatgccaatggtcgtcgcaacgcagtgcctatccagggcactgaagcggtgctggaagcggatgtggtgattatcgctttcggtttctcgccgatgttgccggagtggttaactgcgcagggtatacaagcgtcgagcaacggtcgcattgtggtggcgttgtctgatactggcgatggactgacctatcagacaacgcatccgaagttgtttgctggtggtgattgtgtgcgtggtgccgatttagttgtcactgccgtggccgaagggcgcgacgcggctgagagcattgtgcggtggttgcgtgcgacggcacaggtgatggatgttgcggtgatctga

SEQ ID NO: 4404 - protein, 494 aa, Xylella fastidiosa
MSRKHAFQFLDLPRQMPQRIPVELRTSGDWRELYGKFDKAEAQYQAGRCLDCGNPYCSWKCPVHNAIPQWLQLVQENRIDEAAALCHATNPLPEVCGRVCPQDRLCEGSCTLEEFGAVTIGAVEKYIVDTALQQGWRPDLSHVQPTGWRVAVVGAGPAGLACADRLARAGVQAVVYDRYEQIGGLLQFGIPSFKLDKAVMSTRRKVLEGMGVEFRLGVEIGKDLGIEALLEHYDAVFLGVGAYRYTDGGLPGQDLKNVLPALPFLVQNGRIVSGNDPYGRPIAGWEDQVQLPDVTGKSVVVLGGGDTGMDCVRSAIRLGATKVTCIYRRDEANMPGSAREVANAREEGVRFLFNRQPLSIQSGTDKQAIGVTVVETKLAEPDANGRRNAVPIQGTEAVLEADVVIIAFGFSPMLPEWLTAQGIQASSNGRIVVALSDTGDGLTYQTTHPKLFAGGDCVRGADLVVTAVAEGRDAAESIVRWLRATAQVMDVAVI

SEQ ID NO: 4405 - DNA, 2065 bp, Thiobacillus ferrooxidans
  CDS (336)..(1733)
gatctcatcctcggcccggtcggcgtgaatttcggggcgggcatgaccggcggcctcgccttcgtccgcgatcaggcccgccagttccctgatcaagtgaatggtgagctggtgaattaccacgggatcgaaaccgaatccatgcgcggctacgaggccctcctgcggcgccatatcgaggcccatgtggcggccaccggcagcgattatgccgcggggctactcaaggactggacccactttatccgcgatgtctggctggtggtgcccaaggccgccaaactggatgtcctgctcgaagaagcgagctgaccgcgtcaccctgaggaaaaaccatgagtcatttttcattcatcgaagacccgcggcaggaccccaaaaagctggacgtagaagaacgccgcgaagcctttagggaaatctaccagagctttgacctgggcagtgcccagcttcaggccgaccgctgcctgcattgcggcaacccgtattgtgaatggaagtgcccggtgcacaactatattcccaactggctgcaactcattgtcgagaatcgtctggaagaagcggccacgctgtcccatcagaccaataccctgccggaaatctgcggccgcatctgccctcaggatcgcctgtgtgaaggtgcctgtaccctcaatgcaacgggcggcgccgtcaccatcggcaatctggaaaggttcgtcaccgaagaagcgctggcccgtgcgtggcagccggatatgcccgacatcctccccaatggcaaacgggtcgccgtagtgggtgggggtccggcaggcctcggctgtgcggacatcctcaaccgcgcaggcaccgaagtggtcgtctttgaccgctatccggcggttggtggtctgctcaccttcggcatcccgtccttcaaactggagaaggcagtggttgcacgccgcgccaacctgctccaggaaatgggtatccgttttcagctcgacacggaggttggcagagatatttccctgggtaagctcctggaagattttgacgccgtgttcctggggatgggcacctataccgccaagaccggcgacttccccggcgagaaactgccaggcgtcctcaaggcgctgtcctacctgatcgcgaacacccgtcacctgatgcagttgccggacccgacactcccctatatcagcctttccggcaagcgggttgtggtgctgggtggcggtgataccgccatggactgtctgcgtacggccatccgccagggtgcccgccaggtgacctgtgtctatcgccgcgatgaagagaacatgcccggctcacgccgggaagtcgccaatgcccgcgaggaaggcgtccactttcttttccatcgtcagcccgtcgaagtggtcggagatgctgcatcggggagcccagggcgtgcgtctggtggagacccgtctggcgagcccgatgccaggggccggcgtcacccggaaatcattcccggctcggaacaagtgctggatgccgatgtcgtgatcatcgcttttggttttgatccctcccctgctccctggtttgcggaacaccacatcactacggacagccgggggcggatcagcaccaacgcgcagttccagaccagcaacccgcgcatttttgccgggggagacatgcgacgaggctccgacctggtggtcactgcggtggacgaagggcgccgcgcggcgcagggtatcctcgactatctgggggtatagacggtgaaacccacattgcagaacgataatttcctgcgcgcctgcctgcgtcagccggtggatcacgtacccgtctggctgatgcgtcaggccgggcggtacctgcctgagtaccgcgccacccggcccgggccggcgattttctcagcctctgcaccacgccggaactggcctgcgaggtcactttacagcccatcaaccgcttccccctggatgccgccatccttttttcggatatcctgaccatcccctatgtcatgggactcgggctggaatttcaggaaggagaaggtccggtttttgcacgccccttgcgcagcgctgccgatatc

SEQ ID NO: 4406 - protein, 465 aa, Thiobacillus ferrooxidans
MSHFSFIEDPRQDPKKLDVEERREAFREIYQSFDLGSAQLQADRCLHCGNPYCEWKCPVHNYIPNWLQLIVENRLEEAATLSHQTNTLPEICGRICPQDRLCEGACTLNATGGAVTIGNLERFVTEEALARAWQPDMPDILPNGKRVAVVGGGPAGLGCADILNRAGTEVVVFDRYPAVGGLLTFGIPSFKLEKAVVARRANLLQEMGIRFQLDTEVGRDISLGKLLEDFDAVFLGMGTYTAKTGDFPGEKLPGVLKALSYLIANTRHLMQLPDPTLPYISLSGKRVVVLGGGDTAMDCLRTAIRQGARQVTCVYRRDEENMPGSRREVANAREEGVHFLFHRQPVEVVGDAASGSPGRASGGDPSGEPDARGRRHPEIIPGSEQVLDADVVIIAFGFDPSPAPWFAEHHITTDSRGRISTNAQFQTSNPRIFAGGDMRRGSDLVVTAVDEGRRAAQGILDYLGV

SEQ ID NO: 4407 - DNA, 7174 bp, Medicago sativa (alfalfa)
  CDS (228)..(6812)
ctctgtcttgtttttttctctcttgttgctgttttagttttttcagtttttcagattcgaatctccacataaccacttctcaaaaatctggatcttattgttcttcagtttcatcaatctcagatctgttacatttaataacaaacaaaactgaataacagttagaaaaagccaaaactcgaaaacgcgaatcaacaatttttgaataattttaattttaatctccaatgtcgaattctctttcgttaacgtttacggcgttaaacaatcctcagataaacgctataagtaaccctaacgctcgtttgcgtccgttagcgagggttacgcgatgttctgccacgtgtgtcgagaggaagagatggttagggacgaaattgcgaagtggtggtggtttggagaggattcagttatgggaatccggtggattagggaggttgccgaagctcagagtggcggttaagtcgtcgttttcggctgtgccggataaaccgatgggactttatgatccggcttttgataaagattcttgtggtgttggatttgttgctgaattgaacggtcaaagtagtcgaaaaacggtaactgatgctttggagatgttggttaggatgacacatagaggtgcttgtggatgtgaagcaaataccggtgatggtgctggtatacttgtggctttgcctcatggcttctaccaagaggttgtggattttcagcttcctcctcaaggaaactatgcagttggcatgtttttcttacctaaatccgatagtcggagaaaggaaagcaaaaatatatttactaaggttgccgagtctcttggtcacaaggttcttggttggcgttctgtgcccacggataacacagggttgggcaaatcagcccagctgaccgaaccagtgattgaacaagtgtttcttacaccaagttctgactcaaaagttgatttggagaaacagatgtacatattaaggaagctcagcatggtttctattacatctgcattaaacctccaaagcgatggaattacagatttctatatctgttcactttcatctaggactgttatttacaaaggtcagctaacaccagctcagttgggtgaatattattatgcagatcttggcaatgaaaggtttacgagctacatggccctgatacattcccgattctctacaaatactttccctagttgggatcgtgcccaaccttttcgtgtattgggccacaacggggaaatcaacacactcagaggcaatgttaactggataaaagcacgtgagggcctactgaaatgcaaggaacttggcttatcagagaatgatttaaagaagtttttaccgattgtggacgcaaattcatcagattcaggatgttttgatggtgtcctcgagtttttgcttcattccggaaaaagtcttccagaagctgttatgatgatgattcctgaagcatggcagaacgacaagaacatggaccctcagcgtaaagcattttatgaatactattcagctctgatggagccatgggatgggccagctcttatctcatttaccgatggtcactatctaggagctacattagataggaatggactacgacctggccgcttctatgtcacccacagtggacgggttataatggcaagtgaagttggcgttgtagatattcctccagaagatgtgtgcaggaaaggaagactaaatccaggcatgatgcttctggtggattttgagaagcaaatagttgtgaacgatgacgccttaaaagagcaatactcattggcaagaccgtacggagattggcttgaaaagcagaaaatcgaactgaaggacataattgactctgttcatgaatctgatattgtgccaccaaccatatcaggagtgcctccactgtctaatgatgatgtggacatggaaaatatgggaattcaaggtttgctggctccattgaaagcttttgggtattctgtagaatcattggaaattctattacttcccatggcaaaggatggtgtcgaagcacttggttcaatgggaaatgatactccattagctgtcatgtctaatagagaaaaactcacttttgagtatttcaaacaaatgtttgctcaagtgacaaatcctcctatcgatcctattcgagagaaaatagtcacttctatgcgatgtatggttggtccagaaggtgatctaacagaaaccactgaggaacaatgccaccgcctttcactaaaaggtccccttttatccactaaggaaatggaagccatcaaaaaaatgaattataggggatggaggagcaaagttatagacattacttactcaaaggaacgtggtacgaaagggttggaggaagccttagacaggatatgcacagaagcacacaatgcaattagtgaaggctacaccacccttgttctttctgatagagccttctcaaagaaacatgttgctgtgagctctcttttggctgttggtgcagtccaccaacatctagttaaaacacttgagcgcacaagagttgctctaatggttgaatctgctgagccacgtgaagtgcaccatttctgcacacttgttggttttggcgctgatgctatatgcccatatttggctatagaggcaatttggcgactgcaggttgacggaaagatcccaccaaaagcaagtggtgatttcaactcaaaagatgagttggtcaagaagtatttcaaagcaagcacctatgggatgatgaaggttcttgccaagatgggaatatcaactttggcatcatataaaggtgctcagatatttgaagctctgggtctttcttcagaagtgattgaaaagtgctttgctggaactccaagtcgagttgagggtgcaacatttgagatgcttgctcaagatgcacttcatctgcatgagttggcttttccttctcggattttctctcctggaagtgcagaagcagtagcattgccaaaccctggagattatcattggagaaaaggtggtgaagttcatctgaatgatccacttgctattgcaaagcttcaagaggctgccagaactaacagcgtagatgcatataaacagtattccaagaccattcatgaattgaataaggcttgcaatttgcgaggactcctgaagtttaaagatgcagcaagtaaggttcctattagcgaagtcgaacctgctagtgaaattgttaaacggttttgcactggcgccatgagttatgggtcaatatctttggaggcccacacagcattagcaacggcaatgaacacaattggaggaaaatccaacacaggtgagggaggtgaacaaccatctcgtatggagcctcttgctgatggctcaaggaatcccaaaaggagtgccattaagcaggttgctagtgggagatttggtgtttcaagttactaccttacaaatgctgatgagcttcagataaagatggcccagggagcaaaacctggtgaaggaggtgaacttcctggccacaaggttataggagacattgctatcactaggaattcaacagccggagtaggtctcatcagtccacctccccatcacgatatttattcaattgaagatcttgctcaattgattcatgatctcaagaatgccaacccagctgctcgaattagtgtgaaactagtatctgaagcaggagttggggtaattgctagtggagttgttaaaggtcatgctgagcatgtcttgatctcaggtcatgatggaggtacaggagcatccagatggactggtataaagagtgctggactgccttgggaacttggtctggctgagacccaccaaacattggttgctaatgacctacgtggtcgtacaactctgcaaactgacgggcaactaaaaaccggaagagatgtggccatagccgcccttcttggtgcagaagagtatggtttcagtactgctcccctcattactcttggctgcatcatgatgcggaagtgccacaagaacacctgtcctgttggaattgctactcaagatccagtacttagagagaaatttgctggagaacctgagcacgttattaacttcttttttatggtggcagaagagatgagagaaattatgtcccaacttgggtttagaacagtcaatgaaatggttggccgttcagatatgctcgaagttgataaagaagttgttaagggaaatgcaaaactagagaatattgatctctctctattgcttagacctgcagctgaactgcggccagaagctgcccaatactgtgttcaaaagcaagatcatggtttggacatggctttggataataagctcataagtctgtccaatgctgctttggaaaagggtcttccagtatacattgaaacaccgatctgcaataccaaccgtgctgtgggaactatgcttagccacgaggttactaagaggtacaatttagctggtcttccagccgataccatccatatccaatttactggtagtgcaggccaaagctttggtgcattcctttgtcctggaatcacattggaacttgaaggtgatagcaatgactacattggtaaaggattatcaggtggaaaagttgtagtatatcctccaaaaggaagcaattttgaccccaaagacaacatcttaattggcaatgtggcactgtatggggcaacacgtggtgaggcatatttcaatgggatggcagcagaaagattttgtgtgcgtaattctggggctctggctgtagttgaaggtgttggtgatcatggatgtgagtacatgactggtgggaccgttgttgttcttgggaaaactggtagaaattttgctgcaggtatgagtggtggaatcgcttatgttcttgacgtggatggaacattccagtctcggtgcaacctggagcttgtagatctggataaggttgaagaggaagaggacattattactcttaggatgttgatacagcaacatcaacgtcacacaaacagtttgcttgccaaggaagtgcttgttgattttgaaaatcttcttcctaaatttgtcaaggtgttccctcgggagtataaacgtgttcttgcaagtatgaagtctgatgcagcctctaaagatgcagtggagcgggctgcggaagatgtagatgaacaagacgatgaagcccaagcagtggagaaagatgcttttgaagagctcaagaagctggcaactgcatctttgaatgagaaaccaagtgaggctcccaagaggccaagtcaggtcactgatgctgttaaacatagaggttttgttgcttacgagcgtgagggtgttcagtatagggatcctaatgttcgcctgaatgattggaatgaggtgatgatggagacaaagccgggtccacttttgaaaacacagtctgcccgttgcatggactgtggtactccattttgtcatcaggaaaattctggatgtcctcttgggaacaaaataccggaatttaatgagctagtgtatcaaaataggtggcaagaagcactagagaggcttcttgaaacaaacaactttcctgagttcactgggcgggtttgccctgcaccttgtgaaggttcttgtgtcctcggtattattgagaatccagtttctattaaaaatattgaatgtgctatcattgacaaggcttttgaggagggttggatgattccacgacctcctgtcaagagaactggaaaaagagtagccattgttggaagtggaccatcaggcttggcagctgcagatcagctaaataaaatgggtcatatagtaacagtgtttgaaagagctgatcgcattggtggccttatgatgtatggagttccaaacatgaaaactgacaaagtggatatagttcaaaggcgagtcaatctaatggctgaggaaggaataaattttgtggtgaatgcaaacattgggcttgatcctttatactctcttgaacgacttagagaggaaaacgatgccattgtcttggctgttggagctacaaagccaagggatcttcctgtgcctggaagggagctatcaggagttcattttgccatggagtttcttcatgcaaacactaaaagtttgcttgatagcaatttacaggatggtaactacatctctgccaagggcaagaaggttgtggtcattggcgggggtgacacgggcacagattgcattggaacatccattcgtcatggttgtactgctgttgtcaatctagaacttctccctcagccaccaccaactagggccccaggcaacccatggcctcagtggcctcgcatattccgtgttgattatggtcaccaagaagcggaaactaaatttggaaaagatcccagaacatatgaggtactcactaagaggtttgtgggagatgaaaatggagttgttaaaggacttgaagtggtacgtgtttgctgggagaaagatgaaactggcaagtttcaatttaaagaaattgagggcagtgaggagattattgaggctgacctagttttactagccatgggattccttggccccgaggcgactatagcagaaaagttgggtgtggaacgagacaacaggtcaaacttcaaagctgattatggccgcttctcgaccagtgttgatggggtatttgcagcaggtgactgtcggcgtggtcagtcgcttgtggtatgggctatttcagagggaaggcaagctgccgcacaagtggacagctacctcaccaatgaagaccacggtattgatgggaatcaggatgaatttgtcaagaggcaacaagacctcaacaagaagcacagcaaacacacagtgatgacttaggatgcttttttgattttacaagttcctcgagttcctaaagcaaatgcacataataaaagaaaaaggaatgttgaatgttacattttaggcattcttggttggcaggtagtaagccgaatgggcgaaataagaacgaaaacaataaagataaataatttagtgtaaggaaagcaagaggttgtcttggtttttggtggtattagggtaagatttgagtgttgttcatagttcttatttggattttattgttgggaaggctagcttagttatggttttgtggaaatgaaatgtacagtttggtaattaattatttattctgatgtacaattgtttctgcaattttgagctactgtgtttgttcc

SEQ ID NO: 4408 - protein, 2194 aa, Medicago sativa (alfalfa)
MSNSLSLTFTALNNPQINAISNPNARLRPLARVTRCSATCVERKRWLGTKLRSGGGLERIQLWESGGLGRLPKLRVAVKSSFSAVPDKPMGLYDPAFDKDSCGVGFVAELNGQSSRKTVTDALEMLVRMTHRGACGCEANTGDGAGILVALPHGFYQEVVDFQLPPQGNYAVGMFFLPKSDSRRKESKNIFTKVAESLGHKVLGWRSVPTDNTGLGKSAQLTEPVIEQVFLTPSSDSKVDLEKQMYILRKLSMVSITSALNLQSDGITDFYICSLSSRTVIYKGQLTPAQLGEYYYADLGNERFTSYMALIHSRFSTNTFPSWDRAQPFRVLGHNGEINTLRGNVNWIKAREGLLKCKELGLSENDLKKFLPIVDANSSDSGCFDGVLEFLLHSGKSLPEAVMMMIPEAWQNDKNMDPQRKAFYEYYSALMEPWDGPALISFTDGHYLGATLDRNGLRPGRFYVTHSGRVIMASEVGVVDIPPEDVCRKGRLNPGMMLLVDFEKQIVVNDDALKEQYSLARPYGDWLEKQKIELKDIIDSVHESDIVPPTISGVPPLSNDDVDMENMGIQGLLAPLKAFGYSVESLEILLLPMAKDGVEALGSMGNDTPLAVMSNREKLTFEYFKQMFAQVTNPPIDPIREKIVTSMRCMVGPEGDLTETTEEQCHRLSLKGPLLSTKEMEAIKKMNYRGWRSKVIDITYSKERGTKGLEEALDRICTEAHNAISEGYTTLVLSDRAFSKKHVAVSSLLAVGAVHQHLVKTLERTRVALMVESAEPREVHHFCTLVGFGADAICPYLAIEAIWRLQVDGKIPPKASGDFNSKDELVKKYFKASTYGMMKVLAKMGISTLASYKGAQIFEALGLSSEVIEKCFAGTPSRVEGATFEMLAQDALHLHELAFPSRIFSPGSAEAVALPNPGDYHWRKGGEVHLNDPLAIAKLQEAARTNSVDAYKQYSKTIHELNKACNLRGLLKFKDAASKVPISEVEPASEIVKRFCTGAMSYGSISLEAHTALATAMNTIGGKSNTGEGGEQPSRMEPLADGSRNPKRSAIKQVASGRFGVSSYYLTNADELQIKMAQGAKPGEGGELPGHKVIGDIAITRNSTAGVGLISPPPHHDIYSIEDLAQLIHDLKNANPAARISVKLVSEAGVGVIASGVVKGHAEHVLISGHDGGTGASRWTGIKSAGLPWELGLAETHQTLVANDLRGRTTLQTDGQLKTGRDVAIAALLGAEEYGFSTAPLITLGCIMMRKCHKNTCPVGIATQDPVLREKFAGEPEHVINFFFMVAEEMREIMSQLGFRTVNEMVGRSDMLEVDKEVVKGNAKLENIDLSLLLRPAAELRPEAAQYCVQKQDHGLDMALDNKLISLSNAALEKGLPVYIETPICNTNRAVGTMLSHEVTKRYNLAGLPADTIHIQFTGSAGQSFGAFLCPGITLELEGDSNDYIGKGLSGGKVVVYPPKGSNFDPKDNILIGNVALYGATRGEAYFNGMAAERFCVRNSGALAVVEGVGDHGCEYMTGGTVVVLGKTGRNFAAGMSGGIAYVLDVDGTFQSRCNLELVDLDKVEEEEDIITLRMLIQQHQRHTNSLLAKEVLVDFENLLPKFVKVFPREYKRVLASMKSDAASKDAVERAAEDVDEQDDEAQAVEKDAFEELKKLATASLNEKPSEAPKRPSQVTDAVKHRGFVAYEREGVQYRDPNVRLNDWNEVMMETKPGPLLKTQSARCMDCGTPFCHQENSGCPLGNKIPEFNELVYQNRWQEALERLLETNNFPEFTGRVCPAPCEGSCVLGIIENPVSIKNIECAIIDKAFEEGWMIPRPPVKRTGKRVAIVGSGPSGLAAADQLNKMGHIVTVFERADRIGGLMMYGVPNMKTDKVDIVQRRVNLMAEEGINFVVNANIGLDPLYSLERLREENDAIVLAVGATKPRDLPVPGRELSGVHFAMEFLHANTKSLLDSNLQDGNYISAKGKKVVVIGGGDTGTDCIGTSIRHGCTAVVNLELLPQPPPTRAPGNPWPQWPRIFRVDYGHQEAETKFGKDPRTYEVLTKRFVGDENGVVKGLEVVRVCWEKDETGKFQFKEIEGSEEIIEADLVLLAMGFLGPEATIAEKLGVERDNRSNFKADYGRFSTSVDGVFAAGDCRRGQSLVVWAISEGRQAAAQVDSYLTNEDHGIDGNQDEFVKRQQDLNKKHSKHTVMT

SEQ ID NO: 4409 - DNA, 7231 bp, Saccharomyces cerevisiae
  CDS (678)..(7115)
acctcactttaaaaaactttgttttcttggcatccatacatgaacaataacaacaattctatatcatcttaagtaagactcttattgtaatttctttttctttgatgactcagaccctggtagccctaccgttcaaccctatacagcgcaaatttggtcctaatacacttcggttttaatgcgtcaatccgattggctccgataagcttttgcacatttttcaagtcatatgtcacgacgaacgtgatgcccgcaaaacgtaaaaaaaagaagcaataaattgcccaaaaaaaaaatataaactgcttttcttagtcattcataagttctgatggtcttccttatcttattgtatttttcgtcctattgtttcatttcttaccaaattaatcaattcttatatcttacttgataacacaccaaactaatcgtctccacatcataggaagataggaaattgctatctcagtcctatactacgcagacggatactctcagttgctctttcttccccttcttttagctcattgaggtagtgattaacgtttaacttatttatttatttttctgcttcagtttttttttatttatttttgtctttctactctctcttttttcttaatctatttgccatttatttattttgaagaactagaaaaagaattagaaaagaaagcatgccagtgttgaaatcagacaatttcgatccattggaagaagcttacgaaggtgggacaattcaaaactataacgatgaacaccatcttcataaatcttgggcaaatgtgattccggacaaacgaggactttacgaccctgattatgaacatgacgcttgtggtgtcggtttcgtagcaaataagcatggtgaacagtctcacaagattgttactgacgctagatatcttttagtgaatatgacacatcgtggtgccgtctcatctgatgggaacggtgacggtgccggtattctgctaggtattcctcacgaatttatgaaaagagaattcaagttagatcttgatctagacatacctgagatgggcaaatacgccgtaggtaacgtcttcttcaagaagaacgaaaaaaataacaagaaaaatttaattaagtgtcagaagattttcgaggatttagctgcatccttcaacttatccgtattaggttggagaaacgtccccgtagattctactattttaggagacgttgcattatctcgtgaacctactattctacagccattattggttccattgtatgatgaaaaacaaccggagtttaatgaaactaaatttagaactcaattgtatcttttaaggaaggaggcctctcttcaaataggactggaaaactggttctatgtttgttccctaaacaataccaccattgtttacaagggtcaattgacgccagctcaagtgtataactactatcccgacttgactaatgcgcatttcaaatcccacatggcgttggtccattcaagattttccactaatactttcccctcttgggatagagctcaacctttacgttggctagctcataatggtgaaattaacaccttaagaggtaacaagaattggatgcgctccagagaaggtgtgatgaattcagcaactttcaaagatgagttagacaaactatacccaattatcgaagaaggtggttctgattcagctgcattggataacgttttagaactattgactattaatggcacattatctctacctgaagctgttatgatgatggttcctgaagcgtatcataaggatatggattctgacctaaaagcatggtacgactgggctgcatgtctgatggaaccttgggatggtccagctttgttaactttcactgatggacgttactgtggtgctatattggatagaaatggtttaagaccttgtcgttattacatcactagtgatgacagagttatctgtgcttcagaggtaggtgtcattcctatcgaaaattcattggttgttcaaaaaggtaaactgaagccaggtgatttattcctagtggatactcaattgggtgaaatggtcgatactaaaaagttaaaatctcaaatctcaaaaagacaagattttaagtcttggttatccaaagtcatcaagttagacgacttgttatcaaaaaccgctaatttggttcctaaagaatttatatcacaggattcattgtctttgaaagttcaaagtgacccacgtctattggccaatggttataccttcgaacaagtcacatttctgttaactccaatggctttaacaggtaaagaagctttaggttcgatgggtaacgatgcgccactggcttgtttaaatgaaaatcctgtcttactttatgattatttcagacaattgtttgctcaagtgaccaatcctccaattgacccaattcgtgaagcaaatgttatgtcgttagaatgttatgtcggacctcaaggcaaccttttggaaatgcattcatctcaatgtgatcgtttattattgaaatctcctattttgcattggaatgagttccaagctttgaaaaacattgaagctgcttacccatcatggtctgtagcagaaattgatatcacattcgacaagagtgagggtctattgggctataccgacacaattgataaaatcactaagttagcgagcgaagcaattgatgatggtaaaaagatcttaataattactgacaggaaaatgggtgccaaccgtgtttccatctcctctttgattgcaatttcatgtattcatcatcacctaatcagaaacaagcagcgttcccaagttgctttgattttggaaacaggtgaagccagagaaattcaccatttctgtgtcctactaggttatggttgtgatggtgtttatccatacttagccatggaaactttggtcagaatgaatagagaaggtctacttcgtaatgtcaacaatgacaatgatacacttgaggaagggcaaatactagaaaattacaagcacgctattgatgcaggtatcttgaaggttatgtctaaaatgggtatctccactctagcatcctacaaaggtgctcaaatttttgaagccctaggtttagataactctattgttgatttgtgtttcacaggtacttcttccagaattagaggtgtaactttcgagtatttggctcaagatgccttttctttacatgagcgtggttatccatccagacaaaccattagtaaatctgttaacttaccagaaagtggtgaataccactttagggatggtggttacaaacacgtcaacgaaccaaccgcaattgcttcgttacaagatactgtcagaaacaaaaatgatgtctcttggcaattatatgtaaagaaggaaatggaagcaattagagactgtacactaagaggactgttagaattagattttgaaaattctgtcagtatccctctagaacaagttgaaccatggactgaaattgccagaagatttgcgtcaggtgcaatgtcttatggttctatttctatggaagctcactctacattggctattgccatgaatcgtttaggggccaaatccaattgtggtgaaggtggtgaagacgcagaacgttctgctgttcaagaaaacggtgatactatgagatctgctatcaaacaagttgcttccgctagattcggtgtaacttcatactacttgtcagatgctgatgaaatccaaattaagattgctcagggtgctaagccgggtgaaggtggtgaactaccagcccacaaagtgtctaaggatatcgcaaaaaccaggcactccacccctaatgttgggttaatctctcctcctcctcatcacgatatttattccattgaagatttgaaacaactgatttatgatttgaaatgtgctaatccaagagcgggaatttctgtaaagttggtttccgaagttggtgttggtattgttgcctctggtgtagctaaggctaaagccgatcatatcttagtttctggtcatgatggtggtacaggtgctgcaagatggacgagtgtcaaatatgcgggtttgccatgggaattaggtctagctgaaactcaccagactttagtcttgaatgatttaagacgtaatgttgttgtccaaaccgatggtcaattgagaactgggtttgatattgctgttgcagttttattaggggcagaatcttttaccttggcaacagttccattaattgctatgggttgtgttatgttaagaagatgtcacttgaactcttgtgctgttggtattgccacacaagatccatatttgagaagtaagtttaagggtcagcccgaacatgttatcaacttcttctattacttgatccaagatttaagacaaatcatggccaagttaggattccgtaccattgacgaaatggtgggtcattctgaaaaattaaagaaaagggacgacgtaaatgccaaagccataaatatcgatttatctcctattttgaccccagcacatgttattcgtccaggtgttccaaccaagttcactaagaaacaagaccacaaactccacacccgtctagataataagttaatcgatgaggctgaagttactttggatcgtggcttaccagtgaatattgacgcctctataatcaatactgatcgtgcactcggttctactttatcttacagagtctcgaagaaatttggtgaagatggtttgccaaaggacaccgttgtcgttaacatagaaggttcagcgggtcaatcttttggtgctttcctagcttctggtatcacttttatcttgaatggtgatgctaatgattatgttggtaaaggtttatccggtggtattattgtcattaaaccaccaaaggattctaaattcaagagtgatgaaaatgtaattgttggtaacacttgtttctatggtgctacttctggtactgcattcatttcaggtagtgccggtgagcgtttcggtgtcagaaactctggtgccaccatcgttgttgagagaattaagggtaacaatgcctttgagtatatgactggtggtcgtgccattgtcttatcacaaatggaatccctaaacgccttctctggtgctactggtggtattgcatactgtttaacttccgattacgacgattttgttggaaagattaacaaagatactgttgagttagaatcattatgtgacccggtcgagattgcgtttgttaagaatttgatccaggagcattggaactacacacaatctgatctagcagccaggattctcggtaatttcaaccattatttgaaagatttcgttaaagtcattccaactgattataagaaagttttgttgaaggagaaagcagaagctgccaaggcaaaggctaaggcaacttcagaatacttaaagaagtttagatcgaaccaagaagttgatgacgaagtcaatactctattgattgctaatcaaaaagctaaagagcaagaaaaaaagaagagtattactatttcaaataaggccactttgaaggagcctaaggttgttgatttagaagatgcagttccagattccaaacagctagagaagaatagcgaaaggattgaaaaaacacgtggttttatgatccacaaacgtcgtcatgagacacacagagatccaagaaccagagttaatgactggaaagaatttactaaccctattaccaagaaggatgccaaatatcaaactgcgagatgtatggattgtggtacaccattctgtttatctgataccggttgtcccctatctaacattatccccaagtttaatgaattgttattcaagaaccaatggaagttggcactggacaaattgctagagacaaacaatttcccagaattcactggaagagtatgtccagcaccctgtgagggagcttgtacactaggtattattgaagacccagtcggcataaaatcggttgaaagaattatcattgacaatgctttcaaggaaggatggattaagccttgtccaccaagtacacgcactggctttacagtgggtgtcattggttctggtccagcaggtttagcgtgtgctgatatgttgaaccgtgccggacatacggtcactgtttatgaaagatccgaccgttgtggtgggttattgatgtatggtattccaaacatgaagttggataaggctatagtgcaacgtcgtattgatctattgagtgccgaaggtattgactttgttaccaacaccgaaattggtaaaaccataagcatggatgagctaaagaacaagcacaatgcagtagtgtatgctatcggttctaccattccacgtgacttacctattaagggtcgtgaattgaagaatattgattttgccatgcagttgttggaatctaacacaaaagctttattgaacaaagatctggaaatcattcgtgaaaagatccaaggtaagaaagtaattgttgtcggtggtggtgacacaggtaacgattgtttaggtacatctgtaagacacggtgcagcatcagttttgaatttcgaattgttgcctgagccaccagtggaacgtgccaaagacaatccatggcctcaatggccgcgtgtcatgagagtggactacggtcatgctgaagtgaaagagcattatggtagagaccctcgtgaatactgcatcttgtccaaggaatttatcggtaacgatgagggtgaagtcactgccatcagaactgtgcgcgtagaatggaagaagtcacaaagtggcgtatggcaaatggtagaaattcccaacagtgaagagatctttgaagccgatatcattttgttgtctatgggtttcgtgggtcctgaattgatcaatggcaacgataacgaagttaagaagacaagacgtggtacgattgccacactcgacgactcctcatactctattgatggaggaaagacttttgcatgtggtgactgtagaagagggcaatctttgattgtctgggccatccaagaaggtagaaaatgtgctgcctctgtcgataagttcctaatggacggcactacgtatctaccaagtaatggtggtatcgttcaacgtgattacaaactattgaaagaattagctagtcaagtctaaaaagcttgagttattatttattttatgatcgtatattatttatttatttatttatttatttatttatttatttatttatttatttattttatttagtttattaattttgctgatga

SEQ ID NO: 4410 - protein, 2145 aa, Saccharomyces cerevisiae
MPVLKSDNFDPLEEAYEGGTIQNYNDEHHLHKSWANVIPDKRGLYDPDYEHDACGVGFVANKHGEQSHKIVTDARYLLVNMTHRGAVSSDGNGDGAGILLGIPHEFMKREFKLDLDLDIPEMGKYAVGNVFFKKNEKNNKKNLIKCQKIFEDLAASFNLSVLGWRNVPVDSTILGDVALSREPTILQPLLVPLYDEKQPEFNETKFRTQLYLLRKEASLQIGLENWFYVCSLNNTTIVYKGQLTPAQVYNYYPDLTNAHFKSHMALVHSRFSTNTFPSWDRAQPLRWLAHNGEINTLRGNKNWMRSREGVMNSATFKDELDKLYPIIEEGGSDSAALDNVLELLTINGTLSLPEAVMMMVPEAYHKDMDSDLKAWYDWAACLMEPWDGPALLTFTDGRYCGAILDRNGLRPCRYYITSDDRVICASEVGVIPIENSLVVQKGKLKPGDLFLVDTQLGEMVDTKKLKSQISKRQDFKSWLSKVIKLDDLLSKTANLVPKEFISQDSLSLKVQSDPRLLANGYTFEQVTFLLTPMALTGKEALGSMGNDAPLACLNENPVLLYDYFRQLFAQVTNPPIDPIREANVMSLECYVGPQGNLLEMHSSQCDRLLLKSPILHWNEFQALKNIEAAYPSWSVAEIDITFDKSEGLLGYTDTIDKITKLASEAIDDGKKILIITDRKMGANRVSISSLIAISCIHHHLIRNKQRSQVALILETGEAREIHHFCVLLGYGCDGVYPYLAMETLVRMNREGLLRNVNNDNDTLEEGQILENYKHAIDAGILKVMSKMGISTLASYKGAQIFEALGLDNSIVDLCFTGTSSRIRGVTFEYLAQDAFSLHERGYPSRQTISKSVNLPESGEYHFRDGGYKHVNEPTAIASLQDTVRNKNDVSWQLYVKKEMEAIRDCTLRGLLELDFENSVSIPLEQVEPWTEIARRFASGAMSYGSISMEAHSTLAIAMNRLGAKSNCGEGGEDAERSAVQENGDTMRSAIKQVASARFGVTSYYLSDADEIQIKIAQGAKPGEGGELPAHKVSKDIAKTRHSTPNVGLISPPPHHDIYSIEDLKQLIYDLKCANPRAGISVKLVSEVGVGIVASGVAKAKADHILVSGHDGGTGAARWTSVKYAGLPWELGLAETHQTLVLNDLRRNVVVQTDGQLRTGFDIAVAVLLGAESFTLATVPLIAMGCVMLRRCHLNSCAVGIATQDPYLRSKFKGQPEHVINFFYYLIQDLRQIMAKLGFRTIDEMVGHSEKLKKRDDVNAKAINIDLSPILTPAHVIRPGVPTKFTKKQDHKLHTRLDNKLIDEAEVTLDRGLPVNIDASIINTDRALGSTLSYRVSKKFGEDGLPKDTVVVNIEGSAGQSFGAFLASGITFILNGDANDYVGKGLSGGIIVIKPPKDSKFKSDENVIVGNTCFYGATSGTAFISGSAGERFGVRNSGATIVVERIKGNNAFEYMTGGRAIVLSQMESLNAFSGATGGIAYCLTSDYDDFVGKINKDTVELESLCDPVEIAFVKNLIQEHWNYTQSDLAARILGNFNHYLKDFVKVIPTDYKKVLLKEKAEAAKAKAKATSEYLKKFRSNQEVDDEVNTLLIANQKAKEQEKKKSITISNKATLKEPKVVDLEDAVPDSKQLEKNSERIEKTRGFMIHKRRHETHRDPRTRVNDWKEFTNPITKKDAKYQTARCMDCGTPFCLSDTGCPLSNIIPKFNELLFKNQWKLALDKLLETNNFPEFTGRVCPAPCEGACTLGIIEDPVGIKSVERIIIDNAFKEGWIKPCPPSTRTGFTVGVIGSGPAGLACADMLNRAGHTVTVYERSDRCGGLLMYGIPNMKLDKAIVQRRIDLLSAEGIDFVTNTEIGKTISMDELKNKHNAVVYAIGSTIPRDLPIKGRELKNIDFAMQLLESNTKALLNKDLEIIREKIQGKKVIVVGGGDTGNDCLGTSVRHGAASVLNFELLPEPPVERAKDNPWPQWPRVMRVDYGHAEVKEHYGRDPREYCILSKEFIGNDEGEVTAIRTVRVEWKKSQSGVWQMVEIPNSEEIFEADIILLSMGFVGPELINGNDNEVKKTRRGTIATLDDSSYSIDGGKTFACGDCRRGQSLIVWAIQEGRKCAASVDKFLMDGTTYLPSNGGIVQRDYKLLKELASQV

SEQ ID NO: 4411 - DNA, 1485 bp, Synechocystis sp
  CDS (1)..(1485)
atgggcaaacccactggttttctggaatatacccgcgaaattccccaagagttaagccccggcgatcgcctgaggaattgggacgaattccatgtgaccatgcccgataagcaggtggaaacccagggagcccgttgcatggattgcggcacgcccttttgtcacaccggtagtttgatcagtggcatggccagtggttgcccaatcaataacctcatcccggaatttaatgacctagtctatcgggggctgtggcgggaagctttagatcggcttcacaagactaataactttcctgaatttactggccgggtttgtcccgctccctgcgaaggctcctgtgtgttgggcatcaataatcctccggtgaccatcaaaaatattgaatattccatcatcgaaaagggttggcaggaaggttgggtaacgccggaaccgcccgcaaaacgcacggggaaaaaagtagccgtagttggttctggccccgctggtttagccgccgccgcccagttaaacaaagccggtcattgggtaacggtttatgaacgggaagaccgccccggcggtttgcttatgtacggcattcccaatatgaagctggataaggaagaagtggtgctacgccgcttaaacgtgctggaagcagagggagtcacctttgtttgcaatacggaaattggcaaggatttacccccggaaaccctactcaaggactacgacgcggtggtgctctgtaccggtgccactaagcccagggatttggcgatcgccggtcgggaactggaaggcatccacttcgccatggaatttttgaccgccaacactaaggcaattttagataaaactcccggcccgaatttcattagtgccaaggataaagacgtggtaattatcggtggaggggacaccggcaccgactgtgtgggtacttccctccgccacggttgcagaagcctagtgcaattggaaattatgcccaaacccccggaggaacgggccgccaacaacccctggccagaatggcccaaggtttacaaaatggactacggccaggaagaagccgccgccgtctatggccatgatccccgcagttacctcaccactgccaccaaaattgaaggggatgaccaggggcgggtcaaagcagtccataccgtcgatgtccgttgggaaaaggatgggcagggacgatttattccccagcaagtggctggcacggaacaggtcagaccagctcaattagtcttgctagccatggggtttgtgggaccagaaagtcaactgctggatgcaatgaaattggataaagatgcccggggcaatattaaagctgaatacggtcagtatgaaaccagtattcccggggtatttgcggcgggggactgtcgccggggccaaagtttggtggtctgggctttcaacgaaggtcggggggcagccaaagcctgtgacctttacttaatgggggaaacagacctcccctag

SEQ ID NO: 4412 - protein, 494 aa, Synechocystis sp
MGKPTGFLEYTREIPQELSPGDRLRNWDEFHVTMPDKQVETQGARCMDCGTPFCHTGSLISGMASGCPINNLIPEFNDLVYRGLWREALDRLHKTNNFPEFTGRVCPAPCEGSCVLGINNPPVTIKNIEYSIIEKGWQEGWVTPEPPAKRTGKKVAVVGSGPAGLAAAAQLNKAGHWVTVYEREDRPGGLLMYGIPNMKLDKEEVVLRRLNVLEAEGVTFVCNTEIGKDLPPETLLKDYDAVVLCTGATKPRDLAIAGRELEGIHFAMEFLTANTKAILDKTPGPNFISAKDKDVVIIGGGDTGTDCVGTSLRHGCRSLVQLEIMPKPPEERAANNPWPEWPKVYKMDYGQEEAAAVYGHDPRSYLTTATKIEGDDQGRVKAVHTVDVRWEKDGQGRFIPQQVAGTEQVRPAQLVLLAMGFVGPESQLLDAMKLDKDARGNIKAEYGQYETSIPGVFAAGDCRRGQSLVVWAFNEGRGAAKACDLYLMGETDLP

SEQ ID NO: 4413 - DNA, 3255 bp, Caenorhabditis elegans
  CDS (1)..(3255)
atgtcgtacgacttttatgcgttttgtttgtcaattttcatattttgtaaatttttcaacatcatatttacagccatgactccaaagccaaatactactagtccaaccaataatcttcctcttctcagcaaggactccccggatatcgagagtctcctcatcttgaacccaaaagtacaagacaaggcaaatgcagttccaagtgcggtgacaaagaaaaacaagcacaactggaagagaaacgaggagaaaggatgtggatctacctgcggagaatctaagctcaagaatgacttccgagacatcaagcacactacgctcagtgagcgcggagctttgaaggaagcgatgagatgtttgaaatgcgccgacgctccttgccaaaaaagttgcccaacccaattggatgtcaaaagcttcataactagcatttcaaacaaaaactactacggagcagctcgtcaaattctttctgacaacccactgggtctgacctgtggaatgatttgcccaacatcggatctttgtgttggatcgtgtaacttgcaagcaagtgaagaaggcgctatcaacattggtggtcttcagcagtatgcttgtgacgtgttcaagcaaatgaatgttcgtcaaatcgtatcaaaggaagttcgggagaaccgcaacgcttctcataaggagcaagttgctcttatcggatgcggaccggccagtatttcatgtgcatcgtttttggctcgtttaggatatacagatattactatctatgaaaagagagcttacatcggagggctttcatctgctgaaattccacagttccgtcttccttatgacgttgttgactttgaaattcagcttgccagagacattggagtccagattgaaacaaacagacctttaggaaaagacggtctaacacttgccaaattgaaggaacaaggagctgccgctgtttttattggtatcggaaacccagaaccaaaaattgatcctctctttgaaggattgacaattgagaatggattttatactagcaaaaattatcttccagctgtcgcggctgctagcaaacctggtatgtgcggatgtaagagaactccacttccaacaatgagaggacgtgtcgttgtgctcggagcaggagatactgcaatggactgtgcaacatctgctctccgttgtggtgcatctcgtgtcaccattgctttccgcaaaggtttcactggaatccgtgctgttcctgaagagatggaagcagccaaggaagaaaaatgtgagttccttccattctcagcgccacgaaaaatcaacgtgaaggacgggcgcattgtctcgatcgaattcaacaagaccgaacaagatgacaacggcaagtggtacgaggatgaggaacagattgttatcttgaaatgcgactatgtgatttccgcatttggatccacgttgaaagaagacgcagttttgtcggctttgcaaccatgccagttgaataagtggggaggaattgaagtagattcaacaacacaacaaacttcggaaaaatgggtatttgctggaggagatgtggcaggagtcgcagaaacaaccgtcgaatctgtcaatgatggaaagattgccgcctggaatatgcatcgctacattcaatctcttcacggcaaccaggtgtccgagaccccagaacttccacaattcttcaccccaatcgacgaggttgatatctccgttgacatgtgcggcgttaaattcgaaaatccattcggactggcttctgctcctccaaccacttctggaccaatgtgtcgccgtgctttcgaacaaggatggggattcattctcaccaaaacatatggattggacaaggacttggtcaccaatgtctctccacgtattgtccgaggatctaccagtggaccactttatggaccaaaccaaggatcattcatgaatattgagcttatctcagagaaatcctgtgaatactggcttcaatgtattagggagttgaaacgtgaccatccaactaaaattgtcatcgcatcgatcatgtgcgtctataacaaggctgattggattgagcttgcaacaaagagtgaggaagctggagcagatattcttgagctcaacctctcttgtccacatggaatgggagaaaagggaatgggattggcttgtggacaaagccccgaaattgtaaaggaaatttgtagatgggttcgcgcttgtgtcaagatcccattcttcccaaaaatgactccaaatatcactgacgttcgtgagatcgccagagctgctagagacggaggcgcaagtggagtgactgcaacaaataccgtttcctcacttatgcacatgaaggctgatggaaatgcttggccagcaattggatcaacaaaaagaaccacatacggaggaatgtccgggtcggctattcgtccaatcgctatgaaggctgtctcatcaatcgctaacgaactagatggtttcccaatcatggcgaccggtggaattgaaagcgcagagactggactcggattcttgatggcaggagcttcagtcctccaagtttgctccgcagttcagaatcaagatttcacagttgtcgacgattactgtactggactcaaggcacttctttatctttctggcgctgagtcactcaaaaactgggatggacaatcgccaccaatcgaaaaacatcaaaaaggaaaacctatcttgcttcaaggacaaaagaaaatgccattcttcggaaagtacagggatgaacgtgaaaagcttgaggctattaaactgtcagaaagcaaccttttggacaccgaaaactatcactttgcttcgagaccagacactcaagtttcgcgtgtcccaactgttgaagatgtcattggaaaagccctgccacgtattggcccatatgtcacactcgacaaccaagagcagaaggttgcaattattgatgatgatatgtgcatcaattgtggaaagtgttatatgacatgcaatgattctggataccaagctatcacttttgatccagtcacccatcagccacatgttacggaagacgattgtactggatgtactctttgctacagtgtgtgcccgattccggaatgtatagaaatggtgccaagaactgggccatggaaggctccaaaacgtggtgtgaagccatcggtcgagccaggaactccaaaagtcgtcaaagttgaccaacgtggaagagttatcctagatactactggtggaatgcagtaa

SEQ ID NO: 4414 - protein, 1084 aa, Caenorhabditis elegans
MSYDFYAFCLSIFIFCKFFNIIFTAMTPKPNTTSPTNNLPLLSKDSPDIESLLILNPKVQDKANAVPSAVTKKNKHNWKRNEEKGCGSTCGESKLKNDFRDIKHTTLSERGALKEAMRCLKCADAPCQKSCPTQLDVKSFITSISNKNYYGAARQILSDNPLGLTCGMICPTSDLCVGSCNLQASEEGAINIGGLQQYACDVFKQMNVRQIVSKEVRENRNASHKEQVALIGCGPASISCASFLARLGYTDITIYEKRAYIGGLSSAEIPQFRLPYDVVDFEIQLARDIGVQIETNRPLGKDGLTLAKLKEQGAAAVFIGIGNPEPKIDPLFEGLTIENGFYTSKNYLPAVAAASKPGMCGCKRTPLPTMRGRVVVLGAGDTAMDCATSALRCGASRVTIAFRKGFTGIRAVPEEMEAAKEEKCEFLPFSAPRKINVKDGRIVSIEFNKTEQDDNGKWYEDEEQIVILKCDYVISAFGSTLKEDAVLSALQPCQLNKWGGIEVDSTTQQTSEKWVFAGGDVAGVAETTVESVNDGKIAAWNMHRYIQSLHGNQVSETPELPQFFTPIDEVDISVDMCGVKFENPFGLASAPPTTSGPMCRRAFEQGWGFILTKTYGLDKDLVTNVSPRIVRGSTSGPLYGPNQGSFMNIELISEKSCEYWLQCIRELKRDHPTKIVIASIMCVYNKADWIELATKSEEAGADILELNLSCPHGMGEKGMGLACGQSPEIVKEICRWVRACVKIPFFPKMTPNITDVREIARAARDGGASGVTATNTVSSLMHMKADGNAWPAIGSTKRTTYGGMSGSAIRPIAMKAVSSIANELDGFPIMATGGIESAETGLGFLMAGASVLQVCSAVQNQDFTVVDDYCTGLKALLYLSGAESLKNWDGQSPPIEKHQKGKPILLQGQKKMPFFGKYRDEREKLEAIKLSESNLLDTENYHFASRPDTQVSRVPTVEDVIGKALPRIGPYVTLDNQEQKVAIIDDDMCINCGKCYMTCNDSGYQAITFDPVTHQPHVTEDDCTGCTLCYSVCPIPECIEMVPRTGPWKAPKRGVKPSVEPGTPKVVKVDQRGRVILDTTGGMQ

SEQ ID NO: 4415 - DNA, 6624 bp, Caenorhabditis elegans
  CDS (1)..(6624)
atgtgctgcttttttcgacatcgtgagtcaatgcccattgctccaaattacgtcccggtatattgtatactaaaacaaaaatctcacggtttgataatggttattctaaccaaggaacagcagcaagaagccgccaacacgggactgtggctaccacaacttgaacgcgatgcgtgcggagtcggattcgtctgctccatcaagggaaccacgtccagcaaaatcatgtcggatgcccgtactatgctcgagagaatggctcatcgcggagcttgtggctgtgacaacgattcgggtgacggtgccggtgtcttgactgctatacccgatgatctctacagaaaatcggttaaggagcaggatggatctgatctcccaccattgggtcaatacgccacgggaattctatttcttgaagctgaatcgtacaagcaggcaaaggaggctttccaggatttggcccgagcttgcggtttgcgggttgttgcctggcgcaagctaggaaccaatcgtgaatgcatcggagaggaggcaaagaagacggagccactgattcgtcaagtttttgtcagtgctgactatgctgagagcgatccagctaaattcgagagaagtgtttacttgcttcgcaagcaggctgttaacagcatgaccaagcaagaaattgaatgttatgtgtgctcattgagtacctctaccatcgtttacaaaggacagttcaacactcatcagttgttcaaattttacgatgatttgaccaatccagaatatcaaacacatctggcccttgtccactcgcgtttctcgactaacactttcccaagttggaatcgtgctcaacccaacagaattttggctcataatggagaaatcaacactcttcggggaaacattaacttgatgcgtgctcgtgagggagtgatgaagagcaaatactaccgtgacgacctccagaagctgtttccgattgtggaagagggtctcaccgactctggatgtctcgacaacgtcatggagttcctggttcgcgctggtggaagatctttgccggaagcagcaatgacaatggtgccggaggcgtgggagaaggacgacgatatgtcgacggaaaagaagcacttttaccgttgggctgcaatgagcatggagccgtgggatggacctgcgcttcttgccttttcggatggaagatacattggcgccattcttgaccgcaacggacttcgacctgccagatactacttgacggatgatgatcatctatatttgagttcggaagttggcgtcaacgacattccaattgagaaagttgtcaaaaaggatcgtctcaaacccggacgcatgctccttgtggacacacatctcaaaaagatcgagctcgatgaggaccttaagacaagaattgctttgtcaagacctcataagcaactttccgcatcgagaatctacttggacttgattcgcaaggatgatgtgctctctcacggtgccgtcaccaatgaataccttaatcgtcttcatttggagcaggtgaaccctggtcttatgaagaaaaaggatgttcatctagactctgaccgtcgtctggccttgtatgcctatacccatgacactttcagcttgctcttagttccaatgatcaaggagaagaaggaagctctcgggtcaatggggaatgatgctgcgttggcttgtctgtctgattacagcccgctgttgttcagttatttccagcaactcttcgcccaggtcaccaacccaccaattgaccctttccgtgaacaaatcgtcatgtcgttgagatgcccaattggacctgagtctaacatgcttgagccagacaccgaacttgccagtcggctcatcttggagcagccagttctttcaatggttgatatggaggtcatcaaacgaactatgtacaagggatggaaagcaaaggaaattgacatcacttacccagtcaaatatggagtgaaaggactggtccctggtcttgacgccatgtgctgtgtcgcctgcactgctgcccttgatggatatcaaatcttggtattgtccgatagaaatgccagttccgaacgtgttccgatcccatcacttctcgccgtcggtgccattcatcagtgccttattcgtcatcggcttcgtatgaaggttgcgatcgttgtggaaactggagaggctcgagtcgttcacgacttctgtgtccttctgggattcggagctgacgcaatctgtccgtacatggtctacgagactatgcaccgtctgcgcaacttaggacttttggataaggaactcaatgatgatcaagtttatcaaggatatcgtcagggagtggaacgaggaatctttaaggtcatggcaaagatgggcatttctacgctccactcgtacaagcacgctcaaatcttcgagattgtgggactcgcaaaggatgttgtcgacatgtgctttaaaaacacagtctctcgtcttggtggcgccacgtttgagattctcgcggcggaagccttgaaaagacataggtcggctttccctacgacgagcgacgcgtcattcggtgactcaaaaacactggttgcaagtggaacgttccattggagagctggaggagagaagcatattaacgagccactggctattgccaaacttcaggctgccgctcgtctgaacaactccaagacattccaagagtactcactagcttcaaatatggctcaacgttggtgcactctgcgtggacaattggagatcaaaactagtaagaagattcaaatcccattgtcggaggtcgaaccagcaagcgagattgtcaagaagtttgtcactggagctatgtcatttggatctatttcctgggagactcacactgcgctcgccattgccatgaatcgcatcggtggaaaatcaaatactggtgaaggaggagagaaaccggaaagatatcgaaaggatcaggatccaaaccagaatcttcgctcggctatcaagcaagttgcgtctgctcgatttggagttacctcgtcttacttggctaacgccgacgagcttcagattaaaatggctcaaggtgcaaaaccaggagagggaggagaacttccagggcacaaggttactcaagatattgctgacacgagaaagtctacagccggagttggtctcatttcgccaccacctcatcatgatatttacagtattgaggatcttgctcagctcatctacgacttaaagtgcgctaacccggtggctcgtgtcagtgtgaaacttgtctcagaagctggagttggaatcgttgctgccggtgtggccaagggaaatgctgatcatatcaccgtttcgggacacgatggtggaactggagcttcgagttggactggtattaaacacgcaggattgccatgggagttgggagttgctgagacacatcaggtgctcacgatgaacaacctgcgttcacgcgtcgttcttcaagctgatggacaaattcgtactggacgtgacgtcatgattgctgcccttctaggagcagatgagtttggaatgtcaacagctcctcttattgttctcggatgtactatgatgagaaaatgtcacttgaacacctgcccggttggagtcgctactcaagatcctgttctccgtgcaaagtttgatggaaagccagaacacgttgtcaactatatgttcatggttgccgaagaggttcgctatttcctctccaaactcggtcttcgcaagttagaggacgcagttggaagaactgatcttctttatgcttcttctaatcctgtcaacaagaaggctactatgctcgagttcggatccattcttaagaacgcccaacaaatgttccctaacatctctatcaaaggaggaagtgtgaaacaagtgattgagctcggagctctggagacgagaatgctgactgaacttgatggtgttttcaatgatgctggagaacacaaagtatttgaaaacgagtacatcactaatattgatcgtactttcggaacgagaatttcgtatgagatttccaaacgttatggagagctcggattggaaggatcccgctcgataactattggcctcaagggacacgctggacagtcattctgtgcattcctcgctaagggagttagtgtcacgttggaaggagatgccaatgactatgttggaaaatgtctctctggtggaaaaattgtaattttcccaccgaaagctgcttcttacaaatctgaagagaattctgttattggaaatgttgccttatacggagctacttctggagactgttggtttagaggagttgctggagagagatttgctgtcagaaactcaggagctaacgtgattgtagaggcagttggagaccacggttgtgagtacatgactggtggacgtgtcatagttcttggatccataggaagaaactttgccgctgcgatgagtggaggaattgcatatctttttgcacaggaggataacttctctcgtctaatcaacgcagccaccgtcgatctcgatgatgcttccactgaagatctcatttttgttaaggcaaagattgaagagtttgtcaaacttactggatctgagcttggacagcgcattcttactaactggcaaaaggagcatcagaaaatcattaaggtgttcccgcgtgattacaaacgtgtgctcgccgagcaagaagaagctcgtaagaagcaagctgaattggataaggccaaccaggacatgagtcttctttcggtggatgatacaaagccccgtactagaactttgtcgatggacatgcaaattgcaccaacaatccgtcctcacaacaagaagcagaagactgcattgagaaagactagtttgctcggagacaagcgtaagcaacgtcgactttcaaagagtctgagaccacaggatatggctggttttgagaatgaggaggatcttcaagatgctgctgatatggaagaagaggaagagtccaagtctgatcttgaagatcactctgatgaggaggagttcgtcgagaagaaggccagcgtagatattgagtctcttggcattccagctcatcttcgtaagaaggacgagccactagacaaacttcgcggatttgttaagtacaaccgtcagaaaaaaatgtaccgtgatccaaaagagcgtctcaatgattgggacgaagtgtacgacttcgaggccgttcgcagcaacattcgtgagcaagctgctcgttgcatggactgtggagttccattctgccaaggacactcgggatgcccactcggaaacatcattccaaaatggaatgactttgtcttcaaaaagaactggcgccaagctcttgaacaacttcttcagaccaataacttcccagagtttactggaagagtatgtccagctccttgcgaaggggcgtgtactcttggaattggctcaccagcagtcactatcaagtcaattgaatgtgcaatcattgattatgctttcatgcaaggttggatgaagccatgcaagcctgcattcaacactggaaagagaattgcaatcattggatccggaccctccggactcggtgctgctgcccaattggtgaaggttggacacacggttgttgtctatgaacgcaaaaacagagttggtggacttctcagatacggaatcccaactatgaagctagacaagttcgtcgtggatcgtcgtgtatcgcttctggagcaagaaggagtacgattccttaccaacactgaaattggaaagcatgtgccagccgacttcttgcttaaggagaacgacgcaatcattgtttgcactggttccacaactgctcgtgatttgaacgttgaaggacgcgacgccaagggagtttgctttgctatggagtaccttgagaagagtcaacgccggcgtgcaggagatgatgtctcgtgggaaggacttgacccagccaacaagaaggttatcattctgggaggcggagacacggctactgactgtattgctactagcaacagacttggatgcaagactgttggtgctttcgaaattctgccacagccaggaccaaatcgtaagccggagaatccatggccagagtggccactcattttccgagtggactatggacacgaggaagcaaaagagatgactggctccgatccaagaacttactctgtttctactaagcgtttcctcacaactaccaacgccgccggtatcactgttctcactggacttgaaattgtggatgttgaatgggaaaaggatgacaagggtgcttggaagcttattgagaagaatgagactattcgcacaattgaatgcgatctctgcattctggctatgggattcgtcgggcccgaaaaatcggtaattgagcagttgaatctgaaaactgacccaagatccaacattctcactccaaaggacaaatacgattctgatgtggcaaaggtgttcgctgctggagattgtcgtcgtggacagtcactcgtggtgtgggccattcacgaaggacgtcaagctgcccgacaagttgacgagtatctaatgggcaagacaacattggcaggaccgggaggaattgtgaccgctacaattcaactgaagaatgccatttaa

SEQ ID NO: 4416 - protein, 2207 aa, Caenorhabditis elegans
MCCFFRHRESMPIAPNYVPVYCILKQKSHGLIMVILTKEQQQEAANTGLWLPQLERDACGVGFVCSIKGTTSSKIMSDARTMLERMAHRGACGCDNDSGDGAGVLTAIPDDLYRKSVKEQDGSDLPPLGQYATGILFLEAESYKQAKEAFQDLARACGLRVVAWRKLGTNRECIGEEAKKTEPLIRQVFVSADYAESDPAKFERSVYLLRKQAVNSMTKQEIECYVCSLSTSTIVYKGQFNTHQLFKFYDDLTNPEYQTHLALVHSRFSTNTFPSWNRAQPNRILAHNGEINTLRGNINLMRAREGVMKSKYYRDDLQKLFPIVEEGLTDSGCLDNVMEFLVRAGGRSLPEAAMTMVPEAWEKDDDMSTEKKHFYRWAAMSMEPWDGPALLAFSDGRYIGAILDRNGLRPARYYLTDDDHLYLSSEVGVNDIPIEKVVKKDRLKPGRMLLVDTHLKKIELDEDLKTRIALSRPHKQLSASRIYLDLIRKDDVLSHGAVTNEYLNRLHLEQVNPGLMKKKDVHLDSDRRLALYAYTHDTFSLLLVPMIKEKKEALGSMGNDAALACLSDYSPLLFSYFQQLFAQVTNPPIDPFREQIVMSLRCPIGPESNMLEPDTELASRLILEQPVLSMVDMEVIKRTMYKGWKAKEIDITYPVKYGVKGLVPGLDAMCCVACTAALDGYQILVLSDRNASSERVPIPSLLAVGAIHQCLIRHRLRMKVAIVVETGEARVVHDFCVLLGFGADAICPYMVYETMHRLRNLGLLDKELNDDQVYQGYRQGVERGIFKVMAKMGISTLHSYKHAQIFEIVGLAKDVVDMCFKNTVSRLGGATFEILAAEALKRHRSAFPTTSDASFGDSKTLVASGTFHWRAGGEKHINEPLAIAKLQAAARLNNSKTFQEYSLASNMAQRWCTLRGQLEIKTSKKIQIPLSEVEPASEIVKKFVTGAMSFGSISWETHTALAIAMNRIGGKSNTGEGGEKPERYRKDQDPNQNLRSAIKQVASARFGVTSSYLANADELQIKMAQGAKPGEGGELPGHKVTQDIADTRKSTAGVGLISPPPHHDIYSIEDLAQLIYDLKCANPVARVSVKLVSEAGVGIVAAGVAKGNADHITVSGHDGGTGASSWTGIKHAGLPWELGVAETHQVLTMNNLRSRVVLQADGQIRTGRDVMIAALLGADEFGMSTAPLIVLGCTMMRKCHLNTCPVGVATQDPVLRAKFDGKPEHVVNYMFMVAEEVRYFLSKLGLRKLEDAVGRTDLLYASSNPVNKKATMLEFGSILKNAQQMFPNISIKGGSVKQVIELGALETRMLTELDGVFNDAGEHKVFENEYITNIDRTFGTRISYEISKRYGELGLEGSRSITIGLKGHAGQSFCAFLAKGVSVTLEGDANDYVGKCLSGGKIVIFPPKAASYKSEENSVIGNVALYGATSGDCWFRGVAGERFAVRNSGANVIVEAVGDHGCEYMTGGRVIVLGSIGRNFAAAMSGGIAYLFAQEDNFSRLINAATVDLDDASTEDLIFVKAKIEEFVKLTGSELGQRILTNWQKEHQKIIKVFPRDYKRVLAEQEEARKKQAELDKANQDMSLLSVDDTKPRTRTLSMDMQIAPTIRPHNKKQKTALRKTSLLGDKRKQRRLSKSLRPQDMAGFENEEDLQDAADMEEEEESKSDLEDHSDEEEFVEKKASVDIESLGIPAHLRKKDEPLDKLRGFVKYNRQKKMYRDPKERLNDWDEVYDFEAVRSNIREQAARCMDCGVPFCQGHSGCPLGNIIPKWNDFVFKKNWRQALEQLLQTNNFPEFTGRVCPAPCEGACTLGIGSPAVTIKSIECAIIDYAFMQGWMKPCKPAFNTGKRIAIIGSGPSGLGAAAQLVKVGHTVVVYERKNRVGGLLRYGIPTMKLDKFVVDRRVSLLEQEGVRFLTNTEIGKHVPADFLLKENDAIIVCTGSTTARDLNVEGRDAKGVCFAMEYLEKSQRRRAGDDVSWEGLDPANKKVIILGGGDTATDCIATSNRLGCKTVGAFEILPQPGPNRKPENPWPEWPLIFRVDYGHEEAKEMTGSDPRTYSVSTKRFLTTTNAAGITVLTGLEIVDVEWEKDDKGAWKLIEKNETIRTIECDLCILAMGFVGPEKSVIEQLNLKTDPRSNILTPKDKYDSDVAKVFAAGDCRRGQSLVVWAIHEGRQAARQVDEYLMGKTTLAGPGGIVTATIQLKNAI

SEQ ID NO: 4417 - DNA, 6351 bp, Neurospora crassa
  CDS (1)..(6351)
atgggcgctatcgaggatttcgacgaccgacaagtgcatcttgaaacagagaaagagcagtatcatccctatgaataccaaacagagaataactcttcgtgggctggcgccttgccggtgaagcagggactgtacgatcccgagctcgaaaaggatgcctgtggtgtaggttttgcttgccatatcaagggcaagcccagtcacaagattgtcagcgatgcacgaaacctgctctgcaacatgacccatcgtggtgccgtgggctctgacgcacgcgatggcgatggtgcgggtgtcatgacatcgatcccccacaagttcttcgtgaagaacttcgcgcgcgatgtgggagttacgcttcctccactcggccagtatgctgtgggaaacttgttcttcaaacccgatccagagacactgcaggagtcgaagcggcagttggaagagattgccgagtcgttgggcttgagagttctaggatggcgagagcctcccgtggattcgactttgcttggccctgctgctctttcccgagagccttccattctgcagcctttcgttgtgctagcgtctgcttacgggcccggcaatgaaccagaaacaaccgatcccgagaagtttgacgagaggctgtttgagcggcagctctatgtcctccggaagagagctacacacacgattgggctgcagaactggttctacatctgctccctttccaacaagaacattgtctacaagggtcagctggcgccgattcaggtttaccaatactacaatgatttggtgaactatgactatgaggctcactttgccttggtgcattcgcgtttctccaccaacaccttcccctcttgggatcgtgcccagcctctccgatgggctgctcacaacggtgaaataaacacccttcgcggcaacaagaattggatgcgtgcccgtgagggagtcatgcagtctgatgtctttggagatgagctggaacttctctaccctattgttgaggctggcggttccgactctgctgccttcgataacgtgttggagctcctcaccatcaacggcgttctctctcttcccgaggccgtgatgctgatggtgcccgaggcttggcaaggaaaccagagcatggatcccaagaaggccgccttctatgagtgggcagcttgccaaatggagccctgggatggccctgcgctctttacgttcgctgatggtcgtttttgcggtgccaacttggatcgtaacggtctcagaccttgccgttattatgtgatggacgacgatcgcattatctgcgcgtctgaggtcggcactatccccgttgagcccgagaagatcattcagaagggccgtctccaacctggccgcatgcttctcgttgatactcgcgccggtcgcatcattgatgattccgagttgaaggctgctgtctctagccgggaggacttcaggtcatggctcgacaacgaactcatcaccatgcctcaggtgctcgagacgctttccgggagccagagcattgagcttgctgccaagcctgataacaccaagatccaggaggaccccctgttgcacgcttttggatacacctttgagcaggtgagcttgctgcttggccccatggcctcggatgaaaaggaggctcttggttccatgggcaacgatgctccgcttgcctgtctgtccgatgctcccaagttgctgtacgaatatttccgtcagctgttcgctcaggtcaccaacccgcccatcgatcccatcagagagtcgattgtcatgtctcttgaatgctacgttggtccccagggcaaccttctcgaaatggactcgtcccaatgtggaagactcctgcttcctagccccatcctctccattcctgagttcaatgcacttaagaacatgtctactatccatcccgagtggactgtcaagaccattgacttgacattccccaagaaggaaggcattgagggctacattagacaccttgactatatttgtatggaggctactgccgctattgaagctagtgatcgtatcattgtgctgtctgaccgcaacacctccaaggaccgtgtcgctgtttctgctctcctcgctggtggcatggttcaccatcaccttgtcagcaacaagtggcgtgcaatggcagccattgtcgctgagacggccgaggctcgtgaggttcaccacatgtgcgtcctccttggctacggtgttgacgccatcaatccctaccttgccatggagtgcatcatcaagctcaacaaggagaagcttatcaagaagaagctgactgatgatgagctgatctacaactacaagcactcctgtgatggtggtatcctcaaggtcatgagcaagatgggtatctctaccttggccagttacaaaggtgcccagatctttgaggccttgggtgtcgatgacagcgtggttgagcgctgcttcaaaggtactgcctcccgtatcaagggtattacttttgaacttatcgctgaggatgccttccgtttgcacgagcgcggtttcccgtcgcgttataccgttgctgttcctggacttcccgagtctggtgagtaccactggcgtgacaatggcgaggcacatgtcaacgatcctacttctattgcaaacatccaggatgccgtccgtaccaagaacgacaagtcttacgaggcctactcactctccgagtacgagcagatcaaatcctgcacgcttcgtggtatgcttgacttcaattttgaagactgctctcctatccctattgaccaggttgagccttggaccgagattgttcgccgattctgcactggtgctatgtcgtatggttctatctccctcgaatctcactctaccctggccgttgccatgaacaggcttggtggcaagtccaacaccggtgaaggtggtgaggatcctgaacggtcccaaagactaccgaacggcgataccatgcgctcagccatcaaacaggtggcctcgggtcgctttggtgttacatctgcttatctggccgactctgacgaacttcagatcaagatggcacagggtgccaagcctggtgagggtggtgagcttcctggccacaaggtttccaagtccattgcccgcactcgtcactctacccctggcgtcggcctcatctcgccacctcctcatcacgatatctactcgattgaagacttgaagcagctcatttatgaccttaagtgctcgagtcctcgttctcgcgtttccgtcaagcttgtgtctgagactggtgttggtatcgtcgcctcgggtgtcgctaaggctaaggcagaccacattctcatctctggtcatgacggtggcactggtgcctctcgctggactggtatcaagtacgccggtctcccctgggagttgggtcttgctgaaactcatcagaccttggtgcttaacgacctgcgtgggcgcgttgttgttcagactgatggtcagcttcgtaccggccgtgatgtcgccattgcttgcttgctgggcgctgaagaatgggggttcgcgaccactcctctcattgccatgggctgcatcatgatgcgcaagtgccatttgaatacctgccctgttggtattgccactcaggaccctgaacttcgcaagaagttcactggtacgcctgagcatgtgatcaacttcttctactacgtagcgaacgagctccgtgctatcatggccaggcttggtttccgcaccatcaatgagatggttggtcatgttgaggtgctcaaggttcgtgaggatctcaggaccaagaagacctccaacattgacctatctctcatcttgactcccgcccataaactccgtcccggggtggcaactttcaatgtccgcaagcaggatcacaagctttacgttcgcttggacaacaagcttattactgaggctgagttgacccttgataagggactgccttcacgtattgagtgtgatatcgttaacactgaccgcgccatgggcacttcactgtcctaccaaatttccaaacgatatggcgagaagggactgcccgatgacactgtccatgtcaatattaagggttctgcgggccagtccttcggtgctttccttgctccgggtgtcacactcgaattggagggcgatgccaacgattacgttggcaagggtttgtccggtggtagactgattgtctacccccctcgctccgctgtattcaaggctgaggagaacattatcgttggtaacgtgtgcttgtacggagccactagcggtacctgcttcttccgcggcgttgcagctgagcgtttcgctgtacgcaactctggtgccaccgccgttgtcgagggtgttggtgatcacggctgcgagtacatgacgggtggtcgggtcgtgatcctgggaagtactggccgtaactttgctgctggtatgtctggtggaatcgcctacatcttggatattcagggcgacttcttgaccaagctcaacaccgagatggttgaagccagcactcttgaggaggcggagcctgaagagatcgcattcatccgcagtctcgttgaggatcatcaccactacactggttccgagcttgctgctcgtattctggttgacttttcccgtgccctcaagcgcttcatcaaggtgctacccgtcgactacaagcgcgtactggaggaggagaaggccaaggctgtcaagcaggccgccgagaccaagcgggctgagtacagccttcctgcggctgcgagaaaggagaaggatcctcatgcgcccaagcttcaggatattgaggagagcattaccgataacgctatcagcaagaagaaggcccttgtattggacaagacgcgcggttttatgaagtatcagcgtcgtgctgagaagtaccggaagcccgcgactcgtgtcaaggattgggctgaactgtctcagcgtcttgatgaggacgaactcaagtaccagtctgcccgttgcatggactgcggtgttcccttctgccaatccgatagcggctgcccaatttccaacattatccccaagtggaatgagctggtcttccagggtcagtggcgagatgcattgaaccgcctgttaatgaccaacaacttccccgagtttactggtcgcgtttgccctgctccttgcgagggtgcttgcgtcttgggcatcaacgagcagcctgttggaatcaagtcgatcgagtgcgccatcattgaccgtggtttcgagatgggatggatggtaccggagccccctaagattcgcacaggcaagaacgttgccatcatcggatctggtcccgctggtctcgctgccgccgaccagctgaacaaggctggtcacaacgttactgtgtatgagcgcgccgaccgtcttggtggtctgctcatgtatggcattcccaacatgaaattggacaagcgcatcgtcaagagacgtactgatttcatggctgctgagggtgtccagttcaagactggcgttgcgattggcgaggatataacactcgtggatctcaagaagcaaaatgatgctgtcatcattgctaccggtgctactgtcgcccgcgaccttcctatcaagaaccgcaatcttgagggcattcatttcgctatggagttcctgcacaagaacaccaagtctcttcttgattccgaactggccgacggttcctacatctctgccaaggataagcatgtcattgttattggtggtggtgataccggtaacgactgcattggtacctctgtccgccacggtgccaagtcggtcatcaactttgagcttctccccaagcctcccccggctcgcggccgcgacaacccgtggccgcagtggccccgcgtgtaccgcgtggactacggccacgatgaggtcaagcaacacacgggcaaggatcctcgtgaatactgcatcatgtcggaggagtttgtcgatgacggcaacggaaaggtgaggggcatcaacacgatccgcgtggagtggaccaagtctgccagcggcggttgggacatgaagaagatcgagggctcgcagcagttcttccctgccgatcttgtcctgctgtccatgggctttttgggacctgaggctcgtgtgctcggcgatgaaatcgagaaggatcctcgcaagaacgtaaagactcctcccggcaagtatagcaccaacgtcgagggcgtgttcgctgccggtgattgccgtcggggacagtcgctcatcgtctggggtatcaacgaaggtcgccaggctgctcgcgaggtggatctctacctcgagaagagcacatgtttgcctgttactggcggtatcgtcaagcgcaccgctgaggaggtgttcgccgctgccgccgcagcttaa

SEQ ID NO: 4418 - protein, 2116 aa, Neurospora crassa
MGAIEDFDDRQVHLETEKEQYHPYEYQTENNSSWAGALPVKQGLYDPELEKDACGVGFACHIKGKPSHKIVSDARNLLCNMTHRGAVGSDARDGDGAGVMTSIPHKFFVKNFARDVGVTLPPLGQYAVGNLFFKPDPETLQESKRQLEEIAESLGLRVLGWREPPVDSTLLGPAALSREPSILQPFVVLASAYGPGNEPETTDPEKFDERLFERQLYVLRKRATHTIGLQNWFYICSLSNKNIVYKGQLAPIQVYQYYNDLVNYDYEAHFALVHSRFSTNTFPSWDRAQPLRWAAHNGEINTLRGNKNWMRAREGVMQSDVFGDELELLYPIVEAGGSDSAAFDNVLELLTINGVLSLPEAVMLMVPEAWQGNQSMDPKKAAFYEWAACQMEPWDGPALFTFADGRFCGANLDRNGLRPCRYYVMDDDRIICASEVGTIPVEPEKIIQKGRLQPGRMLLVDTRAGRIIDDSELKAAVSSREDFRSWLDNELITMPQVLETLSGSQSIELAAKPDNTKIQEDPLLHAFGYTFEQVSLLLGPMASDEKEALGSMGNDAPLACLSDAPKLLYEYFRQLFAQVTNPPIDPIRESIVMSLECYVGPQGNLLEMDSSQCGRLLLPSPILSIPEFNALKNMSTIHPEWTVKTIDLTFPKKEGIEGYIRHLDYICMEATAAIEASDRIIVLSDRNTSKDRVAVSALLAGGMVHHHLVSNKWRAMAAIVAETAEAREVHHMCVLLGYGVDAINPYLAMECIIKLNKEKLIKKKLTDDELIYNYKHSCDGGILKVMSKMGISTLASYKGAQIFEALGVDDSVVERCFKGTASRIKGITFELIAEDAFRLHERGFPSRYTVAVPGLPESGEYHWRDNGEAHVNDPTSIANIQDAVRTKNDKSYEAYSLSEYEQIKSCTLRGMLDFNFEDCSPIPIDQVEPWTEIVRRFCTGAMSYGSISLESHSTLAVAMNRLGGKSNTGEGGEDPERSQRLPNGDTMRSAIKQVASGRFGVTSAYLADSDELQIKMAQGAKPGEGGELPGHKVSKSIARTRHSTPGVGLISPPPHHDIYSIEDLKQLIYDLKCSSPRSRVSVKLVSETGVGIVASGVAKAKADHILISGHDGGTGASRWTGIKYAGLPWELGLAETHQTLVLNDLRGRVVVQTDGQLRTGRDVAIACLLGAEEWGFATTPLIAMGCIMMRKCHLNTCPVGIATQDPELRKKFTGTPEHVINFFYYVANELRAIMARLGFRTINEMVGHVEVLKVREDLRTKKTSNIDLSLILTPAHKLRPGVATFNVRKQDHKLYVRLDNKLITEAELTLDKGLPSRIECDIVNTDRAMGTSLSYQISKRYGEKGLPDDTVHVNIKGSAGQSFGAFLAPGVTLELEGDANDYVGKGLSGGRLIVYPPRSAVFKAEENIIVGNVCLYGATSGTCFFRGVAAERFAVRNSGATAVVEGVGDHGCEYMTGGRVVILGSTGRNFAAGMSGGIAYILDIQGDFLTKLNTEMVEASTLEEAEPEEIAFIRSLVEDHHHYTGSELAARILVDFSRALKRFIKVLPVDYKRVLEEEKAKAVKQAAETKRAEYSLPAAARKEKDPHAPKLQDIEESITDNAISKKKALVLDKTRGFMKYQRRAEKYRKPATRVKDWAELSQRLDEDELKYQSARCMDCGVPFCQSDSGCPISNIIPKWNELVFQGQWRDALNRLLMTNNFPEFTGRVCPAPCEGACVLGINEQPVGIKSIECAIIDRGFEMGWMVPEPPKIRTGKNVAIIGSGPAGLAAADQLNKAGHNVTVYERADRLGGLLMYGIPNMKLDKRIVKRRTDFMAAEGVQFKTGVAIGEDITLVDLKKQNDAVIIATGATVARDLPIKNRNLEGIHFAMEFLHKNTKSLLDSELADGSYISAKDKHVIVIGGGDTGNDCIGTSVRHGAKSVINFELLPKPPPARGRDNPWPQWPRVYRVDYGHDEVKQHTGKDPREYCIMSEEFVDDGNGKVRGINTIRVEWTKSASGGWDMKKIEGSQQFFPADLVLLSMGFLGPEARVLGDEIEKDPRKNVKTPPGKYSTNVEGVFAAGDCRRGQSLIVWGINEGRQAAREVDLYLEKSTCLPVTGGIVKRTAEEVFAAAAAA

SEQ ID NO: 4419 - DNA, 2387 bp, Rhodobacter sphaeroides
  CDS (587)..(1828)
gtcgaccggatggcgccggagccccgctatgacgatgcgatggacctgccgctgaacgtggcgctgaagatcggcttcatccagtgtctcgccatggtgccgggcgtgtcccgctcgggcgcgaccatcgtcggcgggctgatgctgggcgcgggcaagcgcgcggcggcggagttctccttcttcctctccatgcccaccatggccggcgccttcgccttcgacctcttcaagaatcgcgacgtgctggacgcttcggctctgggcgagattgcggtaggcttcgtggcagccttcgttgcggcggttctcgtggtgcgctggctgctcggctatgtgagccggcatggctacgcgctgttcggctggtggcgaatcgcagtgggatcggtggctctggcggcattgctggcaggctactgagaggttgggtcagtttagatgacctaaaatctgcggaaattggcggcgaccgggccgcgtcagcgaaaaatcgacaaataggtcagccttgctgacttttatgcccgccggacctggagtaacacgaccgcaccccgcagtcggcctcgagggaggcgtaagcatggcaaaagaaccgatgctccagttcgtcaagatggcgagggagacccccgagaaacgtccgcgttcgctgcgttctcaggactttcacgagatctgcggccggatctgcccgcaggaccgtctctgcgaggggaactgcgtgatcgagcagtcgggccacggcaccgtcaccatcggcgccgtcgagaaatacatcaccgacaccgcttgggaaaacggctgggtcgtgcccggcaagcccgcctacgagcggtcggagtcggtcggcatcatcggcgcgggtccgggcggcctcgccgcggccgacgcgctgcgccgcgcgggccttcaggtcacggtctacgaccgctacgaccgcgcgggcggcctgctgacctacggcatccccggcttcaagctcgagaaggacgtggtcgcgcgccgcgtcgagcagctcgagcaggcgggcgtccagttcgtgctgaactgcaacgtgggcgaggatctgagcttcgatgcgatccgcggccagcacgatgcggtgctgatcgcgaccggcgtctacaagcagcgcgacctcgcggcccccggtgtgggctcggcaggcgtggtgcaggcgctgtcctacctcaccgcctcgaaccgccgcagcttcggcgacgaggtggacgatgacggtctcgatgccagcggcaagcgcgtcgtggtgatcggcggcggcgacacggccatggactgcgtccgcaccgcgatccggcagggcgccaccagcgtgaagtgtctctaccgtcgcgaccgggccaacatgccggggtcgcagcgcgaggtggccaatgccgaggaggagggcgtggagttcgtctggctctcggcgccgcgcggcttcattgcgggcgatgcggtcgagggcgtgatcgtgcagaagatgcggctcggcgagccggatgcgacagggcggcagatgcccgagatcatcgagggcgccgactatgtcgaacctgccgatctcgcgatcatggcgctcgggttcgagcccgaggacctgccgacactctggggcgtgcccgacctgaccgtgacccgctggggcacgatcaaggccgacttccgcacccatgccacgagccttcccggcgtctatgccgtgggcgacatcgtgcggggcgcgagcctcgtcgtctgggcgatccgcgacggccgcgatgcggcgcagtcgatcctcgactatctggcgcaaccggccgtcgtcgcggccgaatagcgcctctgcgggatgcgaccgcccggaaggtcccgggcggccggtgcgggccgggcctctggagaggcgggcgcgaggtgatgggaccatgggcatgactcttctgacgaagatcctggcgggagggctcgcgctgatcgcggccgcccccgctttcggctcggggcagaccttcacgccgcccgagggctgcaccgcctttctcaccgtgcagtcgcgcggctgccgcgtgtcgcaccactaccgctgcgacaaggatcctgcgggcgacaagtggcgcgtggatttcgatcaggagggcatcttcttctcctcccacatcgaccgcgaggcgcagtgggtcgagagctacgagatgtttccgaccgtgcggcaggcgctcgacccggacccggccgacccggcctccttcaccgagcttctgagcggggcggacagctatgatttcggcctgacccgcagcacgggcgagcggagccgcgtgaccggctacgaccggctgaccggccgaagcttcaccatcgacgggattgtgcttcaggagaccgagttcgaattc

SEQ ID NO: 4420 - protein, 413 aa, Rhodobacter sphaeroides
MAKEPMLQFVKMARETPEKRPRSLRSQDFHEICGRICPQDRLCEGNCVIEQSGHGTVTIGAVEKYITDTAWENGWVVPGKPAYERSESVGIIGAGPGGLAAADALRRAGLQVTVYDRYDRAGGLLTYGIPGFKLEKDVVARRVEQLEQAGVQFVLNCNVGEDLSFDAIRGQHDAVLIATGVYKQRDLAAPGVGSAGVVQALSYLTASNRRSFGDEVDDDGLDASGKRVVVIGGGDTAMDCVRTAIRQGATSVKCLYRRDRANMPGSQREVANAEEEGVEFVWLSAPRGFIAGDAVEGVIVQKMRLGEPDATGRQMPEIIEGADYVEPADLAIMALGFEPEDLPTLWGVPDLTVTRWGTIKADFRTHATSLPGVYAVGDIVRGASLVVWAIRDGRDAAQSILDYLAQPAVVAAE

SEQ ID NO: 4421 - DNA, 1800 bp, Pyrococcus sp
  CDS (144)..(1589)
gcctgcatcgacgggcctgggttcgacgcctataaggtcgactgggacgagctgatacacaggacgggtttctacgccccgcttgagaggctcgcccttgagcactatctaaagcaactccaggcccagggaggtgagcagtgatgccgagaaggaagctcatcaaggagagggttccgacccccgagaggcccccggaggagaggattaaggacttcaaggaagtaaacctcggctacaccttcgaactggccgttaaggaagccgagcgctgtctgcagtgcccctacgagtatgcaccctgtatcaagggctgtccggttcacatcaacattcctggattcataagcaagctcgttgagtaccgcgacgatcctgacaaggccgttaaggaagccctcaacgtcatctgggcctgcaactcactcccagctacgaccggtcgtgtctgcccgcaggaagaccagtgtgaaatgaactgtgtcatgggcaaggtcggcgacaagataaacatcggcaagcttgagcgctttgttgctgactacgcccgcgagaagggcattgatgaggagcttctctttgagataatcccgaagatcgagaagaagggccagaaggtcgctatcatcggagctgggccagctggcctcaccgccgccggagagctggcgaagctcggctacgatgttaccatctacgaggccctccacgagcccggaggagtcctgatgtacggtatccccgagttcagacttccgaaggagattgtgaacaaggagattgagaagctcagaaagctcggcgtcaagatactcaccgaccacgttgttggcaggacagttaccatcgaagagctcctccaagagtacgatgctgtcttcattggttccggtgctggaactccgaggctaatcaacgccccgggaatcaacctcaacggaatctacaccgccaacgagttcctcacgagggtcaacctcatgaaggcctatctcttccctgaatacgacacaccggtttacgttggcaagaaggtcatcgttatcggcgctggaaacaccgcaatggacgccgctaggagcgccaggcgcttcggtgcagaggtgaccatagcctaccgccgcggtgaggaggacgtctcggccagggaggaagaggtcgagcacgccaaggaggagggcatcaagttcgtctacttcgtcaacccggtcgagttcataggcgacgagaatggcagggtcaaggcagtcaagttcgagaagatgaaggctctcgatgagagggacgccaggggcaagaggaagatagtcggtaccggcgagtacgtaaccctcgaagcggacaccgtcattatcgccattggaaagcacccgaacaggctcatcatcaacacacctggcctcaaggtcgagcgcggaaagatcgtcgttgatgagaacctcatgaccagcattccgggcgttttcgccggtggagatgccataaggggagaggcaaccgtcatcctggcgatgggtgatgggaggaaggccgcgaaggccatccacgagtacctcacgaagaagaggcaggaaaaggcgaacgcctgatttcttttcttcccctttgtggtaccgtatgctttttatgtctggaaaacctggcggtgaaaagacttataatgtcctattttgggagctattgagtgataccatggcatctgtttcagctgttataaggaatttccggccgcttgagggccgggcatacatcggtctcattggtctggcgatactgatgaatgcaaagtgggttagtcgt

SEQ ID NO: 4422 - protein, 481 aa, Pyrococcus sp
MPRRKLIKERVPTPERPPEERIKDFKEVNLGYTFELAVKEAERCLQCPYEYAPCIKGCPVHINIPGFISKLVEYRDDPDKAVKEALNVIWACNSLPATTGRVCPQEDQCEMNCVMGKVGDKINIGKLERFVADYAREKGIDEELLFEIIPKIEKKGQKVAIIGAGPAGLTAAGELAKLGYDVTIYEALHEPGGVLMYGIPEFRLPKEIVNKEIEKLRKLGVKILTDHVVGRTVTIEELLQEYDAVFIGSGAGTPRLINAPGINLNGIYTANEFLTRVNLMKAYLFPEYDTPVYVGKKVIVIGAGNTAMDAARSARRFGAEVTIAYRRGEEDVSAREEEVEHAKEEGIKFVYFVNPVEFIGDENGRVKAVKFEKMKALDERDARGKRKIVGTGEYVTLEADTVIIAIGKHPNRLIINTPGLKVERGKIVVDENLMTSIPGVFAGGDAIRGEATVILAMGDGRKAAKAIHEYLTKKRQEKANA

SEQ ID NO: 4423 - DNA, 1332 bp, Rhodobacter capsulatus
  CDS (1)..(1332)
atgaccacaagccagtttcgacccggggtgcaccccgggcgtcttccgcccgaggggtattgcacggcctttgccgatgtggcgccgcctttgacggcgcatcaggcgcaggtggccgccgcgcgctgctatttctgcgccgaggcgccctgcaccacggcctgcccgtccgacatcgacgtgccgctgttcatccggcagatcctgaccggcacgccggaggccgcggcaaggacgatcctgtcgcagaatatcatgggcggcatgtgcgcccgggtctgcccgaccgaaaccctgtgcgagggcgcctgcgtgcgcgaggccgccgagggcatgccggtcgagatcggcgcgctgcagcgctttgccaccgaccggctgcaggccgcgggcgtgcatcccttcacgcgcgcgccgcgcacggaaaagtctgtcgccgtggtgggggcggggcctgcgggtctggcctgcgcgcatcggctggcgatgctgggccatgaggtcaccgtttatgacgcgcggctgaaaccgggcgggctgaatgaatatggcattgccgcctacaaggcgccgggcggctttgcggccagggaagtggcctggcttttgcagatcggcggcatcgcggtgctggaaaactggaaactcggccgcaacggttcggtggcggatctgctggccgagcatgacgcggtgtttctgggcatggggctggcgggcgtgaatgcgctgaccattcccggcgccgaacatgccacccccgcgaccgagttcatcgcgcatctgcgtcaggccggggatctggcgacggtgccggtggggcggcgcgtcgtggtgatcggcggcggcatgaccgcggtcgatgcggcggtgcaggcgaaacttctgggcgcggagacggccagcatcgtctatcgccgttcgcaagccgagatgcccgcctcggcgcatgaacaggagcatgcgcaaaagaacggcgtgcggatcgtgccgaatgcggcgcccgtggcgatccgcaaggacgatcagggctatgaggtcgaattcgcccgcaccgagacccagggcggcaagctggtgcagctggacgacaccttgcgcatcaaggccgaccagatcttcaccgcgatcggccagacgcttgggccggtgcccgaggggctgacgatcaccggcggcaagatcgagatcgacgcgcaggggcgcaccgggatggcgcatgtctgggcgggcggcgattgcgccacaggcggcgaagatctgacggtgaccgccgtcgcgcagggccgcgatgcggccgaagacatccacgcttttctgatgggggcctga

SEQ ID NO: 4424 - protein, 443 aa, Rhodobacter capsulatus
MTTSQFRPGVHPGRLPPEGYCTAFADVAPPLTAHQAQVAAARCYFCAEAPCTTACPSDIDVPLFIRQILTGTPEAAARTILSQNIMGGMCARVCPTETLCEGACVREAAEGMPVEIGALQRFATDRLQAAGVHPFTRAPRTEKSVAVVGAGPAGLACAHRLAMLGHEVTVYDARLKPGGLNEYGIAAYKAPGGFAAREVAWLLQIGGIAVLENWKLGRNGSVADLLAEHDAVFLGMGLAGVNALTIPGAEHATPATEFIAHLRQAGDLATVPVGRRVVVIGGGMTAVDAAVQAKLLGAETASIVYRRSQAEMPASAHEQEHAQKNGVRIVPNAAPVAIRKDDQGYEVEFARTETQGGKLVQLDDTLRIKADQIFTAIGQTLGPVPEGLTITGGKIEIDAQGRTGMAHVWAGGDCATGGEDLTVTAVAQGRDAAEDIHAFLMGA

SEQ ID NO: 4425 - DNA, 4358 bp, Rattus norvegicus
  CDS (59)..(3136)
aattcccgcagtggagggagggtcagtgtgcgggagactgaggccagaaagcgttgccatggcgggtgtgctgagcagggacgcgccggacatcgagagtatcctggctttaaatcctcgaatacaagctcatgcgactcttcgttccaccatggccaagaaactagacaagaaacattggaaaaggaacactgataagaactgctttatctgtgagaagctggagaataattttgatgacatcaagcacacgactcttggtgagcgaggggctctccgagaagcagtgagatgcttgaaatgtgcagatgctccctgccagaagagttgtcccacgtctcttgacattaagtcattcatcacaagtatcgccaacaagaactactatggtgcagctaagctgattttttccgataatcctcttggtcttacttgcggaatggtttgtccaacatctgacctctgtgtcggaggatgcaacttacatgctactgaagaggggccaattaatattggtggactgcagcagtttgctaccgaggtgttcaaagcgatgaacatcccacagatcagaagcccgttgctgcctcctccggaacatatgccggaagcttactcagcaaaaattgcgctgtttggagctgggcctgcgagtataagctgtgcctcctttctggctcgactgggctattccgacatcaccatatttgaaaagcaagaatacgttggtggcttaagcacttctgaaatccctcagtttcggctcccatatgatgtcgtgaattttgagattgagctcatgaaggaccttggtgtcaagataatttgtggtaaaagcatttccacagatgaaatgactcttagtactttgaaagaaaatggctacaaagctgcttttattggaataggtttgccagaacccaaaaaggaccatattttccaaggcttgacacaagtccagggattttacacatccaaagactttttgccacttgtcgccaaaggtagcaaaccaggaatgtgcgcctgtcactctccattgccatccgtgaggggagccgtgattgtactcggagctggggacactgcgtttgactgtgcaacatccgctctgcgctgcggagcacgtcgcgtgttcatcgtcttcagaaagggctttgctaatattcgagctgttccagaggagatggagcttgctaaggaagagaaatgtgaatttttgcctttcctttccccacggaaggttatagtcaaagatggaaagattgtaggaatgcagtttgttcgaactgagcaggatgaaaccggaaactgggtcgaagatgaagagcagatagtgcgtttgaaggctgatgtggttattagcccctttggatctgtcttggatgatcccaaagtgatagaagcattgagtcccatcaagtttaacagatggggtctccctgaagtaaacccagaaaccatgcaaaccagtgagccatgggtatttgcaggtggtgatgttgtgggtatggctaacaccacagtggaatctgtcaacgatggaaaacaggcttcatggtacattcacgagtacatacaggcacaatatggagccttggtgccttcccagcctacactgcccctgttttacactcctgttgacctcgtggacatcagtgtggaaatggcagggttgaggttccccaatccctttggccttgccagtgcgacaccagccactagcacaccaatgattcgaagggcctttgaagcaggatggggttttgctttgaccaaaactttctctcttgataaggacatcgtgacaaacgtctcacccagaatcatccgagggaccacttctggccccttgtatggccctggacaaagctctttcctcaacattgagctcatcagtgagaaaacagctgcatattggtgtcacagtgtcaccgaactaaaggctgacttcccggacaacatcctgatcgccagcatcatgtgcagttacaacaaaaatgactggatggaactctccaaaatggctgaggcttctggagcagatgccctggagttaaatttatcctgtccacatggcatgggggagagaggaatgggtctggcttgtgggcaggatccagagctggtgaggaacatctgtcgctgggtgagacaatctgttcgggttccattttttgccaagttgaccccaaatgtcactgatattgtaagcatcgcaagagcagcaaaggaaggtggtgcagatggcgttacagccaccaacactgtctcaggcctgatgggactgaaagctgatggttcaccctggccttcggtgggcagtggaaagaggactacatatggaggagtatcaggaactaccatcaggcctattgctttgagagctgtgaccgccattgcccgcgctttgcctgggtttcctatactggccacaggtggaattgactcagctgaaagtggacttcagtttcttcatagtggtgcttcagttctccaggtatgcagtgctattcagaatcaggacttcactgtgattgaagattactgcactggcctcaaagctctgctttatctgaagagtattgaagagttatcagactgggatgggcagagtccacccactatgagtcatcagaaagggaaaccagttccacacattgctgagctcatgggacagaaacttccaagctttggaccgtaccttgaacggcgcaagaaaatcctagcagcaagtaaaatcagagagaatgatcaaaacagagcttgctcacctctccagagaaagcactttaactcccaaaagccgattcctgccatcaaggatgtaattggaaaatcactgcaatacctggggacgtttggtgagctgaacatcatggagcaagttgtggccctgatcgatgaggaaatgtgtatcaattgcggcaaatgttacatgacctgtaatgactctggctaccaggctatacagttcgatccagaaactcacctgcctactgttagcgacacatgtacaggctgcactctctgcctcagcgtctgccctattatggactgtatcaggatggtttccagggcaacaccttatgaaccaaagagaggcctaccattagccgtgaagccggtgtgttaaggtgatttgtaagacagctgctgtgaactttgatgttaccaacacaggctgatctttaaaacaataacaattgtaatcattatgatcagttctttccaaatttgatagctatgcatatataatttctaaataagcgtctaaattggaaaacaatgtctaatgccagtgaccaattaatggtcataaaatggaataattcttctctgaagtagctggtgagtaactgtggaccagttaattggatatgctcggtcagttgtctgctgtgaaaaattaactttttcatggcaattagtgtgacaatttctaaattgccctatgccgtgctcactctttgatttctaattgtaagcgaaatgaactattttggaacggagtgcgctttcatatacaggaaactgtttccaaggaaacactttgtaattaaaaattacctgtaattttaacactgcttctaaggacatgcaattagccccattaagaacaattgaagagagtcacgtcattatttactatgacaaggggaacacaacctggcagagggttttctagagttttcttacatccccctttgctgaagtaactcactctttggtgctggacactggaagggagattatttcctgactaaaatactgttcaccactcatccctgaaacaggtgtcagactgcccaggaatggagcacaggtcatttttatttgaatagcaaagctgtgctcctgatgaaataagatataaagatggatatctagtgaaggccacactgtcactgggcacagaccactcggtctgcttctcatagtcaccttcattatgagagcaattaacgttcaaacaagggctagattacacagcactgagccataggcttcacgctacaacagcaaaaacatcgtatctgaaatttatacataatgagacaaatgggtctgacgacgcttgaatgctcgtatgatttcaaaattgttgaaatcgacgtgtacttttaaatattgataaatattttctgtctctttatttttataatcaataaatagcatcatatgaactcatttattccttctttatgacatactttaaaatgaatctataggaaataagtgagaaataacagtctgtggcatatttctatgataaatgcacgatatctgcaagtgcactttaaaaatgtgtatgactaaataatcacaaataaaattttatgatttattgtggaatt

SEQ ID NO: 4426 - protein, 1025 aa, Rattus norvegicus
MAGVLSRDAPDIESILALNPRIQAHATLRSTMAKKLDKKHWKRNTDKNCFICEKLENNFDDIKHTTLGERGALREAVRCLKCADAPCQKSCPTSLDIKSFITSIANKNYYGAAKLIFSDNPLGLTCGMVCPTSDLCVGGCNLHATEEGPINIGGLQQFATEVFKAMNIPQIRSPLLPPPEHMPEAYSAKIALFGAGPASISCASFLARLGYSDITIFEKQEYVGGLSTSEIPQFRLPYDVVNFEIELMKDLGVKIICGKSISTDEMTLSTLKENGYKAAFIGIGLPEPKKDHIFQGLTQVQGFYTSKDFLPLVAKGSKPGMCACHSPLPSVRGAVIVLGAGDTAFDCATSALRCGARRVFIVFRKGFANIRAVPEEMELAKEEKCEFLPFLSPRKVIVKDGKIVGMQFVRTEQDETGNWVEDEEQIVRLKADVVISPFGSVLDDPKVIEALSPIKFNRWGLPEVNPETMQTSEPWVFAGGDVVGMANTTVESVNDGKQASWYIHEYIQAQYGALVPSQPTLPLFYTPVDLVDISVEMAGLRFPNPFGLASATPATSTPMIRRAFEAGWGFALTKTFSLDKDIVTNVSPRIIRGTTSGPLYGPGQSSFLNIELISEKTAAYWCHSVTELKADFPDNILIASIMCSYNKNDWMELSKMAEASGADALELNLSCPHGMGERGMGLACGQDPELVRNICRWVRQSVRVPFFAKLTPNVTDIVSIARAAKEGGADGVTATNTVSGLMGLKADGSPWPSVGSGKRTTYGGVSGTTIRPIALRAVTAIARALPGFPILATGGIDSAESGLQFLHSGASVLQVCSAIQNQDFTVIEDYCTGLKALLYLKSIEELSDWDGQSPPTMSHQKGKPVPHIAELMGQKLPSFGPYLERRKKILAASKIRENDQNRACSPLQRKHFNSQKPIPAIKDVIGKSLQYLGTFGELNIMEQVVALIDEEMCINCGKCYMTCNDSGYQAIQFDPETHLPTVSDTCTGCTLCLSVCPIMDCIRMVSRATPYEPKRGLPLAVKPVC

SEQ ID NO: 4427 - DNA, 2124 bp, Moorella thermoacetica
  CDS (1)..(2124)
atgggagaggtggtatttagcacctggggaggaaaagttgtcgatcaccggggcggtccgtcggggggaggaccgtcctgggccggggaatttggcggtcggcagttaaaggcctttattggctgggatggtctcgtagtcaccgacccggccgtagacctgctggctgctttacaggcttactaccaggccgtccagggggaatcctgcggccgctgcgtaccctgccgggtagggaccagggttatttacaatgtcctggtacgcatcgccgggggcgaaggccttccctccgatttagaccttctccgacgggtggcctggattgtacgggatggttctctgtgcgagctcggccaggctggggccaaagctgttcttgattttttagattattatagcgaggccttgcgacctttcctggaggatagcggcagggtcgccgggggtcaacggagaccagggcctggaggccgggtgcaggttctggcttccggacgggtcctggtggggaacgaccgcggaaagggagcggccgccgcttccccggcagccggtttaacctataaaccttttgttactgcgccctgcctcaagcggtgcccggcccacctggacatcccggcttatattgacgccattaaggatggccgctatgaggaatccctggccatcatccgccagcggaccgccctggccggtgtcctgggacgggtctgcgtccacccgtgtgaagaaaactgccgccgcggcaatgttgacgaacccctggccatccggggcctgaagcgcttcgtagccgattatgaggtgaaacgcggccgccggccggtcgccgtctgcgggggtaatctctttacgggaccctggcggccggcaggacaggccggtggggaagaaacaacggccgtcacttcaggcaagaaggtagccatcatcggtgccggaccggcgggtctcagcgccgcctaccagctcgccggtcggggctataaagtgactattttcgaggccttgccggtggccggcggtatgctggcggtgggtattcccagctaccggttgccacgggatatcctggctggagagatcgaggccatcaaggctctgggcgtaaccatcaacctcaacacccgggtcggcgtcgacgtgaccatggaccaattacagcgcgattacgacgccgtctttattgctaccggcctccatgccagctcccgcatgggagtagccggcgaggatgaaggctatggaggatttatccccggggtcaagttcctgcgagatttgaacctggaccggtgtccttccctggagggcaaggtggtggccgtcgtcggcggcggcaatgtagcgatggattgcgcccgttccgccctgcgccggggggcccgggaggtgcaccttatttaccggcgttcccgggcggaaatgccggcccatgcgaccgaggtcagggatgccgaggccgagggggttatttatcacttcctggttaatcccaccgccctggtagcggaaaaaggcaatatcaagggtatgcagtgcgtccggatgaaacttggcgagccggacgattctggccggcgccggcccgtacccgtgccgggaacggagtttttcctgccctgcgatattgtggtgccggctatcggccaggcggccgacctgtctttcctggacggccggatcgaggtgggcaaacgtggtaccatcagtgttgacccggtgaccctggctaccagtgtccccggcgtcttcgccggcggcgatatcgtcctgggggccaggacggtagttgaggccgtggcccagggcaaccgggcggcagtttccattgaccagtacctgcgccaggggaccaccagtcccacggtagaggacgagctggacgcgtggctggaaaaggtcggcgtctatgacccggaagaggatgtaggaatctacggcggccggccgcggcaggcagaaagggtggcgccgttggccgagcgggtaaaggacttccgggaagttgaaggcggcttcgatttctacgcaggcagggccgaagccgaacgctgcctgcgctgttaccgggtcgggatgatggtcctggccggagagggggagagtaatggttaa

SEQ ID NO: 4428 - protein, 707 aa, Moorella thermoacetica
MGEVVFSTWGGKVVDHRGGPSGGGPSWAGEFGGRQLKAFIGWDGLVVTDPAVDLLAALQAYYQAVQGESCGRCVPCRVGTRVIYNVLVRIAGGEGLPSDLDLLRRVAWIVRDGSLCELGQAGAKAVLDFLDYYSEALRPFLEDSGRVAGGQRRPGPGGRVQVLASGRVLVGNDRGKGAAAASPAAGLTYKPFVTAPCLKRCPAHLDIPAYIDAIKDGRYEESLAIIRQRTALAGVLGRVCVHPCEENCRRGNVDEPLAIRGLKRFVADYEVKRGRRPVAVCGGNLFTGPWRPAGQAGGEETTAVTSGKKVAIIGAGPAGLSAAYQLAGRGYKVTIFEALPVAGGMLAVGIPSYRLPRDILAGEIEAIKALGVTINLNTRVGVDVTMDQLQRDYDAVFIATGLHASSRMGVAGEDEGYGGFIPGVKFLRDLNLDRCPSLEGKVVAVVGGGNVAMDCARSALRRGAREVHLIYRRSRAEMPAHATEVRDAEAEGVIYHFLVNPTALVAEKGNIKGMQCVRMKLGEPDDSGRRRPVPVPGTEFFLPCDIVVPAIGQAADLSFLDGRIEVGKRGTISVDPVTLATSVPGVFAGGDIVLGARTVVEAVAQGNRAAVSIDQYLRQGTTSPTVEDELDAWLEKVGVYDPEEDVGIYGGRPRQAERVAPLAERVKDFREVEGGFDFYAGRAEAERCLRCYRVGMMVLAGEGESNG

SEQ ID NO: 4429 - DNA, 1479 bp, Plectonema boryanum
  CDS (1)..(1479)
atgggaaaaccaactggattcatcgaatatctgcgcgaacttccttccgaactcgcaccactcgatcgcattcgcaattgggacgaattccacctctccatgcctgaggaaaatcttcgcactcaaggcgcgcgctgtatggattgcggcattccgttttgccatacgggaaccttaattagcggcatggcgagcggctgcccaatcaacaatctcattcctgaatggaatgatttgatctatcgcggactctggaaagaagcactcgatcgcttacataaaaccaacaatttccccgaattcactgggcgggtctgtcctgctccttgtgaagggtcgtgtgtactcggcattcacaatccacccgtcacgatcaagaacattgaatactcgatcgcagaaaaaggctggaacgaaggctggatcaagcccgaacctcctgccaaaagaacaggtaagaaaattgcgatcgtaggatctgggcctgctggactttctgctgcggctcagctcaataaagtcggacattgggtaactgtgtttgaacgggctgatcgtcccggtggcttgctcatgtatggcattcccaacatgaagctcgacaaacaagaagtcgtgatgcggcgattaaacatcctcgaagccgaaggtgtgaaattcgtttgcaatactgaaatcggaaaagatctgcctgctgaagacttgctgagagattttgatgcagttgtactctgcacaggtgcgacgaaaccgcgtgatttaccgatcgaaggtcgccaacttaaaggcattcacttcgcaatggactttctcaccgcgaacactcaagctgtactagaccaaaccgagccagcgattaccgctcaaggcaaagatgttgtgatcattggtggaggagacaccggaacggactgtgttgggacttcgattcgacacggctgtaacggtcttgtccaactcgaaatcttacctcaaccacccgaagaacgcgctcccaacaatccttggcctgaatatccaaaagtctacaaaatggactatggacaagaagaagctgccgcaaaattcggaggtgatcctcgggcttatctgagaacggcaacgcactttgaaggcgatgagcagggcaatgtcaaagcagttcacacggtcgaggtgcaatgggaacgcaatgaacaaggacagttcattcctaagcaaattccgggaactgagaaaatcattccggctcagttagtactactcgcaatgggatttttaggacctgagcaacctttactcgatgcaatgggactcgatcgcgatgcccgtagtaacatcaaatccgaatacggtagatacacgaccagtattcccaaggtgtttgcagccggagattgccgtcgaggacaaagtttagttgtctgggcattcaatgaaggtcgtggcgcggcgagagaatgcgatctctatctgatgggcgaaactaatctaccctaa

SEQ ID NO: 4430 - protein, 492 aa, Plectonema boryanum
MGKPTGFIEYLRELPSELAPLDRIRNWDEFHLSMPEENLRTQGARCMDCGIPFCHTGTLISGMASGCPINNLIPEWNDLIYRGLWKEALDRLHKTNNFPEFTGRVCPAPCEGSCVLGIHNPPVTIKNIEYSIAEKGWNEGWIKPEPPAKRTGKKIAIVGSGPAGLSAAAQLNKVGHWVTVFERADRPGGLLMYGIPNMKLDKQEVVMRRLNILEAEGVKFVCNTEIGKDLPAEDLLRDFDAVVLCTGATKPRDLPIEGRQLKGIHFAMDFLTANTQAVLDQTEPAITAQGKDVVIIGGGDTGTDCVGTSIRHGCNGLVQLEILPQPPEERAPNNPWPEYPKVYKMDYGQEEAAAKFGGDPRAYLRTATHFEGDEQGNVKAVHTVEVQWERNEQGQFIPKQIPGTEKIIPAQLVLLAMGFLGPEQPLLDAMGLDRDARSNIKSEYGRYTTSIPKVFAAGDCRRGQSLVVWAFNEGRGAARECDLYLMGETNLP

SEQ ID NO: 4431 - DNA, 2016 bp, Yersinia pseudotuberculosis IP 32953
  CDS (1)..(2016)
atgaatccatttattgttgctgacgctgagagctgtattggttgtcggagttgtgaagtggcttgtgtggtcgcccatcatgagggccagtttcctgataaaccggaatatttcaccccacgggtgaaagtattcaaaggcgatcaatgtgcgacggcagtattttgccatcattgtgaagatgccccttgtgccagcacctgcccgaatggtgccattgttgaattgaataatagtattcaggtgattcaggaaaaatgtattggctgtaaaacctgtatgatcgcctgcccgtttggcatgatgaccgtggtcaccgaaacggttcaacccgccagccaccgcttagcggatgtctatcggcgtacagaagcacaaaaatgtgacctttgtcttgatcagcctgatggcccagcctgtattaaaacctgccctacgcaggctctgaccttggtggaccaacaatatttactgcatcaacagcagcaaaagcgccaacacatggcgctgaatgagcacaatggccgcttgttcagtcgcgcggtggtacaggcggccagtgcatcgtcaaataaaagcatccgcgacgcaacaccggttaacctcttgcagcggccacgggcaccacgtctggagccgaaaaaaattccgttggcagagcgtaaaacgggttttgctgaaatctatctgccatttaccgaaagccaaatccatgaacaggctgaacgctgcctggaatgcggtgataaaaccatctgtcagtggacatgcccactgcataacgccatcccgaaatggatctcgctggcccatcaggggcggatccatgaagcagcagaattatcccatcaaaccagcagcttgcccgaagtgtgtggccgggtatgcccgcaagatcgcttatgtgagcagtcctgtacgctgaatgaccacgatggcgcggtcactatcgggcagattgagcggcatatcacggaaacggcactggcgaccggctggcggcctgatctgtcacaggtgaaacccagcggtaaacgggtcgctattattggcgctggcccagcaggtttgggctgtgcggatattctggtacgtaatggcatcacgccagtggtgtttgatcgttatcccgaaattggcggtttgctgacatttggtattccggctttcaagctggaaaaatcggtgatgactcggcggagagaaattttcaccgagatgggcgtggagttttgcctgaatacagaaattggccgcgatatcaccatggaaaacctgctccacgacttcgatgctctgttcctcggggttgggacctaccgttccatgcgctcaggattagaaaatgaggatgctcagggcgtttacgatgccttgccattcctgatcggtaacacccagcatttgatgggttacaccgccaatggcgctcacccttatgtcagtatgcaggaccaacgcgtggtggtgttggggggcggtgataccgccatggattgtgttcgaacctccctgcgtcagggggcaagccgcgtagtgtgcgcgtatcggcgtgatgagaagaatatgcctggttctaaacgtgaggtgaaaaatgcgcgtgaggagggggctgaatttatgttcaacctccagccgatgagcattgtggtcgatgaatcgggacaggtgacgggtatcaagatggttcgcactgaaatgggacaggcagatgcccaagggcggcgacaagccctgcctatcgccggttccgagcatcttattcctgctgatgccgtgatcatggcctttggtttcagcccgcaccggatgtcatggctggcagaacataacgtggtgctggataaacaggggcgcgtggttgcgccgactatctccggctatccctatcaaaccagtaatcccaaaatttttgccggtggcgacattgtgcgaggagctgacttgattgtgaccgccatcgcggaggggcgcaaagcggcagagagtattgcgtattatttgaacgttttataa

SEQ ID NO: 4432 - protein, 671 aa, Yersinia pseudotuberculosis IP 32953
MNPFIVADAESCIGCRSCEVACVVAHHEGQFPDKPEYFTPRVKVFKGDQCATAVFCHHCEDAPCASTCPNGAIVELNNSIQVIQEKCIGCKTCMIACPFGMMTVVTETVQPASHRLADVYRRTEAQKCDLCLDQPDGPACIKTCPTQALTLVDQQYLLHQQQQKRQHMALNEHNGRLFSRAVVQAASASSNKSIRDATPVNLLQRPRAPRLEPKKIPLAERKTGFAEIYLPFTESQIHEQAERCLECGDKTICQWTCPLHNAIPKWISLAHQGRIHEAAELSHQTSSLPEVCGRVCPQDRLCEQSCTLNDHDGAVTIGQIERHITETALATGWRPDLSQVKPSGKRVAIIGAGPAGLGCADILVRNGITPVVFDRYPEIGGLLTFGIPAFKLEKSVMTRRREIFTEMGVEFCLNTEIGRDITMENLLHDFDALFLGVGTYRSMRSGLENEDAQGVYDALPFLIGNTQHLMGYTANGAHPYVSMQDQRVVVLGGGDTAMDCVRTSLRQGASRVVCAYRRDEKNMPGSKREVKNAREEGAEFMFNLQPMSIVVDESGQVTGIKMVRTEMGQADAQGRRQALPIAGSEHLIPADAVIMAFGFSPHRMSWLAEHNVVLDKQGRVVAPTISGYPYQTSNPKIFAGGDIVRGADLIVTAIAEGRKAAESIAYYLNVL

SEQ ID NO: 4433 - DNA, 4160 bp, Xenopus laevis
  CDS (101)..(2923)
cccacgcgtccggccttgggtctacttctgcacttgtgctagtgattcatatatattttttaaaagccattgcacggcagaactgcagaaaacaaataccatgtctcgtatgctgagcagggacccgctggatattgagaacattttggccttgaatcccagaacaccaactcatgcctccttgtattcaacaacagccaagaagcagtctaaaaagctttggaagcggaaccctgacaaaagttgctcaaaatgcgagaaactagaaaacaattttgatgacatcaaacatacaactcttggtgaaagaggagcattgcgagaagcaatgaggtgcctaaaatgtgcagatgctccttgccagaagagctgcccaacaaacttagatatcaagtcatttatcacaagcattgcaaacaagaattactatggcgctgccaaagccattttttctgataacccacttggcttgacgtgcggtatggtatgtccaacgtcggacctctgtgttggaggatgtaatttatacgcatcagaagaaggaccaattaacataggaggacttcagcagtttgcaactgagattttcaaaactatgaacattcctcagatcagaaatccattgcttccttcaaccgaggccatgccagctcaatacacgactaaaattgcccttattggtgctggaccagctagtattagctgtgctaccttcttagctcggctgggatattcagatattactatttttgagaagcaaacatattttggaggattaagcacatcagaaatccctcagttccgcttgccatatgacgttgtcagttttgaaattgagcttatgaaggacctcggagttaaggtaattgagggcaagggcctgggaatgaatggaatgaatatcagatctttgaaggaagaaggttttaaagcaatattcattggtataggactaccacagccaaagatagatgatgttttcactggcctcacaatagaacatggcttttatacatccaaggacttcttaccactagtatcaaaagcaagcaaacaaggtatgtgtgcatgccactctccacttccatccattaaaggagcggtcattgtactcggtgctggagatacagcatttgactgtgcaacttctgccttgcgttgtggtgctcgcagggtttttgtggtgttcagaaaaggattcactaacatacgggcagttcctgaagaggtggagctggcaaaagaagaaaaatgtgaattccttcctttcctctctcctcgtaaagtgactttaaaaggtgggaaaataagtggtatggagtttgttcgtacagaacaagacgatgatggaaactggattgaggatgaagatcagaaaattcagctgaaagcagaagtggttatcagtgcgtttggttctgtgctaacagattctgcagttctagaagccatgataccaatcaaattcaacagatggggccttcctgaagctgatccagagacaatgcaaaccagtgaagctggagtttttgtgggtggagacattgctggcttagcaaatacaactgtggagtcagtgaatgatggaaaacaggcatcttggcatatgcacaaatatatacagtctctacatggagtgtctatcaataacaagcctgagcttcctttgtttaacactccaattgatttggttgatataagtgtggaaatggttgggctcaaattcctaaatccttttggcttggcgagtgctcctccaacaacaagtgccccaatgatacgtagagcctttgaagcaggatggggttttgctctcaccaaaaccttctcccttgaaaaggatatagtaacaaacgtatctccgagaatcatacgtggaactacctctggctccatatatggccctggtcaaggatctttcctcaatattgaacttatcagtgaaaagaccgctgcatactggtgtcaaagcatcactgagcttaaagctgactttccaaagcatattattattgccagcatcatgtgcagctacaacaaggatgactggacagagctttctctaatggcagaggcttctggtgccaatgctctggagttaaatctttcttgcccccatggaatgggagagaggggcatgggtctggcttgtggacaggatccagagctggtacgaaacatctgccgctgggttagacaagctgtcaaaattccattctttgcaaagctgaccccaaatgtcacagatgttgtgaaaattgcaatggctgcacaggaaggtggtgcagatggggttactgcaaccaatacagtttcaggtctgatgggacttaaagcagatgcaacaccttggcctgcagttggaagtgggagtaggaccacatatggtggagtgtctggaaatgccattaggccgattgctctaagagctgtatctgccattgcccgtgctcttccaggatttcccattttagctactggtggaattgattcagcagaaagtggcctgcagtttcttcacagtggagcttcagttttacaggtttgcagtgcagtgcaaaatcaagactttactgtgattgaagactattgcacagggctgaaagcactcctgtacctcaaaagtattgatgagcttcaagactgggatgggcaaagtccaccaactattcgccatcaaaaaggaaagccagtacctacaattgcagaaatcaaagaaacgaaacttccaagctttggcccatttttggaaaaacgcaaaagaatcttagctgaaaataaaatgaatgaattaacctccagcacaagtcctgcatcaaaggagaagactcattttgcgccaaagaaacctgttccctcagtcaaggatgtcattggaagagctttgcaatacattggatcttatagtcaattgaacatataagaacaagttgtagccctgattgatgaggaaatgtgcataaactgtggcaaatgctacatgacctgcaatgattctggttaccaggcgattgagtttgatccagagactcacctgccgacagtcaccgacacctgcactggctgcaccctgtgtcttagcgtctgtcctataattgactgcatcaaaatggttaccaggacgattccttatgtaccaaagagaggcttgcccttaactgttaatccagtttgttgaggtgaatagttcagcggttaatgtgaacctcatgtatactgctgctgacttagtatctcattatagtacattatgtggaatcagatcataatatagaaaaatagtgggtttttttttaattacacttgtatatggcagccatagcaatgcaagtatccttctgcaatgggctctaatatttacaaatcttattaactctctttcaatatggccattacattgcgtgccttaaagtagagcccattgtttcctaatttttacgacattaaagccggttaattcagcacaaatgataacataacagagcaaatgttttataatgcaattaaagtgccttgtttttccttcttcatattttctttttagttagaaaccgtgagccataattagtggcactaaaaacaaaaaattaagagaagaattactgtttgtaaacagacgatagatttacagtggggatttaactctggattaagttctttgtgcagagcgtccactgacaaaacataatgcatttcttaagccctagtacattaatgctcataatggacactgtataatgcataactattaaccctttagagcagtcagaattcactggagattttgtttttcatgtttgtacttgaaaaatgcctctgcttcattccctgtgctgttaaattgcattggttttattcaattaacattaaagggaattcctgtcctacatacaaaattgcaatatcaaactgcagagtaatagtctttcaccactcaaaggccataacttaaagtttgttttagtgtaggagatattttattgaatatatgtatgtttataggaatatgatgaatatataagtacatcaatagctgcacggtatagcctggggatcaatatgtgccatgtaatcaatggagttttttctcttatcaatatctatataaaattataaaataattaaagtctattaagccttaaaaaaaaaaaaaaaaaaaa

SEQ ID NO: 4434 - protein, 940 aa, Xenopus laevis
MSRMLSRDPLDIENILALNPRTPTHASLYSTTAKKQSKKLWKRNPDKSCSKCEKLENNFDDIKHTTLGERGALREAMRCLKCADAPCQKSCPTNLDIKSFITSIANKNYYGAAKAIFSDNPLGLTCGMVCPTSDLCVGGCNLYASEEGPINIGGLQQFATEIFKTMNIPQIRNPLLPSTEAMPAQYTTKIALIGAGPASISCATFLARLGYSDITIFEKQTYFGGLSTSEIPQFRLPYDVVSFEIELMKDLGVKVIEGKGLGMNGMNIRSLKEEGFKAIFIGIGLPQPKIDDVFTGLTIEHGFYTSKDFLPLVSKASKQGMCACHSPLPSIKGAVIVLGAGDTAFDCATSALRCGARRVFVVFRKGFTNIRAVPEEVELAKEEKCEFLPFLSPRKVTLKGGKISGMEFVRTEQDDDGNWIEDEDQKIQLKAEVVISAFGSVLTDSAVLEAMIPIKFNRWGLPEADPETMQTSEAGVFVGGDIAGLANTTVESVNDGKQASWHMHKYIQSLHGVSINNKPELPLFNTPIDLVDISVEMVGLKFLNPFGLASAPPTTSAPMIRRAFEAGWGFALTKTFSLEKDIVTNVSPRIIRGTTSGSIYGPGQGSFLNIELISEKTAAYWCQSITELKADFPKHIIIASIMCSYNKDDWTELSLMAEASGANALELNLSCPHGMGERGMGLACGQDPELVRNICRWVRQAVKIPFFAKLTPNVTDVVKIAMAAQEGGADGVTATNTVSGLMGLKADATPWPAVGSGSRTTYGGVSGNAIRPIALRAVSAIARALPGFPILATGGIDSAESGLQFLHSGASVLQVCSAVQNQDFTVIEDYCTGLKALLYLKSIDELQDWDGQSPPTIRHQKGKPVPTIAEIKETKLPSFGPFLEKRKRILAENKMNELTSSTSPASKEKTHFAPKKPVPSVKDVIGRALQYIGSYSQLNI

SEQ ID NO: 4435 - DNA, 2550 bp, Azoarcus sp
  CDS (1)..(2550)
atggaagccgtacagacatcggaaatcaggtggtggaaggcgagcaagccggtcggcatggccgagttcggcgcgccggtaaagctgagcatcgacggcgtcgaggtcgaggcgccggccggtgcgtcggtcctgaatgcggcgactgccgcgggtctctacattccggcgctgtgcgcgcaccccgatcttcctcctgccgggcagcgcggcgcgggtgagggcggctgcaacctgtgcatggtcgagatcgagggcacggacggcctttcgaaggcctgttcgaccactgtcacggccggcatggtcgtgacgacccagtcggcggcgatccagaccgtgcgccaggccaacctggcgaaggtcctcggtccgcacccgcatgtctgcctcacctgtccgcagcgcgacggctgttcgcgctcgcagtgctcctacggcaacccgcaggaaacgcgctgctgcacgattttctcgtcctgtgagctgcgcaaggtctccgactacatcggcatcccgaacaccaccccgccgtacaagcccgcgcagcttccgatcatcaaggacgagccgttcttcgatcgcgactacaacctctgtatcgactgccgccgctgcctcgtcgcctgtaacgacgtacgcggcgtgggctgtctcgaggtgaaggaagtcgagacgccgcagggcaagcgcacctacgtcggcacgattgcgccgacgctgctcgaatccggctgtaccttctgccaggcctgtgtgaccgtgtgcccgaccggcgcgctgatggaccgcacgctcgaccccgcgaagcgcgaggagtcgatggtgccgtgcaagagcgcctgcccggcggggatcgacgtgccgcgttacgtgcagctcgccgcagagggcaagtacggcgaggcgatcgccgtggtgcgcgagcggctcccgttcccgggtattctcggccgcgcctgttttgcaatgtgcgagtcggcctgccggcgcaaggatctcgacgacccgctgtcgatccgcaatctcaagcggattgctgccgataacgacacgggcctgtggcgcgagcatgctaagaagctgccggcgacgggcaagaaggctgcggtgatcggcgccggtccggccggcctgacggtggcgtactacctcgccaagcagggccacggcgtgaccatcttcgatgcgcagccggccgcgggcggcatggcgcgctacggtatcccgtcctaccgcgttccggccgaagtcatcgacaacgaggtcgcggaggtttctgctctgggcgtcgagttccgctacggtgccaaggtcgagagtgtcgatacgctcttcaacgatggctacggcgcggtgtttgtcggcatcggcgcgcagggcggcgacaatctgggtatccccggcgacgatctgcccggcgtggtcgatagcccgacctacctcaaggccgtgacgatgggcctcgtgaatacccccgagggcatccagaccggcaggaaggtggccgtgatcggcggcggcaacgtcgcgaccgacaacgcacgcagctcgcgccgcttcggcgccgaggtcgacatggtgtatcgccgcacccgcgaggagatgccggcacgcctggaggagttcgagggctgcgtggaggagggcgtgaatatccgctacttgctcgcgccgaagaagatcgagccgggcaccaacggtttccggctgcagatcacctacgcgaagatggcgctcggcgaggccgacgcgtccgggcgccgccgcccggtcgagaccggcgaggaagtcgtcgagggggtcgatctggtgatcgccgcgatcggccagttcccgaaccgtttcggaggtttcggcgtggagacggatcgcaagggccgcatcacggtgcgcgaggattcgatgctgacgagccggcccaaggtgtatgccggcggcgactgcgtgctcggaccttcgacgctgatcgaatcggttgcccagggccgcactgcggcctccgcgatggacatcgtgctaggcggcgacggcgacatctccgaagtgctgctgcgcagcggttgggagaccaacccgcgcatcggccgcaaggacggcttcaacacgacgcgcaagttccacccgatcatgctggcgccggagcagcgcaccggctgggacgaggtggagctcggcttcgacgatgcgacggcccgtgccgaagcggcccgctgcttcaagtgcaacctcgcgccgaagattgccgaagcgatcctgccgcccgagtcctcgctgaagttcgacgaggcgacgatcgcatccgtgccaaccgagtcgggcgtgttccaactgctcgatggcgacaagaacgtgctgatgatcaagggcgtcgagaatctgcgcgacgggctcatggaacagctcgaacgtggcggcgacgcgactaacttcgtgttcgaggaagcggcgctcttcacctcgcgtgaaagccagatgatccaggcttacctgcagcagtacggaaagatgccgggcggcgggtccgacgagctggacgacctgttctga

SEQ ID NO: 4436 - protein, 849 aa, Azoarcus sp
MEAVQTSEIRWWKASKPVGMAEFGAPVKLSIDGVEVEAPAGASVLNAATAAGLYIPALCAHPDLPPAGQRGAGEGGCNLCMVEIEGTDGLSKACSTTVTAGMVVTTQSAAIQTVRQANLAKVLGPHPHVCLTCPQRDGCSRSQCSYGNPQETRCCTIFSSCELRKVSDYIGIPNTTPPYKPAQLPIIKDEPFFDRDYNLCIDCRRCLVACNDVRGVGCLEVKEVETPQGKRTYVGTIAPTLLESGCTFCQACVTVCPTGALMDRTLDPAKREESMVPCKSACPAGIDVPRYVQLAAEGKYGEAIAVVRERLPFPGILGRACFAMCESACRRKDLDDPLSIRNLKRIAADNDTGLWREHAKKLPATGKKAAVIGAGPAGLTVAYYLAKQGHGVTIFDAQPAAGGMARYGIPSYRVPAEVIDNEVAEVSALGVEFRYGAKVESVDTLFNDGYGAVFVGIGAQGGDNLGIPGDDLPGVVDSPTYLKAVTMGLVNTPEGIQTGRKVAVIGGGNVATDNARSSRRFGAEVDMVYRRTREEMPARLEEFEGCVEEGVNIRYLLAPKKIEPGTNGFRLQITYAKMALGEADASGRRRPVETGEEVVEGVDLVIAAIGQFPNRFGGFGVETDRKGRITVREDSMLTSRPKVYAGGDCVLGPSTLIESVAQGRTAASAMDIVLGGDGDISEVLLRSGWETNPRIGRKDGFNTTRKFHPIMLAPEQRTGWDEVELGFDDATARAEAARCFKCNLAPKIAEAILPPESSLKFDEATIASVPTESGVFQLLDGDKNVLMIKGVENLRDGLMEQLERGGDATNFVFEEAALFTSRESQMIQAYLQQYGKMPGGGSDELDDLF

SEQ ID NO: 4437 - DNA, 1473 bp, Propionibacterium acnes
  CDS (1)..(1473)
atggctgatctgcacggctttatgaatgtgactcgacaggaggcggagcgtcgtccagtcgaagagcgcgtccaggactggaaagaggtctacccaggcggacctggtcacgctctgctgcccatcattacagaccaagcgagccggtgcatggactgtggtgtgcccttctgccataccggctgtccgttgggtaatctcatccctgactggaacgacctcatctggcgagacgaatggcgcgaggctctcagctgtttgcagaccaccaacaactttccagagttcaccggtcgattgtgccccgctccatgcgagacggcgtgtgtcgaagggcttaaccgcgccccggtcacgattaggaacgttgaggttgccatcattgataaggcctgggaagaccgccgcgtcattccggtggtgcctgagtggcattcactcaagacggctgcagtggtcggatctggccccgcaggactggcaaccgcccagcagctcacccgtgcggggcatacggtcgtcgtctacgagcgtgacgacgccatcggcgggttgctgcgttatggcatcccggattttaagatggaaaaatcggttctcgaccgccggattaagcagatggtgttggagggtaccgtcttcaagacgaatactgagatcggcgtcgatatcactggcgagcagttacgcgagcggtttgacgccgtcgtcttggctaccggtgccaccgttccacgcatgctggatgctccaggtattgagctcgacggggtctgttatgccatggagtacctcactcagcaaaaccgcgtcgtggcgggggcagaggtgcttgatcagatccacgctgacggtaagcatgttgtcatcatcggtggcggagatactgccaccgactgtgtaggcaccgcagtgcgtcagggcgcggcctcaattacccagctgcagtacaacccggagccgcccaaggaccgatcggctaactatccctggcccacttatccgctcattttacgggtctccagctccaatgaagagggcggacagcgggtgtactcgaccaacaccgtcgagatcgtcagtaatgaccggggccacgtcaaggcagttcgggtggtctcaggccatcgcgatgagaaccgggtgtttattgcggacgagggcagcgaacatgatctgccggccgacctagtgatctttgcgatgggattcgctcatccggagtatgacggtgttgttgccgagctggggctggaacttgacggacggggcaatattatcagaaatgatgcgtatgagactaatgtgccgggggttttcgcctgtggtgacgctggccgcgggcagtccctcgtggtgtgggccatcgcggagggacgcgcagctgctcacggtgttgatgcgtatctcaaaggatcaccgtcggtgctaccgaagccggtaaaaccgtcggatcgtcagatgacggtgtag

SEQ ID NO: 4438 - protein, 490 aa, Propionibacterium acnes
MADLHGFMNVTRQEAERRPVEERVQDWKEVYPGGPGHALLPIITDQASRCMDCGVPFCHTGCPLGNLIPDWNDLIWRDEWREALSCLQTTNNFPEFTGRLCPAPCETACVEGLNRAPVTIRNVEVAIIDKAWEDRRVIPVVPEWHSLKTAAVVGSGPAGLATAQQLTRAGHTVVVYERDDAIGGLLRYGIPDFKMEKSVLDRRIKQMVLEGTVFKTNTEIGVDITGEQLRERFDAVVLATGATVPRMLDAPGIELDGVCYAMEYLTQQNRVVAGAEVLDQIHADGKHVVIIGGGDTATDCVGTAVRQGAASITQLQYNPEPPKDRSANYPWPTYPLILRVSSSNEEGGQRVYSTNTVEIVSNDRGHVKAVRVVSGHRDENRVFIADEGSEHDLPADLVIFAMGFAHPEYDGVVAELGLELDGRGNIIRNDAYETNVPGVFACGDAGRGQSLVVWAIAEGRAAAHGVDAYLKGSPSVLPKPVKPSDRQMTV

SEQ ID NO: 4439 - DNA, 1458 bp, Leifsonia xyli
  CDS (1)..(1458)
atggctgatcccaaagggttcttgaagacgaccgagcgggagctgccgaagcgccgccccgtcccggtccggctgatggactggaaagaggtctacgaggccggggaaccggcccagctgcgccgccaggccgggcgctgcatggactgcggcattccgttctgccaccagggttgtccgctcgggaacctcattccggagtggaacgacctcatgtggcgtggggagggtcgccaagcaatcgagcgtctgcacgccaccaacaacttcccggagttcaccgggcggctgtgcccggccccctgcgagtcctcgtgcgtactgggcatcaaccagcccgccgtgaccatcaagcaggtcgaggtgtcgatcatcgaccaggcttggcagcacggctgggtgcagccgcacccgccggagcgcctcaccggcaagaccgttgcggtcgtcggctccgggcccgcgggtctggccgccgcccagcagctcacgcgcgccgggcacacggtcgccgtgtacgagcgggacgaccggatcggcggtctgcttcgctacggaatcccggacttcaagatggagaagaagcatctggaggcgcgcatcggtcagatgaccgccgagggcacgcgtttccgcgccggggtgacgattggtgtcgacatcggctgggacgatctgcgggcgcgttacgacgcgatcgttgtcgccaccggtgcgatggtgccgcgggatctgcccatcccgggccgcgacctcgcaggcgttcacttcgcgatggagtacctcgtccagcagaaccgggcgggtgcgggtgaccaggtcgccgcccagatcaccgcggacagcaagcgcgtcgtcgtcctcggcggcggcgacaccggtgcggactgcatcggcaccgcccaccgccagggtgctgcgagcgtgaccactctcgccatcggcaaacagccgccgagcgagcgtccgggtcaccagccctggccgctgaccccggctctgttcgaagtccagtcggcgcacgaggagggcggtcagcgcgagtacctcgtctcgacggtcgagttcctcgcgaatgagcacggcgaggtgcgcgcggtgcgggtggccgagaccgagcatgtcgatggccaccgcgtgccgaaggccggcaccgagcgggagatccccgcggatctcgtccttctcgctctgggcttcaccggtccggagcaggacggactctcctcccagctgaacctgccgttcgatgagcggggcagcctcgagcgtgacggcggctaccagaccagcgaggctggcgtgttcgtcgccggggacgctggccgcggtcagtcgctcatcgtctgggccatcgccgagggccgtgcagcggccgccgccgtggaccggtatcttgaaggggagacacaactgccggcgccggtccgtcccacggaccgcggcatcctggtctga

SEQ ID NO: 4440 - protein, 485 aa, Leifsonia xyli
MADPKGFLKTTERELPKRRPVPVRLMDWKEVYEAGEPAQLRRQAGRCMDCGIPFCHQGCPLGNLIPEWNDLMWRGEGRQAIERLHATNNFPEFTGRLCPAPCESSCVLGINQPAVTIKQVEVSIIDQAWQHGWVQPHPPERLTGKTVAVVGSGPAGLAAAQQLTRAGHTVAVYERDDRIGGLLRYGIPDFKMEKKHLEARIGQMTAEGTRFRAGVTIGVDIGWDDLRARYDAIVVATGAMVPRDLPIPGRDLAGVHFAMEYLVQQNRAGAGDQVAAQITADSKRVVVLGGGDTGADCIGTAHRQGAASVTTLAIGKQPPSERPGHQPWPLTPALFEVQSAHEEGGQREYLVSTVEFLANEHGEVRAVRVAETEHVDGHRVPKAGTEREIPADLVLLALGFTGPEQDGLSSQLNLPFDERGSLERDGGYQTSEAGVFVAGDAGRGQSLIVWAIAEGRAAAAAVDRYLEGETQLPAPVRPTDRGILV

SEQ ID NO: 4441 - DNA, 2328 bp, Desulfotalea psychrophila
  CDS (1)..(2328)
atgacaagaactgtgataaacggcctcgatgaaaacggtcgtcgaataagctctatggagtttgagaaaatggtccgggctgctgccagcagctcagccaatatccatctcaactcctacgggcaacataatataggtattagattagagcacaaagagggactcaacatcaccgttgaaggcccttctggacagcgtcttggttgcatgggacttcccggcaccaagattgtctgtaagggcgccacctccgatgatgtcggctacctgaatattggtgctgaaatcaccgtcctcggtgacgccaccaacggtgcctgtaatgccatggccatgggcaaggtctatattggtggctccattggtgcccgtggtctgaccatgaccaagtggaacccggagtatgaaaaacctgaactgtgggtacttggctccaccggcgattcttttgccgaattcaactgtggtggtattgctgtcgtctgtggcatcaagcccaaaaccccgaaaaatatactcggctatcgaccatgtgtcggaatggttggcggctcgatctacttccgtggaccaatagatgactcttactcaagacttaatgccaagctctgcaaactagatgaccagcaatggcagtggctccttgaaaatatgccgacctttctcggcaatatccaaagagaagatcttagtgaagaactcaccatccgggaagattggcatgtcctgagctccattaccacccaagagcgggctcttatgtgggcaggtcccatgcccatggcagaatttcgccgtgaacactgggataaaacctttggcggtgaccccctacgtgatattgcccctggccttgaccgtagtcccattaatgccatcaccaccggagaacttcgtcgcaaaaagccctactgggccaacaacgaatattctgctccctgcacatactactgtccaattcacattccaaccgtggaacgcctgcgtcttctccgagagggaagggcagatgaggcctacgaactactgctccgctacacgcctcttcccgcctctgtctgcggcgctatttgtcctaaccagtgcattcagaattgttcaagaaaaggtgttgatgaggccattgacacccaaattcttggtcgggcagctggacattttccggcgcctaaaccagcagctgccacaggcaaaagagttgccatcattggtggtggccccggcggcatgaatgcagcatggcaacttgcccttaaaggtattgaggcccatatctttgagcaagatgacaaactcggcggcaagctggcaggagtaatcccctgggagcgcctgccacaggcaacatggcagtatgaaatcgatcgtttcacctccatggaggggatcgaactgcacctgaataccaccatgaccaagggaaagtttgccgagctgcaaagagattatgactacgttatcgtagccgtaggaacccacgagccacgaagcattccatttccaggacatgagaaggtgatcccggccctccacttcttaaaggatgccaaaaacgccagccaccctccacaggtaggcagagaagtcgtgatcatcggcgcaggcaatgtcggctgtgatgtagcctgtgaggcctatcgcctcggcgcggaaaaggttaccctgatagatatccaaaagccgctggcctttggtaacgaaaaagaggcagccgaagcactgggcgctcaatttcgttggccaataaccacaaaggaggtaacggatcagggtattatcaccacggatggcgaactgatacctgctcagaccgttattgtctctattggtgatgttcccgccctctccttcctgccggattccgtggagaccatgaccgttggtggcgcagattgggtaaccaccaacgaggcatatgttacctcaaacaagaaggtacttgccgtaggcgatgtaaaacgaccagggcttgcaaccaacgccttgggtgctggcaaagacgccgcagagtacattcttgccaccgaaaaaggcgagaagtgggagcccttcagcaaaccactcattgcccaatccgccctgaccatcactcattacgcgccgatagcaaaggaagcaacagaggcaaatcaggccgaccgttgtctctcctgtgcctcctgccgtgattgccatctctgtgaaaccatctgtccagagggtgccatttcacgggaagatctgggcaacggagagtatcgctatgtctccaacgacgataaatgtatcgcctgtggtttttgcgccgacacctgtccctgtggtatctgggtcatgaacccctactag

SEQ ID NO: 4442 - protein, 775 aa, Desulfotalea psychrophila
MTRTVINGLDENGRRISSMEFEKMVRAAASSSANIHLNSYGQHNIGIRLEHKEGLNITVEGPSGQRLGCMGLPGTKIVCKGATSDDVGYLNIGAEITVLGDATNGACNAMAMGKVYIGGSIGARGLTMTKWNPEYEKPELWVLGSTGDSFAEFNCGGIAVVCGIKPKTPKNILGYRPCVGMVGGSIYFRGPIDDSYSRLNAKLCKLDDQQWQWLLENMPTFLGNIQREDLSEELTIREDWHVLSSITTQERALMWAGPMPMAEFRREHWDKTFGGDPLRDIAPGLDRSPINAITTGELRRKKPYWANNEYSAPCTYYCPIHIPTVERLRLLREGRADEAYELLLRYTPLPASVCGAICPNQCIQNCSRKGVDEAIDTQILGRAAGHFPAPKPAAATGKRVAIIGGGPGGMNAAWQLALKGIEAHIFEQDDKLGGKLAGVIPWERLPQATWQYEIDRFTSMEGIELHLNTTMTKGKFAELQRDYDYVIVAVGTHEPRSIPFPGHEKVIPALHFLKDAKNASHPPQVGREVVIIGAGNVGCDVACEAYRLGAEKVTLIDIQKPLAFGNEKEAAEALGAQFRWPITTKEVTDQGIITTDGELIPAQTVIVSIGDVPALSFLPDSVETMTVGGADWVTTNEAYVTSNKKVLAVGDVKRPGLATNALGAGKDAAEYILATEKGEKWEPFSKPLIAQSALTITHYAPIAKEATEANQADRCLSCASCRDCHLCETICPEGAISREDLGNGEYRYVSNDDKCIACGFCADTCPCGIWVMNPY

SEQ ID NO: 4443 - DNA, 1764 bp, Desulfotalea psychrophila
  CDS (1)..(1764)
atgaaaccaactgacataaaaaaaccggaatatttccacaaaattatagactgccaatacgcctgtcccacccacacccccgtacctcaatacatacagcatattgcccggagggagtacgaccaggcatatataataaactggatatcaaacgtatttcccggagtactgggaagaatatgcgatcgcccctgtgaacccgcctgtagacgaggacgaatcgaggaaacccctgttgccatctgcaggttaaaacgcctggcagcagacaaaaagagcagcattgatattctgccaacaaaatgccgggccccaaacggcaaaaaaatcgccctcattggcggcggcccggcctccctgaccgttgctcgggatctgcgccttcttggttacgaaatccatctctttgaccaacaaaaaaaggccggtggtttcattcgcacccaggtcccctccttccgcctgcccgaaaaaatccttgaagaggaggttgatatcattctcaacatgggcgttatcacccacttcaatggttatatcagcagtctcaaaagcatacttggacagaacttcgatgccgtttttgtcggcaccggtgccccccgcggtcgcgacctggccaagctaccaggcagggaggcgggcagaaagaacattgccatcggcactgaatggctggcggccgttctctaccggcatgtaaaaaagataggcccccgggtactggtccttggtggaggaaatacagccatggattgctgtcgcactgcccgacgcctcgggggcgagaatgtctccattattgttcgcagccctaaagagacgatgaaggcctccctctgggaaattgaagaggccctcctggagggggttcacctcatagacaaccatctccccctagcctttgtcacggaaggtgacagactgacaggcatgaactttgaccgggtagaggccaggcaaaacgatagaggcgagagagagctcatctccagcggagaggcaccggtctttatcccctgcgacgatgttatcctggcggtggggcaggagaatgcctttccttggatagaaagagatatcggtctgcactacaaaaatgggctgccactgatcgaccctgaaacactgcagtccaacatcccccgactgttctttggtggcgatgccgcctttggccccaaaaacgtaattaccgccgtagcccatggacatcaagccgccatctccattgatctcttttgccaggggcagagtttggatgagcgccctcctaccctcctcagcctgagcagccaaaaaatgggcctgcaggagtgggcctatgacaacgatatatccatcgcccaccgcaacaaggtaccaagagaaagccctgtcaaatcaattcgaaacagactcatggaggtggaacttggctttgatcaggaggtgggcctgcaagaggcctcacgttgcctcaactgtgacattcaaaccgtcttcgaggcagccacctgcatagagtgcgatgcctgcgtagatatctgccctgtttcctgtattaacttcatggacagcacagagaatgagctcagaacctctctccggataccggctgaaaatctcagtcaggctctctatgtctcggagcccacccccattggtcacatcatggtaaaggatgaaaatgtctgcctgcactgcgccctctgcgcgaatagatgccccacatcctcctggcaaatgcttaaatcgaccctctcctatccaggacaaaaatga

SEQ ID NO: 4444 - protein, 587 aa, Desulfotalea psychrophila
MKPTDIKKPEYFHKIIDCQYACPTHTPVPQYIQHIARREYDQAYIINWISNVFPGVLGRICDRPCEPACRRGRIEETPVAICRLKRLAADKKSSIDILPTKCRAPNGKKIALIGGGPASLTVARDLRLLGYEIHLFDQQKKAGGFIRTQVPSFRLPEKILEEEVDIILNMGVITHFNGYISSLKSILGQNFDAVFVGTGAPRGRDLAKLPGREAGRKNIAIGTEWLAAVLYRHVKKIGPRVLVLGGGNTAMDCCRTARRLGGENVSIIVRSPKETMKASLWEIEEALLEGVHLIDNHLPLAFVTEGDRLTGMNFDRVEARQNDRGERELISSGEAPVFIPCDDVILAVGQENAFPWIERDIGLHYKNGLPLIDPETLQSNIPRLFFGGDAAFGPKNVITAVAHGHQAAISIDLFCQGQSLDERPPTLLSLSSQKMGLQEWAYDNDISIAHRNKVPRESPVKSIRNRLMEVELGFDQEVGLQEASRCLNCDIQTVFEAATCIECDACVDICPVSCINFMDSTENELRTSLRIPAENLSQALYVSEPTPIGHIMVKDENVCLHCALCANRCPTSSWQMLKSTLSYPGQK

SEQ ID NO: 4445 - DNA, 2226 bp, Desulfotalea psychrophila
  CDS (1)..(2226)
atgtttgagatcgtagaaaacagcatcatcgcccctaatgttcaccgccttatcatcaaagctcctcgagtggcaaaatcccgtaagccgggacaatttgttatcgtccatgaagagggtggcgaacgcattccccttaccattgccgacgagaacattgaaaacggtacaatcaccttaattattcaagccgttggcgagggcaccaagcaaattgtcagcaagcaggccggagaatttatccgtgacattgccggcccccttggtaaggcttcagaaattgaaaaagtcggtaaggtggtctgtattggtggcggggtaggtaccgctgtactctttcccctggccaaggcccttgccgcagcaggcaatgatctgacaaccatcatcggtggtcgttcagagtcctttgtcattctcaaagacgagctcgccgtattttctactcaactaaagataaccacggaagatggttctctcggtgataagggctttgttaccggccccctcgctgaaatacttgaagacgagaccagacgcccagagattatctatgccatcggccccgttcctatgatggcggccatctgtgaacagacccgtccctacggcgtcaagaccattgtcagcctcaatcctattatggtagacggcacaggcatgtgtggcggttgtcgggtaaccgtcgccaacaaggtaaaatttgcctgcgtcgacggccctgaatttgacggtcatgaggttgactttaaagagcttgctgccagacagcgccagtatgtcggccacgaccacgatcgccataaatgtcgcatggacgcagtaaagatagagacaatcagcataaaagaacgcatggcaattccccgggcccatatgcccgagcaggacgccaagatcagggcaaccaacttcactgaggtaaatctggggatctctgaagaggtggccatccgtgaggcccaacgctgccttaactgcaagacccgtccctgtgtctccggttgtcccgtcggtgtccgtatccctgaatacctgcaggaagttgccaagggcgatttcgccgcagctgccaagatactccgtgaagacaacgccctgcccgccaccaccggccgggtctgcccacaggaatctcaatgcgagcagaaatgtgttcggggtaaaaagggcgatgccgttgccctcggttggctggaacgctttgtcgctgactgggctgcccaaaaccttaaacccgaagtaccctgcatagagaagacggggaaaaaggtcgccattatcggcagtggtcccggaggtctgaccgccgccggagaacttgcccgtagggggcacgatgtcacagtttttgaggcattacataccgccggtggtgtacttcgttatggtattcctgagtttcgtctgccaaaaaatattgtcgatcacgaggtggaaaaccttgtcgccctcggggttaagtttgaattcaacgtcatcattggccaaaccctgactattaaggagataatggcagaatttgacagctgttttatcgccaacggtgccggactgcctatcttcctcaatttaccaggtgaaaacctcaacggtgtctactcgtcaaacgaatacctcacccgggtaaacctgatgaacgcctataagaagggcagtgcaactccaattgtcactggtcctaccaccgtcgtctttggtggtggcaacacagccatggattcagccagaacagctaaacgcatgggcagtgaacgagtaatccttgcctatcgccgtggccgtgacgagatgcctgcccgtctggaagaggtcattcatgcggaacaggagggtatcgagttcatgttcctggtcgcacctctttctattggtggcaccgaagatggctgggtggaaaatgttcacctgcaaaaaatggaacttggcgaaccagatgcctcgggcagaagacgccctgttgccatagagggaagtgaatttaaagtagaggctgatattgttatcatgtccatcggtaccacctcaaatccactcctcacctccacatgtcctgagctggaactcaacaagtggggtaatattgtggtggacgaaaagcagatgagctccatgcagggtgtctttgccgggggcgatatcgtccgaggcggcgccactgttatcctcgccatgggcgatggtaaaaatgcagctcagtccattcatgattatctacaaaaatag

SEQ ID NO: 4446 - protein, 741 aa, Desulfotalea psychrophila
MFEIVENSIIAPNVHRLIIKAPRVAKSRKPGQFVIVHEEGGERIPLTIADENIENGTITLIIQAVGEGTKQIVSKQAGEFIRDIAGPLGKASEIEKVGKVVCIGGGVGTAVLFPLAKALAAAGNDLTTIIGGRSESFVILKDELAVFSTQLKITTEDGSLGDKGFVTGPLAEILEDETRRPEIIYAIGPVPMMAAICEQTRPYGVKTIVSLNPIMVDGTGMCGGCRVTVANKVKFACVDGPEFDGHEVDFKELAARQRQYVGHDHDRHKCRMDAVKIETISIKERMAIPRAHMPEQDAKIRATNFTEVNLGISEEVAIREAQRCLNCKTRPCVSGCPVGVRIPEYLQEVAKGDFAAAAKILREDNALPATTGRVCPQESQCEQKCVRGKKGDAVALGWLERFVADWAAQNLKPEVPCIEKTGKKVAIIGSGPGGLTAAGELARRGHDVTVFEALHTAGGVLRYGIPEFRLPKNIVDHEVENLVALGVKFEFNVIIGQTLTIKEIMAEFDSCFIANGAGLPIFLNLPGENLNGVYSSNEYLTRVNLMNAYKKGSATPIVTGPTTVVFGGGNTAMDSARTAKRMGSERVILAYRRGRDEMPARLEEVIHAEQEGIEFMFLVAPLSIGGTEDGWVENVHLQKMELGEPDASGRRRPVAIEGSEFKVEADIVIMSIGTTSNPLLTSTCPELELNKWGNIVVDEKQMSSMQGVFAGGDIVRGGATVILAMGDGKNAAQSIHDYLQK

SEQ ID NO: 4447 - DNA, 6360 bp, Yarrowia lipolytica CLIB99
  CDS (1)..(6360)
atggatcacgaagaacaacaagaatacaaccccatctcatacaacgagaacaatggctcgtgggcaggcgcgctccccaccaaacagggcctgtacgaccccgagtacgaaaaagatgcctgtggtgtcggttttgcctgtaacatcaagggccaacaatcgcacaagatcatttccgacgccaagaatctgctctgcaacatgacccaccgaggagccgtgggatccgacgcacgagacggagatggagcaggagtcatgacctccatcccccacaagttcatcaaaaaggagtttaagcggctctacgacttcgagctgcctcccatgggtcagtacgcctgcggtaacctcttcttcaaaaacgaccaggacgtgctggcgaagtccaaggacacgtttgagtccattgccaagtctctgggccttgaggtgctcggctggcgattcgtcccccgagactcctctattcttggtcccgctgctctgtctcgagagcctctgatcctgcagccggtggttgtgctgtctgaggccttcaagtcaggccctcacactgaggacgaatgggactccaagttcgagaagctgtttgagttgcagctttacgtgctccgaaagcagtccactcacaccattggtttgcacaactggttctacatttgttcgctgtcgaacaagaacatggtctacaagggccagcttgctcccgtccaggtctacaactactactacgatctgctcaacgtcgactacgagggccactttgctctggtccactcgcgattctccacaaacactttcccctcttgggaccgagcccagcctctgcgatgggccgcacacaacggtgagatcaacaccctgcgaggaaacaagaactggatgcgagcccgagagggaatgatgaaatctggtctgtttggagacgaacttgagcgactctaccccattgtcgaggagggaggatccgattccgctgcctttgataacgtccttgagctgctggtcatcaatggtgtcctgtccatgcccgaggccgttatgatgatgattccagaggcctggcagaacaacaccaccatggactccaagaagcgagctttctacgagtgggctgcttgccttatggagccctgggacggccctgctcttttcacttttgccgacggacggtactgtggtgctaacctcgatcgaaacggtctacgaccctgccgatactacatcaccgacgacgaccgaatgatctgtgcctctgaggtgggtgtcattctgatcgagtccgagaaggtgatccagaagggccgactccgaccaggacgaatgctgctggttgataccaaggagggacgagtcgttgatgaccgagagctcaaaaagaagattgctggccgagtggacttcaagtcgtggatccacgccaacgtcatcaccatggaggacatgcgacagaaggttgagtccaagatgccctccattctcgaggtcaagatcgacgagctctctgtccagagcgatccccgtctccctgcgttcggatacactgctgagcagctttctctgctgctggcacccatggctgccactgccaaggaggctcttggatctatgggtaacgacggacctctggcttgcctcgcaaagcagcccaaggtgctgtttgactacttccgacagctgtttgctcaggtcactaaccctcccatcgatcccattcgagaggctattgtcatgtccctggagtgctacgttggaccccagggtaacgtgcttgagatgaaccccagccagtgcaaccgtctgctgcttccctctcctattctgaccatccaggagactgcaatgctgcacgagatgcacagacactaccccaagtggaccacagataccattgatatcacttttgacaaatctgagggccccgctggctacctgaaggctcttgacagaatctgtgaggaggcctccaactccatccacgccaagcaccagatcatcatcctatccgacaagaagacttctgctgaccgagtccctgtctcttctgttgtggcctgtggtgctgttcaccaccaccttgtgcagcagaagcagcgatctcgagttgccctgattgtcgagactgccgaggcccgagaggtacaccacttctgtgttctgctcggatacggcgctgacgctatcaacccctacttggctatcgagacccttgccaagatgaaccgggagggtcttatcaaggaacctctttctgacgaccagattgtggccaactacaagacagccgttgacggcggtattctgaaggtcatgtccaagatgggtatctctactctcgcgtcttacaagggtgcccagatctttgagattcttggtatcgacaactctgtagtcgacaagtgcttcgccggtactgcttcgcgaatcaagggtatcacctttgacttcattgcagaggatgccattgcccttcacgagcgaggtttcccctcgcgagagactgtcaagaccaagtctctgcccgagtctggagagtaccactaccgagatggtggagacccccacgtcaacacccccgttgccatctcgaacatccaggatgctgttcgaaacaagaacgagaaggcttatgaggcttactctaaggccgagtacgaagccatcaaggactgtactctccgaggtctgcttgatttcgacttcgatgccgctacccctgtccccattgatcaggttgagccctggaccgagattgttcgacgattcgtcactggtgccatgtcctacggttccatctcaatggagtcccattctactcttgccgttgccatgaaccgacttggtggtaagtccaacaccggtgagggtggtgaggaccccgagcgatccgctgttgctgagaatggagacactatgagatctgccatcaagcagattgcctctggtcgatttggtgtcacttcgtactacctttctgacgccgatgagctccagatcaagatggctcagggtgccaaacccggtgagggtggtgagcttcccggacacaaggtgtctgagcagattggtaagactcgacactccactcctggtgtcggtctcatttctcctcctccccaccacgacatttactctattgaggatctcaagcagcttatctacgacctcaagtgctctaaccctcgatctcgagtctctgtgaagctggtgtccgaagtcggtgtcggtatcattgcctccggtgttgccaaggctaaggctgaccacattctcatttctggtcacgatggtggaactggtgcctctcgatggaccggtatcaagtacgccggtctcccctgggagttgggtcttgctgagactcaccagactctggttctgaacgatctgcgaggtcgagtcactgtccagaccgatggtcagatccgaaccggtcgagatgttgccattgcctgtcttctcggagccgaggagtggggatttgctactactcctctcattgccatgggctgcatcatgatgcgaaagtgccatctcaacacttgtcccgtcggtattgccacccaggaccccgagctgcgacagaagttcaagggtacccccgagcatgtgatcaacttcttctactacattgccaatgagcttcgaggaatcatggctcagcttggattccgaaccattgacgagatggttggccacgccgagatgctgcgagtccgagacgatcttcgaaaccacaagaccaagaacctggatctgactcccattctcactcctgctcacacccttcgacctggtgttgctacccgaaaggttcgaaagcaggaccaccgactccatgtccgactcgacaacaagctcattgacgaggctgaggtcactctggacaagggtcttcccgtcaccattgactgtgacatcatcaacactgatcgatctcttggttccacactctcctaccgaatctccaagcggtttggtgaggctggactgcctgacgacactgttcacgtcaatgtcaagggttctgcgggtcagtcgtttggtgccttcctggcacccggtatcactctggaactggagggagactgtaacgattacgttggtaagggtctttctggaggccgaatcgtcgtctatcctcccaagaactctgttttcaaggctgaggagaatatcatcgttggtaacacttgtttgtacggtgctacttccggtacttgtttcttccgaggtgttggtgccgagcgtttcggtgtccgaaactccggtgccactgccgttgttgagggctgtggagaccacggctgcgagtacatgactggaggtcgtgttgttgttctcggctccactggccgaaactttgccgccggtatgtctggtggtattgcctacgtgcttgacatgggccaggagtttgtcaacaacgtcaactccgagactgttgagctgggccctgtctctgatccccaggagattgctttcctgcgaggcctgattgaggaccaccgacactacaccggttccgagctggctgaccgagttctcacagacttcaaccgaatcttgccccggtttgtcaaggtactgcccaccgattacgctcgagttctggaggagcaagctgccaaggttgctgaggccaagaagcgagaggtctctggctacatgcatgccatcaaggaggaccctgacgccgacatcaccaacggtgagctcaagcgagctgctacccccaagccttgtgccactcctcggtcccgaaaggagcctcctgttcaggatctggaggacgccattctcgaccacaacgccacaaaggccaaggcttccaagctggtcaagctcgataagacccgaggtttcatgaagtacactcgacgtgctgagaagtatcgagatgccaagaaccgaaccaaggactgggacgagatgaacacccgactgaccaaggaggagctgaagtatcagactgcccgatgcatggactgtggtgtccccttctgccagtctgacactggatgccctatttccaacgtcatccccaagtggaacgagctcgtgttccaggaccgatggcaggatgctctcgacagacttctgatgaccaacaacttccccgagttcactggacgaatctgtcccgctccttgtgagggtgcctgtgttctgggtatcaacgaggaccctgttggtatcaagtccatcgagtgtgccattatcgatcacggtttcgagcagggctggattaagcccaagccccccgccactcgaactggtaagaccattgccattattggttctggtcctgcgggtctggctgctgccgatcagctcaataaggcaggccactctgtgactgtctacgagcgagctgaccgaattggaggtctcctcatgtacggtatccccaacatgaagctggacaagcgggttgttgagcgacgagtccagttgatgcgagacgagggtgtcacttttattaccaacaccgaggtcggtgaggacaaggaagtttctgtgtctggtctgcgagctgacaatgatgctgtcgttctgtgtgtcggatccaccattcctcgagacttgcccatcaagaaccgatctctcaacaacatcaatttcgccatgcagttgctccgatggaacacgaagtctctgcttgacggtgacatggatgaggttcgagagtccctcaaggacaagcacgttgttgtcattggtggtggagacactggtaacgattgtctgggtacttctactcgacacggagcgaagtccgtcaccaacttcgagctgcttccacgacctacccctgctcgacccaaggacaacccctggccccagtggcctcgaatcttccgagtcgactatggtcacactgaagtggctgctcactacggcaaggatccccgagagtacggtatcctgtccaaggagtttgttgacgacggagagggcaatgtcaagggtatcaagactgttcgagttgagtggaagcagtctgagtctggcgcctggcagatgagcgagattcccggctctgaggagttcttccccgccgacgtggttctgctgtccatgggtttcgttggtcccgaggcccaggagctcgctgctgagcgagacggacgaggaaacatcaagactcagaccggcgatgtcaaggatcttggactctacaaggtccaggacaacctgttcactgccggtgactgtcgacgaggacagtctctggttgtctggggtatccaagagggtcgacagtgtgctcgagctgttgatcacttccttatgggatgcactcgactgcccggtaacggttccattgagcagcgagatctcaagctcaaatag

SEQ ID NO: 4448 - protein, 2119 aa, Yarrowia lipolytica CLIB99
MDHEEQQEYNPISYNENNGSWAGALPTKQGLYDPEYEKDACGVGFACNIKGQQSHKIISDAKNLLCNMTHRGAVGSDARDGDGAGVMTSIPHKFIKKEFKRLYDFELPPMGQYACGNLFFKNDQDVLAKSKDTFESIAKSLGLEVLGWRFVPRDSSILGPAALSREPLILQPVVVLSEAFKSGPHTEDEWDSKFEKLFELQLYVLRKQSTHTIGLHNWFYICSLSNKNMVYKGQLAPVQVYNYYYDLLNVDYEGHFALVHSRFSTNTFPSWDRAQPLRWAAHNGEINTLRGNKNWMRAREGMMKSGLFGDELERLYPIVEEGGSDSAAFDNVLELLVINGVLSMPEAVMMMIPEAWQNNTTMDSKKRAFYEWAACLMEPWDGPALFTFADGRYCGANLDRNGLRPCRYYITDDDRMICASEVGVILIESEKVIQKGRLRPGRMLLVDTKEGRVVDDRELKKKIAGRVDFKSWIHANVITMEDMRQKVESKMPSILEVKIDELSVQSDPRLPAFGYTAEQLSLLLAPMAATAKEALGSMGNDGPLACLAKQPKVLFDYFRQLFAQVTNPPIDPIREAIVMSLECYVGPQGNVLEMNPSQCNRLLLPSPILTIQETAMLHEMHRHYPKWTTDTIDITFDKSEGPAGYLKALDRICEEASNSIHAKHQIIILSDKKTSADRVPVSSVVACGAVHHHLVQQKQRSRVALIVETAEAREVHHFCVLLGYGADAINPYLAIETLAKMNREGLIKEPLSDDQIVANYKTAVDGGILKVMSKMGISTLASYKGAQIFEILGIDNSVVDKCFAGTASRIKGITFDFIAEDAIALHERGFPSRETVKTKSLPESGEYHYRDGGDPHVNTPVAISNIQDAVRNKNEKAYEAYSKAEYEAIKDCTLRGLLDFDFDAATPVPIDQVEPWTEIVRRFVTGAMSYGSISMESHSTLAVAMNRLGGKSNTGEGGEDPERSAVAENGDTMRSAIKQIASGRFGVTSYYLSDADELQIKMAQGAKPGEGGELPGHKVSEQIGKTRHSTPGVGLISPPPHHDIYSIEDLKQLIYDLKCSNPRSRVSVKLVSEVGVGIIASGVAKAKADHILISGHDGGTGASRWTGIKYAGLPWELGLAETHQTLVLNDLRGRVTVQTDGQIRTGRDVAIACLLGAEEWGFATTPLIAMGCIMMRKCHLNTCPVGIATQDPELRQKFKGTPEHVINFFYYIANELRGIMAQLGFRTIDEMVGHAEMLRVRDDLRNHKTKNLDLTPILTPAHTLRPGVATRKVRKQDHRLHVRLDNKLIDEAEVTLDKGLPVTIDCDIINTDRSLGSTLSYRISKRFGEAGLPDDTVHVNVKGSAGQSFGAFLAPGITLELEGDCNDYVGKGLSGGRIVVYPPKNSVFKAEENIIVGNTCLYGATSGTCFFRGVGAERFGVRNSGATAVVEGCGDHGCEYMTGGRVVVLGSTGRNFAAGMSGGIAYVLDMGQEFVNNVNSETVELGPVSDPQEIAFLRGLIEDHRHYTGSELADRVLTDFNRILPRFVKVLPTDYARVLEEQAAKVAEAKKREVSGYMHAIKEDPDADITNGELKRAATPKPCATPRSRKEPPVQDLEDAILDHNATKAKASKLVKLDKTRGFMKYTRRAEKYRDAKNRTKDWDEMNTRLTKEELKYQTARCMDCGVPFCQSDTGCPISNVIPKWNELVFQDRWQDALDRLLMTNNFPEFTGRICPAPCEGACVLGINEDPVGIKSIECAIIDHGFEQGWIKPKPPATRTGKTIAIIGSGPAGLAAADQLNKAGHSVTVYERADRIGGLLMYGIPNMKLDKRVVERRVQLMRDEGVTFITNTEVGEDKEVSVSGLRADNDAVVLCVGSTIPRDLPIKNRSLNNINFAMQLLRWNTKSLLDGDMDEVRESLKDKHVVVIGGGDTGNDCLGTSTRHGAKSVTNFELLPRPTPARPKDNPWPQWPRIFRVDYGHTEVAAHYGKDPREYGILSKEFVDDGEGNVKGIKTVRVEWKQSESGAWQMSEIPGSEEFFPADVVLLSMGFVGPEAQELAAERDGRGNIKTQTGDVKDLGLYKVQDNLFTAGDCRRGQSLVVWGIQEGRQCARAVDHFLMGCTRLPGNGSIEQRDLKLK

SEQ ID NO: 4449 - DNA, 6426 bp, Kluyveromyces lactis NRRL Y
  CDS (1)..(6426)
atgatttcttctgggaaatatgatcctttagaagaatcgtacgatggcggttgttctttagatgaaagacctttatcaaagaaagcacatgtttataagtcctgggctaatgtcataccggacaaacagggtctatatgaccctgaatttgagaaagacgcctgcggtgttggttttgtagctaacatcaaaggtgtgtcatcccataagatcgtttctgatgcgcggttcttactctgtaacatgacacacagaggagctgtttcctcagatgggaacggtgatggtgcagggatcttgaccggtatcccacatgagtttatgcagagagagttcaaattggatgtagggatcgatattccagatcaatctcagtacgcggtagggaacgttttcttcaagaaagattctcccgaagcgttggtaaattccaagagaacgtttgaacaattggctgattctttggacttgaaagttctaggttggagagttgtaccacatgattcttccattcttggtgctgtcgcactgtcccgagaaccagaaattttgcaacctttagtagtgttgaaagaattattttccgagtcatcttcatcttcttccatctctaaggatgaattccaatccacatgcgaaaccaagtttaagactagcttgtacattcttcggaaacaggcttctacatcgatcggtcttcaaaactggttttatgtttgttccttggataacaaaactatagtttacaaaggacagcttaccccatcacaggtgtacaattactaccatgatttaactaatgctcatttcaaatcgcatatggcactagtgcattctcgtttttcaacaaatacattcccatcatgggaccgtgctcaacctctacgttggttggctcataacggtgaaattaatactttgagaggtaataagaattggatgagagccagagaaggtgttatggcttctgaggtgtttggtgaacaattggataaattgtacccgattgtggaagaaggtggttctgattctgccgcattggataacgttctggagcttttgatgatgaacggtgttctttcccttccagaagctattatactgatggtcccagaagcctatcacaaggacatggactcggatttgaaggcgtggttcgattgggcgtcatgccttatggaaccatgggatggtccagctttgctaaccttcactgatggtcgcttcactggtgccactttggacaggaacggtttaagaccatgccgttactatattacatccgatgaccgtgtcatttgtggttcagaagtcggtgttattcctgtggagaattcattggtcattcagaagggtaagttgaaaccaggtgatatgttgctagttgatacggaatctggagaaatggtcgacacaaagcaattaaagcataagttcgccaagagaaaggatttcaagtcgtggttatcaaaagttattaaagtggaagatgtgttagagaagacttccaaattcttaccgccaagtttcatttcagattataacttgaaagctcaaactgatccaaggctattggcattaggatacacatatgaacaggtttcgatgatccttgtaccaatggcgcttggaggtaaggaagctctaggatccatgggtaatgatgctccattggcttgtctaaatgaagacccagtactattatatgattatttcagagagcttttcgcccaggtgacaaaccctccaattgatccaattcgtgaggccaacgtcatgtccttggaatgtttcgtaggacctcaagggaaccttttggaaatgcatccttctcaatgcgatcgtttagttttaaaatcgccaattttacattgggacgaatttgaagccttgaaaaatattgaaaaggcacatcctacttggtctacttcgaacatagacattactttccctaaagaagaaggtctattaggctacacggctaccattgacagaatcacacaggaagccagtgatgctattgatcaaggaaagaagattttgttcattagcgacagactgttatctgcggatcgggtctcaatctcttcgttgatcgctattggtgccattcatcaccatcttgttcgcaacaaacagcgttctcaggtggctttgatcttggaaactggtgaagctcgcgaggtgcatcatttctgtgttctattaggttatggttgtgatggtattttcccttacctagccatggagaccttggtcagaatgaatcatgaaggattagtccgaaatgtcaacaacgatgattcatcaattgacgataagactttattagataattacaaacacgcggttgatggtggtatcttcaaagttatgtcaaagatgggtatctctactcttgcatcttacaaaggtgcccagatctttgaagctttaggcattgataattcggtcgttgatctatgttttgctggtactgcctctagaatcaaaggtgttacatttgaatacttggcacaagattcgttctctatgcatgaacgcgggttcccatctagattaacgatacaaaaatcggtaaatttgcctgagtccggtgaatatcattggagagatggtggctacaagcatatcaatgatcctactgccattgctgccctacaggactccgtgagaaacaaaaacgaagatgcatgggaaatgtacgttaagaaagaaatggaggctatcaaagactgtactctaagaggtctcttggaattggattattctgattcggaatcaatcccattggaacaagttgaaccttggacggagatcgcaagaagatttgctactggtgctatgtcgtatgggtcaatttccatggaagctcactccacattagcagttgcaatgaaccgtttaggtgccaagagtaactgtggtgaaggtggtgaagatccagagagatctattgtaaactccaacggtgacaccatgagatctgccatcaagcaagtcgcatctgcgaggttcggtgtaacatcattctatttatcagatgctgacgaaattcaaattaagatagctcaaggtgctaagccaggtgaaggtggtgaattacctgctcacaaggtttccaaagaaattgccaaaactagacattctacgccttatgtgggtttgatttctccacctcctcaccatgacatttattccatagaagatttgaagcagttaatctatgatttgaagtgctctaatccaagagcaggcatctcagttaaattagtctctgaagtcggtgttggtattgtggcctctggtgtcgctaaagccaaagctgatcatattttagtatctggtcatgatggtggtacaggtgcatccagatggaccggtatcaagtatgctggtttaccatgggaacttggtttagctgaaacacaccaaacattagttttgaatgatttgagaggaaacgtcgttgttcaaactgatggtcaattgagaacaggattcgatattgctgttgcaattttattaggtgccgaatctttcactttggcgaccgttcctttgattgctatgggctgtattatgttgagaaaatgtcatttgaacgcatgtgcagttggtattgccactcaagaccccgttttgagagacaaattcaaaggtcaacctgaacatgtcatcaacttcttctattatttgatccaagatttgagaaggataatggcaaagttgggcttcagaactgttgacgaaatggtgggacactctgagaagttgagaaaaagagacaacgtcaagaccaaagcgttgaatattgacttatctccaatcttgactcctgcccacttgatcagaccaggagttgcaacaaagtttaccaaaaagcaggatcacaagttacacactagactcgacaataagttaatcgacgaagctgaaattactctagataagggtttgccagttaccattgatgccaacatcatcaacactgatcgtgctttggggtcaacactgtcatacagagtctctaaaaggttcggtgaaaatggtctacctcaggatacggtggtggttaatatatctggttcagctggtcagtcattcggtgcattcctaactgctggtttgaccttcattttagatggtgatgccaacgattatgtaggaaagggtttgtctggtggtagattagtcatcagaccaccaaaggactccagatttaagtctgatgagaatgttatcgtcggtaatacctgtttctacggtgcaacgtctggttatgcattcatttctggttgtgctggtgaacgttttgccgttcgtaactctggtgctactgttgttgtggagagaatcaaaggtaacaatgcctttgaatatatgactggtggtagggctgttgttctttctcaaatggaatctcttaacgctttctctggtgcaactggtggtattgcttattgtttgacatcagattatgatgatttcgttggtaaaatcaatcatgacaccgttgaaatgcaaagtttagttgatcctgttgaaatagcgtttgtgaagaacttgatccaagaacattacaactataccaaatctgatcttgctaaaaagattctgaataaatttaatcattacttgaataatttcgtaaaggttatacctacggactacaagaaggttcttgagaatgaagcaaaggaaaaggttaaagcggagaaacaatctactgctgatttcttgaagaagttcaacagctcaacggattccgctgttgatgcaactaacggagaagtcgatctgctcagatcatctgtatctcataaatcgactttggctgaacctaaggtacttgatcttgaggatgccgtacaggatactaataatttgaaaaaagccgaggaaaagttggagaaaattcgtggtttcatgaagtataaaatgaaacacgaaaagtacagatctcccgcggcaagaactaaagactggaaagagctttctaatgcaatcacaaagaaggacgctagacaacagactgctagatgtatggactgtggtgttccattctgtacatcagatacgggatgtccaatttccaatattatcccaaaattcaatgagcttgtgttcaaaaaccaatggaaattagcattggacaaactattggaaactaacaatttccctgaatttactggtagagtttgtcccgctccatgtcaaggttcttgtaccttggctatcattgacgatccagtcggcatcaagtctgttgaaagattgattatcgataacgctttcaaagaaggatggattaaaccttgtccacctgaagtcagaacaggtaagattgttgccgttatcggctctggccctgcaggtatggcttgcgcagaccaattgaacagagctggtcattcagtagttgtttacgagagggctgatcgttgcggtggtttgttgatgtacggtattccaaatatgaaattggacaagtcaattgttcaaagacgtttggatctattagcagccgaaggtgttcaattcatcacaaacactgaggttggtaaagatatctccgttgaggaattgaaatctaagttcgatgctattgtttacaccgttggctcgaccattcctagagacttgagaattcctggtcgtgaattgaaaaacatcgactttgcaatgactttgctaaagagcaacacgcaagctttattagacagagacttagaaacaattaagaaacaaatcaaggggaagaaagttattgttattggtggtggtgataccggtaatgattgtttaggtacttctgtcagacatggcgctgcgtcagttctaaactttgagttgttaccacaaccacctaacgaacgttctaaggacaatccttggcctcaatggccacgtatcatgagaattgattacgggcatgcggaagtgaaagaacattacggaagagatcctcgtgagtactgcatcttatccaaggagtttattggaaatgaaaatggtgaagtgaaagccattaaaaccgttcgtgtcgaatggaagaaatctcaatctggtgtttggcaaatggtagatgtaccaggttctgaacaaatatttgaagctgacatcgttctattatccatgggtttcgtcggccctgaagtaatcgaagaccctacctttgtcaaatccaaaagaggtaccatcactacgttgtcagattcctcgtactctgttgacggagacaaggtatttgcagcaggtgactgtaggagaggtcaatctctaatcgtgtgggctatccaagagggaagaaagtgtgctacagccattgacacattcttgatggggtccacaaacttacctggaaatggtggtattgtcaaacgtgactacaaactcttggaagaactagcctccacaatttaa

SEQ ID NO: 4450 - protein, 2141 aa, Kluyveromyces lactis NRRL Y
MISSGKYDPLEESYDGGCSLDERPLSKKAHVYKSWANVIPDKQGLYDPEFEKDACGVGFVANIKGVSSHKIVSDARFLLCNMTHRGAVSSDGNGDGAGILTGIPHEFMQREFKLDVGIDIPDQSQYAVGNVFFKKDSPEALVNSKRTFEQLADSLDLKVLGWRVVPHDSSILGAVALSREPEILQPLVVLKELFSESSSSSSISKDEFQSTCETKFKTSLYILRKQASTSIGLQNWFYVCSLDNKTIVYKGQLTPSQVYNYYHDLTNAHFKSHMALVHSRFSTNTFPSWDRAQPLRWLAHNGEINTLRGNKNWMRAREGVMASEVFGEQLDKLYPIVEEGGSDSAALDNVLELLMMNGVLSLPEAIILMVPEAYHKDMDSDLKAWFDWASCLMEPWDGPALLTFTDGRFTGATLDRNGLRPCRYYITSDDRVICGSEVGVIPVENSLVIQKGKLKPGDMLLVDTESGEMVDTKQLKHKFAKRKDFKSWLSKVIKVEDVLEKTSKFLPPSFISDYNLKAQTDPRLLALGYTYEQVSMILVPMALGGKEALGSMGNDAPLACLNEDPVLLYDYFRELFAQVTNPPIDPIREANVMSLECFVGPQGNLLEMHPSQCDRLVLKSPILHWDEFEALKNIEKAHPTWSTSNIDITFPKEEGLLGYTATIDRITQEASDAIDQGKKILFISDRLLSADRVSISSLIAIGAIHHHLVRNKQRSQVALILETGEAREVHHFCVLLGYGCDGIFPYLAMETLVRMNHEGLVRNVNNDDSSIDDKTLLDNYKHAVDGGIFKVMSKMGISTLASYKGAQIFEALGIDNSVVDLCFAGTASRIKGVTFEYLAQDSFSMHERGFPSRLTIQKSVNLPESGEYHWRDGGYKHINDPTAIAALQDSVRNKNEDAWEMYVKKEMEAIKDCTLRGLLELDYSDSESIPLEQVEPWTEIARRFATGAMSYGSISMEAHSTLAVAMNRLGAKSNCGEGGEDPERSIVNSNGDTMRSAIKQVASARFGVTSFYLSDADEIQIKIAQGAKPGEGGELPAHKVSKEIAKTRHSTPYVGLISPPPHHDIYSIEDLKQLIYDLKCSNPRAGISVKLVSEVGVGIVASGVAKAKADHILVSGHDGGTGASRWTGIKYAGLPWELGLAETHQTLVLNDLRGNVVVQTDGQLRTGFDIAVAILLGAESFTLATVPLIAMGCIMLRKCHLNACAVGIATQDPVLRDKFKGQPEHVINFFYYLIQDLRRIMAKLGFRTVDEMVGHSEKLRKRDNVKTKALNIDLSPILTPAHLIRPGVATKFTKKQDHKLHTRLDNKLIDEAEITLDKGLPVTIDANIINTDRALGSTLSYRVSKRFGENGLPQDTVVVNISGSAGQSFGAFLTAGLTFILDGDANDYVGKGLSGGRLVIRPPKDSRFKSDENVIVGNTCFYGATSGYAFISGCAGERFAVRNSGATVVVERIKGNNAFEYMTGGRAVVLSQMESLNAFSGATGGIAYCLTSDYDDFVGKINHDTVEMQSLVDPVEIAFVKNLIQEHYNYTKSDLAKKILNKFNHYLNNFVKVIPTDYKKVLENEAKEKVKAEKQSTADFLKKFNSSTDSAVDATNGEVDLLRSSVSHKSTLAEPKVLDLEDAVQDTNNLKKAEEKLEKIRGFMKYKMKHEKYRSPAARTKDWKELSNAITKKDARQQTARCMDCGVPFCTSDTGCPISNIIPKFNELVFKNQWKLALDKLLETNNFPEFTGRVCPAPCQGSCTLAIIDDPVGIKSVERLIIDNAFKEGWIKPCPPEVRTGKIVAVIGSGPAGMACADQLNRAGHSVVVYERADRCGGLLMYGIPNMKLDKSIVQRRLDLLAAEGVQFITNTEVGKDISVEELKSKFDAIVYTVGSTIPRDLRIPGRELKNIDFAMTLLKSNTQALLDRDLETIKKQIKGKKVIVIGGGDTGNDCLGTSVRHGAASVLNFELLPQPPNERSKDNPWPQWPRIMRIDYGHAEVKEHYGRDPREYCILSKEFIGNENGEVKAIKTVRVEWKKSQSGVWQMVDVPGSEQIFEADIVLLSMGFVGPEVIEDPTFVKSKRGTITTLSDSSYSVDGDKVFAAGDCRRGQSLIVWAIQEGRKCATAIDTFLMGSTNLPGNGGIVKRDYKLLEELASTI

SEQ ID NO: 4451 - DNA, 2025 bp, Erwinia carotovora
  CDS (1)..(2025)
atgaaccgatttgttattgccagtactcaagactgtatggggtgccatgcatgtgaaatcgcctgtgtgatttcacacaatgacgaacagtatccagatagcaccgcggtgtttcagcccagaatcaaggcgttcaatacgccaacactgcgggctgccgtgacatgccgccactgtgaagatgcaccctgtgccagcgtgtgcccaacgcaggccttgatcaaaaaagacaatagcattcagctcgttcaggaaaagtgcatcggctgcaaaagctgtgtactggcttgcccattcggtgcaatgtccatggtgacaaatcccatggacaacagcgccatagcccataaatgtgacctctgcgccgatcgccctgaagggcaagcgtgcgtggaagcttgcccaactcaggcattgcagctcatcagtgaacacacgttaacagcacgccgtcaggagaaacagcagctgatggcgctgcgttccgccgctcactggcagcgtgaaacacctgtactgaaaacgctgacgacccatccgctcaacaaaagaaaaaactggccgcgccgggatgcggagaaaaaaccgctgacgcagagaacgtccacctttgatgaaatctaccatggcttctccgtacagcagacggaagatcaggctgatcgctgcctctcctgcggcaaacgagcagtctgcgagtggacttgcccgttgcataacaatattcccgagctgctgagtctggcgaagcaggggcgcatttttgaagccgtagagctatcacatcaaaccagcagcctgccagaaatctgtggccgagtatgtccgcaggatcggctatgcgaaggggcttgtacgctgggtaaagagtacggtgccatcacgatcggcaacattgagcgctacattaccgataccgcgatggccatggggtggtcacccgatatgacgcgtgtcgttcccagcggcaaacgcgccgcaatcgtcggggctggcccggctgggttagcctgtgccgatgtgctggcacgcaatggcgtgcaggccgtcgtgttcgatcgccacccggaaattggtggattgctcacgttcggaattccgtcgttcaagctggataaagacgtcctgattcatcgtcgtaaagtattcagcaccatgggaatcgaattccagctgaataccgaagtggggaaagacatttctctggctcagcttctggacgactatgacaccgttttcctcggcgtgggcacctaccgctccatgaaggccaacattgataatgaagatgcccccggcgtcttcgatgcacttcctttccttattgccaataccaaacacgttatggggctacctgaattagacgatgagccctatatctcgatggcaggaaaacgcgtcgtagtactcggcggtggggataccgcaatggactgcctgcgcacgtccgtccggcaaggtgcaatatccgtaacctgcgcatatcgccgcgatgaagccaacatgcccggctcgaaaaaagaggttaaaaactcccgcgaagagggcgtggatttcatgtttaacgttcagccacaaaaaatctgtctcaacgaacagggcgaagtgtgcggtatcagcctggttcgcactgaactgggtgaaccagatgctagcggccgtcgtcgcccacgccccattcctagttcggaattcgtacagcccgcggaagccgtaataaccgcatttggctttcagtcgcacagtatgccgtggctggaagatgccgatattggtctggataactggggacacatcaccgccccccttgatagtcagacaccttgccagactaatcatccgcgtatttttgctggtggcgatgccgtgcgcggtgccgatctggtggttaccgcgattgccgatgggcgcaaagccgcattggggatgattgagacgatggggctgaccgccgtcacaggtgccattcccgcacatccgcagcgtcccgaaatgaatgcaacccgcgaggagctacgctcatga

SEQ ID NO: 4452 - protein, 674 aa, Erwinia carotovora
MNRFVIASTQDCMGCHACEIACVISHNDEQYPDSTAVFQPRIKAFNTPTLRAAVTCRHCEDAPCASVCPTQALIKKDNSIQLVQEKCIGCKSCVLACPFGAMSMVTNPMDNSAIAHKCDLCADRPEGQACVEACPTQALQLISEHTLTARRQEKQQLMALRSAAHWQRETPVLKTLTTHPLNKRKNWPRRDAEKKPLTQRTSTFDEIYHGFSVQQTEDQADRCLSCGKRAVCEWTCPLHNNIPELLSLAKQGRIFEAVELSHQTSSLPEICGRVCPQDRLCEGACTLGKEYGAITIGNIERYITDTAMAMGWSPDMTRVVPSGKRAAIVGAGPAGLACADVLARNGVQAVVFDRHPEIGGLLTFGIPSFKLDKDVLIHRRKVFSTMGIEFQLNTEVGKDISLAQLLDDYDTVFLGVGTYRSMKANIDNEDAPGVFDALPFLIANTKHVMGLPELDDEPYISMAGKRVVVLGGGDTAMDCLRTSVRQGAISVTCAYRRDEANMPGSKKEVKNSREEGVDFMFNVQPQKICLNEQGEVCGISLVRTELGEPDASGRRRPRPIPSSEFVQPAEAVITAFGFQSHSMPWLEDADIGLDNWGHITAPLDSQTPCQTNHPRIFAGGDAVRGADLVVTAIADGRKAALGMIETMGLTAVTGAIPAHPQRPEMNATREELRS

SEQ ID NO: 4453 - DNA, 1419 bp, Erwinia carotovora
  CDS (1)..(1419)
atgagtcagaatgtttaccagtttatcgacttacagcgcgttgatccgcccaagaagccgctgaagattcgtaaaattgaatttgttgagatctacgagccgttctcagaaagccagtccaaagcccaggcagatcgctgcctgtcatgcggaaacccttactgtgaatggaaatgtccagtacataactacatcccgaactggctgaagctggcgaacgaaggccgcattatcgaagcggctgagttatcgcaccagactaacagcctgccggaagtgtgcggccgcgtatgcccgcaggatcgtctgtgtgaagggtcttgtacgctgaatgacgagttcggagcggtcaccatcggcaacatcgagcgctatatcaatgataaagcgatagagatgggctggaagccgagcgttgccaacgtcataccgacaggtaaacgcgtcgcgatcatcggcgctggccctgctgggctggcctgtgccgatgtgctggcacgcagtggcgtacaggccgtcgttttcgatcgtcaccctgagatcggtggcctactgaccttcggcatcccctctttcaagctggaaaaagaggtgatggtgaaacgccgtgaaatcttcaccgagatggggatcgaattccgtctgaataccgaagtcggcaaagacgtacagatgaaagcgctgctggacgagtacgatgcggtattcctcggtgtcggcacctatcagtctatgcgtggcggattggacaatgaagacgctcagggcgtctacgatgctctgccgttcctgatcgccaacactaagcagctaatgggctttgaagccgcaacagacgaaccttacatcagcatgcaggggagacgcgttgtcgtgctgggcggtggtgataccgcgatggactgcgtgcgaacctcaattcgtcaggccgcaacgcacgttacctgtgcctatcgtcgtgatgaagagaacatgcctggctccaagcgcgaagtgaaaaatgcacgtgaagaaggcgtcgagttcaaattcaacctgcaaccgctgagcgtcgaggtcaatggcgcaggcaaagtgtgcggtgtgaaaatggcgcgaactgcactgggcgtacctgatgccaatggacgtcgtcgtcctgaaatcgtagagggttccgagcacgtactggaagccgatgcggtcatcatggcgttcggcttccgtccgcacaaaatggcgtggctggcagaacatgacgtcaagctggacgatcaagggcgtattgtcgcaccggaaagctgcgataacgccttccaaaccagcaacccgaaaatttttgcgggcggcgatgcagtacgcggttcagatctggtggttaccgccatcgcagaaggtcgtaaagctgctgacggcatcatgaactatctggaagtgtag

SEQ ID NO: 4454 - protein, 472 aa, Erwinia carotovora
MSQNVYQFIDLQRVDPPKKPLKIRKIEFVEIYEPFSESQSKAQADRCLSCGNPYCEWKCPVHNYIPNWLKLANEGRIIEAAELSHQTNSLPEVCGRVCPQDRLCEGSCTLNDEFGAVTIGNIERYINDKAIEMGWKPSVANVIPTGKRVAIIGAGPAGLACADVLARSGVQAVVFDRHPEIGGLLTFGIPSFKLEKEVMVKRREIFTEMGIEFRLNTEVGKDVQMKALLDEYDAVFLGVGTYQSMRGGLDNEDAQGVYDALPFLIANTKQLMGFEAATDEPYISMQGRRVVVLGGGDTAMDCVRTSIRQAATHVTCAYRRDEENMPGSKREVKNAREEGVEFKFNLQPLSVEVNGAGKVCGVKMARTALGVPDANGRRRPEIVEGSEHVLEADAVIMAFGFRPHKMAWLAEHDVKLDDQGRIVAPESCDNAFQTSNPKIFAGGDAVRGSDLVVTAIAEGRKAADGIMNYLEV

SEQ ID NO: 4455 - DNA, 1422 bp, Acinetobacter sp
  CDS (1)..(1422)
atggcagagcgcctaaataatgactttcagtttctggatgtagcacgccaagatccagagaaaaaagatattgatgtccgcaaatctgagtttgtggaaatttacaaaccatttactgctgaagttgctgcaaatcagacgcatcgttgtttgggctgtggtaatccgtactgtgaatggaaatgcccagtacataactatattccaaactggttgaagttgattgcagagggccgtatttttcaggcggctgaattgtgtcatcaaaccaatactttgcctgaagtgtgtggtcgtgtttgtccgcaagaccgcttgtgtgaaggtgcatgtacattgaatgacggctttggtgctgtcacaattggtaatgcagaaaaatatattaatgacaccgcttttgcattgggctggcgtccagatatgtcttcagttaaatggaccaataaaaaagttgcgattattggtgcaggccctgcgggcttgggctgtgcagatattctggtgcgtaatggtgtaaagccagtggtatttgacaagcgtccagaaattggtggattgctgacctttggtattccagaattcaagatggaaaaagatgttatgaaacgccgccgtgaaattttcacgggtatgggggttgagttccgtctaaatgttgaaattggtaaagatgtcacaatcgagcaattgcttgaagactatgatgctgtattcatgggtatgggcacctacacctatatgaaaggtggcttcccaggtgaagacttagatggcgtatacgatgcactcgactttttgattgccaatgttaaccgtactcagggctgggagcaaaatccgagcgattatattagtgttgaaggcaaaaaagtgattgtattgggtggcggtgatacagcgatggactgtaaccgtacctccattcgtcaaggtgctgaagaagtaacgtgtgcataccgtcgtgacgaagccaatatgccaggttcacgtcgtgaagtacaaaatgcacgtgaagaaggcgtcaacttcctgtttaatcgccagcctatcgagattgtaggtgaaaatggtcaggtgacaggcgtaaaagtggtcactactcagcttggagctccagacagccgtggccgtcgtagtccagagccaattccaggttcggaagaagtgcttgcagccgatgcggtgctacttgcttttggtttccgtcctagtccagcagattggtttgcatcatcaagtattaacttggatggttcaggtcgtgtagtggcagcagaacagcaacaatataaattccagacatctaacccaaaaatctttgcgggtggcgatatggtacgtggttctgatctggtggtaactgcaatttgggaaggccgtgaggccgcagaaggtattttggattaccttgatgtctaa

SEQ ID NO: 4456 - protein, 473 aa, Acinetobacter sp
MAERLNNDFQFLDVARQDPEKKDIDVRKSEFVEIYKPFTAEVAANQTHRCLGCGNPYCEWKCPVHNYIPNWLKLIAEGRIFQAAELCHQTNTLPEVCGRVCPQDRLCEGACTLNDGFGAVTIGNAEKYINDTAFALGWRPDMSSVKWTNKKVAIIGAGPAGLGCADILVRNGVKPVVFDKRPEIGGLLTFGIPEFKMEKDVMKRRREIFTGMGVEFRLNVEIGKDVTIEQLLEDYDAVFMGMGTYTYMKGGFPGEDLDGVYDALDFLIANVNRTQGWEQNPSDYISVEGKKVIVLGGGDTAMDCNRTSIRQGAEEVTCAYRRDEANMPGSRREVQNAREEGVNFLFNRQPIEIVGENGQVTGVKVVTTQLGAPDSRGRRSPEPIPGSEEVLAADAVLLAFGFRPSPADWFASSSINLDGSGRVVAAEQQQYKFQTSNPKIFAGGDMVRGSDLVVTAIWEGREAAEGILDYLDV

SEQ ID NO: 4457 - DNA, 6459 bp, Candida glabrata CBS138
  CDS (1)..(6459)
atgctgtcgtctgacccatacgatcctatggaggatgcgtatgagaccagtggcaacattccggactacgctcacgatgagctatatcataatagtgaaaacaagtcctggggtcaagtggtacctggtaaagtaggactgtatgacccagactacgaacacgatgcctgtggtgtcggttttgttgcaaatgtcaacggcttgcaatcgcataagattgtctctgatgcaagatcgctattatgcaacatgactcatcgtggtgctgtttcttctgatggtaatggtgatggtgcgggtattctggtcggtattccacatggcttcatcaaaagagaattcaagttagatctaggcatcgaagtacctgaacgtggtcagtatgctgttggtaacgttttcttcaaaaaggatgactccgatgacgaaacgttgagtgagaaaagcaaagctgaaattagagtaatgcaacaaaaattcgaagacaccgcacgtaacttcaacttaaatgtggtgggatggagaaatgttccccatgactcttctattcttggagatgtagcattatcccgtgaacctgtcatattgcaaacattggtggtaccactagactccaacgaattagtggaattcaacgaaaccgtgtttaagacaaacttatacttgttcagaaagtttatcacaaagcaattcaagcctgaagattgtttctacgtttgctctttgagcaattccacaattgtctacaaaggtcaattaactccaaatcaagtttacaactactatcatgatttaacgaatgcgcatttcgaatcccatatggctttagtccattcaagattttcaactaatactttcccatcatgggatagagcacaaccattaaggtgggtggctcacaatggtgaaatcaacactttaagaggtaataagaattggatgcgttctagagaaggtgttatggtctctgaaactttcaaagataaattggattctttgtatccaattattgaagaaggtggctctgattctgctgcattagataatgtcctagaacttttaacaattaacggcactctttcattacctgaagctatcatgatgatggtgcctgaggcttatcactctgatatggactcagacttgaaggcatggtatgattgggctgcttgtctaatggaaccatgggatggccctgctctactaacttttacagatggtagatactgtggtgccattttagatagaaatggtctgagaccatgtcgttactatgttacttccgatgatagagttatctgcgcctctgaagtaggtgttatcccaattgacaactccttggttcttcagaaaggtaagctgaaacctggcgatgttttcctagtcgacactcaacaaggacaaattgtcgatacaaagaaacttaaaagtgatttctccaagagagaagatttcaagtcttggttatctaaggttatcaagttggaagatttacttcagaagacagaaaactgtgaaccagaggattttgtgctgaatgctccttcactgaaagttcaaagtgatccaagattactagctcatggctacactttcgaacaattttcaatgctacttactccaatggcactaacaggcaaagaagctcttggttctatgggtaatgatgctccattagcttgcctgaaccaagatcctgttttattatatgaatatttcagacaattattcgcacaagtgacaaatccaccaatcgaccctattcgtgaagcaaatgttatgtctttagattgttacgttggaccccaaggtaacttactagaaatgcatccatcccaatgtgaacgtctgttattgaagtccccaatattaaaatggaatgaattcaaagctattcaaaatattgaaaaagtaaatccttcatggagtgttgctaatatagatataacatttgaaaaatctgaaggtattgaaggctatatcaatgctgtcgaacgtattactaaagatgcaagtattgcaattgaagaaggtaagaagattcttattatatccgatagaagaatgggtgaacaccgtgttgcattgtcttcattactagcggttagttcgatacatcaccatttgattagaaataaacagcgtaccgaagttgcattaattttggagactggtgaagcaagagaaattcatcacttctgtgttttacttggttatggttgtgatggtattttcccttacttagcaatggaaacactaatcagaatgaacagagaaggtttagtacgtaatgttaacaatgacgaccatgatcttactgatcaagaactggtcgagaactataaacatgccatcgatagtggtatcttgaaagttatgtctaaaatgggtatttccactttggcatcatacaaaggtgcccaaatttttgaagctcttggtattgattcatccgttattgacttatgctttactggtacttcttcaagaattaagggtgtaacctttgagtatattgcacaagatgccttctcctttcacgaaaagggttatccatcaagaatgacaatcactagatctgtcaatttacctgaaactggtgaatatcactggagagatggtggatacaagcatgttaatgatccaacagccattgctgcactacaggactctgtaagacacaagaatgacgatgcttggagtttatatgtcaagaaggaaatggaagcaattaaggactgtactttaagagggttgcttgaactggattttgaaaattctacacctattcctatcgaacaagttgaaccatggactgaaattgctagaaggtttgcgtcaggtgctatgtcttatggttctatttccatggaagcgcattcaacactagcaatcgccatgaaccgtctcggtgccaaatctaactgtggtgaaggtggtgaagatgcagaacgttcattggttcatccaaatggtgacaccatgagatcagcaattaagcaagttgcttcagctagattcggtgttacttctcattatctttctgatgctgacgaaattcaaattaaaattgcacaaggtgccaagcctggtgaaggtggtgaattaccagctcataaagtatctaaaagcattgccaagactagacactccaccccaaatgttggtttgatatctccacctccacatcacgatatttactctattgaagatttgaaacaattggtgtacgatctgaaatgtgctaatccaagagccggcgtatcagtgaaattagtttctgaagtcggtgttggtattgtggcatcaggtgtagctaaagcaaaggctgaccacatcttaatttcaggtcatgatggtggtactggtgcctctagatggaccagtattaagtatgccggtttaccttgggaattaggtctagctgaaactcatcagaccctagtgttgaatgatttgagacgtaatgttgttgtccaaacagatggtcaattaaggacaggttttgacattgctgttgctgtattgttaggtgctgaatcatttacactagctacaattccattgattgttatgggttgtgtcatgctaagaagatgtcataccaacacatgtgcagttggtattgctactcaagacccttacttaagaagcaagttcaaaggtcaaccagaacatgttatcaactttttctactatctaattcaagacttaagacaaatcatggccagattgggcttcagaacaattgatgaaatggttggtcactccgaaaaattaagaagaagagcggatgctaatccaaaggtgataaatattgacttgacaccaattttaacaccagctcatactattcgacctggtgttgctacaagattcaccaagaaacaagaccataaacttcatacacgtttggataacaaactaattgatgaggccgaagttactttagataaaggtctacctgttaatattgatgccaacatcgttaacactgaccgtgccctaggttcgacactttcttaccgtgtatctaagagatttggtgagaatggtctcccaagggataccattgtcgcaaatatcaatggttctgctggccaatcatttggtgcatttttggcttcaggtatcacatttatccttgacggtgatgctaacgattatgttggtaagggtttatcaggtggtattattgttgttagacctccaaagaattccaagtttaagagtgatgagaatgttatcgttggtaatacatgtttctatggagctacttcaggtaccgcattcattgctggtagtgcaggtgaacgtttcgctgttagaaactctggtgccacaattgtagtggaaagagttaaaggtaataacgcatttgaatatatgacaggcggtagagccttagttctttctcaattagaatccattaatgccttctcgggtgcaactggtggtattgcttattgtttgacatctgattatgatgcattcctatctaagataaacaaagaaacaatcgaacttgaacatttagaggaccctgttgaaattgcttatgtcaagaacttgattcaagaacattacaactttacgaagtccgaattagcatccaatattttaggcaacttcaaccattacttgaaaaaatttgttaaagttattccaagtgattacaagaaggtgttactaaaggaagccgaagaaaaagcaaaggaaaaagaaaatgcaacagctgaatatctaaagaagctaggttctcctgcagaacctggtttggatgctacaaatggagaggttgcaaaaatgcaggcagccaagcgccaagctatttcccgtgctgtgatttccaacaagtccacattacatgaacctaaggtgttagacttggaggaagctgttcctgatgctaagcaaatggagaaaaatgctgaaaaggttgtaaagatgaatggttttatgaaatacaatgttcgccacgaaggacatagagatcctgccactagaacaaaagattggaaggaattcacaaagcctgtctccaagcgtgacgcaaaataccaaactgctagatgtatggattgtggtactccattttgtcaatctgatactggttgtcctttatcaaatattattccaaagttcaatgaacttgttttcaagaaccaatggaagcttgctctagacaagttgttagaaaccaacaatttcccagaatttacaggtagagtttgtcctgccccatgtgaaggtgcttgcaccctgggaatcattgaagatccagttggtatcaaatctattgaaagaatcattattgataatggtttcaaggaaggttggattattccaactcctccttccacgaggactggtcgtcgcgttgcaattattggttccggccctgcaggtatggcttgtgctgacatgttaaacagagcaggccattcagtgactgtgtttgagagagctgatcgctgtggtggtttactgatgtacggtattccaaatatgaaactggataaatctattgttcaacgtagactagatttactctcagctgaaggtattgaattcgttaccaacacagagataggtaaagatatcaccgttgatgaactgaagagtaactacgactctgttgtgtatgcaattggttcaactattccaagagatttgccaataaaaggtcgtgaattgaagaatattgattacgcaatgaacctccttactgaaaatacaaaggcattattatcaaacgatcttgagactatcaggaagcagattgaaggtaagagagttctcgtcattggtggtggtgacacaggtaatgactgtttgggtacctctgttagacatggcgctaaatctgttgttaattttgaactgctaccacaaccaccaaacgagcgtgccaaggataacccatggccacaatggccacgtataatgcgtgtagactatggtcatgctgaagttaaggaacattacggtagagatcctcgagaatactgtatcttatctaaggagttcattggtgatgaagagggtaatgttacaggtattaaaactgcacgtgttgaatggaagaaatcacaaagtggtgtttggcagatggttgaagtccctaacagtgaggaactgtatgaagctgatattgtgttactatctatgggtttcgttggaccagaattactgaacaacgatactaacatcaagaagactagaagaggtacaattgaaacactatcacattcatcatacaatattgacggcggtaaaatgtttgctgctggtgattgtagaagaggtcagtcattgattgtctgggccattcaagaaggtcgtaagtgtgctgccgctgttgacgaatttttaatgggcgatacttacctcccaggtagcggtggtattgtgaaacgtgattacaggttattagaggaactagctgccacagtatga

SEQ ID NO: 4458 - protein, 2152 aa, Candida glabrata CBS138
MLSSDPYDPMEDAYETSGNIPDYAHDELYHNSENKSWGQVVPGKVGLYDPDYEHDACGVGFVANVNGLQSHKIVSDARSLLCNMTHRGAVSSDGNGDGAGILVGIPHGFIKREFKLDLGIEVPERGQYAVGNVFFKKDDSDDETLSEKSKAEIRVMQQKFEDTARNFNLNVVGWRNVPHDSSILGDVALSREPVILQTLVVPLDSNELVEFNETVFKTNLYLFRKFITKQFKPEDCFYVCSLSNSTIVYKGQLTPNQVYNYYHDLTNAHFESHMALVHSRFSTNTFPSWDRAQPLRWVAHNGEINTLRGNKNWMRSREGVMVSETFKDKLDSLYPIIEEGGSDSAALDNVLELLTINGTLSLPEAIMMMVPEAYHSDMDSDLKAWYDWAACLMEPWDGPALLTFTDGRYCGAILDRNGLRPCRYYVTSDDRVICASEVGVIPIDNSLVLQKGKLKPGDVFLVDTQQGQIVDTKKLKSDFSKREDFKSWLSKVIKLEDLLQKTENCEPEDFVLNAPSLKVQSDPRLLAHGYTFEQFSMLLTPMALTGKEALGSMGNDAPLACLNQDPVLLYEYFRQLFAQVTNPPIDPIREANVMSLDCYVGPQGNLLEMHPSQCERLLLKSPILKWNEFKAIQNIEKVNPSWSVANIDITFEKSEGIEGYINAVERITKDASIAIEEGKKILIISDRRMGEHRVALSSLLAVSSIHHHLIRNKQRTEVALILETGEAREIHHFCVLLGYGCDGIFPYLAMETLIRMNREGLVRNVNNDDHDLTDQELVENYKHAIDSGILKVMSKMGISTLASYKGAQIFEALGIDSSVIDLCFTGTSSRIKGVTFEYIAQDAFSFHEKGYPSRMTITRSVNLPETGEYHWRDGGYKHVNDPTAIAALQDSVRHKNDDAWSLYVKKEMEAIKDCTLRGLLELDFENSTPIPIEQVEPWTEIARRFASGAMSYGSISMEAHSTLAIAMNRLGAKSNCGEGGEDAERSLVHPNGDTMRSAIKQVASARFGVTSHYLSDADEIQIKIAQGAKPGEGGELPAHKVSKSIAKTRHSTPNVGLISPPPHHDIYSIEDLKQLVYDLKCANPRAGVSVKLVSEVGVGIVASGVAKAKADHILISGHDGGTGASRWTSIKYAGLPWELGLAETHQTLVLNDLRRNVVVQTDGQLRTGFDIAVAVLLGAESFTLATIPLIVMGCVMLRRCHTNTCAVGIATQDPYLRSKFKGQPEHVINFFYYLIQDLRQIMARLGFRTIDEMVGHSEKLRRRADANPKVINIDLTPILTPAHTIRPGVATRFTKKQDHKLHTRLDNKLIDEAEVTLDKGLPVNIDANIVNTDRALGSTLSYRVSKRFGENGLPRDTIVANINGSAGQSFGAFLASGITFILDGDANDYVGKGLSGGIIVVRPPKNSKFKSDENVIVGNTCFYGATSGTAFIAGSAGERFAVRNSGATIVVERVKGNNAFEYMTGGRALVLSQLESINAFSGATGGIAYCLTSDYDAFLSKINKETIELEHLEDPVEIAYVKNLIQEHYNFTKSELASNILGNFNHYLKKFVKVIPSDYKKVLLKEAEEKAKEKENATAEYLKKLGSPAEPGLDATNGEVAKMQAAKRQAISRAVISNKSTLHEPKVLDLEEAVPDAKQMEKNAEKVVKMNGFMKYNVRHEGHRDPATRTKDWKEFTKPVSKRDAKYQTARCMDCGTPFCQSDTGCPLSNIIPKFNELVFKNQWKLALDKLLETNNFPEFTGRVCPAPCEGACTLGIIEDPVGIKSIERIIIDNGFKEGWIIPTPPSTRTGRRVAIIGSGPAGMACADMLNRAGHSVTVFERADRCGGLLMYGIPNMKLDKSIVQRRLDLLSAEGIEFVTNTEIGKDITVDELKSNYDSVVYAIGSTIPRDLPIKGRELKNIDYAMNLLTENTKALLSNDLETIRKQIEGKRVLVIGGGDTGNDCLGTSVRHGAKSVVNFELLPQPPNERAKDNPWPQWPRIMRVDYGHAEVKEHYGRDPREYCILSKEFIGDEEGNVTGIKTARVEWKKSQSGVWQMVEVPNSEELYEADIVLLSMGFVGPELLNNDTNIKKTRRGTIETLSHSSYNIDGGKMFAAGDCRRGQSLIVWAIQEGRKCAAAVDEFLMGDTYLPGSGGIVKRDYRLLEELAATV

SEQ ID NO: 4459 - DNA, 1464 bp, Staphylococcus aureus
  CDS (1)..(1464)
atgggtgaatttaaaggatttatgaagtatgacaaacagtacttaggtgaattatcactggtagaccgtttgaagcatcataaagcatatcaacaacgatttactaaagaagatgcctctatccaaggtgcacgatgtatggattgtggaacgccgttttgtcaaaccggacaacagtatggtagggaaacaataggttgtccaattggaaactacattcctgaatggaacgacttagtgtatcatcaagattttaaaactgcttatgaacgcttaagcgaaacaaataactttcctgactttacagggcgtgtatgtcctgcaccatgcgaaagtgcttgtgtgatgaagattaatagagaatcgattgcgattaaaggtattgaacgcacaattattgatgaagcttttgaaaatggttgggtagcgccgaaagttccgagtcgccgtagagatgaaaaagtggcaatcgttggaagcggtccagcaggattagctgctgctgaagaacttaatctactaggatatcaagtaactatttatgaacgtgctagagaatcaggcggtttattaatgtatggtattccgaatatgaaacttgataaagatgtggttcgacgtcgtattaagttaatggaagaagcgggcattactttcattaatggtgttgaagtcggtgttgatattgataaagcaacgttagaatctgagtatgatgccattatattatgtactggtgcacaaaaaggtagagatttacctttagaaggacgcatgggtgatggtatacatttcgctatggattatttaactgaacaaacgcagttgttaaatggagaaattgatgatataacaataactgcaaaagataagaatgtcattatcattggtgctggtgatacaggggcagactgtgtagcgacagcattaagagaaaattgtaaatcgattgttcaatttaataaatatacgaaattgccagaagcaattacatttacagaaaatgcatcatggcctttagcaatgccggtgtttaaaatggactatgcgcaccaagagtacgaagctaagtttggtaaggaaccacgtgcatatggtgttcaaacaatgcgttacgatgttgacgataaaggacacatacgtggtttgtatactcaaattttagagcaaggcgaaaatggtatggtcatgaaagaaggacctgaaagattttggcctgctgaccttgtattattatcaatcggcttcgaaggtacagaaccaacagtaccgaatgcttttaacattaaaacggatagaaatcgaatcgtggcggatgatacaaactatcaaactaataatgaaaaggtatttgctgctggagatgctagacgtggtcaaagtttagttgtatgggcaattaaagaaggtagaggcgtagcgaaagcagtagatcagtatttagctagtaaagtttgtgtatag

SEQ ID NO: 4460 - protein, 487 aa, Staphylococcus aureus
MGEFKGFMKYDKQYLGELSLVDRLKHHKAYQQRFTKEDASIQGARCMDCGTPFCQTGQQYGRETIGCPIGNYIPEWNDLVYHQDFKTAYERLSETNNFPDFTGRVCPAPCESACVMKINRESIAIKGIERTIIDEAFENGWVAPKVPSRRRDEKVAIVGSGPAGLAAAEELNLLGYQVTIYERARESGGLLMYGIPNMKLDKDVVRRRIKLMEEAGITFINGVEVGVDIDKATLESEYDAIILCTGAQKGRDLPLEGRMGDGIHFAMDYLTEQTQLLNGEIDDITITAKDKNVIIIGAGDTGADCVATALRENCKSIVQFNKYTKLPEAITFTENASWPLAMPVFKMDYAHQEYEAKFGKEPRAYGVQTMRYDVDDKGHIRGLYTQILEQGENGMVMKEGPERFWPADLVLLSIGFEGTEPTVPNAFNIKTDRNRIVADDTNYQTNNEKVFAAGDARRGQSLVVWAIKEGRGVAKAVDQYLASKVCV

SEQ ID NO: 4461 - DNA, 1830 bp, Oryza sativa
  CDS (1)..(1830)
atgatgatacaacagcacagacttcatacacaaagtgatttggccagagatatactcttgaattttgatactctcctcccaaaatttataaaagtatatccaagggattacaagcgggttttggataaactaaaagaagagaaggctgctaaagaagcagagcaaaaggcaagagaagtggtggataagaagccagttgaagtaattcaagctccaaatggcatttcagtaaagacagagaaagtaatgaacgaagagccatcaagccgaccatcacgagtttcaaatgctgtaaagtaccgaggtttcataaaatatgagcgagagggtacttcttacagagatccaaatgagcgtgtaaaagattggaatgaagttgcaattgaattggttcctgggccactgctaaagacgcaatctgctcggtgcatggattgtggcactcctttctgtcatcaggagggttctggtgctggttgtcctcttggaaataagattcctgaattcaatgaattggttcatcagaatagatggcatgaagccttggatcggctacttgagacaaacaatttccctgagtttactggacgagtttgtcctgctccttgtgagggttcgtgcgtacttggcattatagacaatccagtatccataaaaagcatagagtgcgccatcatagacaaaggatttgaagagggatggatggtaccacggcctccacttcggagaacaggaaagagagttgctattgttggcagtggcccagctggtctagctgctgcagaccaactgaacaaaatgggccatttcgtgactgtctttgaacgtgctgaccgtattggaggactgatgatgtatggggttccaaatatgaaggctgacaaagagggcattgttcagcgacgtgtcgagttgatggctaaggagggggttcaattcattgtgaatgcccatgttggaagtgaccctttatactccgttgaaaagctccgctctgagaatgatgccattattttggcctgtggagctacaaagccaaaagatctccctattcctggacgggagttggcaggcatccatttcgctatggaatttcttcatgccaataccaaaagtttacttgacagcaacttggaggatggtaactacatatcagcccaagggagaaaggtggttgtcattggtggtggagacacaggcacagattgcattgggacatccattaggcatggttgcaccaaccttgtaaatcttgaacttttgccagagccaccaagaaagagggcacctgacaacccctggccccagtggcccaggatcttccgtgttgattatgggcaccaggaagcaactagcaagtttggaaaagatccaagaagttacaaagtcctgacgaagcgatttatcggagatgagaatggaaatgtgaaggcccttgaggtaatacgtgttgaatggggaaaggtgaacggaaggttccaattcaaggaagttgaaggatcagaagaaattattgaggccgatcttgtcctcttagctatgggattcctgggtcccgaagcgactgttgctaacaagctgggtctagaacaagacatgaggtcaaacttcaaagctcaatttggaaactttgcgaccaatgtggaaggtgtatttgctgctggagactgcagacgtgggcaatcactggttgtttgggccatcacagaggggcgccaagctgcagcagccgtagacaattacctgtcgaaggatgatgaaggtgaaaccaatggcacagaggacattgctgtctcaagtgaaggtctggtccaacccgtagttgcatag

SEQ ID NO: 4462 - protein, 609 aa, Oryza sativa
MMIQQHRLHTQSDLARDILLNFDTLLPKFIKVYPRDYKRVLDKLKEEKAAKEAEQKAREVVDKKPVEVIQAPNGISVKTEKVMNEEPSSRPSRVSNAVKYRGFIKYEREGTSYRDPNERVKDWNEVAIELVPGPLLKTQSARCMDCGTPFCHQEGSGAGCPLGNKIPEFNELVHQNRWHEALDRLLETNNFPEFTGRVCPAPCEGSCVLGIIDNPVSIKSIECAIIDKGFEEGWMVPRPPLRRTGKRVAIVGSGPAGLAAADQLNKMGHFVTVFERADRIGGLMMYGVPNMKADKEGIVQRRVELMAKEGVQFIVNAHVGSDPLYSVEKLRSENDAIILACGATKPKDLPIPGRELAGIHFAMEFLHANTKSLLDSNLEDGNYISAQGRKVVVIGGGDTGTDCIGTSIRHGCTNLVNLELLPEPPRKRAPDNPWPQWPRIFRVDYGHQEATSKFGKDPRSYKVLTKRFIGDENGNVKALEVIRVEWGKVNGRFQFKEVEGSEEIIEADLVLLAMGFLGPEATVANKLGLEQDMRSNFKAQFGNFATNVEGVFAAGDCRRGQSLVVWAITEGRQAAAAVDNYLSKDDEGETNGTEDIAVSSEGLVQPVVA

SEQ ID NO: 4463 - DNA, 4185 bp, Photobacterium profundum
  CDS (1)..(4185)
atgccgagaaccataaagaggcaatcaatgataaatgtcacgatagatggacaaaaattccccgtaaacgcgcaacaaaccctactcgaagctgcagctgactgtaatattgaaataccgtcactttgtggtctcaataaaaatggcgagaaagtgccttgtgaactttgtgtcgtcgatgtagctgggcaaggtattcaacgtgcctgtgaaattttacccgttgaaaacatgattgtgaccactgtttctgaagaactgtcttcgctacgtcaaacagcactaaaccgtattctttctgatcactatgccgattgtgaggcgccgtgccaaacagcatgtcctgctggcgtagatattcaatcttatctttaccatatttctcaagatgatcatgttaaagcggtggaagtcattaaacgaacactgcctatgccgttatccattggccgtgtttgccctgcattttgtgaaactgaatgccgtcgtggtttagtcgatgaaccaatcgccattcgccagcttaaacgacatgcagccgatatagatcttgctgcacaagaaaattatgtaccgccaaagaaagcatcaaaaggtatgtccattgcagttgtaggtagtggccctggcggcttaacgtgtggctattatctaacaaacgaaggttacgatgtaacagtatttgaatcgatgcctgaagcgggtggttggttacgttacggtatacctgaataccgtttgcctaaggctattttggcaaaagaaattgagctaatgtgccgaaacggcatgcaagtactgacctcgaagaagttaggcgatgatttcacactcacgcaactaacagaagattatgatgcggtatgccttgcagttggtgcttctcaagccgtagaaatgaattataccggtagtgatcttaatggttgttatttgggcgttgattacctgaaagattacgtcactgaaggttgttacattacgggtaaaaaagtagccgttattggtggaggtaatactgccattgactgtgcacgaacagctgtacgtgatggtgccgataccacgcttatttaccgtcgtacacgtgatgaaatgcccgctgaagattatgaaattgtagaggccgagcatgaaggcgttaaatttcacttcttgacaaacccagttgagaatattgctgacgcgaatggtcacgtgtgtgaaattaagctagagaaaatggcattgggtgaggctgatgcatctggtcgtcgtcgaccggaaccgacaggtaaatactttaccgaagcgtttgataccgttattgccgcggtttcgcaaaagcctgatttaagcttcatggataaagaagaattagatctgccattaacgcgctggaatactcaagatgctaatccgaataccatgcactcaggtttaggtaatgtattcagtattggtgatttccgtcgtggacccgcaacagccattgaggcggttgcagatgggcgcattgctgcagaggcgattgaccgcttcttcgacggtgatatggaaaacattccagttaagctttttaattcacaaaaagagcgcaagttgaaacaggttgctcctgagcagtttgtagagattaaaaaagtaatgcgctctgtaatgccagaattgagcacgaaagagcgagagttaagctttagtgaagttgaaacggggtttaacaatgacgaagcaatgcgcgaagctgcacgttgtttagagtgcggttgccaagcaaacaccgattgtaagttacgtgactatgcgaccgaatatgatgttgcagaaaccgaattaaccaatgagagttgccagaagttccatgtagatgatagctctgaattcatcgtgttcgacgctaaccgttgcattagttgtggtcagtgtgttgaagcctgtaatgaaaaagcggttcatggcacgctaagttttgcaaaaaatgctgatggttcaagtgcgagccgccctgaatgccgccctggctttgataagggctacagtatgggtgactctaattgtgttcaatgtggggcatgtgttcaagtgtgtcctactggcgcactggtcgataagcgagataagtcgcaaggtcgaatcgaaatgctgaagccggttgagacgatttgtacctattgtggtgtgggttgtaagctgacgatgtatgtcgatgaatcattaaatcagattcgttatgtacaaggcgtaaaagattcgccagtaaaccaaggtatgttatgtgttaaaggacgctttggttttgattttgtaaatagcaaagagcgtttaacaaccccgctaattcgtaaaaatggtgaattacagccagccagttgggaagaggctatttcgctggtcgctgataaattcaatgcgattaaagccgatagaggcggcaatgcgttagcgggtttctcatcggcgaaaaccaccaacgaagataactttgcattccaaaagtttattcgtcgagaattagaaacgaataacgtcgatcactgtgcacgtttgtgtcacgcatcaacagtaacaggattagaagcgtcaattggtagtggcgcaatgaccaatgacattccaagcattaagttctctgatgtggtgtttatcattggttccgatacgaccgcggcgcacccgatcattgcatcacatatcaagcaagcgattcgtacgggtaaaacacgtttaatcgtggcagatcctaaacgtattgatattgccgatcattccgatttgtatgttgcacatcgtccgggtacggatgtgatgctaatgaacggcatcatgcagcaaattatcaaaaacgactggcatgataaaacgtatatcaatgagcgaacagaaggctttgaagcattaaaagcagaagtgatgctcgatagctatgcaccagataaagtggaattggtcacgggtgtgaaagcgcaagacgttatcaaaatagcgcagatgattggtactgctaatcgtactgccgtgtattactcgatgggtattacgcagcatacaacgggccatgataatgtacgttctgtggctaacttgcagatgttgtgcggtaacattggcatcgaaggtggtggtattaatccactacgtggtcaatctaatgtgcaaggtgcctgtgatatgggcgcactaccaaacaacttccctggttaccagaaagtacaggtgccagaaattcatgccaaatttgccaaagcatggaataaacccaacttaccgaaagaggatgggttaaccctaaccgagattatcgatgctgcatgtcatgatcaggtgaaaggtttgtatgtaatgggggaaaacccggtattgagtgatccaaaccaagcccatgtaatagaagggttagagaagttggatttcttagtggtgcaagacattttcttaactgaaactgcgcaatatgcggatgtcgttttaccgtcgtgttctttcgcagaaaaatcgggtcatttcacgaatactgaacgccgcgttcaacgtatttcacctgcggttaatcctccaggggaagcgaaggaagattggtggatcattcaaagtatcgcaaatgcaatggggagtgattgggcgtatcaatcggtaaaagacattactgaagagatcacccagttaacaccacaatatgcgggtattcactgggatcgtgtcggtagagatggccttcaatggccgtgtaacgacaacgcacctgatggtacgcgtgttatgcacacatctcagtttacccgtggtaaaggggagatggctgcaatcccgttccgttatgcggctgagttgcctgatgcagaatatcctcttattttgacaacagggcgtttattagaacaattccacactggcagcatgacaagaaaaaccaaagggttggataacctggctggccctcgtgcaatgatttcggtcgttgatgcagagcgtcttggtgtgcgtaatggtgaaatgcttaaagtgtcgacgcgtcgtggaagcattgaaacccctgcgtttgttactaagcgtatgcaagaaggtgtggtatttgtaccgttccattttgctgaagcgcctgccaaccgtttaacgacgacggcaacggatccccatgcgaagatccccgagttcaaagtggcagcggttaaaattgaaaaagtacgggtgttagtagagacctgctga

SEQ ID NO: 4464 - protein, 1394 aa, Photobacterium profundum
MPRTIKRQSMINVTIDGQKFPVNAQQTLLEAAADCNIEIPSLCGLNKNGEKVPCELCVVDVAGQGIQRACEILPVENMIVTTVSEELSSLRQTALNRILSDHYADCEAPCQTACPAGVDIQSYLYHISQDDHVKAVEVIKRTLPMPLSIGRVCPAFCETECRRGLVDEPIAIRQLKRHAADIDLAAQENYVPPKKASKGMSIAVVGSGPGGLTCGYYLTNEGYDVTVFESMPEAGGWLRYGIPEYRLPKAILAKEIELMCRNGMQVLTSKKLGDDFTLTQLTEDYDAVCLAVGASQAVEMNYTGSDLNGCYLGVDYLKDYVTEGCYITGKKVAVIGGGNTAIDCARTAVRDGADTTLIYRRTRDEMPAEDYEIVEAEHEGVKFHFLTNPVENIADANGHVCEIKLEKMALGEADASGRRRPEPTGKYFTEAFDTVIAAVSQKPDLSFMDKEELDLPLTRWNTQDANPNTMHSGLGNVFSIGDFRRGPATAIEAVADGRIAAEAIDRFFDGDMENIPVKLFNSQKERKLKQVAPEQFVEIKKVMRSVMPELSTKERELSFSEVETGFNNDEAMREAARCLECGCQANTDCKLRDYATEYDVAETELTNESCQKFHVDDSSEFIVFDANRCISCGQCVEACNEKAVHGTLSFAKNADGSSASRPECRPGFDKGYSMGDSNCVQCGACVQVCPTGALVDKRDKSQGRIEMLKPVETICTYCGVGCKLTMYVDESLNQIRYVQGVKDSPVNQGMLCVKGRFGFDFVNSKERLTTPLIRKNGELQPASWEEAISLVADKFNAIKADRGGNALAGFSSAKTTNEDNFAFQKFIRRELETNNVDHCARLCHASTVTGLEASIGSGAMTNDIPSIKFSDVVFIIGSDTTAAHPIIASHIKQAIRTGKTRLIVADPKRIDIADHSDLYVAHRPGTDVMLMNGIMQQIIKNDWHDKTYINERTEGFEALKAEVMLDSYAPDKVELVTGVKAQDVIKIAQMIGTANRTAVYYSMGITQHTTGHDNVRSVANLQMLCGNIGIEGGGINPLRGQSNVQGACDMGALPNNFPGYQKVQVPEIHAKFAKAWNKPNLPKEDGLTLTEIIDAACHDQVKGLYVMGENPVLSDPNQAHVIEGLEKLDFLVVQDIFLTETAQYADVVLPSCSFAEKSGHFTNTERRVQRISPAVNPPGEAKEDWWIIQSIANAMGSDWAYQSVKDITEEITQLTPQYAGIHWDRVGRDGLQWPCNDNAPDGTRVMHTSQFTRGKGEMAAIPFRYAAELPDAEYPLILTTGRLLEQFHTGSMTRKTKGLDNLAGPRAMISVVDAERLGVRNGEMLKVSTRRGSIETPAFVTKRMQEGVVFVPFHFAEAPANRLTTTATDPHAKIPEFKVAAVKIEKVRVLVETC

SEQ ID NO: 4465 - DNA, 1611 bp, Photobacterium profundum
  CDS (1)..(1611)
atgaccttacccccagaccttaaaatgaaaaaagggtcaggggccattcgtacaaaacttcctatctattccaattccttaccaccttgtaatcacgcctgtcctaccgggagtaatatacaagaatggctatccctcgctcagtcagagcactatgaagatgcttttcaagcgttaatcaaaaataacccaatgcctgcgattcatggtcgtgtgtgttaccacccgtgcgaatcggcgtgtaaccgtaccaacgtggatcaagcggtgagtattcatgccgttgaacgttatttaggtgatcaagcgttagtcaataattggcaagtacgttttcaggccgagccaaccggtaaacgtgtattggttgttggcgcgggtcctagtggtttagcgacggcgtatcacctcaagcgtaaagggcatgaggttgaaatacgtgattcagcaccaatggctggcggcatgatgcactttggtattcctgcataccgtttaccgcgtgatattttagagaatgaaattgcacgcatcgaagccatgggcatcaagattatattgaaccacaaagtggaaaatttactggccgaaaaagtgaaagggcagtttgatgcggttttcctagcgattggtgcacatgtcggtcgtggagttgatattccgaacgatgagcctggaaaggtcaatgatgcggtttcatatttacgcgatgttgaaatgggcaccgcccccatattaggtaaacgtgttgcagtctatggcggcggtaatactgcgatggatgccgcccgaactgcccgtcgtttaggggccgatgtgacggtgatttaccgtcgtgatcgtgcacacatgcccgcccatgattttgaatgtgtcgaagcaatggaagaaggcgtgactttccattggcagcggaccattaaagaaatcgatggtacggcgtttacgttggaaaaaatggcgattgatgacaatggtcgtccgcaaccgactggcgaatttgaaacagtgaaagcggattcattgattctggctctgggtcagaatattgataccaagttgaccgaatcgataccgtgtgttgaacacaaacacgatggaaccgtgatcgtaaatgaacaaatgatgacgggttacaaagggctgtttgcgggcggtgatatggtaccaagcgaccgcaccgttaccattgctgttgggcacggaaagaaagccgctgcacacattgatgctttcctcaatcaccgtagtttcaacaaaatcagcaagcaaccgctgatccgctttgataagttacacctgtggtacaaaaccgatgccgagcagagtgagcaacccgcgatcccagtgatccagcgtgcgacttcatttgatgaagtggtgggtgggttaaccgaagaagaagccttatacgaggcacagcgttgttattcttgcggtaactgctttgaatgtaatggttgtttgggggcttgtccgcaaggtgcgattacccatcttgggaagggcaaaggctataaggtggattacgacaagtgcactggctgtgaagcctgctattcccaatgtccttgtcatgcgatcgaaatggtcgcggcactaacggaatag

SEQ ID NO: 4466 - protein, 536 aa, Photobacterium profundum
MTLPPDLKMKKGSGAIRTKLPIYSNSLPPCNHACPTGSNIQEWLSLAQSEHYEDAFQALIKNNPMPAIHGRVCYHPCESACNRTNVDQAVSIHAVERYLGDQALVNNWQVRFQAEPTGKRVLVVGAGPSGLATAYHLKRKGHEVEIRDSAPMAGGMMHFGIPAYRLPRDILENEIARIEAMGIKIILNHKVENLLAEKVKGQFDAVFLAIGAHVGRGVDIPNDEPGKVNDAVSYLRDVEMGTAPILGKRVAVYGGGNTAMDAARTARRLGADVTVIYRRDRAHMPAHDFECVEAMEEGVTFHWQRTIKEIDGTAFTLEKMAIDDNGRPQPTGEFETVKADSLILALGQNIDTKLTESIPCVEHKHDGTVIVNEQMMTGYKGLFAGGDMVPSDRTVTIAVGHGKKAAAHIDAFLNHRSFNKISKQPLIRFDKLHLWYKTDAEQSEQPAIPVIQRATSFDEVVGGLTEEEALYEAQRCYSCGNCFECNGCLGACPQGAITHLGKGKGYKVDYDKCTGCEACYSQCPCHAIEMVAALTE

SEQ ID NO: 4467 - DNA, 3144 bp, Photobacterium profundum
  CDS (1)..(3144)
atgggagacatcatgcgtcccgttccatttggcgagcttctcaatcgtatgtttagcgaatacaaagagagcaagtccatttttggaatcccatcgaagcagttttatcgaaaagaaaatgctaagagcttatccgtttggggcgaacattgtgaaacacctgtagggccagcagccggtccacacacgcagttggcacaaaacattgtttgttcgtggctagcgggcggacgtttcatggaacttaaaactgtccagaaattggatcagttagaaatcgctaaaccgtgtattgatgcagaagatgagtgcttcaatacggaatggtctaccgaattcactttggtaaaagcgtacgatgaatacttaaaagcgtggattgcacttcacctacttgaagaggtgtttgaccctcgtacagaaggggaagataagtcatttgttttcaatatgagcgttggttatgacttggccggtattgaaactgctccaatgcaaaaatatatcgatgatatggtcgattctagccaacatgaaaatttccatgcgtatgttgcagagctaaaaaccttcattaacgatcctgaattcattaaaacctacggatttgagcaccgtcttgcacgtttagagaacttacccgccagtatttcgactcaactaacacgtggcgttacgttatcgaccatgcacggttgtcctccgaatgaaatcgaagcaatttgtcgttatatgattgccgataaacatatcaatactttcgtaaaattaaacccaacgttgcttggttacacgcgtgttcgtagcattatggataacgctggctttgattacattgccttaagtgaagagtcatttagtcacgatttacaaattgaacccgcgaaagccatgcttcaccgtttggttgatttaggcaaagaaaaaggcatcggttttggtgttaaattaaccaacacattaggtacgctgaataaaaaaggacgcttgccagacaaagaaatgtacatgtctggtcgtgctttgttcccattgtcgattaatgtcgcgctcgaattgtcacgtgaatttaatggtacgttgcctatttcatattctggcggcgcaagtaaattcaatatcaaagagatttttgaaacgggtattcgtcctatcaccatggcaaccgatctgttgaagcctggtggttatttgcgtttagccgattgtgccaaagagctggaaacaagcagcgaatggggcatgggtaaagttgatttggtgaaactggaagccttagctgctaaatcattagtggcggaatacacgcaaaaagaatggcgtggaccagaagaaatcagtgtgaaaaaagcgctgccattaaccgactgttacgttgcgccttgtgtaacggcatgtcctatcagccaagacatacctgaatatattcgtttaatgggtttaagccagtataccgaagctctggaagtaatttattcacgtaatgcgctacctgcaattactgggcatatttgtgatcaccagtgccagtacaactgtacccgtcgtgattacgaaggtgcattgaacattcgtgaaatgaaaaaggttgcccttgcaaaaggctgggaaggctataaagccaaatggcatgcaccggatctagacagcgaaaaacatccgattgccgtgattggtgcgggtccttcaggtttatctgcggcctactttatggcgcgtgcgggtcatcctgtaacggtttttgagaaagaacataatgcaggtggtgtggttaaaaatatcattcctcaattccgtattcctgccgaagtgattcaacatgatattgactttgtgcaagatcatggtgtgaatatcgagtacggctgtaatccacatatgacggtggatacactgaaatcgagtggctttaaatatgtatgtttgggtataggggcagataaaggcaaccctatgtcgttaacgggtgataacaccaatgtgttcaagtcgttagagttcttacgtagttttaatgatggcgagtttacgcctagccctgaacacgcaccaatgcatacattaggtaagcatgttgccgttgttggcgcaggcaatacagcgatggacagtgcaagagcggcattgcaagttgatggcgttgaaacagttacggtattgtaccgtcgtacattggctgaaatgccagcttataaagatgaatatgatgaagccgttgaagatggtgtgaagttcatgttcttgactaacccagaagagtttaatgctgacggtacggtagttgcccgcgttatgaaattgggtgagcctgatgaaaaagggcgtcgtcgtccggttgcaaccgatgaaacggttgagctgcatgtagatgcgcttattaccgctgttggtgagcaaagcaatcgcgatgcacttacccgtattggtattccgatgggcgaagatggttggcctgtcgtaaatagtgaaacaggtgaaaccagtgtcgagaatgtattcctaatgggcgatgcaagtacaggcccgtcatccattgtttcggctatttctggtggacgcaaagctgcaacaacgattcttgcgcgagaagctcaaaatgatgagttaattgccgtgaaatcagatgtgcaagtggacgatatttatgcccgtaaaggggagattcaagtcaagctgattgaagcgaatacgcttgaaattgatgaccatgaagcgtttatccaacaagaatcacagcgttgcttagagtgctcgtatgtttgtagcaagtgtgtcgacgtatgtcctaaccgtgcaaacatttctctacctattccgggcttccgtgatcagttccaaacaatacacctcgatgcttactgtaatgaatgtggtaactgtgcccagttctgcccatgggacagcaaaccgtacaaagataagtttactctgtttaacctacgcgatgattttaccaatagcacaaatgcaggcttctatatcgaaggaactgaagtgctagtacgttctgaaggggaaatttacaccttcagcatcaatgagcaaagtgaactcgatatgccagagtcgttagccgatgaagcaaccattattagctacgtgcatgcacatcatagctacctacttggcaaagtggacgtatag

SEQ ID NO: 4468 - protein, 1047 aa, Photobacterium profundum
MGDIMRPVPFGELLNRMFSEYKESKSIFGIPSKQFYRKENAKSLSVWGEHCETPVGPAAGPHTQLAQNIVCSWLAGGRFMELKTVQKLDQLEIAKPCIDAEDECFNTEWSTEFTLVKAYDEYLKAWIALHLLEEVFDPRTEGEDKSFVFNMSVGYDLAGIETAPMQKYIDDMVDSSQHENFHAYVAELKTFINDPEFIKTYGFEHRLARLENLPASISTQLTRGVTLSTMHGCPPNEIEAICRYMIADKHINTFVKLNPTLLGYTRVRSIMDNAGFDYIALSEESFSHDLQIEPAKAMLHRLVDLGKEKGIGFGVKLTNTLGTLNKKGRLPDKEMYMSGRALFPLSINVALELSREFNGTLPISYSGGASKFNIKEIFETGIRPITMATDLLKPGGYLRLADCAKELETSSEWGMGKVDLVKLEALAAKSLVAEYTQKEWRGPEEISVKKALPLTDCYVAPCVTACPISQDIPEYIRLMGLSQYTEALEVIYSRNALPAITGHICDHQCQYNCTRRDYEGALNIREMKKVALAKGWEGYKAKWHAPDLDSEKHPIAVIGAGPSGLSAAYFMARAGHPVTVFEKEHNAGGVVKNIIPQFRIPAEVIQHDIDFVQDHGVNIEYGCNPHMTVDTLKSSGFKYVCLGIGADKGNPMSLTGDNTNVFKSLEFLRSFNDGEFTPSPEHAPMHTLGKHVAVVGAGNTAMDSARAALQVDGVETVTVLYRRTLAEMPAYKDEYDEAVEDGVKFMFLTNPEEFNADGTVVARVMKLGEPDEKGRRRPVATDETVELHVDALITAVGEQSNRDALTRIGIPMGEDGWPVVNSETGETSVENVFLMGDASTGPSSIVSAISGGRKAATTILAREAQNDELIAVKSDVQVDDIYARKGEIQVKLIEANTLEIDDHEAFIQQESQRCLECSYVCSKCVDVCPNRANISLPIPGFRDQFQTIHLDAYCNECGNCAQFCPWDSKPYKDKFTLFNLRDDFTNSTNAGFYIEGTEVLVRSEGEIYTFSINEQSELDMPESLADEATIISYVHAHHSYLLGKVDV

SEQ ID NO: 4469 - DNA, 1473 bp, Photobacterium profundum
  CDS (1)..(1473)
atgggtaagcctacaggatttttagaatttggtcgtgagctaccacaaaaggtagatccaagcgttcgtattcaagataacaaagaatttgttcttaatgacgactttggcgataagatcaatactcaagcatcacgttgcatggattgcggcgtacctttctgtcacaacgcgtgcccgattggtaacatcatcccagagttcaacgatgccgttttccgagatagctgggaagaagcgtggaacattttaagttcaaccaataacttccctgaatttactggtcgtgtatgtccagctccttgtgaaagtggctgtgtattgggtatcaaccaagatccaatcacgatttgtaatatcgagaaaaccattgtcgaaacagcctatcgtgaaggatatgcaaaaccgaaaacaccacgcacacgtacaggcaaaaccattgctatcatcggttctggtcctgcgggtctatccgctgccgagcagttaaacagcgcgggtcattgtgtgacggtttttgagcgtgatgaaaaggtcgggggactattacgttttgggatccctgacttcaaattaggcatggatatcattgatcgtaaaatcgacttaatgagcgatgcaggcgtaaaatttgaggttaatgctcacattggtgtcacggtaaatgctcagcaattacgtcacgagtttgatgtggtattactaacaggcggatcaaccgtaccgcgtaatttaccgattccaggtcgtgaactaactggtgtacattttgcaatggaattccttgcgcaaaataatcgccgggctaacgacatggatttaaaaaccgaagaaattcacgccaaaggcaagcatattgtcgtggttggtggtggtgatacgggttctgactgtgtgggtacatctaaccgtcatggtgctgcaagcattactcaagtggaaattatgccaataccacctgggcagcgcccaacgaatcagccttggccgtcttacccaatgatcatgaaaacatcgacttcgcatgaagaaggttgtgatcgtcattggaatattctgactaaagagttcatcggtgatgaggcgggtaatgtaaaagcattgcgtatcgccgatattcagtggcaagaagccaagcctggtgaacgtcctggttttgatgaaatcgcagggtctgagcgtattattccatgtgatatggcgttcttagcgatgggcttcttacatccagaaccaacaggcgttattgctcaactggatattaagttggatgagcgcggtaatattgcaaccacgggttttgcaactagccagaaaggtgtttttgccgcaggcgatatgcgtacaggccaatctttggtggtacgttgtatcaacgaaggtcgtgaatgtgcacgtgaaattgatgactttttaatgggtaattctaacttagaagcaaaagatgattcactgatgctatctcaagcctaa

SEQ ID NO: 4470 - protein, 490 aa, Photobacterium profundum
MGKPTGFLEFGRELPQKVDPSVRIQDNKEFVLNDDFGDKINTQASRCMDCGVPFCHNACPIGNIIPEFNDAVFRDSWEEAWNILSSTNNFPEFTGRVCPAPCESGCVLGINQDPITICNIEKTIVETAYREGYAKPKTPRTRTGKTIAIIGSGPAGLSAAEQLNSAGHCVTVFERDEKVGGLLRFGIPDFKLGMDIIDRKIDLMSDAGVKFEVNAHIGVTVNAQQLRHEFDVVLLTGGSTVPRNLPIPGRELTGVHFAMEFLAQNNRRANDMDLKTEEIHAKGKHIVVVGGGDTGSDCVGTSNRHGAASITQVEIMPIPPGQRPTNQPWPSYPMIMKTSTSHEEGCDRHWNILTKEFIGDEAGNVKALRIADIQWQEAKPGERPGFDEIAGSERIIPCDMAFLAMGFLHPEPTGVIAQLDIKLDERGNIATTGFATSQKGVFAAGDMRTGQSLVVRCINEGRECAREIDDFLMGNSNLEAKDDSLMLSQA

SEQ ID NO: 4471 - DNA, 1413 bp, Photobacterium profundum
  CDS (1)..(1413)
atgagccagaacgtataccaattcattgatgtcgcgcgtgttgatcctgcaaaaaaaccgcttaacatccgtaagattgagttcgttgaaatctacgaaccctttacacaacagcaagctggggctcaagctgatcgctgccttgactgtggtaacccatattgtgaatggaaatgcccagtacataactacattccacaatggttaaaattagccaatgaaggacgcatattagaagctgtcgaacttgcccaccaaaccaatacactacctgaagtgtgtggtcgagtatgcccacaagatcgtttatgcgaagggtcttgtacacttaatgaggattttggtgccgtcgctattggtaacgttgaaaaatacattactgataaagcgtttgaaatgggctggaaacccgacatgtcgcatgttgaatggacagataaaaaagtggcgattattggtgccggtcctgcaggattatcttgcgctgatatcttagtgcgtaacggcgtaaaacccgtggtatttgatcgttacccagaaattggcggtttactcacgtttggtatcccctctttcaagcttgaaaaagaggtgatgattaaccgccgtaaagtgttcactgaaatgggcgttgagttccaactcaataccgagatcggaaaagacattcagatgaatgacttgctcaaaggctatgatgctgttttccttggggtcggaacgtataaaaacatgcgtgctggtttggaaaacgaaaatgcagccggtgtttacgatgccctgccatttctcgtatcgaatacctacaaagtgatgaacctaaacaccgaaattgattttactgacatgaaaggaaaacgcgttgttgtgttagggggtggtgataccgcgatggactgtgtacgcacctctattcgtcaaaacgccaaaaatgtaatttgtgcttaccgccgtaacgcagccaatatgccaggttcaagacgtgaagtaaaaaatgcacgtgaagaaggcgtgaaattcatgtttaacctacaaccattaagtataaaaattaatgaccaaggccaagcaactggggtgaatgtcgttaaaacaaagctcggtgaaccagacgaagcaggacgtcgtcaccctgaattggttgaaggcagtgaacatttacttgaagccgatgccgttattatggcctttggttttcagcctcacgccatgccatggttagaaaaatacgctgtcgacattgatcaaagagggcgtattaaagcgcctgaaactgccaccttcccatttcaaacctctaacgagaaaatctttgctggcggcgatgccgtacggggttcagacctcgtcgtcaccgcaattaatgaagggcgtttagccgctcaaggtattcttgattaccttgaggtgtaa

SEQ ID NO: 4472 - protein, 470 aa, Photobacterium profundum
MSQNVYQFIDVARVDPAKKPLNIRKIEFVEIYEPFTQQQAGAQADRCLDCGNPYCEWKCPVHNYIPQWLKLANEGRILEAVELAHQTNTLPEVCGRVCPQDRLCEGSCTLNEDFGAVAIGNVEKYITDKAFEMGWKPDMSHVEWTDKKVAIIGAGPAGLSCADILVRNGVKPVVFDRYPEIGGLLTFGIPSFKLEKEVMINRRKVFTEMGVEFQLNTEIGKDIQMNDLLKGYDAVFLGVGTYKNMRAGLENENAAGVYDALPFLVSNTYKVMNLNTEIDFTDMKGKRVVVLGGGDTAMDCVRTSIRQNAKNVICAYRRNAANMPGSRREVKNAREEGVKFMFNLQPLSIKINDQGQATGVNVVKTKLGEPDEAGRRHPELVEGSEHLLEADAVIMAFGFQPHAMPWLEKYAVDIDQRGRIKAPETATFPFQTSNEKIFAGGDAVRGSDLVVTAINEGRLAAQGILDYLEV

SEQ ID NO: 4473 - DNA, 2835 bp, Rhodopseudomonas palustris
  CDS (1)..(2835)
atgagcgacgtcaccggaacggtctccagcgacgtgctgcgctaccagcaggcgcgcagcacgctggaaagctccaagagcgaactggaagagctgcagaacagcgaagctgtcggcgtcttccagaagcagctcgcgctgctgcagaagcgcctggtcaacgacccggcgtcgctgcggaacatgttcatcgcggacggcacccaggccatcgtctgggaattccaacagccggagctgggtgaagccttcaccaccacgctgtggaatctgctcgcccgcggcgacgacatgtcgatcatactgcagcgcttcatctgggcgctgccgctgaagttcaagcgcaagttcatcaaggcgatcgacgtgcatctgcgcggtcgctacccgatgttcgagaacctgtcggaaggctggccgggcgaagcgttcatcccgccctacatccgtccggcggaagagcgcgcgatcgacttcgagctcgtgaaccagggctatctcggctaccagtcgatcggctactcggtgcgcgagtgtgagctgttcgtctggctcgaggtgatgcgcgacaagcagtgcgacgacaagccgtgcgaactcggcgtgctgatccagggcaagaaggaagccaagggcggctgcccggtgaagatccacatccccgagatgctggacctgctcggcaacggcaagcatcgcgaagccttggaactgatcgagagctgcaacccgctgccgaacgtcaccggccgcgtctgcccgcaggaactgcagtgccagggcgtctgcacccataccaagcggccgatcgagatcggccagctcgaatggtatctgcccgagcatcagaagctcaccaacccgaacgccaatgagcgcttcgccggccggatctcgccgtgggctgcggccgtgaagccgccgatcgcggtggtcggctccggcccgtcgggtctgatcaacgcgtacttgctggcggtcgagggcttcccggtcacgatcttcgaggcattccacgacctcggcggcgtgctgcgctacggcattcctgaattccgcctgcccaacacgctgatcgacgacgtggtcgagaagatcatcctgctcggcggccgcttcgtgaagaacttcgtggtcggcaagaccgcgacgctggaagacctcaaggccgaaggcttctggaagatcttcgtcggcaccggcgcgggtcttccgaccttcatgaacgtgcccggcgagcatctgctcggggtgatgtcggccaacgagttcctgacccgcgtcaacctgatgcgtggtctggacgatcgctacgagacgccgctgcccgaggtgaaggacaagaacgtgttcgtgatcggcggcggcaacaccgcgatggacgcggcgcgcaccgccaagcggctcggcggcaacgtcaccatcgtgtatcgccgcaccaagagcgagatgccggcccgcgtcgaggagctgcatcacgcgctggaagagaacatcaatctcgcggtgctgcgcgcgccgcgcgaattcatcggcgacgaccacacccacttcgtcacccacgcgctgctcgacgtcaacgagctcggcgagcccgacaagtccggccgccgcagcccgaagccgaccgggcagatcgagcgggtgccggtcgacctcgtgatcatggcgctgggcaacaccgccaacccgatcatgaaggacgccgagcccggcctgaagaccaacaaatggggcaccatcgaggtcgaagaaggctcgcagcggacctcgatcaagaacgtctacaccggcggcgacgctgcgcgcggcggctccaccgcgatccgcgcggccggcgacggccaggcggcagcgcgcgagatcgtcggcgagatcccgttcacgccggctgagatcaaggaccgcgtcgaacgcgccgccaagtacaccgagctcggccagatcgaacagacgatcgtgggcaaggtgccgctggccggcggcatcgtcgagttcaccgtgcgggccccgatggtggcgcgctcggccaaagccggacagttcgtccgcgtgctgccgtgggaaaagggcgaactgatcccgctgacgctggccgattgggacgccgagaagggcaccatcgatctggtggtgcagggcatgggcacctcgtcgctggagatcaaccggatggcgatcggcgatgcgttttctggcatcgccggcccgctcggccgcgccagcgagctgcaccgctacgaaggcaaccagaccgtggtgttctgcgctggcggcgtcggcctgccgccggtgtatccgatcatgcgcgagcacctgcggctcggaaaccacgtgacgctgatctccggcttccgcgccaaggagttcctgttctggaccggcgacgacgagcgcgtcggcaagctgaagaaggagttcggcgaccagctgtcgctgatctacaccaccaatgacggctcctacggcgtcaaaggcttcgtcaccggcccactcgaggagatgatgaaagccaaccaggagggcaagggccgcagcatcgccgaggtgatcgcgatcggcccgccgctgatgatgcgggcggtctccgacctcaccaagccgtatggcgtcaagaccgtggcgagcctcaactcgatcatggtggatgcgacagggatgtgcggcgcctgcatggtgccggtgacgatcgacggcaagatggtgcgcaagcacgcctgcatcgacggcccggaaatcgacgcccacatcatcgactgggacaagttcctgccccgcttcaacgccttcaaggcgcaggaactggagagcaagaagaagcacggcttcgcgtaa

SEQ ID NO: 4474 - protein, 944 aa, Rhodopseudomonas palustris
MSDVTGTVSSDVLRYQQARSTLESSKSELEELQNSEAVGVFQKQLALLQKRLVNDPASLRNMFIADGTQAIVWEFQQPELGEAFTTTLWNLLARGDDMSIILQRFIWALPLKFKRKFIKAIDVHLRGRYPMFENLSEGWPGEAFIPPYIRPAEERAIDFELVNQGYLGYQSIGYSVRECELFVWLEVMRDKQCDDKPCELGVLIQGKKEAKGGCPVKIHIPEMLDLLGNGKHREALELIESCNPLPNVTGRVCPQELQCQGVCTHTKRPIEIGQLEWYLPEHQKLTNPNANERFAGRISPWAAAVKPPIAVVGSGPSGLINAYLLAVEGFPVTIFEAFHDLGGVLRYGIPEFRLPNTLIDDVVEKIILLGGRFVKNFVVGKTATLEDLKAEGFWKIFVGTGAGLPTFMNVPGEHLLGVMSANEFLTRVNLMRGLDDRYETPLPEVKDKNVFVIGGGNTAMDAARTAKRLGGNVTIVYRRTKSEMPARVEELHHALEENINLAVLRAPREFIGDDHTHFVTHALLDVNELGEPDKSGRRSPKPTGQIERVPVDLVIMALGNTANPIMKDAEPGLKTNKWGTIEVEEGSQRTSIKNVYTGGDAARGGSTAIRAAGDGQAAAREIVGEIPFTPAEIKDRVERAAKYTELGQIEQTIVGKVPLAGGIVEFTVRAPMVARSAKAGQFVRVLPWEKGELIPLTLADWDAEKGTIDLVVQGMGTSSLEINRMAIGDAFSGIAGPLGRASELHRYEGNQTVVFCAGGVGLPPVYPIMREHLRLGNHVTLISGFRAKEFLFWTGDDERVGKLKKEFGDQLSLIYTTNDGSYGVKGFVTGPLEEMMKANQEGKGRSIAEVIAIGPPLMMRAVSDLTKPYGVKTVASLNSIMVDATGMCGACMVPVTIDGKMVRKHACIDGPEIDAHIIDWDKFLPRFNAFKAQELESKKKHGFA

SEQ ID NO: 4475 - DNA, 1455 bp, Rhodopseudomonas palustris
  CDS (1)..(1455)
atgggcaaggtcacggggtttctggaaatcgagcggcacgatcgcgtttatgcgccggtcaccgatcgggtgaagaactacaacgagttcgtggttccgctcagcgagaaagacctgcgcgaccaggccgcccgctgcatgaactgcggcatcccgtattgccacggcaccggttcggcgcagccgggcgcgacgggctgtcccgtcaacaaccagatccccgactggaacgacctggtttacaacggctattggcaggaggccgcgcgcaccctgcactcgaccaacaactttccggaattcaccggccggatctgcccggcgccgtgtgaagcgtcgtgcacgctgaacatcgacgacaacccggtcaccatcaagacgatcgaatgcgcgatcgtcgacaccgcgttcgacaacggctgggtcacgccggagattgcggcggtcaagactggccagagcgtcgcggtcgtcggcgccggcccggcgggcctcgcctgcgcccagcagttggcgcgcgccggccacgacgtccacgtctatgagaagttcgccaaggccggcggcctgcttcgctacggcatcccggacttcaagatggagaagactctgatcgaccgccgcgtcgctcagatggaagccgaaggcgtcaccttccactacggcgcgccggtcggcggcagcgctccgggcgcagtcgatccggccgagttgctcaagcagtacgacgccgtcgcgctgaccggcggtgccgaagcgccgcgcgatctgccgatcccgggccgcgagctcggcggcatccatttcgcgatggacttcctcacccagcagaaccgccgggtctccggcgaagccgtgaacggcaccgacattctcgccgccggcaagaatgtggtggtgatcggtggcggcgacaccggttcggactgcatcggcacctcgatccgtcagggcgccaagtcggtgacccagatcgaaatcatgccggcgccgccggagcgcgagaacaaggcgctgacatggccgaactggccgatgaagatgcgcacctcctcgagccaggccgaaggcgccgcgcgcgaattcgccgtgatgacgcagtcgttcgaaggcgagggcggtgtcgtcaagaagctgaactgcgtccgcgttgacgccaagttccagccgatccccggcactgaattcacgttggaagccgacctcgtgctgctggcgatgggcttcgtctcgccggtgaaggaaggtctgctgacccagcttggcgtcgcgctcgacccgcgcggcaacgttgccgccgacctgtcgcacttcacaacctcggtcgacaaggtgttcgccgccggcgatatgcgtcgcggccagtccctggtcgtgtgggcaatccgcgaagggcgcctctgcgcccaggcgatcgaccgcttcctgatgggcgcgacgacgctgccgcggtaa

SEQ ID NO: 4476 - protein, 484 aa, Rhodopseudomonas palustris
MGKVTGFLEIERHDRVYAPVTDRVKNYNEFVVPLSEKDLRDQAARCMNCGIPYCHGTGSAQPGATGCPVNNQIPDWNDLVYNGYWQEAARTLHSTNNFPEFTGRICPAPCEASCTLNIDDNPVTIKTIECAIVDTAFDNGWVTPEIAAVKTGQSVAVVGAGPAGLACAQQLARAGHDVHVYEKFAKAGGLLRYGIPDFKMEKTLIDRRVAQMEAEGVTFHYGAPVGGSAPGAVDPAELLKQYDAVALTGGAEAPRDLPIPGRELGGIHFAMDFLTQQNRRVSGEAVNGTDILAAGKNVVVIGGGDTGSDCIGTSIRQGAKSVTQIEIMPAPPERENKALTWPNWPMKMRTSSSQAEGAAREFAVMTQSFEGEGGVVKKLNCVRVDAKFQPIPGTEFTLEADLVLLAMGFVSPVKEGLLTQLGVALDPRGNVAADLSHFTTSVDKVFAAGDMRRGQSLVVWAIREGRLCAQAIDRFLMGATTLPR

SEQ ID NO: 4477 - DNA, 3108 bp, Rhodopseudomonas palustris
  CDS (1)..(3108)
atgcggcaccggaccggacatgaccgaagtcaaatcaatttggcgctcgttggctattttgggccgctttcccttcacctttcgacgccgttcgccggcctcggaccaatctgtgctgtcaccatgtatcgtattgtgcgacgcgagcagttctcggacgcgacctttctgtgggacgtcgaggcgccggatatcgcggcttcggccgagcccggccatttcgtgatgctgcgtctctacgacggtgccgaacgcattccgctcaccgttgccgatttcgatcgcgacaagggactggtgaccgtcgtcgtccaggcgctcggcaagaccacgcgggagatgcgcgacaagttcaaggaaggtgaggcgttcgaggatttcgtcgggccgctcggtctgccgcaacacatcgacaaggtcgatcacgtggtgttcgtcggcggcggcctcggcgtcgcgccgatcttcccgcagcttcgcgccttcaagcaatccggcgcgcgcaccaccgcgatcatgggcttccgcaccaaggatctggtgttttgggaagacaagttccgcgagttcgccgacgaactgatcatttgcaccgatgacggcagctacggcgagcccggcctcgtcacggcagcgctggagcgggtaatcacccagcagaagcccgacaaggtggtggcgatcggcccgatgccgatgatgcacgcttgcgtcgagaccacgcgcccacacggtgtgaagaccatggtgtcgctcaacaccatcatggtcgatggcaccggcatgtgcggttcgtgccgcgtcacggtcggtggcgaagtgaagttcgcctgtgtcgacggcccggatttcgacggccacaaggtcgacttccacgagttgcatgcgcgccagaagcggttcaagaccgaggaagacaaggcgaacgaacacttcgcccatgtctgtaatctcgaaaaacagctgatcgtcgagggcaagcgcaactacaagaagctggcgacgctgccgccgcatcagacgccgatgccggagcgcgatgcccacgagcgcgccaccaacttcaaggaagtcaatctcggctattcggtcgaggaagccctgcaggaagccgagcgctgcatccagtgcatcacaccgacctgcgtcgccggctgcccggtcgggatcgacattccggtgttcatccgcaacatcctcttccgcgatttcgacgccgcgctggagacgatctatcagtcgagcatcttcccatcgatctgcggtcgggtctgcccgcaggagacgcagtgcgaagcgcagtgcatcatccgcaaatacaagaagcatgagccggtcgcgatcggccggcttgagcgcttcatcggcgacaatgcgcgggcgccgaagagcaagccgatcgatctcagcaaagccatcggcaaggtcgcgatcgtcggctccggtccggctggcctcgccgccgccgctgatctcacccgctacaatgtcgagaccacggtgtacgaggcgctgcacgtgctcggcggcgtgctgcaatacggcattccgtcgttccggctgccgcgcgacatcatcgatcgcgaaatccagcggctgaaggacatcggcgtcaagttcgagaccaacaaggtcgtcggcaagaccttcaccatcgaacagttgatgaatggacgcggcttcgacgcggtgttcgtggcggcgggcgccggtgcgccgaccttcctgggcattcccggtgagtttgctggccgggtttattcggccaacgagttcctcactcggatcaacctcatgggcggcgaccgcttcccgtatctcgatacgccggtcagcgtcggcaacagcgttatcgtgatcggtgccggcaacaccgcgatggactgcctgcgcgtcgcccgccgcgtcggcgccgcgacggtgcgctgcgtgtatcgccggtcggaagccgaagcgccggcccgcatcgaggaaatccgccacgccaaggaggagggcgtcgatttcttcttcctgcactcgccggtggagattctagtcaccgaaagcggcgacgttcgtgcggtgcggctgcagaaaatggagctcggcgaggccgacgagcgcggccgccgcaagccggtgccgctcgacgagtttatcgagctcgaatgcgacaccgtgatctacgcactcggcaccaagcccaatccgatcatcggccaggcgacacccggtctcgcgctcaacaagtggggtaacatcgcagccgatgacgacacccagtcgaccaacatgccgggcgtgttcgccggcggcgatatcgtcaccggtggcgcgactgtgatcttggcgatgagcgcgggtcgccgcgccgccaagtcgatcgcggcctggctgcggctgaacaagaccaaatggcctatcaccgcgcaggacgccgacgacttcgtcgccggcaagctggcgcctgcgatcgaggaggatggcgtggcgcattgcccgaagtgtcaccagccgctggaaggctccgaagagtacatctgctgcgctgattcggagctgcaatggcgctgcgacgactgtgccaaggtcagcgaaggcttcgcgttcccctatggcatgtgcccgcactgcggtggcaagctgcagccgctcgatcgcgccggcgtcagcgatgaggccggacttggggcgatccgcaccgcgttcgagatcgagctcggcggccgtgcattctatgcccgtgccgcgaaggaaacgtccgatccgacattgcaggagctgttcctcagcttcgccgcgatggaagaggagcacatgaccacgctggccaatcgctaccatgtggcgattccgcaggcgaccgagggcttccatctcggcaccgcggcgatcatggccggcgtcaaaggccggattggcgatccgactacgctgttcgaagccgcgatcgagtttgaacggcgcgccgcctcgttcttcaagacccgggtcggcgagacgccggacggttcggtcgagcgccagctgtatcgcgagctcgccgccgaagaggacgagcacgtctcggtgctgcagaccgaattcgcgcgctggaaggaaggcaagcgcgggctgctgacgtaa

SEQ ID NO: 4478 - protein, 1035 aa, Rhodopseudomonas palustris
MRHRTGHDRSQINLALVGYFGPLSLHLSTPFAGLGPICAVTMYRIVRREQFSDATFLWDVEAPDIAASAEPGHFVMLRLYDGAERIPLTVADFDRDKGLVTVVVQALGKTTREMRDKFKEGEAFEDFVGPLGLPQHIDKVDHVVFVGGGLGVAPIFPQLRAFKQSGARTTAIMGFRTKDLVFWEDKFREFADELIICTDDGSYGEPGLVTAALERVITQQKPDKVVAIGPMPMMHACVETTRPHGVKTMVSLNTIMVDGTGMCGSCRVTVGGEVKFACVDGPDFDGHKVDFHELHARQKRFKTEEDKANEHFAHVCNLEKQLIVEGKRNYKKLATLPPHQTPMPERDAHERATNFKEVNLGYSVEEALQEAERCIQCITPTCVAGCPVGIDIPVFIRNILFRDFDAALETIYQSSIFPSICGRVCPQETQCEAQCIIRKYKKHEPVAIGRLERFIGDNARAPKSKPIDLSKAIGKVAIVGSGPAGLAAAADLTRYNVETTVYEALHVLGGVLQYGIPSFRLPRDIIDREIQRLKDIGVKFETNKVVGKTFTIEQLMNGRGFDAVFVAAGAGAPTFLGIPGEFAGRVYSANEFLTRINLMGGDRFPYLDTPVSVGNSVIVIGAGNTAMDCLRVARRVGAATVRCVYRRSEAEAPARIEEIRHAKEEGVDFFFLHSPVEILVTESGDVRAVRLQKMELGEADERGRRKPVPLDEFIELECDTVIYALGTKPNPIIGQATPGLALNKWGNIAADDDTQSTNMPGVFAGGDIVTGGATVILAMSAGRRAAKSIAAWLRLNKTKWPITAQDADDFVAGKLAPAIEEDGVAHCPKCHQPLEGSEEYICCADSELQWRCDDCAKVSEGFAFPYGMCPHCGGKLQPLDRAGVSDEAGLGAIRTAFEIELGGRAFYARAAKETSDPTLQELFLSFAAMEEEHMTTLANRYHVAIPQATEGFHLGTAAIMAGVKGRIGDPTTLFEAAIEFERRAASFFKTRVGETPDGSVERQLYRELAAEEDEHVSVLQTEFARWKEGKRGLLT

SEQ ID NO: 4479 - DNA, 2022 bp, Rhodopseudomonas palustris
  CDS (1)..(2022)
atgcgggcagtaccctggggcggggtcgagatgacgcaggtggtgtacggggtctgggacggcgtcgcctatgattcacgggcggccgaggctcgggcggcggactacgcgctggcaaacttcgacgagttcgacgagggcaacgcgatccgcgctttcatcgccgatcgcgggttcttcgtgttcgatcccacggtttcgctggtcgatgcgctattccactacctgaaagccgccgccgaacagtcctgcggtgcctgtacgccctgtcggatcggcaccgtgctggtccgcgatgcgctcgatcagatgcgccgcggtctggacgccgcgctgacgctcgacgacatcgtgatgctcggcgagcaaatccggcagacctcgctgtgcggactggggcagacctgcgcggtggcgctgctggcggtgctgcgggactttcgcgaacggatcgaacaggagctggcgcagcaccggccaatcccggctcagcacggcatggcctatgtgacagcgccgtgtatcgaggcctgcccgtccaaggtcaacgtgccgcgctacatcgactacatccgggatggtaagcccgagaactcgctcggcgtgctgctgcagaaatacccgatggccgcgacctgcggccgggtctgcgtccgctattgcgagcaggcgtgccggcgcaaatttgtcgacgaagccgtcggcatcaagacgctgaagcgctatgtcgctgaccagcagagcggtccgcacgcgctgaagttcacccgcgacatgatccgcaagccgctcgccgacgggatgcgggtggcggtggtcggcgccggcccggccggcatctcctgcgcctatcacctgttgttgcgcggctatcacgtcgacgtcttcgacaaggccggccaggccggcggcatggcgcagatcggcattccgagctaccggctgcccaaggacacgctggcgctggagaccgacatcatcgtcgacctcggcggccggttcctgttcgatcagcgcctcggccgcgacttctcggtcgacgacctgtttgcgcgcggctatcgcgcggtgttcctgggccttggctgtcagcagggcgcccggctcggcgtcgatggcgaagacgccgcacatggcggctacttcagcggcatcgatttcctgctcaaggttcacgaccacgtcgacggcatcgctccgctggtattgcagggcgaggtggtggtggtcggaggcggcaacgtcgcaatggactgcgtgcgttcggcgatccggcttggcgccgagaaggtccacgtcgtctatcgtcgcaccctcgccgacatgccggccgacccggccgagatcgaagcggcgcgcgccgaaggcgtcgaattccatgtgctcaccgcgccggccgagatcgtcaccgaccacggcaaggtcaccggcgtggtgctgaccaggatgcaggcgagcgagcccgatgccggtgggcggcggtcggtgaagccggtcccaggcagcgagacatcgatgcgctgcgacgtgctgatcgcggcgatcggccagcaggtcgaggacggtccgctgatcgagagcgacggcattgcgttcgaccgctggcgctgcgtcgcgaccgatcgggtgctcgcgacctcgcggccgggagtttttgccggcggcgattgcgtcaccggtccgtcgacgcttgtttacgcgatggctgcaggactgaaggcggcgcgcaacatcgacgattggattcaacggggctcggtgcggttcttcaagcggtcgcgcatgcgcaagctgatcgccgacaatcatatgctggccaacgagatcgtcgcagccccggtgcgcaacgcctatcgggtgcacaatcccgaaatcgatcccgaactgcgcaagcatatgttcggcgaagtcgagcagaccatcgacgcccgcgccgcctatgcggagacccagcgctgcatgcgctgttatcgcgtctattccgtcgtcaccaagcatccgatcccggaaggagcggcttga

SEQ ID NO: 4480 - protein, 673 aa, Rhodopseudomonas palustris
MRAVPWGGVEMTQVVYGVWDGVAYDSRAAEARAADYALANFDEFDEGNAIRAFIADRGFFVFDPTVSLVDALFHYLKAAAEQSCGACTPCRIGTVLVRDALDQMRRGLDAALTLDDIVMLGEQIRQTSLCGLGQTCAVALLAVLRDFRERIEQELAQHRPIPAQHGMAYVTAPCIEACPSKVNVPRYIDYIRDGKPENSLGVLLQKYPMAATCGRVCVRYCEQACRRKFVDEAVGIKTLKRYVADQQSGPHALKFTRDMIRKPLADGMRVAVVGAGPAGISCAYHLLLRGYHVDVFDKAGQAGGMAQIGIPSYRLPKDTLALETDIIVDLGGRFLFDQRLGRDFSVDDLFARGYRAVFLGLGCQQGARLGVDGEDAAHGGYFSGIDFLLKVHDHVDGIAPLVLQGEVVVVGGGNVAMDCVRSAIRLGAEKVHVVYRRTLADMPADPAEIEAARAEGVEFHVLTAPAEIVTDHGKVTGVVLTRMQASEPDAGGRRSVKPVPGSETSMRCDVLIAAIGQQVEDGPLIESDGIAFDRWRCVATDRVLATSRPGVFAGGDCVTGPSTLVYAMAAGLKAARNIDDWIQRGSVRFFKRSRMRKLIADNHMLANEIVAAPVRNAYRVHNPEIDPELRKHMFGEVEQTIDARAAYAETQRCMRCYRVYSVVTKHPIPEGAA

SEQ ID NO: 4481 - DNA, 3593 bp, Brachydanio rerio
  CDS (36)..(3104)
gagcgatcggatcataaactgcggatcggatagtaatggctacaatgctgagcaaagagttgcaggatattgagagtatcctggccttgaacccgagggtgaagagccatgcaaatgtccattccactgcctcaaagaagaatgagaagaagcactggaagagaaaccctgagaggagctgtgattcctgtgtgaatttggagaacaactttgatgacatcaagcacacgactctgagtgagcgtggggcacttcgggaggcgctgagatgcctgaaatgcgcagacgctccatgccagaaaagctgccccaccaatttggatatcaaatctttcatcaccagcatttccaacaagaactactacggtgctgctaaagcaatcctgtccgataacccactgggtctgacctgtggcatggtgtgtcccacctctgatctgtgcgttgggggctgtaacctctacgcctctgaggaagggcctatcaatattggtgggcttcagcagttcgctactgaggtgttcagtaagatgggcatccctcagatcagaaatccagagcttcccacggcggacaacatgccgaagagtttccacacaaggatcgctctcattggctgcggccctgccagcatcagctgcgcctccttcctggcccggctaggatatgacaacatcaccatcttcgagaagcagaaatacattggtggcttgagcacttcagaaatccctcagttccggttgccctacgaggtggtgcagtttgagattgatctgatgaaggatcttggcgtaaaggttgttcttgagaagggactggggcagaatggcttgactctgacctcgctgaaggaggagggctatcaagtggtctacattggcattggtcttccacaagcaaacagggacaagattttcgagggcttgaccacggaacagggattctacacatcaaaggatttccttcctttggttgcaaaagccagtaaaataggcatgtgtaattgccgctcacagctgccaaagctgcatgggaatgtgatcgtcctgggtgcaggagacacagcgttcgactgcgccacctctgctctccgctgtggagctcgacgagtctttgtggtctttagaaagggcttcaccaacattcgcgctgttccagaagagatggaggcagccaaagaggaaaagtgtgaattcctgcccttcttgtcacctcatgaggtaataaagaaaaatggacgtgtctcaggcctgcgcttctgccgcacagagcagcaggatgatggcacctggattgtggacgaggagcaaattgtccacctgaaagcagatttcatcatcagtgcctttggctccatgctgaatgatccagcagtgacgaaggccctggatccaataaagctgaaccgatgggggactcctgaggtgaacagcgaaaccatgcagaccactgaaccctgggtgttcgccggcggagacatcgcaggctttgccaacaccaccgtggagtctgtcaacgatggcaaacaagcttcctggcacatccacaagtacatccagtctcttcatggtaacacaataagtgccactcccagactgcccttgttccactgctccattgacacagtggacatcagcgtggagatgtgcgggatcaagtttcctaacccctttggactggccagcgctcctcccacgaccagcgcagccatgatccgcagggccttcgagcagggctgggggttcgccctcaccaagacctttggcctggacaaggatttggtgaccaacgtgtcaccgcgaatcgtgcgtgggacaacctcaggtcacatattcggtcctggtcagggctcattcctcaacatcgagctcattagtgaaaaaacagccgcttactggtgcaagagcgtggctgaactcaaagccgacttccccaaaaatattatcattgccagtattatgtgcagttacaaccaagctgactggactgagctggcaaagatggctcaggagtctcaagctgatgctttggagctgaacctctcctgccctcatggcatgggggagagaggtatgggactggcctgtggacaggaccctgagctggtgaggaacatctgtcgctgggttagaaaggccactagcatccccttcttcgccaaactcacacccaatgttaccaacatcgttgacatcgccacagctgcttatgaaggaggtgcggatggagtcacagccaccaacactgtatctggactaatggccctcaaagccgatgctacaccctggcctgggattggcagaggcgccagaactacatatggcggtgtttctggtaatgcaatccggcccatagctctacgtgcagtttcagctatagcaagagcacttcctggcttcccaatcttggccaccggtggcatcgactcggctgagtctggattacagttcctccatgctggagcatctgtcttgcaggtatgcagtgccgtgcagaaccaggacttcacagtgatcgaggactactgtttaggcctgaaggcgctgctgtatctaaaaagcatagaggagctgcacgattgggacggccagtctcctcccaccattcgccaccagaagggcaagcccgttccccatgtgagcgagctcattggaaagagtctgcctagcttcgggccgtacttgcaaacgaagactcaggcactggcgaagtacaagaaagatgccagcggtgatgtgatcatggacaccggcgctgctagagtaaacatccccaaaaaaccaatccctaatgtcaaagatgtgattgcccgcgcgctgaagcacattggcgcctaccaagagctggacaacactgaacaagtgcaggccctggtggatcctgagatgtgcatcaactgtggcaaatgctacatgacctgcaatgactcaggctaccaggctattaagtttgaccctgagactcatcttcctgtaatcacggacagctgcaccggctgcactctctgcctgagcgtgtgtcccatcattgactgcatcaaaatggttagcaggaccacaccgtacgagcccaagagaggcctgcccgttaatcccgtctgctgaagcacaccgtcacagagcgaatgacaaaaaacagcaagagcatccattccacttctaattgctgggtgaaaaattacctttattatgaaaacgaataattagccggcagaaataattgccttatattcccaagccggttatgccagaataattgcgctggcacagaaagagttgcattttttcaaaaacaactcgacagtgcaatgtgcctttctgtcccttttccctcaagagatgacaaagagatgacaataagatgcgagatggaggattgattgattgattgattgattgattgattgattgattgattgattgattgaagtggtgttgtttgctctggtaagactgaccataaataaacagtaaaggaggaatattaataattggaactatcaaagataattgtatgactgctaagtgtgattaataaacattattagcatgtaaaaaaaaaaaaaaaaaaaaaaaaaaaaaaaaaaaaaaaaa

SEQ ID NO: 4482 - protein, 1022 aa, Brachydanio rerio
MATMLSKELQDIESILALNPRVKSHANVHSTASKKNEKKHWKRNPERSCDSCVNLENNFDDIKHTTLSERGALREALRCLKCADAPCQKSCPTNLDIKSFITSISNKNYYGAAKAILSDNPLGLTCGMVCPTSDLCVGGCNLYASEEGPINIGGLQQFATEVFSKMGIPQIRNPELPTADNMPKSFHTRIALIGCGPASISCASFLARLGYDNITIFEKQKYIGGLSTSEIPQFRLPYEVVQFEIDLMKDLGVKVVLEKGLGQNGLTLTSLKEEGYQVVYIGIGLPQANRDKIFEGLTTEQGFYTSKDFLPLVAKASKIGMCNCRSQLPKLHGNVIVLGAGDTAFDCATSALRCGARRVFVVFRKGFTNIRAVPEEMEAAKEEKCEFLPFLSPHEVIKKNGRVSGLRFCRTEQQDDGTWIVDEEQIVHLKADFIISAFGSMLNDPAVTKALDPIKLNRWGTPEVNSETMQTTEPWVFAGGDIAGFANTTVESVNDGKQASWHIHKYIQSLHGNTISATPRLPLFHCSIDTVDISVEMCGIKFPNPFGLASAPPTTSAAMIRRAFEQGWGFALTKTFGLDKDLVTNVSPRIVRGTTSGHIFGPGQGSFLNIELISEKTAAYWCKSVAELKADFPKNIIIASIMCSYNQADWTELAKMAQESQADALELNLSCPHGMGERGMGLACGQDPELVRNICRWVRKATSIPFFAKLTPNVTNIVDIATAAYEGGADGVTATNTVSGLMALKADATPWPGIGRGARTTYGGVSGNAIRPIALRAVSAIARALPGFPILATGGIDSAESGLQFLHAGASVLQVCSAVQNQDFTVIEDYCLGLKALLYLKSIEELHDWDGQSPPTIRHQKGKPVPHVSELIGKSLPSFGPYLQTKTQALAKYKKDASGDVIMDTGAARVNIPKKPIPNVKDVIARALKHIGAYQELDNTEQVQALVDPEMCINCGKCYMTCNDSGYQAIKFDPETHLPVITDSCTGCTLCLSVCPIIDCIKMVSRTTPYEPKRGLPVNPVC

SEQ ID NO: 4483 - DNA, 1440 bp, uncultured bacterium 314
  CDS (1)..(1440)
atgtcggataaaatgcttaaatttgtaaatgttggaatgcaaatgccagctaaaagagccggtggtttaagaactaaagattttaaagaaatctatgatcaatttattcacgagaaagctaaagagcaatcgagccgatgttcacaatgtggagttcctttttgtcaagttcattgtcctttgcataataatattcctgactggttaaagttgaccgccgaagggaggcttcaagaagctcatgaattagttcatagcacaaataatatgcctgagatttgtggaagtatttgtccgcaagatcgtttatgtgaaggtaattgcgttattgaaaaagcaggacatggaaccgttacaatcggatctgttgaaaaatacataacagatactgcatgggaaaaagggtggattaaaccaattaaagttttgaaagaaatagatcaatccgttggtatcattggagcaggaccagcgggattagcttgcgcagaagagctaagaaaatcaggatataaaataactatttacgatcgatacgaccgaccaggtgggcttttgatttacggaataccaaactttaaactagaaaaatttactgttgaaaggagaaccaatcttttaaaagagagtggaataaagtttaaacaagattttgaggttggaaaagatatatcgctcgatgaattaagaaaaaaacatgatacaatacttattgcaactggcgtttataaacctcgagaaatcgatttgccgggctctgatttaaaaaatatttttccagctatggaatttttaacggcttccaatcggaaaggtttaggagatagagtaaacaattttgataacgggacactcaatgctgaaggcaagaacactattataattggcggaggtgataccgggatggattgcgtgagaactgcagtaagacaaaatgcaaaatcagtaaagtgtttgtatagaagagatagagaaaatatgcccggttctgcacgagaagtacataatgcagaagaagaaggaattgagtttatatggttatcaaatccaaaaaaatttattggtacatcacaaatttcatcagtgttagttgagagaatgaaacttggtaagacggattcatctggaagaaaaaaacctgagcctatcccaaattctggatttgaaatgaaggcggatatggtaattaatgctttgggttttgaccctgaagatttaccaaaattatttaactccccagatctatctatttctaaattggggactataaagatcaatttaaaaactatggaaacaaatctctccggtgtttttgccgctggagatatagtcagaggagcctctttggttgtgtgggcaattagagacggtagagatgcaactatatcaattcgaaaatatttagaacacaaacgaagcaaaaatgtaaaagcagcataa

SEQ ID NO: 4484 - protein, 479 aa, uncultured bacterium 314
MSDKMLKFVNVGMQMPAKRAGGLRTKDFKEIYDQFIHEKAKEQSSRCSQCGVPFCQVHCPLHNNIPDWLKLTAEGRLQEAHELVHSTNNMPEICGSICPQDRLCEGNCVIEKAGHGTVTIGSVEKYITDTAWEKGWIKPIKVLKEIDQSVGIIGAGPAGLACAEELRKSGYKITIYDRYDRPGGLLIYGIPNFKLEKFTVERRTNLLKESGIKFKQDFEVGKDISLDELRKKHDTILIATGVYKPREIDLPGSDLKNIFPAMEFLTASNRKGLGDRVNNFDNGTLNAEGKNTIIIGGGDTGMDCVRTAVRQNAKSVKCLYRRDRENMPGSAREVHNAEEEGIEFIWLSNPKKFIGTSQISSVLVERMKLGKTDSSGRKKPEPIPNSGFEMKADMVINALGFDPEDLPKLFNSPDLSISKLGTIKINLKTMETNLSGVFAAGDIVRGASLVVWAIRDGRDATISIRKYLEHKRSKNVKAA

SEQ ID NO: 4485 - DNA, 2331 bp, Desulfovibrio vulgaris
  CDS (1)..(2331)
atgtccggcaatgaaacgatccgcatcggcggactggataacggagagcgcgtctcgtcgcgcaggctcgaagagcgcatacaacaggccgtacaggatggcgcgcgcaccatcgacatcgaggcggcagggcagcacggcataggcggtcgcctgtgggttgcccgcaccgaacccgtgcgcgtgaccgtgcgcggcgcggtgggccagcgtctcggttccatgggatgcgaaggcaccagcatagaggtcatgggccccgcctccgaggacgtgggctggctcaacgccggggccgacatcctcatccacggcaacgtgggcgggggcacggccaacgccatggcgcaaggccgcatccgcgtgggcggcaacatcggctcgcgcggcatgaccatgaccaagcagaacccgcgcttcaccgcccccgaactctgggtgctggggagcgtgggcgactatttcgccgagttcatggcgggcggcaccgccgtggtctgcgggttcaacgcacagaaccccgccaacgtgctgggctaccgcccgtgcgtgggcatggtgggcgggcgcatcctcgtgcgcggtccctatgacggcttctcgcaggccgacgcgcgcctcgaccccatcgacgacgccctgtggcagtggctggtggacggccttgccgacttcaccgccgccctcggcaagcccgaactcgccgccgcgctctcggtgcgtgaggagtggcagtgcatcgtggcgcgcggcccctacgagaagacgggcaagacccgccgctccatctccgacttccgccgcaacgtgtgggaccgagaactgggcatgggcggtcttgtgggcgacctgacgtcgctcgaccgcagccccatcccgctcatcaccaccggcgaactgcgccgcttcgtgcccgtgtgggagaacgcccgctacgcggccccttgccagtcgagttgccccacgggcattcccgtacaggaacggtggcggctggtgcgtgacggactcgtggacgaggccgtggacatggcgctggcctacacaccctttcccgccactgtatgcggctacctgtgccccaacctctgcatgcagggctgcacccgcaacctgcaacgcatgaagcccgtggacgtgaccatgctcggcaaggccggggtgcgttccgacataccggccctgccgcccctcaccgggcagcgcgtggccgtggtgggcggcggtgcggcgggcatctccgtggcgtggcagttacggatgcgcggcatcgaagccgtcatccacgacatggagcctctcctcggcggcaagattgcctcggccattcccgaaagccgcatcccgcgcgaggttctcgacgctgaactcgaacgcgtacgcaaggtgctgccccacatccacctgcaccgcaagctgacgaaggacgacttcgaacagttgcgcgccgacttcgacttcgtggtgctggcgaccggggcgagcaaaccccgtatgctgcccgtacccggcagggagttggcgaccacggccctcgacttcctgcgcgatgccaagtccggcaacggcaagccctgcaagcgcgtggtcatcgtcggcgcgggcaacgtgggatgcgacgtggccaccgaagccgcacgcctcggtgccgaatccatcaccctcgtcgacatccagacccccgccgccttcggcaaggagcgcgacgaagccgaacatgtgggtgccaccttccgctggccctgcttcacccgcgaggtgaccgcagatgggctggtgctcaccaccggcgagctcatccccgccgacacggtggtcttctccatcggcgatgcgcccgacctcgactacctgcccgacaccatcgccacggaacgcggctacgtcacggtcaacgaccttggccagaccaccgacgcccgcgtcttcgccatcggcgacgtggtgcgccccggtctgctgacgcaggccatcggcgcaggtcgcaaggccgccggtgccatcgcggacatggcagagggcaaacgccccgtctccgacacccgcgagatggtggacaccgcccgcatcaagcttgaatacttcgacccgcgcatctccggcttcgacgacctcgaacgttgcggcgaagcgtgtgtgagttgcggcgcatgccgcgactgcggcgtgtgcgagaccatctgcccgcagggggccatctcgcgccgcgacctcggcgaaggacgcttcgagatgactgtggacggcgaacgatgcatcggttgcggcttctgcgccggggcgtgcccgtgcggcatctggaacctcgtggagaacacgccgctggagtag

SEQ ID NO: 4486 - protein, 776 aa, Desulfovibrio vulgaris
MSGNETIRIGGLDNGERVSSRRLEERIQQAVQDGARTIDIEAAGQHGIGGRLWVARTEPVRVTVRGAVGQRLGSMGCEGTSIEVMGPASEDVGWLNAGADILIHGNVGGGTANAMAQGRIRVGGNIGSRGMTMTKQNPRFTAPELWVLGSVGDYFAEFMAGGTAVVCGFNAQNPANVLGYRPCVGMVGGRILVRGPYDGFSQADARLDPIDDALWQWLVDGLADFTAALGKPELAAALSVREEWQCIVARGPYEKTGKTRRSISDFRRNVWDRELGMGGLVGDLTSLDRSPIPLITTGELRRFVPVWENARYAAPCQSSCPTGIPVQERWRLVRDGLVDEAVDMALAYTPFPATVCGYLCPNLCMQGCTRNLQRMKPVDVTMLGKAGVRSDIPALPPLTGQRVAVVGGGAAGISVAWQLRMRGIEAVIHDMEPLLGGKIASAIPESRIPREVLDAELERVRKVLPHIHLHRKLTKDDFEQLRADFDFVVLATGASKPRMLPVPGRELATTALDFLRDAKSGNGKPCKRVVIVGAGNVGCDVATEAARLGAESITLVDIQTPAAFGKERDEAEHVGATFRWPCFTREVTADGLVLTTGELIPADTVVFSIGDAPDLDYLPDTIATERGYVTVNDLGQTTDARVFAIGDVVRPGLLTQAIGAGRKAAGAIADMAEGKRPVSDTREMVDTARIKLEYFDPRISGFDDLERCGEACVSCGACRDCGVCETICPQGAISRRDLGEGRFEMTVDGERCIGCGFCAGACPCGIWNLVENTPLE

SEQ ID NO: 4487 - DNA, 1431 bp, Desulfovibrio vulgaris
  CDS (1)..(1431)
atgaatagtgacaagaagggcagaagcctgcaaccgcgagtccccatgccctgccagcccgcccatgagcgggtgggcaacttccacgaagtggcccttggctactcgcgcgaggacgccatgcgcgaggcctcgcgctgcctgcaatgcaagaagcccaagtgcgtcaagggctgccccgtcgaggtgcagataccgcaattcatcgccgcccttgccaagggcgatgtcgagtcggcctaccgcaccctgcgcgagaccaacagcctgcccgcggtctgtggccgggtctgtccacaggagaaccagtgcgaaggggcctgcatactcggggccaagggacaacccgtggccatcggtcgtctcgaacgctacgccgcagacacctacatggccctcgacgcctgcgaccagcttacgggcaggcccgagtgcccgctcatcgaccccgacctcaaggtcgcgtgcatcgggtccgggcccgcaagcctcaccgtggcgggctacctttcgtcgcgcgggttcaaggtgaccgtgtacgaggccctgcacgaacttggcggggtgctcgtctacggcatccccgaattcaggctgcccaagtccgacatcgtggagaaggagattgccgccctgcgccagcaggaggtggagttcgtcaccaactgggtgggcgggcgcaccttctccatcgacgacctcttcgccgaaggctacaaggccgtgttcatcggggtcggggccgggttgccccgttttctcgacatccccggagagaacctcgtcggggtgttctcggccaacgaatacctgacgcgggtcaacctcgggcgtgcctacggcttcccggactatgacacccccgtctacagggggcgcgaggtcaccgtcttcggcggaggcaacgtggccatggacgcggcacgcactgccctgcgcctcggcgcggagagcgttcgcatcgtctaccgccgtacccgcgacgagatgcccgcccgcctcgaagaacttgaacatgccgaggaggaaggcgttcgcctcgaacttctggccgcaccgctcggcttcaagggcgacgcggacggacgcctcaccgccgtgaccctgcaacgcatggaactgggcgagcccgacgcctcgggcagacgcagcccccgccctgtggagggcgcggtgtacgacctgcccaccgaccttgccgtcatcgccgtgggcacacgccccaacccaatcctgctcgaagcgacccccggactcacgctcgaccgccggggctacatcgcggtggacgaggccacgggcatgacatccatccccggcgtgtacgccggtggcgacatcgtgacgggagccgccacggtcatcctcgccatgggtgccggtcgcagggccgccaaggacatagaagcccgactgcgccctgccacatag

SEQ ID NO: 4488 - protein, 476 aa, Desulfovibrio vulgaris
MNSDKKGRSLQPRVPMPCQPAHERVGNFHEVALGYSREDAMREASRCLQCKKPKCVKGCPVEVQIPQFIAALAKGDVESAYRTLRETNSLPAVCGRVCPQENQCEGACILGAKGQPVAIGRLERYAADTYMALDACDQLTGRPECPLIDPDLKVACIGSGPASLTVAGYLSSRGFKVTVYEALHELGGVLVYGIPEFRLPKSDIVEKEIAALRQQEVEFVTNWVGGRTFSIDDLFAEGYKAVFIGVGAGLPRFLDIPGENLVGVFSANEYLTRVNLGRAYGFPDYDTPVYRGREVTVFGGGNVAMDAARTALRLGAESVRIVYRRTRDEMPARLEELEHAEEEGVRLELLAAPLGFKGDADGRLTAVTLQRMELGEPDASGRRSPRPVEGAVYDLPTDLAVIAVGTRPNPILLEATPGLTLDRRGYIAVDEATGMTSIPGVYAGGDIVTGAATVILAMGAGRRAAKDIEARLRPAT

SEQ ID NO: 4489 - DNA, 2022 bp, Desulfovibrio vulgaris
  CDS (1)..(2022)
atggcacgtgtcatctacggaatctgggacggtaccgtccacgacaacaggggaaaggcgcttttcgagataccggatgcgccggggttcgaagggttcgatacgttcaatcagggcaactccattcgcgcctttgtcggagatagagggttcttcgtcttcgaaccgggtgtgaatctgctcgatgccttgtggcagtatatggaaagggccgcccgcgagtcatgcggcaagtgtacgccatgccgtgtcggcacgggtatcatccgcgacagcctcgccgccctgctgcgtgatggtgtcggttctggcggtctgggcactttggtcgaactcgctgaacaggtacgctctacttcattgtgcggcctcgggcgcacgtgcactgtggcactgtgcggcgcgcttgagcactttcaggatatgctcgttgaaggggcgcgcacggcgagcggacagcagcacggcatgagctatgtcacggcaccgtgcatcgaagcctgtcccgccagagtgaatgtcccccgctatatcgattacatacgtgacggcatgccctcgcattcgctcggggtcatcctgcagaagtatcccatggcggcgacctgtggccgtgtgtgcgtgcggttctgcgaacaggcatgccgacgcgggctggtcgatgagcccgttggcatcaagattctcaaacgctacgtcgccgaccatgagagtcaccttgcgcagggctggttctctcctgatatcgtacgtgacagaaaacccggccacctcaaggtggcagtggtgggggccggacctgccggcatatcctgcgcctatcacctgcttctcaacggctaccccgtcgacgtgttcgaggcgcgtaacgaggcggggggcatggctgcatgcggcattcccagttacaggttgcccaaggatgtcctccgtacggagaccgacatcgtcgaacgtctcggagggcggttcttctatggacagcgtctcgggcacgatgtctcgctcgatggactccgtgagcagggatacaaggccgtgtttctcgcccttggttgcccggaaggacgccttctgggcattgagggggaggatacatcgcttgaaggataccagcccggcatcgactttctcttgcgagtgcacgaccatgtcgaatcgcaagccgacgcttcgctgtcaggggtggtcgtggtcgtggggggcggcaacgtcgccatggactgtgtccgttccgcattgcgcctcggcgcacgtgaggtgcaccttgtctaccgtcgcacacgcgacgccatgcctgccgaccatgaggagatagaggccgcagagaaggagggcgtggtcttccactacctcaccaacccggtgcgcatcatcaccagacagatggtggactccgcaggcgtgacccgtgaccgtgtcgtcggtgtcgaggtcgtggacatgcgcgagggcgagcccgatgcgcgaggaaggcgcggcgtcgtcgcggtgtcggggtcggggcgcgtcataccctgcgataccctcatccccgccatcggccagcagatggacagcaccgcgctttcgccggaggacggcgtcgatgtcgacgcgcgaggtcgcgtcgtctccgaccagaccactctcgccacgacgcggcccggtgtctttgccgggggcgactgcgccttgggcccctcaacgctcatccaggccatggcgaccggcctcaagggggcgcggagcatcgacgactatctgcgctacggcagggtccgcttctttcccagaagccggatgcgccgtatcatccgtgatttcaaaccgctgtcgcaacagtgggtcgatactccggttcgtcatctgtaccgcatccatgcacaggaactcgaccccgcctaccgcaggcagttgttcgacgaggtggaatgtcccatctccgcagaggacgcctatcacgaggccggacgctgtctgcgttgctaccgcgtctattctgtcatcaccgaggccgccatcccgcagtgcgacgactga

SEQ ID NO: 4490 - protein, 673 aa, Desulfovibrio vulgaris
MARVIYGIWDGTVHDNRGKALFEIPDAPGFEGFDTFNQGNSIRAFVGDRGFFVFEPGVNLLDALWQYMERAARESCGKCTPCRVGTGIIRDSLAALLRDGVGSGGLGTLVELAEQVRSTSLCGLGRTCTVALCGALEHFQDMLVEGARTASGQQHGMSYVTAPCIEACPARVNVPRYIDYIRDGMPSHSLGVILQKYPMAATCGRVCVRFCEQACRRGLVDEPVGIKILKRYVADHESHLAQGWFSPDIVRDRKPGHLKVAVVGAGPAGISCAYHLLLNGYPVDVFEARNEAGGMAACGIPSYRLPKDVLRTETDIVERLGGRFFYGQRLGHDVSLDGLREQGYKAVFLALGCPEGRLLGIEGEDTSLEGYQPGIDFLLRVHDHVESQADASLSGVVVVVGGGNVAMDCVRSALRLGAREVHLVYRRTRDAMPADHEEIEAAEKEGVVFHYLTNPVRIITRQMVDSAGVTRDRVVGVEVVDMREGEPDARGRRGVVAVSGSGRVIPCDTLIPAIGQQMDSTALSPEDGVDVDARGRVVSDQTTLATTRPGVFAGGDCALGPSTLIQAMATGLKGARSIDDYLRYGRVRFFPRSRMRRIIRDFKPLSQQWVDTPVRHLYRIHAQELDPAYRRQLFDEVECPISAEDAYHEAGRCLRCYRVYSVITEAAIPQCDD

SEQ ID NO: 4491 - DNA, 2745 bp, Treponema denticola
  CDS (1)..(2745)
atgagtaaaaaagacaagcctaaaaaaatcttgtatgcagtcgattataagccgaaaagaaagagcccctttcttttggaatttgccaaccatctaaaccgaacaaaacccggttccaaaaggtcaattacctacgatgaccccgaatactatgttatggaaaacatcgttaccgacgaaatggcaaaggtcggtatgtttttaaaaatcagaacacctctaagtgctcaagatatatctcccctatgcggaaaaaccgtggaggaaaccgagaagattctttgggatttggcctatgtaggctgctgtattacaaataccattgacggagtaaataagtactggaccgaaatatgggttcccggcattatggaaatgataaacaacaacaaggagctgacctcaaagcatcccgaaataaccatagccttcgatgcctacggaaaaaagaaaggagaaatagctcccggtatcttgcccatgggtgtttccccgatgagggttattcctatcgaaagtgcaatcgaaagcgatacccatcatgcaagttacgaagaaatttctcattacctaaaccagcacactctttttagtgtttcagattgttcttgccgaacggtgcgcgaaaagatgggagaaggctgcggacatctaaaagaagatatgtgtatccagatgggacacgccgccgagtattatataaagaccggaagagcgaggcagattacgcgtgaagaagcctttgaaattataaaaagagctgaagaaaacgggctcatgcacgatattccgaaccttgacggagagggtaaaactcatgccatctgtaactgctgcggatgcggctgtcttgctatccgaaatgcaattatgtacagaaacacggatttttcacgctcaaattatatctccgtaattgacgaagaaaaatgtgtagcctgcggcgaatgtgtagagcattgcccttcaaatgccctaaggctgggacaaaaaatctgctcgtcaaaacctatccccgaagaaaaaaccgtaaaaactcccagagaccatcgatgggggcctgaagactggaatccagattaccgtacaaacagacaggttgtagtaaaaaccggaaccagcccctgtaaggcaaactgccccgcccacataggagttcaaggttatatcaaacttgcggctcagggaaaatacagggaagccttggagcttataaaacttgaaaaccccttcccggcagtctgcggtcatgtatgtccccgttattgcgagcagggctgctcaaggctggggcttgatgaagccgttgccgtcgacgatataaaaaaatttatagcagagcaggatcttaattccgagcaccgctatgttcctaaaaagaaaagatactatcacgataaaaaaatcgccattataggaggcggccccgcaggtctttcctgtgcctattatcttgcaatagataattacgatgtaaccgtcttcgaaaaagaaaaatccttgggcggaatgttaaaattcggtattccctcatttaggctcgaaaaaaatgttcttgatgccgaaatagatgttttaaaagaactgggcgtaaactttaaaaccggagtcgaggtaggaaaagatgtaagccttgatgaacttagagctcagggctttaaggccttttaccttgcaatcggggctcaaaagggaaggcttttaggcattgaaggcgaagatgcggcaggcgtaattaccggtgtggactttttaagggaagaaaacttaaatgaaagcaaaagcctttcaggcaaggtaatcgttatcgggggcggaaatgtcgccattgatgtagccagaatggcagtccgtgcaggcggcgaagaagtttccatgttctgtcttgaaaaaagagaagaaatgcctgcccttcctgaagaaatccatgaagccgaagaagaaggtataaagattacaaactcatggggccccaaacgcattcttgttacgaacggaaaagtgagcggagtcgaatttaaaaaatgcctttccgtttttgataaggacggaaggttcagcccaagctatgacgaaaacgacactatgactgtagaatgtagtttcgttataacctctgtaggtcaggccatagatctaggttctatcttagaaggttccgcttgcgaaataaacagaaatcaaaccgtaaaggcagacccaatcacctatcaaagtgctcaaaaagatatctttgtaggaggcgatgtattgacaggccctaaatttgccatagatgccatcgcccaaggaaaagaaggggccatctcgattcaccgttttgtacatccgggacaaagtttggttatgggcagaacaaggcgggattataaacccctcgatcgtgaaaatttggagcttgcaggctttgacagactgccccgccaaagagcggaagaaccttccggcgaagaaggaaaaaagacatttagggatttacgcaaaacattaaccgaagaacaggtaaaggctgaaaccgagcgctgcttaaaatgcggagccgtaaaggttgacgaatacatgtgcataggctgcggaatgtgtacgacccgctgccgtttcggagctatcagcttaaagcgtgtttatgatgctcacccaagcaccctcgaaaagcttaaaggtgtggttataagaaacatggtaaagagggaaggcaagattttgtttaacaagatttttaagtcttctcccaagaataaatag

SEQ ID NO: 4492 - protein, 914 aa, Treponema denticola
MSKKDKPKKILYAVDYKPKRKSPFLLEFANHLNRTKPGSKRSITYDDPEYYVMENIVTDEMAKVGMFLKIRTPLSAQDISPLCGKTVEETEKILWDLAYVGCCITNTIDGVNKYWTEIWVPGIMEMINNNKELTSKHPEITIAFDAYGKKKGEIAPGILPMGVSPMRVIPIESAIESDTHHASYEEISHYLNQHTLFSVSDCSCRTVREKMGEGCGHLKEDMCIQMGHAAEYYIKTGRARQITREEAFEIIKRAEENGLMHDIPNLDGEGKTHAICNCCGCGCLAIRNAIMYRNTDFSRSNYISVIDEEKCVACGECVEHCPSNALRLGQKICSSKPIPEEKTVKTPRDHRWGPEDWNPDYRTNRQVVVKTGTSPCKANCPAHIGVQGYIKLAAQGKYREALELIKLENPFPAVCGHVCPRYCEQGCSRLGLDEAVAVDDIKKFIAEQDLNSEHRYVPKKKRYYHDKKIAIIGGGPAGLSCAYYLAIDNYDVTVFEKEKSLGGMLKFGIPSFRLEKNVLDAEIDVLKELGVNFKTGVEVGKDVSLDELRAQGFKAFYLAIGAQKGRLLGIEGEDAAGVITGVDFLREENLNESKSLSGKVIVIGGGNVAIDVARMAVRAGGEEVSMFCLEKREEMPALPEEIHEAEEEGIKITNSWGPKRILVTNGKVSGVEFKKCLSVFDKDGRFSPSYDENDTMTVECSFVITSVGQAIDLGSILEGSACEINRNQTVKADPITYQSAQKDIFVGGDVLTGPKFAIDAIAQGKEGAISIHRFVHPGQSLVMGRTRRDYKPLDRENLELAGFDRLPRQRAEEPSGEEGKKTFRDLRKTLTEEQVKAETERCLKCGAVKVDEYMCIGCGMCTTRCRFGAISLKRVYDAHPSTLEKLKGVVIRNMVKREGKILFNKIFKSSPKNK

SEQ ID NO: 4493 - DNA, 1830 bp, Treponema denticola
  CDS (1)..(1830)
atgagtcgacttgagatattttcacaaaaccggtctcaaattataattgaagaactgtatgagaatcttcaacatcgaattgaagcaagtcctcccggactttgtcccgtttacataacacgagcctttattgaaatgtgtcatgcccaaacttgcggaaaatgtgcaccatgccgtatcggccttttacagttaaagcatattttaactgatgtcctaaacggaaaatcaacaatgaaaacccttgatcttattgaagaaactgctaaatctataagggaaacagcagactgtgcactggggtatgaagcagccgatatggtttataaaagcataatctattgccgtgatgactttgaagaacatataaaacacggaagatgcggctgtataacaactcagcccgtaccctgtgtagccctctgtcctgcaaatgtggatattccgggctatattgcccttgtcagggatgaaagatatgccgatgccgtccgcttaatcagaaaggacaatccttttccttctacatgtgcctttatctgtgaacatccttgcgaacataggtgccgtcgaaatatggtagacaccgcaataaatataagaggattaaaaagggttgccgttgaatttgccggaaaagttccgcctcccccatgtgcaccctctacaggaaaatcgatcgccatagtcggaggagggcctgccgggcttaccgcggcttattatttacagctcatgggacatcagacaaccgtatatgagatgctgcccaaattaggagggatgctccgttacggtatacctaattaccgtctccctaaggacagattggacgaagatatagatgcaattcttgaaaccggagttaaagtcgtttacggtaaaaaaataggaaccgatatagaactcaatgaacttataaaagataatgatgcggctataatagcaattggagcctcaaccgacaaaaagctgggccttgaaggagaagattcggaaggcgttatctctgctgttcaattccttagagatgtgggaatggataagggcatggatttaacaggtaaaaaaactgcaataataggaggcggaaatgttgccatggatgcagtgcgtactgctgtccgtctaaaatcggaaaaagttacctgtctttaccgaaggcgtgtagccgatatgacggctcttcctgccgaaatagaaggagccttagccgaaggggtagaaatgatgaccctaaaagctccttcaaaacttgaagtaaagaatggaaaactcacaggcgtttgggttactcctcagatgatttccaaaataaaagacgggcgagcctccgttgtatctacaggagaacctgatatttttattccgtgtgaagtgcttgtcgttgcaataggtcaggatatcgaaactcaacattatgaagattccggtataccggttgatcgaggaaagctttttaccatgcccagcgcaagttttcaaggaatgcctggcctattttcaggcggagactgtgcttcaggccccgctacggttataaaggccattgccgccggaaaagttatggccgcaaatatagacgaatatttaggctatagccacactataagctgtgatatagaaattcccattcccaatattgatgaccgccttgcttgcggaagggttgaacttggagagagggaagcttctgaaagaataaaggattttgaaggcgtagaattctgtatgagtaaaaaggaagcttgtcaagaatcaaatcgctgtcttaaatgcgatcacttcggatttggtatatttaagggaggacgggaacgattatggtaa

SEQ ID NO: 4494 - protein, 609 aa, Treponema denticola
MSRLEIFSQNRSQIIIEELYENLQHRIEASPPGLCPVYITRAFIEMCHAQTCGKCAPCRIGLLQLKHILTDVLNGKSTMKTLDLIEETAKSIRETADCALGYEAADMVYKSIIYCRDDFEEHIKHGRCGCITTQPVPCVALCPANVDIPGYIALVRDERYADAVRLIRKDNPFPSTCAFICEHPCEHRCRRNMVDTAINIRGLKRVAVEFAGKVPPPPCAPSTGKSIAIVGGGPAGLTAAYYLQLMGHQTTVYEMLPKLGGMLRYGIPNYRLPKDRLDEDIDAILETGVKVVYGKKIGTDIELNELIKDNDAAIIAIGASTDKKLGLEGEDSEGVISAVQFLRDVGMDKGMDLTGKKTAIIGGGNVAMDAVRTAVRLKSEKVTCLYRRRVADMTALPAEIEGALAEGVEMMTLKAPSKLEVKNGKLTGVWVTPQMISKIKDGRASVVSTGEPDIFIPCEVLVVAIGQDIETQHYEDSGIPVDRGKLFTMPSASFQGMPGLFSGGDCASGPATVIKAIAAGKVMAANIDEYLGYSHTISCDIEIPIPNIDDRLACGRVELGEREASERIKDFEGVEFCMSKKEACQESNRCLKCDHFGFGIFKGGRERLW

SEQ ID NO: 4495 - DNA, 1512 bp, Treponema denticola
  CDS (1)..(1512)
atggaaaatataaataaagaatgtcataaacatgtaacccatgaagatctttcagatcgggccaaacagctttgggccgatttaaagggcaaaaccttaacccctaaagaaagggctcagattcctattcaggaaatgccgaccctcgatccccataaaagggcctcattgatgaatgaggttgccatgggctacactgatgaacaggcccgcattgaggcggaaagatgcttaaactgcaaaaacaagccctgcgttaaaggctgccccgtaggtataccgattcccgaatttattgccgaaatccaaaaaggcgattataaaaaggctgtcgatattataaaaacaacaaacctcttacctgcaatttgcggacgcgtttgtccacaagaaaagcagtgccaagctttttgtactgtaggtaagatgctcaaatccacggaacaggctgtagccatcggccgtcttgaacgctttgtcgccgactgggaaagaaacaataataagattaccattccgcccgttgctcccgaaaccggaaaaaaagttgctatcatcggttcaggccctgccggtttgactgttgcagcagatgtccgcagggaaggccactcggtaacagtctttgaagccttccacaaaacaggcggcgttatggtttacggaatccccgaattccgcttgccgaaagaaatcgttgcaaaggaagtcgaaaacctcgaaaagatgggcgttgaattcaaaaccaacttcttggtaggaagaaccgaaacccttgagcagcttttaaaagaagacggatatgatgccgccttcatcggaaccggtgccggtcttcccaaatttatgggaattgaaggcgaaaacctaatcggtgtttttagtgcaaacgaatacctgacacgggccaaccttatgaaagcctatgatgcagaacactccgatactcctctttatgaggctgaaaccttggccgtaatcggaggcggaaacgttgctatggatgctgcaagaatgggctaccgccttggctgtaagaaggtttactgtatctaccgccgaacccgtgcagaaatgccggcccgaatcgaagaagttgcccacgccgaggaagaaggcgtagagttctgcttccttcaaaaccccacaagaataatcggagataaagaaggaaaggtttgtgcaatagaagttttagactatgaattgggcgaacccgatgaatccggcagaagaaagcctgtagcaaagcccgggaccgagcatcaaataaaggtagatgccgtaattgttgccctcggaaacgactccaacccccttatggctcaaacaagtcatggtttggaagttaccaaaaaaggaaatatcgttgttgacgaaaaccaaaaaacctcaatcgagggagtttgggcaggcggcgacattgttttaggtgctgctaccgtaattcttgcaatgggcgaaggccgaaaagccgctgctgcaattaacgaatatttaaagacaaaataa

SEQ ID NO: 4496 - protein, 503 aa, Treponema denticola
MENINKECHKHVTHEDLSDRAKQLWADLKGKTLTPKERAQIPIQEMPTLDPHKRASLMNEVAMGYTDEQARIEAERCLNCKNKPCVKGCPVGIPIPEFIAEIQKGDYKKAVDIIKTTNLLPAICGRVCPQEKQCQAFCTVGKMLKSTEQAVAIGRLERFVADWERNNNKITIPPVAPETGKKVAIIGSGPAGLTVAADVRREGHSVTVFEAFHKTGGVMVYGIPEFRLPKEIVAKEVENLEKMGVEFKTNFLVGRTETLEQLLKEDGYDAAFIGTGAGLPKFMGIEGENLIGVFSANEYLTRANLMKAYDAEHSDTPLYEAETLAVIGGGNVAMDAARMGYRLGCKKVYCIYRRTRAEMPARIEEVAHAEEEGVEFCFLQNPTRIIGDKEGKVCAIEVLDYELGEPDESGRRKPVAKPGTEHQIKVDAVIVALGNDSNPLMAQTSHGLEVTKKGNIVVDENQKTSIEGVWAGGDIVLGAATVILAMGEGRKAAAAINEYLKTK

SEQ ID NO: 4497 - DNA, 1413 bp, Geobacter sulfurreducens
  CDS (1)..(1413)
atgagcacgggtatgaccaccagagagcgattggccattgaccgggtccacatggtcgaactcgatgccgacagccgcagccgaaattttgacgaagtgaaccggggcctcaccccggaggaggccgtgcgcgaggcccagcgctgcattcgctgcacgaaccgccagtgcgtggcaggctgtcccgtgggggtgtcgatcccggaatttatcacggccctggccgacggcaacctcagggaggctgcccggatcctgaccagggacaatgcgttgcctgccgtgtgtggccgggtctgtccccaggaaacccaatgcgaggccaggtgcgtgcgtgggatcaagggagagcccgtggccatcgggtatctggagcgttttgtggcggactgggccacggccaatgtcgccgagctcggtgacgagccgctgccgccgccaacaggcaggcgggtggcagtggtcggctgtggtccggccggattgactgccgccggggagttggcccgcaagggacatggcgtgactatcttcgaggcgctccacgacacgggcggggtgcttcgctacggcattccggagttccgcctgcccaaaaccattatcgatgccgaggtggcgcggcttcttgcactgggggtgacggttgagtgcaatgtcatcatcggcaagacgctgaccctcgcccagctgcgggaagaattcgacgcggtattcatcgccaatggcgccggcctgccggtgatgctctccatcccgggcgagaatctcaagggggtctattccgccaacgaatacctgacccgggttaacctcatgggggccggccgcgaccccggctccaccactcccatcattgccggtaagcgcgtggccgtcatcggcgggggcaacaccgccatggactgcgtccgaaccgctcgccgtctgggcgccgagcgggccatgatcatctaccgcaggagcgaggagcagatgccggcccgggtggaggagatcaagcacgccaaggaggaaggggtcgagttcgtaatgctgacagcccccatcgccatcgggggcgacaaggacgggtgggtggccaccctgcgctgcctgcgaatggagctgggcgcgcccgattcgtcgggacgccgatcaccggtgccggtggaaggttccgcatacgacattgccgtggatgtggtggtgaatgccgtcggtacccgggccaatccgctcctgaccgccacggcgccggaacttaaactgaaccggtggggcaacatcgccaccgatgacaacggtgccacgagcgttgccggcgtctatgccggtggcgacatcgtgcgagggggcgccacggtaatccttgccatgggcgatgggaagcaggcggctgccgcgatccacgactggctgaacaggcggtga

SEQ ID NO: 4498 - protein, 470 aa, Geobacter sulfurreducens
MSTGMTTRERLAIDRVHMVELDADSRSRNFDEVNRGLTPEEAVREAQRCIRCTNRQCVAGCPVGVSIPEFITALADGNLREAARILTRDNALPAVCGRVCPQETQCEARCVRGIKGEPVAIGYLERFVADWATANVAELGDEPLPPPTGRRVAVVGCGPAGLTAAGELARKGHGVTIFEALHDTGGVLRYGIPEFRLPKTIIDAEVARLLALGVTVECNVIIGKTLTLAQLREEFDAVFIANGAGLPVMLSIPGENLKGVYSANEYLTRVNLMGAGRDPGSTTPIIAGKRVAVIGGGNTAMDCVRTARRLGAERAMIIYRRSEEQMPARVEEIKHAKEEGVEFVMLTAPIAIGGDKDGWVATLRCLRMELGAPDSSGRRSPVPVEGSAYDIAVDVVVNAVGTRANPLLTATAPELKLNRWGNIATDDNGATSVAGVYAGGDIVRGGATVILAMGDGKQAAAAIHDWLNRR

SEQ ID NO: 4499 - DNA, 2019 bp, Geobacter sulfurreducens
  CDS (1)..(2019)
atggcacaggtggttttttccagctggggaagaacaatcgtcgataaccgcaaggggggagaagcccaggacgtgagcttccgccttccgaccaccctcgatggcgagcggcagattgccgcgttcatggggtgggatgggatcatcctttacgacctgaaggttgacgtgccggccatggcggccgaatatatgaagcgcgtgcagacccagtattgctgcggcaagtgcacccccggcaaaaaggggaccaaggttcttgccgacgttttggcggccatcattgaggggcgggccacagaggcagacctcgacaccatcgacgatctggcggacctgctcaccaattgcaagtgcaccctctgccaaagctcaacgatcccggttctcgatgcagtgaaacacttccgggaagatttcctcgcctatatcaccggcatccgcaaacccgccaacgtacaccggttcatcgacaagtacaccgccccctgcatggaccgctgcccggcccatatcgacattcccgcctacatcgaggcgatcaaggaataccgattcgatgagtcgcttgatatcatccgcgacaacatgccgttgccgtcggtctgcggcagggtgtgcccgcacccctgcgagacccactgtcgccgcaagaacgtggacgactcggtcaacatcatggtgctcaagcgttccgcctccgactacgagtggatgcacaacgcagccccccccatgcaacccaagccgcaaaaaaacaagaaagtcgccattgtcggggccggcccggcaggccttgcctgcgcctactacctggcccttgaaggatatccctgcaccatctacgaggccctgcccgaaggatacggcggcggtatgatcgccgtcggcatccccccctaccgccaaccgcggcacctgctccaacgcgatatcgacatcatttcctccatgggtgtggatatcatctatgacacccgcatcggcaaagacatctccctagaagagctcaagcagaaattcgacgccgtcttcctggcaccaggcgcccaccgctccaagcccatgggcgtcgagggagaagacaagggctacaagggcttcctgaagggcggtatcgactttctccgggaagcctacatgggacgccccaccggcatggggaaaaaggtggtcgtggttggcggcggcaacactgccattgactgcgtgcgggttgctctccgggaaggagcggaagaatccacacttctctatcgtcgttcgcgcaaggaaatgccggccgacgtatgggaagtggacggtgccgacgaagaaggggtacgatttgagttccaggtcctccccacacgggtactcgtggatgagaacgagcaggtgaccggtgtggaatgtgtccgaatggccctcggtgagcctgacgcctcggggaggcgccggcccgagccggttcccggcagcgagttcgtggtcgagtgtgacaccgtcatcccggccattggccaggatcccgatctttccttcatccccgacaacctgggaatcgacatcaccaagtggaacaccgttgtcaccaagtacgttcctctcaaggatgcggcgggcaaggacttgaaagacggcatgggcaacccccttgcacgggtactcatcactgaccttgagggtgttttcgcgggcggcgatgccgaaataggccccctgaccgtcgtcgcctgcattggaaatgcacatcgggccgcgcgggtgattcagcgctggcttgaagaaggaaaggcataccttaccgaggacgaactcatggaggacatcctcacgaacatgccggtctacgacaagaacgaaaaggttccctggctcgactcccgggagcgggcccaccaagccgaggtccacggccaagagcgggcgagcaagggcaactaccaggaagtggaactcggctttgtcgatacccaggcagtggaggaagcagagcgctgcctccggtgctaccgggtcgccatggccgccatttag

SEQ ID NO: 4500 - protein, 672 aa, Geobacter sulfurreducens
MAQVVFSSWGRTIVDNRKGGEAQDVSFRLPTTLDGERQIAAFMGWDGIILYDLKVDVPAMAAEYMKRVQTQYCCGKCTPGKKGTKVLADVLAAIIEGRATEADLDTIDDLADLLTNCKCTLCQSSTIPVLDAVKHFREDFLAYITGIRKPANVHRFIDKYTAPCMDRCPAHIDIPAYIEAIKEYRFDESLDIIRDNMPLPSVCGRVCPHPCETHCRRKNVDDSVNIMVLKRSASDYEWMHNAAPPMQPKPQKNKKVAIVGAGPAGLACAYYLALEGYPCTIYEALPEGYGGGMIAVGIPPYRQPRHLLQRDIDIISSMGVDIIYDTRIGKDISLEELKQKFDAVFLAPGAHRSKPMGVEGEDKGYKGFLKGGIDFLREAYMGRPTGMGKKVVVVGGGNTAIDCVRVALREGAEESTLLYRRSRKEMPADVWEVDGADEEGVRFEFQVLPTRVLVDENEQVTGVECVRMALGEPDASGRRRPEPVPGSEFVVECDTVIPAIGQDPDLSFIPDNLGIDITKWNTVVTKYVPLKDAAGKDLKDGMGNPLARVLITDLEGVFAGGDAEIGPLTVVACIGNAHRAARVIQRWLEEGKAYLTEDELMEDILTNMPVYDKNEKVPWLDSRERAHQAEVHGQERASKGNYQEVELGFVDTQAVEEAERCLRCYRVAMAAI

SEQ ID NO: 4501 - DNA, 6588 bp, Ashbya gossypii
  CDS (1)..(6588)
atgtcttatcttgcttttgtttactgtttacatagtacatcattggtgttagtacctacgctgagttactgtcgtttggatacgcctggcacacacacacacacgcacggttatatacaggcaagcgacgttacgactgaccaacgcaaggtaatgctacactcggagccttatgatgcgctccaagaggcctacgaaggcggacagcctcttggcgagcagacggagttgagaggccaggacggtcatatctcctgggccaacgccattcctggcaagcaggggttgtatgatcctgactatgagaaggacgcctgtggtgtcggcttcgtggccaacatcaagggcgagccatcgcataagatcgtctcggatgcaaaatatttgctatgtaacatgacccatcgtggcgcagtctcgactgacggtaacggtgacggtgccggtatcctggtcgggattccacatgagttcatgcagcgggagttccgcatggaggcgggtgtcgaggttcccgccaagcatcagtatgctgtcggtaacatcttcttcaagaaggatgcagcagaggtcctagaggcctcgaagcaaactttcggccagctagccgagtcgctcgacttgcgggttttgggttggagggaggtcccacacgactcttccattctaggttccgttgcgctatcgcgcgaacccactatcctacaaccgttggttgtgctgaaagagacttatgggcaggagatatccggtgaagaattccaggctaaatacgagacgacgttccggatgcagttgtacattttaagaaagcaggcttctacggccatcggtatccagaactggttctacgtgtgctccctaaataaccggacaattgtgtacaaaggtcaattgacccctgcccaggtgtataattattaccacgacttgaccaatgctcatttcaagtctcacctggcgctggtacactctcgtttctccaccaatacattcccatcttgggaccgtgcccagcctctgcgctggcttgcacacaacggtgaaattaataccctaagaggcaacaaaaactggatgcgtgcgaaggaaggtgtcatggcatccgccgttttccaagaccaactggagaagctttatccgattatcgaagaaggcggatccgactctgccgcgctggacaatgtgctagaattactagtgataaatggtgttctgtcattacccgaagcgatgtgcttgatggttccagaagcctaccacaaggacatggattctaacctgaaggcttggtttgactgggccgcctgtttgatggaaccatgggatggccctgcgttgctcacctttaccgatggccgctacaccggcgctacattggaccgcaacggtttgcgcccatgcagattctatattacttcagatgatcgggttatctgcggctccgaagttggtgttatccctgtcgcaaatgaactcgttgtttgcaagggtaagctaaagccaggcgatatgttgcttgtagacacggagaagggtgaaatggtagacaccaacatgctgaagaaagagttttcgttgagacaggactttaagtcatggctttcaaaggtgattaagctagatgacttgtccgagaaaaccaaaaagtacactccacaggccttcactccatcgcattctactggtcatgtccagcaagaccccagactcttagcgcttggttacacctttgagcaggtttccctccttttgattcctatggccctacaggggaaagaagcattgggatctaggggtaaggacgttcctttggctggcttgaacgaggatcctgttcttgtttacgattacttcaggcaattgtttgcccaagttaccaaccctccaattgaccctatccgtgaggcgaatgtcatgtccctggagtgttttgtgggtccccaaggcaacttgttggagatgcatccatctcagtgtgaccgtctactgctgcggtctccagttctcatgtgggatgaattcgaggctctaaagaatatagagaaagtccatccaacttggtctaccgcacacatcgacataaccttccaaaaatctgaggggttgcttggttataccaatgctatagaacgtatcacacaagaagcctcggatgctattgagcaaggcaagaagatactgatgatctctgataggaaaattgacgctgagcatgtgcccatctcctcactgatcgctgttggagctattcaccatcacctaatcagaaacaagcagcgctcccaggttgctttaatcttggagactggcgaagcccgcgaagttcaccagttctgtgttcttcttggctatgggtgtgacggtattttcccttacttagcgatggaaaccctggtcagaatgaataacgaaggtttagttcggaatgttaacgatgactactctgatattacagatgagcaactgttgcataattacaaggaagcaattgacggcggtatactaaaagtcatgtcgaagatgggtatctctactctggcatcttacaagggagcgcagatatttgaagctttaggtattgataactcagtgattgatttgtgttttgccggaaccgcttctagaattaagggtgttacctttgaatacattgcgcaagacgccttttcattgcacgagcgcgggtatccatcgaggtttacgattaagagatctgtcaacttgcctgaagccggcgaataccactggagggatggtggctataagcacgtcaacgagccaagtgccattgctgcattgcaggattctgtccgtaacaagaacgaggatgcatggtccatgtatgttcaaaaagagatggaagcaattagagactgtaccttaagaggtttgttggatctggattacgagtcgtctacagctattccactagaacaggtcgagccatggactgagattgccagaagatttgctaccggtgccatgtcttacggttccatctctatggaggctcactctaccctagcgattgccatgaacagactaggtgcaaaatctaactgtggagagggtggtgaggaccctgagcgttccattgttcaccctaacggtgacaccatgcgctctgctatcaagcaggtggcctctgcaagattcggtgtaacctctcattacctttctgatgcagatgagatccagatcaaaattgctcaaggtgctaagcctggtgaaggtggtgagctacctggccataaggtttcgaaggaaattgcgaagactagacattctaccccatatgtcggcctcatttctcctcctccacaccacgacatttactctattgaagacttgaaacagttgatttatgatttgaagtgtgctaatcctcgtgctggcatatctgttaaactggtttctgaagttggtgtcggtatcgttgcttctggtgttgcgaaagctaaggcagaccacattcttgtttccggccatgacggtggtactggtgctgctaggtggacttctgttaagtacgcaggtcttccatgggaattgggtttggcagagactcaccaaacattggttctcaacgatctacgtcgtaacgttgttgtccagacggacggtcaactaagaaccggctttgatattgctgttgccattctccttggtgcggaatcgttcactcttgctaccattcctttgattgctatgggctgtgttatgttgcggaagtgccacttgaacgcctgtgcagttggtatcgcaactcaagatcctgtattgagagctaagttccaaggccaaccggagcatgtaattaacttcttctattatttgattcaggacttgagaaagattatggcgaaacttggcttccgtactgtaacagaaatggtaggccattcggagaagctaagaaagagagacgacgtttctacaaaggcattaaacatagacttatcgcctatcttgacaccaggccatgttattcgccctggcgttcctacaagcttcaccaaaaagcaggaccacaagttacacgtccgcctcgacaacaaattaattgacgaggctgaagtcacattggataaaggattgccagtaacaatcgatgcctcgattatcaatactgatcgtgccttaggatctactttatcgtatagagtatcaaagaggttcggtgagcatggtctaccacaggacacaattgttgttaaaatcaatggttcggcaggccagtcttttggtgctttcttagcttctggtattacttttattctagatggtgatgccaacgactatgttggtaagggcttgtccggtggtagaattatcattaagcctccccagaactctaagttcgaatctgatgaaaatgtcatcattggtaacacctgtttctacggtgccacttctggctatgcgtttattgctggtagcgtcggtgagcgttttgctgtccgtaactccggtgcgacattagtcgtggaaaggattaagggtaacaacgctttcgagtatatgacaggtggtagagctgttgtgttgtctcagatggagtcattaaatgcattctccggtgcaactggtggtattgcttactgtttgacttctgactatgacgatctggttggaaagattaacctggacacaatcgagctacagagcttgagcgacccggtggagatcgctttcgtcaaaaacttaatccaggagcactacaactacacaaagtctgagctggcagcgagaatcttgcataactttaaccattatttgaagaatttcgttaaggtcattcctttggactacaagaaggttttggaaaatgaggctgccgaaaagaccaaggagaaggagagaagtgcaaatgaatatttgcggacattcagcaagaagctcaatttgtctgctgatgccaccaatggagaggtaagcaagcttctctccaagaaaaaccaggccgcagctcgtccgatttctatcaaagcgactttggcagagccaaaggttgtggatttggaagacgctgttcaaaatcctgatcaagaggacaatatcaaaaaactagatcgtatcaacggtttcattaaatataagttgcggcacgaagagtataggaacgttgcaaccaggacaaaggactggaaagagctcacttctgcaataacgaagaaggcagcaaagttccagactgctagatgtatggactgtggtgttccattctgtacctctgataccggttgtccaatctccaatgtcattccaaagttcaacgaacttgtctttaagaaccagtggaagcttgctctggacaaacttttggagacaaacaatttcccagaatttaccggcagagtgtgtccagctccgtgccagggtgcttgtaccttgggtatcagtgaagaccctgttggcatcaagtctatcgagcgtctcatcatcgataatgccttcaaggaagggtggatcaaaccatgtcctcctgaagtcagaactggccgtactgttgctataattggttctggtcccgctggtctatcttgtgccgaccagttgaaccgcgctggccactcggttacagtctacgaacgtgccgaccgttgcgggggtcttttgatgtacggtattccaaatatgaagcttgacaaatccatcgttcagagacgtttgaacttgctcgcggcagagggtatcgaattcgtgacgaacaccgaaataggcaaggatatcacaatgagcgagttgaagtcaaaatttgactccgtcgtttacgccgtgggctcgaccattccaagagacctacgcattccaggccgtgagttgaagaatatcgactttgcaatgactctgttgaagaacaacacccaagcgctcctagagaaggacctgggcaccattagaaagcatatagagggaaagaaggtcattgtcattggtggtggtgatactggtaatgactgtctgggcacttctgtcaggcacggcgctgcaagtgtgttgaactttgagctgctaccacagcctccaaaggagcgcgctaaggacaacccttggcctcagtggccgcgtgttatgcgcgttgactacggtcacgcagaggtcaaggagcattacggcagagacccccgggagttctgtatactctccaaggaattcgtgggcaacgaaaatggcgaggtcaccgcgatcaagacggtccgcgtggaatggaagaagtcgcagtccggtgtatggcagatggtggaggtcccaggctcagaggagacatacgaggccgatgttgttctgctctctatgggctttgtcggccctgagctgatcgaagaccctgcggtcacaaagacccgcagaggcactattggcactgtctccgacatgtcctactctgtggacggcggcaagctattcgccgcaggtgactgcagaagaggccagtcgctaattgtctgggccatccaagagggcaggaagtgtgcgactgccattgacaactatttgatgggttctacaaacctacccgggaacggtgggattgtgaagcgcgactacaagcttctcgaggaactagcatccgctttttga

SEQ ID NO: 4502 - protein, 2195 aa, Ashbya gossypii
MSYLAFVYCLHSTSLVLVPTLSYCRLDTPGTHTHTHGYIQASDVTTDQRKVMLHSEPYDALQEAYEGGQPLGEQTELRGQDGHISWANAIPGKQGLYDPDYEKDACGVGFVANIKGEPSHKIVSDAKYLLCNMTHRGAVSTDGNGDGAGILVGIPHEFMQREFRMEAGVEVPAKHQYAVGNIFFKKDAAEVLEASKQTFGQLAESLDLRVLGWREVPHDSSILGSVALSREPTILQPLVVLKETYGQEISGEEFQAKYETTFRMQLYILRKQASTAIGIQNWFYVCSLNNRTIVYKGQLTPAQVYNYYHDLTNAHFKSHLALVHSRFSTNTFPSWDRAQPLRWLAHNGEINTLRGNKNWMRAKEGVMASAVFQDQLEKLYPIIEEGGSDSAALDNVLELLVINGVLSLPEAMCLMVPEAYHKDMDSNLKAWFDWAACLMEPWDGPALLTFTDGRYTGATLDRNGLRPCRFYITSDDRVICGSEVGVIPVANELVVCKGKLKPGDMLLVDTEKGEMVDTNMLKKEFSLRQDFKSWLSKVIKLDDLSEKTKKYTPQAFTPSHSTGHVQQDPRLLALGYTFEQVSLLLIPMALQGKEALGSRGKDVPLAGLNEDPVLVYDYFRQLFAQVTNPPIDPIREANVMSLECFVGPQGNLLEMHPSQCDRLLLRSPVLMWDEFEALKNIEKVHPTWSTAHIDITFQKSEGLLGYTNAIERITQEASDAIEQGKKILMISDRKIDAEHVPISSLIAVGAIHHHLIRNKQRSQVALILETGEAREVHQFCVLLGYGCDGIFPYLAMETLVRMNNEGLVRNVNDDYSDITDEQLLHNYKEAIDGGILKVMSKMGISTLASYKGAQIFEALGIDNSVIDLCFAGTASRIKGVTFEYIAQDAFSLHERGYPSRFTIKRSVNLPEAGEYHWRDGGYKHVNEPSAIAALQDSVRNKNEDAWSMYVQKEMEAIRDCTLRGLLDLDYESSTAIPLEQVEPWTEIARRFATGAMSYGSISMEAHSTLAIAMNRLGAKSNCGEGGEDPERSIVHPNGDTMRSAIKQVASARFGVTSHYLSDADEIQIKIAQGAKPGEGGELPGHKVSKEIAKTRHSTPYVGLISPPPHHDIYSIEDLKQLIYDLKCANPRAGISVKLVSEVGVGIVASGVAKAKADHILVSGHDGGTGAARWTSVKYAGLPWELGLAETHQTLVLNDLRRNVVVQTDGQLRTGFDIAVAILLGAESFTLATIPLIAMGCVMLRKCHLNACAVGIATQDPVLRAKFQGQPEHVINFFYYLIQDLRKIMAKLGFRTVTEMVGHSEKLRKRDDVSTKALNIDLSPILTPGHVIRPGVPTSFTKKQDHKLHVRLDNKLIDEAEVTLDKGLPVTIDASIINTDRALGSTLSYRVSKRFGEHGLPQDTIVVKINGSAGQSFGAFLASGITFILDGDANDYVGKGLSGGRIIIKPPQNSKFESDENVIIGNTCFYGATSGYAFIAGSVGERFAVRNSGATLVVERIKGNNAFEYMTGGRAVVLSQMESLNAFSGATGGIAYCLTSDYDDLVGKINLDTIELQSLSDPVEIAFVKNLIQEHYNYTKSELAARILHNFNHYLKNFVKVIPLDYKKVLENEAAEKTKEKERSANEYLRTFSKKLNLSADATNGEVSKLLSKKNQAAARPISIKATLAEPKVVDLEDAVQNPDQEDNIKKLDRINGFIKYKLRHEEYRNVATRTKDWKELTSAITKKAAKFQTARCMDCGVPFCTSDTGCPISNVIPKFNELVFKNQWKLALDKLLETNNFPEFTGRVCPAPCQGACTLGISEDPVGIKSIERLIIDNAFKEGWIKPCPPEVRTGRTVAIIGSGPAGLSCADQLNRAGHSVTVYERADRCGGLLMYGIPNMKLDKSIVQRRLNLLAAEGIEFVTNTEIGKDITMSELKSKFDSVVYAVGSTIPRDLRIPGRELKNIDFAMTLLKNNTQALLEKDLGTIRKHIEGKKVIVIGGGDTGNDCLGTSVRHGAASVLNFELLPQPPKERAKDNPWPQWPRVMRVDYGHAEVKEHYGRDPREFCILSKEFVGNENGEVTAIKTVRVEWKKSQSGVWQMVEVPGSEETYEADVVLLSMGFVGPELIEDPAVTKTRRGTIGTVSDMSYSVDGGKLFAAGDCRRGQSLIVWAIQEGRKCATAIDNYLMGSTNLPGNGGIVKRDYKLLEELASAF

SEQ ID NO: 4503 - DNA, 1383 bp, Wolinella succinogenes
  CDS (1)..(1383)
atgcaaaattttttacaagttgaacgaagcaaccctaaaaagcgccaagccctagagcgagtcaaagactatagcgagatttaccagccctactcaagcgatgaggcgacccctcaggcgagtcgatgcgtgcagtgcggtgacccctattgtcacaataaatgcccactccacaacttcatccctcagtggctcaaaaaggtctccgaaaaggattttcgcctcgcctttgagctctctcatgccacttcgcccttccctgaaatcatggggcgtgtctgtcctcaagatcgcctctgcgagggggattgcactcttaatgatggctatggggcaatcactattggcgcgattgaaactttcatcagtgaaaaggggatggagcttggctacaagccaaagtttgccactaaaagcgttggtaaaagcgtggctatcgtgggttcaggcccagcaggactctcagcagcaaccttcttgcttcgagaaggtttcaaagtggagctctttgagcgccaagatcgtgcgggtgggctcctcacctatggaatcccaggcttcaaactcgaaaaaagcgtcatagagagacgacttgatcagctcacccaagcaggactaaaactccatcttggtaaagagattggcaaggagatgtcttttgagaagcttcttaaaggctttgatgctatcttcttggggattggcgcaaccgcccctaaaaaggcaaggatttccggagaagaggcggagggctgttatagcgctattgattttctcacggcgattcaaaagcgaaactttggagttgaatcctccatccttttgcccgaactcaagggcaaaagcgtggtcgtggttggcggaggggacacagcgatggattgtgtgcgaaccgccattagagagggagccgaggaggtgaagattctctatcgccgcgatgaaaataatatgcccggaagccacaaagagtatgtgaacgccaaagaggagggggtagaatttgaattttttgccgcccccaagcaggtgattctccgcgagggcaaagctactggaatcgaatcgtaccgaaccgaactttgcgatatggacgagaagggacgacaaaagtgtgtggtcgtggagggaagcgagtttgtcgtggaagcggatgtgattatcttctctctaggctttgatcctgctagaccctcttttttagagcagcaccaaatcgcactgcacccttggggaggaatcatcgtggataattcttatgagacttcccttcccaatgtctttgcaggaggggattgctatcgaggcgctgatcttgtagtcaatgctgcgcttgatggtcgagaggccgccaaagcaatcatcaaaaagcttctaggctaa

SEQ ID NO: 4504 - protein, 460 aa, Wolinella succinogenes
MQNFLQVERSNPKKRQALERVKDYSEIYQPYSSDEATPQASRCVQCGDPYCHNKCPLHNFIPQWLKKVSEKDFRLAFELSHATSPFPEIMGRVCPQDRLCEGDCTLNDGYGAITIGAIETFISEKGMELGYKPKFATKSVGKSVAIVGSGPAGLSAATFLLREGFKVELFERQDRAGGLLTYGIPGFKLEKSVIERRLDQLTQAGLKLHLGKEIGKEMSFEKLLKGFDAIFLGIGATAPKKARISGEEAEGCYSAIDFLTAIQKRNFGVESSILLPELKGKSVVVVGGGDTAMDCVRTAIREGAEEVKILYRRDENNMPGSHKEYVNAKEEGVEFEFFAAPKQVILREGKATGIESYRTELCDMDEKGRQKCVVVEGSEFVVEADVIIFSLGFDPARPSFLEQHQIALHPWGGIIVDNSYETSLPNVFAGGDCYRGADLVVNAALDGREAAKAIIKKLLG

SEQ ID NO: 4505 - DNA, 1950 bp, Wolinella succinogenes
  CDS (1)..(1950)
atgagccaagcgcacttctcctcgtggcggggtcaccaagagtttctcgcccctcatctcattgaagggcgcgccgttcgcgcctttattggatgggcgggggtgatgatctatgatccgaccttggatgtgattgcgctagccaaagagtatgcaagacagtatcaatgctttgcagagacttgcgggagatgcgctccaggcaagtttggcgggaagattctctttgatctgttggagaagattgaccaaggaagaggcgaagagagtgatttggagcgtcttgtagaggtgggaaaactgatgatgacaacgagcaaatgcgaagtgggcaagacgacccccttgcctattttggatttgctggaagcctatcgacccctttttgtggaggcgctagggaatcgctccagaaaagagaggagcaaaaaggagcgctatatcgctaagatcaccgctccatgcatagatgcctgccccgctcatgtcgatattcctgcctatattgagggagtgcgagatcatcttttgggcgattctctggctgccacgcgaaagagtatgccgctagctcaagtgtgcgggcgtgtctgtcctcatccttgtgagagtgcttgtcggcgaggcgatttggatgagcctatctccattatggagctcaagcgcttgggggcggattatgagaaggagcgtcatggcggatttatccacccctatcctccaaaacctaggcgcaaagacaagagggtggcgatcattggggcgggacccgcgggactctctagcgcttactatctggcgctagagggaatcatgagcgatgtttttgaggcgcttcctgtgcttggcggcgaggtgagcgtgggagtgcctgagtatcggatgcccatagatcgatactaccatgatattgaggcgatcaaaagcctaggcgtgagcttttggacgaatcacttcgtgagcgccaaagagttggatgagatgcgccaaaagtatgacgccattattttggccacaggggcgagaatctccaaaaagcttggagtcaaaggcgaagaggagtcgctagggggatatgctcccgcgattccttggctggatcagatcaatcttgccaccaagttcaatcttgccgctctgcctgatttgagaggaaagagcgtggtgtgtgtggggggcggattcacctcgatggatgtagtgcgatgtgccgtgcgattgggggcaaagcggatcgtgatgctctatcgccgcgatgaggcgacactcatccaaaacacctccaaagaggagtatcacgaggcgcttgaagagggggtggagttcctctttcagtgcgctgtgcaggagattaagagctgcgggggagagatcaaagccctcttggtcgaggagtatgaggtggtctatgaggagggcgcgcgcaaaccctcactgagacgaatcgagcgagagcctctctttttagagtgcgatcttcttatccctgcggtctctcaagaggtggacaggagctttatccctaaagagtggaatttggagagtacctcatgggggagtttcaagaccaatggcaaggatttttctacaactctgcgtggggtttttgctgcgggggattgcgaaaaagggcctttgaccatcgtcaatgccgtagggcaggggaagagagcggcgagcgtggtgagtcgattcttggaggatggagagatcactttgactcctgaggaggagatggaagattggcttaaaaaagagggggtttatgaccgatccatgcctgtggtgggctggctggcgggattggtgcgccaagaatcgcacaaagaggagcctttgaagcgcagagaggattttagagaggtgaatcaggggctctccatgcaggaggcttttgccgaatcggaacgatgtatgcgatgctactatatctcgatggtagcgctttaa

SEQ ID NO: 4506 - protein, 649 aa, Wolinella succinogenes
MSQAHFSSWRGHQEFLAPHLIEGRAVRAFIGWAGVMIYDPTLDVIALAKEYARQYQCFAETCGRCAPGKFGGKILFDLLEKIDQGRGEESDLERLVEVGKLMMTTSKCEVGKTTPLPILDLLEAYRPLFVEALGNRSRKERSKKERYIAKITAPCIDACPAHVDIPAYIEGVRDHLLGDSLAATRKSMPLAQVCGRVCPHPCESACRRGDLDEPISIMELKRLGADYEKERHGGFIHPYPPKPRRKDKRVAIIGAGPAGLSSAYYLALEGIMSDVFEALPVLGGEVSVGVPEYRMPIDRYYHDIEAIKSLGVSFWTNHFVSAKELDEMRQKYDAIILATGARISKKLGVKGEEESLGGYAPAIPWLDQINLATKFNLAALPDLRGKSVVCVGGGFTSMDVVRCAVRLGAKRIVMLYRRDEATLIQNTSKEEYHEALEEGVEFLFQCAVQEIKSCGGEIKALLVEEYEVVYEEGARKPSLRRIEREPLFLECDLLIPAVSQEVDRSFIPKEWNLESTSWGSFKTNGKDFSTTLRGVFAAGDCEKGPLTIVNAVGQGKRAASVVSRFLEDGEITLTPEEEMEDWLKKEGVYDRSMPVVGWLAGLVRQESHKEEPLKRREDFREVNQGLSMQEAFAESERCMRCYYISMVAL

SEQ ID NO: 4507 - DNA, 4200 bp, Vibrio vulnificus
  CDS (1)..(4200)
atgatccaaattgtcatagacggtaaataccgtatcgttgaggcggggcaaaccgttctgcaagccgccaaagtgtgtggggttgagattccgtctctgtgtggcatgaatcgttctggtgagaagattccatgcgatttgtgtgttgttgaggtcgaaagtggcggcacccgccgtgcttgtgagcttgaagtctacaacggcctaacggtaaacacgcaatccgaagcgctgtctgcgcatcgtaaacaggcgctcaaccgcatcatgagtgaccactacgccgactgcgaagcgccgtgcaaaacggcgtgccctgcgggcgtggacattcaatcctatctttaccatattgcgcaaaacgaccatcaaaaagcgattgaagtgatcaaacgtacgctgccgatgcctttgtcaattggccgcgtttgtcctgcgttttgcgaatccgaatgtcgccgctcgctggtggatgatgcgattgctatccgccaactgaaacgccacgctgcggacgctgatcttgctgcgcaagaagcctacacacccgagaaaaaagccgacaaaaacaaacgtattgcgattgtcggcagtggccctggtggtttaactgcgggctattacctcaccaatgaaggttatcaggtggatgtgtttgaagcgatgccacaagcgggtggttggctgcgttatggcattcccgagtatcgtctaccgaagagcattctcgataaagagatcgcgttgatgtgtcgcaacggtatggcgattcatactgataaaaaactgggtcgagacatcagtttgtcgcagttaagccaagactatgatgcggtgtgtttggctgtgggtgcctcaaaagcggtggcgatggattacccgggtagcgatcttgatggttgttatttaggggtggattatctgaaagatttcgtcactgagcagcgtttcaccacaggcaaaaaagtggcggtgatcggtgggggtaacacggcgatcgactgcgcgcggacggcggtgagaacgggggcggataccacgttgatctatcgtcgtactcgcgatgaaatgcccgcggaagattacgaaatcgaagaagcagaacatgaaggcgtcaagtttcacttcctgaccaatcctgcgcagaacatcgccgacgaacatgggcgagtgtgctcggtgaagctggaaaaaatggcgctgggtgcgcccgatgcctctggccgccgtcgacctgaagcgacgggggagtatttcaccgaagcctttgataccgtgattgctgcggtttctcagcaagccgatttgagctttatgcaaggggaagcgttaacgctacctctgactcgttggaataccgctgatgcaaatccagaaaccatgcacagtggcaccggcaatatcttcagtatcggtgattttcgccgtggcccagccaccgcggttgaagcggtcgcggatgggcgcattgctgcgcaggccattgaccgtttcttcgatggtgacatggaaaatattccccttaagcccttcaattctcgtaaagagcagaagttgaaacaggtcgacccgcttcatttttctcacctgcaaaaagtggcgcgcaccatcatgcctgagctgacctctcagcagcgcgagcaaagctttgaagaagtcgagttaggctttgataacgccgaagcgatggcggaagcggcgcgctgtttagaatgtggttgccaagtcaacacgtcgtgtgacctgcgcgattacgccactgagtatggcgcggaacagcacttccactattcggtgaacatcaaaagccatgatgagtggcaagcattgcgtcaaaacgacccacgtcataaatacccgatcgaccacagttctgagtttattgtctttgatgctaaccgctgcatcagttgcggccagtgcattcaagcttgccgtgaacagtcagtgcaaggtgtattgagtttcatgaaccttgaaaaaggccgcccggtggtgcgtccggattgccgtccgaactttggtggtcagggggtgaggatgggcgactcacgctgcgtgcaatgtggcgcctgtgtgcaagcgtgccctgttggggcgatgaccgatgcgcgcgatcgctcgcaaggccgcgaaacgcctttgaagaaagtggataccatttgtacctactgcggggtcggttgtaagttgaccatgcatgttgacgaagcggccaaccgaattcgctatgtagaaggggcacactcgccggtcaacgaaggcatgttgtgtgtcaaagggcgctatgggttcgattttgtcgccagtgaagagcggcttactacaccgttgatccgtaaagatggttggttgcagccggccagctggcaagaagcgatccgcttagttgcggataagttcagcaccatcaagcaagatttcggtggccgtgcattggcggggttctcatcggcgaaaaccaccaatgaagataactacgcattccagaagttcatgcgtcgtgagctcggcaccaacaacgtcgatcactgtgcaaggctttgccacgcatcgaccgtcacggggttggaagcgtcgctgggcagtggcgcgatgaccaacgacattccaagcatcaagcactcagatgtcatcttcatcattggttcggatacctctgcggcgcatccggtgattgcgtctcacatcaaacaagcggttcgacatcatggcgcgcgtttgattgtagcggatcccaaacgcattggcatggcggatcacgctgagctctatttggcgcatcgccccggcacggatgtgatgttgattaatggcgtgatgcagcaaatcatcaagaatggctggtatgacatggagtacatcgaagaacgtgtcgatggctttgataccatgctgcaagaggtgatgtcgccggcctatgcgctcgacaaagtcgaattggtgacgggcgtaaaagccgatgacatttttgccatggctcggatgatcggtaccgcgaagcgcaccgccgtctactactcaatgggcatcacccagcacaccacggggcatgacaacgttcgctctatcgccaacttgcaactgctgtgtggcaacattggtatcgagggtgggggcatcaacccattgcgcgggcagtcgaacgtgcagggcgcgtgcgatatgggcgcgttgcctaataactacccgggctatcaaaaagtgtataacccattggtgcgcgagaaatttgtcattgaatgggatgcgcccaatctctctgcagagccgggattgaccctaaccgaaatcatcgatggggcgtgtcgccgtgatgtacgagcgctttatgtgatgggcgaaaaccccgtattgagcgatcccaatcaggcgcatgtgattgagggattggaggcgctggatttcttggtggtgcaagacatcttcctcacggaaaccgcacaatacgccgatgtggtgttgccttcttgctcgtttgctgaaaaatcgggtcactttaccaatacggagcgccgtgttcagcgtatttatcctgcggtaaaccctcccggtgaagcaaaagaagattggcgaatcatccaagagatcgccaatgcgatgggcagcgattggcactatcgttctgtggtggacatcaccaacgaaatcacccgcgtgacgccacaatacgcagggctgaaatgggacaacatcacccgcgaaggcgtgcagtggccgagcaacaaaaacaaccctgcaggcacgcgaatcatgcaccaaacgcagtttacccgtggcaaaggccagatggaggcgataccgttccgttacgccgcagaactgcctgatgaagagtacccactggtgctcaccacggggcgtgttcttgagcagttccacaccggtaccatgacgcgcaaaacgcagggtttgaacaatcttgcggggccacgagcgatgatcagcgtgcaagatgccgaggcgctcggcattggcaatggcgacatgctgaaagtctcaacccgtcgcggtgaaattgaaatcgcggcgtttgtcactaagcgtatgcaagcgggcgtggtgttcattccgttccactttgttgagtcgccagtgaatcgactcaccaccacggcgaccgatcctcatgcgaagatccctgagttcaaagtggcggcggtacgcgtggagaaactgcacactgcgctggtggagtaa

SEQ ID NO: 4508 - protein, 1399 aa, Vibrio vulnificus
MIQIVIDGKYRIVEAGQTVLQAAKVCGVEIPSLCGMNRSGEKIPCDLCVVEVESGGTRRACELEVYNGLTVNTQSEALSAHRKQALNRIMSDHYADCEAPCKTACPAGVDIQSYLYHIAQNDHQKAIEVIKRTLPMPLSIGRVCPAFCESECRRSLVDDAIAIRQLKRHAADADLAAQEAYTPEKKADKNKRIAIVGSGPGGLTAGYYLTNEGYQVDVFEAMPQAGGWLRYGIPEYRLPKSILDKEIALMCRNGMAIHTDKKLGRDISLSQLSQDYDAVCLAVGASKAVAMDYPGSDLDGCYLGVDYLKDFVTEQRFTTGKKVAVIGGGNTAIDCARTAVRTGADTTLIYRRTRDEMPAEDYEIEEAEHEGVKFHFLTNPAQNIADEHGRVCSVKLEKMALGAPDASGRRRPEATGEYFTEAFDTVIAAVSQQADLSFMQGEALTLPLTRWNTADANPETMHSGTGNIFSIGDFRRGPATAVEAVADGRIAAQAIDRFFDGDMENIPLKPFNSRKEQKLKQVDPLHFSHLQKVARTIMPELTSQQREQSFEEVELGFDNAEAMAEAARCLECGCQVNTSCDLRDYATEYGAEQHFHYSVNIKSHDEWQALRQNDPRHKYPIDHSSEFIVFDANRCISCGQCIQACREQSVQGVLSFMNLEKGRPVVRPDCRPNFGGQGVRMGDSRCVQCGACVQACPVGAMTDARDRSQGRETPLKKVDTICTYCGVGCKLTMHVDEAANRIRYVEGAHSPVNEGMLCVKGRYGFDFVASEERLTTPLIRKDGWLQPASWQEAIRLVADKFSTIKQDFGGRALAGFSSAKTTNEDNYAFQKFMRRELGTNNVDHCARLCHASTVTGLEASLGSGAMTNDIPSIKHSDVIFIIGSDTSAAHPVIASHIKQAVRHHGARLIVADPKRIGMADHAELYLAHRPGTDVMLINGVMQQIIKNGWYDMEYIEERVDGFDTMLQEVMSPAYALDKVELVTGVKADDIFAMARMIGTAKRTAVYYSMGITQHTTGHDNVRSIANLQLLCGNIGIEGGGINPLRGQSNVQGACDMGALPNNYPGYQKVYNPLVREKFVIEWDAPNLSAEPGLTLTEIIDGACRRDVRALYVMGENPVLSDPNQAHVIEGLEALDFLVVQDIFLTETAQYADVVLPSCSFAEKSGHFTNTERRVQRIYPAVNPPGEAKEDWRIIQEIANAMGSDWHYRSVVDITNEITRVTPQYAGLKWDNITREGVQWPSNKNNPAGTRIMHQTQFTRGKGQMEAIPFRYAAELPDEEYPLVLTTGRVLEQFHTGTMTRKTQGLNNLAGPRAMISVQDAEALGIGNGDMLKVSTRRGEIEIAAFVTKRMQAGVVFIPFHFVESPVNRLTTTATDPHAKIPEFKVAAVRVEKLHTALVE

SEQ ID NO: 4509 - DNA, 1470 bp, Vibrio vulnificus
  CDS (1)..(1470)
atgggtaagccgactggatttttagagtttggacgcgagcttccaaagaagcttgcaccagcagagcgaatcaaaaacaacaaagagttcgtactcaacgcggaatttggtaagaaaatcaatactcaagcgtctcgttgtatggactgtggtgtgccgttttgtcacaacggctgcccaattggtaacatcattccggaatttaacgatgcggtttatcgcgacagttgggaagaagcgtggaacattctaagttcaaccaacaacttcccagagttcaccggacgagtttgccctgcgccatgtgaaagtgcttgtgtattgggcatcaaccaagacccaatcaccatctgtaacattgagaaaaccattgtggagacggcgtatcgtgaagggtacgccaaacccaaaactccgcgttcgcgcacaggtaagaaagtggcgatcatcggttccggtccggcaggcttagcggcagctgagcagctcaatagtgcaggccattcggtgacggttttcgagcgcgatgagaaagtgggtggtctactgcgtttcggtatcccagatttcaaactgggcatggacatcattgaccgcaagatcaatctcatggcagaagcaggggttgagtttaaggtgaatcaacatgttggtgtggatgtgaacgcacagcaaattcgccaagaatacgatgttgtgctgcttactggcggctcgaccgtaccacgcgatcttcctgtccctggccgcgagctgaaaggcgtttactttgcgatgcagttcctcgcacaaaacaaccgccgagcaaatgagatggaccttaaaggtgaagaaattcacgcagcaggaaaacatgttgtcgtgatcggtggtggtgatactggttcagactgtgtgggtacttctaaccgtcatggtgctgcaagtgtaactcaagtagaaatcatgcctgtgccaccagaaaagcgcccggccaatatgccttggccgcaatacccaatgattcttcgcacctcaacttcgcatgaagaaggggttgatcgccattggaatattctgaccaaagagttcatcggcaacgacaaaggtgaagtcacaggtctacgtcttgcagatattgtttggcaagatgcacaaccaggcgaacgcccaagcttcaaagaagtcgaaggtagcgagcgcgtgattccatgtgatatggctttcttggcgatgggtttccttcacccagaaccgcatggtgtacttgcgcagttgaatgtcgcgctggatgagcgcggtaacgtggcaactcaagatttccagaccaatcaacaaggcgtatttgccgcaggtgatatgcgtactggtcaatctttggtggtgcgctgtatcaacgaaggtcgtgaatgtgcacgtgctatcgaccaatacctaatgggcaataccaatctggaagcaaaagccgattcactcatgctttctgcttaa

SEQ ID NO: 4510 - protein, 489 aa, Vibrio vulnificus
MGKPTGFLEFGRELPKKLAPAERIKNNKEFVLNAEFGKKINTQASRCMDCGVPFCHNGCPIGNIIPEFNDAVYRDSWEEAWNILSSTNNFPEFTGRVCPAPCESACVLGINQDPITICNIEKTIVETAYREGYAKPKTPRSRTGKKVAIIGSGPAGLAAAEQLNSAGHSVTVFERDEKVGGLLRFGIPDFKLGMDIIDRKINLMAEAGVEFKVNQHVGVDVNAQQIRQEYDVVLLTGGSTVPRDLPVPGRELKGVYFAMQFLAQNNRRANEMDLKGEEIHAAGKHVVVIGGGDTGSDCVGTSNRHGAASVTQVEIMPVPPEKRPANMPWPQYPMILRTSTSHEEGVDRHWNILTKEFIGNDKGEVTGLRLADIVWQDAQPGERPSFKEVEGSERVIPCDMAFLAMGFLHPEPHGVLAQLNVALDERGNVATQDFQTNQQGVFAAGDMRTGQSLVVRCINEGRECARAIDQYLMGNTNLEAKADSLMLSA

SEQ ID NO: 4511 - DNA, 1389 bp, Porphyromonas gingivalis
  CDS (1)..(1389)
atgtcgcgtccacgggctgaaatgcccgaactcgaccccctctatcgtagctccaagatcaatgaagaggtgaatcgcggtttgtcccgtgaggccgctatggccgaagcctctcgttgtctcgattgtccgcaaccgagctgtatggaaggatgtcctgtgagtatcaatatcccgacctttatcaagcagatagaagtaggcgatatactggctgcagcatctactttgcgagagacaagctctttgccggcggtgtgcggacgtgtctgtccgcaagagaagcaatgcgaaagccggtgcatctatacgaaaatgaacaaaccggctgttgccatcggtttcttggaacgctttgccgcagactacgaacgcgaacagggcgcactcaaagttcccgaaatggctcctcgcaacggtatcaaagtggctgtgatcggaagcggtccggccggactttctttctccggagacatggccaagttgggctatgacgtgaccgtattcgaagccctgcacgaaatcggaggagtgctcaagtacggaattccggaatttcgtcttccgaatagtatagtcgattcggagatcaatcttctcgaagagatgggcgtacgctttgagacgaatacgattgtcggccgaacgatcgcatacgatgacctgcatgaagcaggatttcgcggtgtattcgtaggaagtggtgccggtctgcccaatttcatgaatatcccgggtgaaaaccttgtaggagtcatgtcttcgaatgaatacctgacgcgcgtcaatctgatgcatgcgagccaagccgacagcgacacacccgttttcaagggcaagaatgtagctgtcatcgggggcggcaatacggccatggactccgttcgtacggccaaacgcctcggagcagaacgtgccatgatcgtctatcgacgcagcgaagaggaaatgccggcaagattggaagaggtgaagcacgccaaggaggaaggaatagagttcctgacactgcacaatcctatcgaatatatcggcaatgaacgaggccgagtgactgcgatgcgcctgcaaaagatggagcttggcgagccggatgcaggtggtcgtcgtcgtcctgttgcgatcacgggggctatcgaggagatcccggtggacgaagtgattgtaagtatcggtgtatcgcccaatccgctcgttccccgaactatttccggtcttgaagtgacaagcaaaggaaccatcgtcgtcaatgagagcaatcagacagctctccccgatgtttttgccggtggtgacatcgttcgtggcggagccactgtgatattggcgatgggcgatggacggaaagcagcagctgccatgcacgaatatctgaaagcggaatcatag

SEQ ID NO: 4512 - protein, 462 aa, Porphyromonas gingivalis
MSRPRAEMPELDPLYRSSKINEEVNRGLSREAAMAEASRCLDCPQPSCMEGCPVSINIPTFIKQIEVGDILAAASTLRETSSLPAVCGRVCPQEKQCESRCIYTKMNKPAVAIGFLERFAADYEREQGALKVPEMAPRNGIKVAVIGSGPAGLSFSGDMAKLGYDVTVFEALHEIGGVLKYGIPEFRLPNSIVDSEINLLEEMGVRFETNTIVGRTIAYDDLHEAGFRGVFVGSGAGLPNFMNIPGENLVGVMSSNEYLTRVNLMHASQADSDTPVFKGKNVAVIGGGNTAMDSVRTAKRLGAERAMIVYRRSEEEMPARLEEVKHAKEEGIEFLTLHNPIEYIGNERGRVTAMRLQKMELGEPDAGGRRRPVAITGAIEEIPVDEVIVSIGVSPNPLVPRTISGLEVTSKGTIVVNESNQTALPDVFAGGDIVRGGATVILAMGDGRKAAAAMHEYLKAES

SEQ ID NO: 4513 - DNA, 1419 bp, Photorhabdus luminescens
  CDS (1)..(1419)
atgagccagaatgtatatcagtttatcgacttacaacgcgtcgatccgcctaaaaagccgctgaaaatccgcaaaatagaatttgtggaaatctatgagccattttcaacaagtcaggcacagacacaggccgatcgctgtctttcttgcggtaacccttattgcgaatggaaatgtcccgttcataactacattcccaattggcttaaactggctaatgaaggacgtattatggaagcggcggatttatcccatcaaacaaacagcctgccggaagtttgtggtcgtgtttgtccacaggatcgcctttgtgaaggcgcttgcactctgaatgatgagttcggtgcagtaactattggtaatattgaacgctacatcaatgataaagcgattgctatgggctggaagcccgatatgtcacacgttcagcccacgggcaaacaggttgcgattattggtgcaggccccgcggggctagcttgtgctgacgtattgacccgtaatggcgtacaagccgttgtttttgatcgtcacccggaaatcggtggattactcacctttggcatacccgcgttcaaactggaaaaagaggtcatgatacgccgccgtgaaattttctctgagatgggaattgaattccggctcaatactgaaataggcaaagatattgccttatctgaactgactgagcagtttgatgcgatatttcttggcgtaggaacctatcagtcaatacgtgggggactggcaaatgaagatgctgatggtgtttatgatgctctaccatttctgactgccaatacccggcatttgatgggttatcccgccctaccatcgcaacctttcatcaatatgcaaggcaagcgggtcgtagtgcttggtggcggtgatactgcaatggattgtgtcagaacggctattcgtcaaaaagcggcttcggttacttgtgcttatcgtcgtgacgaaaccaacatgccaggctcccagcgtgaagtcaaaaattccaaggaagaaggtgtagaatttctgtttaatctgcaaccagtcaggattgaaatcaaccattcaggtcaagtttgtggcataaacatggtacggactcaattaggccaacctgatgagaatggacgccgccaagctgaaattatcgcaggctcggaacacctgcttaaggccgatgcagtgatcatggcattcggctttaaaccacataccatgaactggctaagtgctcatcaagtaaccttggataaacaaggacgcattgtcgcaccagagtactcagacattccctttcaaactagcaatccgcagatatttgctggtggagatgctgttcgtggctcagatctcgttgtaaccgcaattgccgaggggcgcaaagccgcacaaggcattcttgattatctcaacatctag

SEQ ID NO: 4514 - protein, 472 aa, Photorhabdus luminescens
MSQNVYQFIDLQRVDPPKKPLKIRKIEFVEIYEPFSTSQAQTQADRCLSCGNPYCEWKCPVHNYIPNWLKLANEGRIMEAADLSHQTNSLPEVCGRVCPQDRLCEGACTLNDEFGAVTIGNIERYINDKAIAMGWKPDMSHVQPTGKQVAIIGAGPAGLACADVLTRNGVQAVVFDRHPEIGGLLTFGIPAFKLEKEVMIRRREIFSEMGIEFRLNTEIGKDIALSELTEQFDAIFLGVGTYQSIRGGLANEDADGVYDALPFLTANTRHLMGYPALPSQPFINMQGKRVVVLGGGDTAMDCVRTAIRQKAASVTCAYRRDETNMPGSQREVKNSKEEGVEFLFNLQPVRIEINHSGQVCGINMVRTQLGQPDENGRRQAEIIAGSEHLLKADAVIMAFGFKPHTMNWLSAHQVTLDKQGRIVAPEYSDIPFQTSNPQIFAGGDAVRGSDLVVTAIAEGRKAAQGILDYLNI

SEQ ID NO: 4515 - DNA, 1431 bp, Chromobacterium violaceum
  CDS (1)..(1431)
atgggagagaacaagatgtccgatgtattccagttcatgaagctgtcgcgcaacccaggcgaaaaggtcgaagcgtcggtgcgcaaggtcgagttcaaggaaatctaccagccgctgcacgcggtggatgccgccgaccaggccggccgctgcctgtcctgcggcaatccgtattgcgagtgggagtgcccggtgcacaactacattcccaactggctgaagctggtggaggaggggcgcctgttcgaggcggcggagttatcgcatcagaccaacagcctgcccgagatctgcggccgggtctgcccgcaagaccggctgtgtgagggggcctgtaccttgaatcaggggggcttcggcgcagtatccatcggcagcatagagaagtacattaccgacgaggcattcaaggcgggttggcgtcccgacatgtccaaggtggtttggacggataagactgtggggatcatcggcgctggtcccgcgggcctggcctgtgccgacgtgttggtgcgcaatggggtcaaggctgtggtgtatgaccgctatgaggagatcggcgggttgttgacctttggtattccggagttcaagttggaaaaaagcattgtccaccgccgcagagagatactggaaggaatgggggtggagtttgtgctgaatactgaggtcggcaaggacatcagctttgacaagcttatgattaagcacgatgccgtgtttatgggtatgggcgcgtacaaggccatgcgggggggctttcctggagaagacagcaagggtgtgctgcaggctttgccctatctgattaataatgtgcgccagtctatgggaaccttgcctgtagacgaagcagccatctcgatgaagggcaagcgagtattggtgctgggtggcggggacactgcgatggactgcaaccgcactgcgatccgacaaggcgcgaaacgtgtgatctgcgcttaccgtcgcgacgaggccaatatgcccggttccagacgagaagtcagcaacgcgcgcgaagaaggggtggagtttttgtggaaccggcagcctttggcgattgagccgatgataggcggcaccctggctgtgaagctgggcgagactcggctgagcgaggctggagccaaggggcgaagcgctgttgaacttgtgccgggggggggggaggtcttagaatgcgaccacgttatcatagcgttcgggtttcaagccgaagcggctgcttggtttgacgcctgcggggtacgaactgaaaatgggtccggtagaaccaaagtctcccgaggaggcaagtacccttaccagactagcaatcccaaagtatttgccggaggggatcaagttcgaggcgcggatcttgttgtgcgcgcagtgttcgaggggcgtcaggctgcggagtcgttgtgcgcgtatttgtttgactag

SEQ ID NO: 4516 - protein, 476 aa, Chromobacterium violaceum
MGENKMSDVFQFMKLSRNPGEKVEASVRKVEFKEIYQPLHAVDAADQAGRCLSCGNPYCEWECPVHNYIPNWLKLVEEGRLFEAAELSHQTNSLPEICGRVCPQDRLCEGACTLNQGGFGAVSIGSIEKYITDEAFKAGWRPDMSKVVWTDKTVGIIGAGPAGLACADVLVRNGVKAVVYDRYEEIGGLLTFGIPEFKLEKSIVHRRREILEGMGVEFVLNTEVGKDISFDKLMIKHDAVFMGMGAYKAMRGGFPGEDSKGVLQALPYLINNVRQSMGTLPVDEAAISMKGKRVLVLGGGDTAMDCNRTAIRQGAKRVICAYRRDEANMPGSRREVSNAREEGVEFLWNRQPLAIEPMIGGTLAVKLGETRLSEAGAKGRSAVELVPGGGEVLECDHVIIAFGFQAEAAAWFDACGVRTENGSGRTKVSRGGKYPYQTSNPKVFAGGDQVRGADLVVRAVFEGRQAAESLCAYLFD

SEQ ID NO: 4517 - DNA, 1293 bp, Anopheles gambiae str
  CDS (1)..(1293)
atgcaggcggatcgctgcctcgactgcggcaacccttactgcgagtggaagtgcccggtccacaactacatccccaactggctgaagctggccaacgagggacgcattctggaggcggtggagctctcccaccagaccaacagcctgccggaggtgtgtggccgggtctgtccgcaagacagactgtgtgagggtgcctgcaccctcaacgatcgcttcggtgccgtcaccatcggcaacatcgaaaaatacatcaccgacaaggcgttcgagatgggctggaagcccgatctctccaaggtggtcaagaccggcaagcgggtcgccgtcatcggcgccggcccggcgggtctcgcctgtgccgatgtgctggcacggggcggagtcaccccggtggtgttcgacaagtatccggagatcggcggcctgctcaccttcggcatcccctccttcaagctggaaaaagaggtgatgcagcgtcgccgcgagatcttcgaggggatgggggtggagtttcgcctcgagaccgaagtgggtcgcgatgtcaccttcgccgacctgctcggtgagttcgatgcggtcttcctcggggttggcacctacaagtacatgaagggcggctttgccaacgaggaggcaccgggagtctacgacgccctgccctacctcatcgccaatgccaaccggctgctgggctttgagaaggcgcaaaccgactacatcgacttcgccggcaagcaggtagtggtgctcggcggcggtgataccgccatggactgcgtacgtaccgccatccgtcagggggccgacaaggtgatctgcgcctatcgccgcgacgaggagaacatgccgggctccaagcgggaggtgaagaatgcccgcgaagagggggttgaattcatgttcaacctgcagccggtcggcgtcgagctggacgcccagggccgcacctgcggcatcaaggtggtgagcacagagctcggcgcccccgatgccaatggccgccgcaacccggtggtgatcgccggctccgagcaggtgctggctgccgatgcggtggtgatggcgttcggcttccagcccaacccccagccctggatggcggaacacggcatcgagcttgacggccgggatcgcatcaaggcctcggagcaggccgaacatgccttccagaccagcaaccccaaggtgttcgccggtggcgacgcggtgcgcggctccgatctggtggtgaccgccatctatgaggggcgcaaggcggccgaagggatcatggactatctggccgtgtga

SEQ ID NO: 4518 - protein, 430 aa, Anopheles gambiae str
MQADRCLDCGNPYCEWKCPVHNYIPNWLKLANEGRILEAVELSHQTNSLPEVCGRVCPQDRLCEGACTLNDRFGAVTIGNIEKYITDKAFEMGWKPDLSKVVKTGKRVAVIGAGPAGLACADVLARGGVTPVVFDKYPEIGGLLTFGIPSFKLEKEVMQRRREIFEGMGVEFRLETEVGRDVTFADLLGEFDAVFLGVGTYKYMKGGFANEEAPGVYDALPYLIANANRLLGFEKAQTDYIDFAGKQVVVLGGGDTAMDCVRTAIRQGADKVICAYRRDEENMPGSKREVKNAREEGVEFMFNLQPVGVELDAQGRTCGIKVVSTELGAPDANGRRNPVVIAGSEQVLAADAVVMAFGFQPNPQPWMAEHGIELDGRDRIKASEQAEHAFQTSNPKVFAGGDAVRGSDLVVTAIYEGRKAAEGIMDYLAV

SEQ ID NO: 4519 - DNA, 2733 bp, Giardia lamblia ATCC 50803
  CDS (1)..(2733)
atgaagcagaatacaactgatgatatgagccatactgctacgccgatatgtattgaaaacgacggatacgttactccagcagataaaacaccgagctctgtaggcgtggctccgacagccccaagtgtcaagccgtttacaattgtaaaacgaactgttctctggaaagaccccgagacggttgagctgacatgctacgctcctgaagttgctgaggccagtaaggccgggcacttcgtcacagtcaaagcctatgctccctccgaaagacttccgatccctatcagcgactgtgatcccgttaagaagaccatcacgttcatttgttcatccataacgcatgcaacaagcaagatagtatcctttgctgaaggtcagagtctgtcatcaattactgggcccttaggtcatgcggctgatattacagcaaagatgggccacgtagcagtagttgcagaaggggctgggcttggtcctgttcagctatacgctaggtcaatccatcagctgcccggtaacagcgtatctgcttttatcggtgctccgtcaaaggaccagctcgttggagaaaacaagcttgcagaaacagtcgatgctctttcagtggtgattgctgatgaaatccctccagaaaagaaggaaaagggacttgtaggggtattcgaagattttcttcaagaaactctgaagactcctcagaagtatgtacctgtggaccttgtctacgtgatgggaccttatccattgcttcgtaagatttctgaactcactagggattacggcattcgcactatcggtcttctcagcaccgttacagtcgatgggtccatgcttctcgggactttccgggtagaattgtataacgagctcccgtatctcacgagcatttatgataaatatgctcttcgtaaggaacacgtcccttcccatattccatgcattaatttggatgagtttgtcagaagcaatattaatcccagcttttccaaaggtaagattagcactagctatgtctttgtcgacggtccagaagttgacgctcatcgtatttcttgggagaagtttagacttgggacaagtatttattcgtctacaacatcttcagctggtaatgcacacaagaagggtccatctgtacgttcagtaaagcctgctcccacacagacaccaatgcctatgcagcatcctaaagttcgctgtcataactgggccgaaatatctctaggctacactccagaaatggcactgatggaggcgtcacggtgcttgcagtgtaagaagcctatgtgtgtcaggggctgtccagtacaagttccaataccccagttcattaaaaagatcactgagcgggacttccttggagcatataaaatcataaagactgcacataattgtccgtctgttactggacgtgtctgccctcaagagaaccagtgccagtctgcagagggaaattacgggtgtatcctttgtcgtactggtaaagagcctgttggcattgggaagctagagcggtttgttgccgactacgtgcgcgaaaacaatttggaggatgaatcacttaaggatggtaaaaatatgcctgagatagttttgtccgggtataaagttgctataattggctctggcccgacaggtcttgcagccgcccgggagtgtgcacttgcgggtcattatgttacaatctttgaggcactagatcagcctggtggtgtattaaattacggaatccctaagttccggttgccaaagcaaatagttgctcacgaaataaatagtgttaagcgcttggggctcgtcgatataaagacaaagactgtcgtggggaaggacgtcactatcccacaactccaaagcgaggggtacactgccatattcatcggtacaggtgtaggaataccacgtagccttggcatccctggagaagaccttccaggtgtcttcacagcaaacgagtttttgaagaggtgtaacctagaagacaactgtgtatttccattcattagcagagctgacagtaacgagccacgcaaaaaggtcgtggtcattgggtgtggaaatgttgcaatggattgtgcttcgtctgcacgaaggctaggagctgatgttgtagtggtatatcgtcgtcgtctacaggattctcctgcgcgttttgaggagatcgagagtgccgaagcagaaggagtctactttgctaccttaaattcgcccttagaaataatccctaacgatagccgtaccggcataaagggactaaggtgccaggttaactccttcgaagcaggagctattgtgcccttggatggagaattttccttttttgcctgtagtatgattattgttgcggtaggatttgggcctaataacattatcgtgaagacgacagaaaatttgaagataaatgacaaaggtcttgtgattactgatgagaacttcgagacttctgtcccaggtgtcttttgcgcaggagatgttcagactggggctgcaaccgtcatcaaggcccttggcaatggaaaggttgcaggtcaaagcatgaacttttggattgcacagaatcatgcgacacttcctcgagacaatgatctcttcggaaaagtaattagccctggtatttgtccacccgcagaaaaagttgacaggcctccacaggatgctctttctgtgtcttcctctgcgacctcacttctcctcaacagcgatatagaggagactctgaccactcacatatag

SEQ ID NO: 4520 - protein, 910 aa, Giardia lamblia ATCC 50803
MKQNTTDDMSHTATPICIENDGYVTPADKTPSSVGVAPTAPSVKPFTIVKRTVLWKDPETVELTCYAPEVAEASKAGHFVTVKAYAPSERLPIPISDCDPVKKTITFICSSITHATSKIVSFAEGQSLSSITGPLGHAADITAKMGHVAVVAEGAGLGPVQLYARSIHQLPGNSVSAFIGAPSKDQLVGENKLAETVDALSVVIADEIPPEKKEKGLVGVFEDFLQETLKTPQKYVPVDLVYVMGPYPLLRKISELTRDYGIRTIGLLSTVTVDGSMLLGTFRVELYNELPYLTSIYDKYALRKEHVPSHIPCINLDEFVRSNINPSFSKGKISTSYVFVDGPEVDAHRISWEKFRLGTSIYSSTTSSAGNAHKKGPSVRSVKPAPTQTPMPMQHPKVRCHNWAEISLGYTPEMALMEASRCLQCKKPMCVRGCPVQVPIPQFIKKITERDFLGAYKIIKTAHNCPSVTGRVCPQENQCQSAEGNYGCILCRTGKEPVGIGKLERFVADYVRENNLEDESLKDGKNMPEIVLSGYKVAIIGSGPTGLAAARECALAGHYVTIFEALDQPGGVLNYGIPKFRLPKQIVAHEINSVKRLGLVDIKTKTVVGKDVTIPQLQSEGYTAIFIGTGVGIPRSLGIPGEDLPGVFTANEFLKRCNLEDNCVFPFISRADSNEPRKKVVVIGCGNVAMDCASSARRLGADVVVVYRRRLQDSPARFEEIESAEAEGVYFATLNSPLEIIPNDSRTGIKGLRCQVNSFEAGAIVPLDGEFSFFACSMIIVAVGFGPNNIIVKTTENLKINDKGLVITDENFETSVPGVFCAGDVQTGAATVIKALGNGKVAGQSMNFWIAQNHATLPRDNDLFGKVISPGICPPAEKVDRPPQDALSVSSSATSLLLNSDIEETLTTHI

SEQ ID NO: 4521 - DNA, 8874 bp, Plasmodium yoelii yoelii
  CDS (1)..(8874)
atgaaaaagaagaaatcggccaaacatggcttatacgatagccgttatgaaaaagatgcgtgcggggttggagttgtagcagatataaatggaaaatcttcaaggatggtaattcaaaaggctatgcaaatattattgcgactaagccacagaggaggtgtacaatcaaataatggagatggtgcaggaatattagttggcatgccgcatgaatattttcaaatgctaagtgatacatgccaattaccttttttattgccagaaaaaggggattatgcagttgctcaaatatttttaccacataatgaagaaagaagattatttttatatcatgaaatagaaagggaagtgtataaccatggtttggttgttttaggatggcgatcacctatacctgttagaagtgacgtcataagtgctacagtaaaaaaaagtgaaccttttattgctcaaatgtttgtatgcaaaagatcagtatttaaaaattatgacgattttaatatataccccttttcggatataaattttacagatgatacaaatttaaatttaaatgaattacctggtgatatagaattactttcattttttataagaaaaaaattagtaagacataatgatatgtatttttgcagcttttcttcaagaacaatagtatataaaggtttattaactccatcacaaatatacttatattttgaagatttgctaagtgagcaatttaccacttatttagctatggttcatgtaagattttcaacaaatacatcccctacatggtatgctgcccatccatttagacgaatttgccataatggtgaaataaatacaattagtgttaattcattattatttaaagagaggatgcaactagctaaagcacctgattttttcaaatccgtttctataaaagatttaaagccaattaatgaagaaaaatacattatttatgataatgacgatgaaataatacataaaagagacacatttgaagatattatgttgacaaaaaatcgattaaaaaaaaaatcgagacgaaatttattactaaaattaaaaagagattatacatataatagctccgcattaaactatcaaataaaaagagaatacatgaattcagatattaatagtaattctgaatttttaaataatatgaatgaacaatctaagagttcttcagatgacttattagatataaatgaaaaagatagccatatgaaaaatgctaagaaatttattacaggcaatactggtataagcaatccaaatgattttggaaaatccatgaaatcacaaataaaatacggtgaaagtaaaaaaaccaaaggagaattaagttttccgtctgattcttctttatttgacaatgcaatagattttctgactatgacagggagagaaatcgaacatgcagttatgatgctaatgccaagagcatatcaaaaagatccaaatataactcctttagaaaaagcattttatgaatatcatacatgtttaatggaaccatgggatggaccagctttagttatatttacagacggaaataaagtaggcgcttcattagatagaaatggtttaaggccagctcgatatagtataactaattatgggctatttgtattatctagtgaaaccggggttgttgacttaccctatgataaaattacacataaaggatgtgtatatccaggaaaagttgtgttagtagattttaaagaaaaaacatttcttagacatgaagatgttttaagtaaatttttaaaattaaataattataaaaaatggttagatcattattctatacatttagataatattataaaacctgcatctaatatggaaaatatacgtatgactgcatataaatatggagctattctgaacaaagataactattatcaccatactaatcatgtaaataataatagtactagtaaaataggacaaataaataatccagatcgtcatgatgattctttaataaaaaaattaaaagcttttggttatacttatgacgcatttaacataatcatatctcctatggttaagcatgcagctgatggattgggagcaatgggtaatgatactgctttcccatttcttagttatttacgtagaaacttagtatactattttcaacaaacatttgctcaagttactaatccagctattgatccaattagagaagaaaatataatgtctcttatgagtattttaggtaaagaaggagatatattacattgtacatatacaaattgtcaacggatatttatcaacgggccaatattaaatgagccattgtataatatgctacttcaattgcccgattttccacatataattattgacatgacgataagtttggatcttttggagcatttaatgtcaacagaaaacccaacttcacccacagctaatggcgaaaatgatgacgacaatttcatcaagtttgatgtagtaaaaagctattcatctccaaaaaaatcatttatccaagactatacaccaaaagccgaggattctgcaaaaaaatatgttaaggatgatcctactgcaaataatactggtgggaataagaagccacgtgtattttccaaatatctgataaaatttattgacagaattaatacaaaggttgaaagtgcaattagaagaggtagccaacttattatattatcacatggaaatgtcagcgaatcaagagttccgatattttctataataatcgttggtgcactacataaatatctattaagtaaaaatttaagaacgaaatgctctattattgttaaagccggtgattgttttgaaatacatcatttagctgttttactatcttttggagccgattgtatttatccatttatactttatgaaagtttacaatttataaaatatggtagcaatgaagctagattaagtaatcaacagcttattagtaattatagacatgcaactaattatggtatattaaaaataatgtcgaaaaatggaatatctacattacctagttataaaggttgtggtttaatgcagccattgggtatatctgatgaaattttaaaaaaatgttttattaatgtttgtgactcaataatagggggagtaactttcgaatttgttgaaaaagaaattttaagaatattcaatcacgcataccctaaaagaatattagcattaaatgttaaaaatgctaatgatgagttagatgattttggtgaatatcattttagaaacatagggaatgcacaaattcatatgaatcatcccgaaacaataaatttattacaaagagcaacaaaaactggaaattttgatacttataaaaaatattcagaattgcaaaatgagttaatcaatcattgtgaaataagaggccaattagaaattaattataaaaaatgtccatcttataataaaaaaaaaaaaaaaaatgagcctataaatattaatttagtagagcctattaataaaatattactacgattttgtacaggtgctatgtcttttggttcattatctgaagaagcacatacaactgttgccattgctatgaatagtattggattaaaatcgaatactggggaaggtggagaagctgaggatcgaataatacaacccaataataataataacaatgagcccaatacatcttcagctgttaaacaaatagcatcagccagatttggagttacagcttatagcttagtaaacgcccatgaattacaaataaaagttgcacaaggatcaaaaccaggggaaggaggagaattaccaggttataaagtaaatgcgaaaatcgcttcagttcgtagaagcacaccaggaattggtttgatttcacctccaccacatcatgatatgtattctattgaagatgttgggcaattggtttatgatctaaaaaatataaataaagaagcaaagatatctgttaaattagtttcaaaattaggtattggtgttataacatctggtgtagtaaaaggtaattgtgaacagattctaattagtggtatgtcaggaggtacaggtgcatctaaatggacatcaataaaacatgcaggtttaccttgggaaattggtttagcagaagcacatcaaactttatgcaaatctaaattaagaaaaagagttattttgcaaatagatggacaattaaaaacgggtagagatgttatattaggggcattattaggagcggaatcttttagtttttctactcagccattaattactttaggctgtattatgatgaggaaatgtcatttaaatatatgccctgtaggtatatgtacacaagatccagaattaagaaaaaaatttgcaggaaaaccagaatatgttattaatttttttttcatggtagcaaacgaagttagagaatatttagctagtatgggatttcgaaaattctcacatattattggtagatctgatttattaaaaaaaaaaagtcacttaaaatatgatgaaaaaagaaaacttttagatttttcaaaattattattccctggttggaaatattataccgaagagcaaaataaggaagatggtgataagggttacaccaatagtgaaaaaagaaaaaaaaaaaagaaggaaattgaaaaagaacgcgaaaaggaaaagaaaaaaaaaacgttaaatgcatattcaatgcataataatataattaacaaatataaagaccaacaaagtggtagtttaaccccttctgagaaaaatataagaaaacaggttcttataaatgaaaatttgaacactgatattaagtatgatccatcaaaggaggaacaacatggtgttaatacaataaaggaaagggtagggaaattatcatatgaaaaaattgaagaagatgaggatggagatgatgaagaagaagaggaaagagaagaagaagaaaaggataaaagcacaagtgaagaagatgaagatgaggaagaagaagacgaagaagaagaggaggatgatgaagaagaggaatatggtgaaacagatggagatgatgtaatagaaaaaaatttaagcctaacatacagagaagatatgttaaaaaatgtagataaattgaattttcaaaataaagcattacgaaaaaagtcaaaaagtatatctgaaaaaaaaagtcatgtaaaaaagaaaaaaaataaacctattccaatattttgttgtgaaacacaaaatcataaactgtgtgacattatagacagagaattaataagacgatctaaaattgcacttttaaattgtactcctgtaaatattaatatgccaataaaaaacacagatagagcagttggagcaatgttaagttatcacattattcagaaatatggtgaaaaaagtttaccaatggatactataaatgtaaaatttagaggaacaggaggattatcatttggtgtatttttaactagtggatgtaattttgaattagaaggagatgcaaatgattttgttggaaaaggtttatcaggtggaataatttcagtacattttcctaaatcttcattatttattaatgaatgccaaaaaaatatgatagtaggaaattcagtgttatatggcgcaacaaaaggtcgagccttttttgcaggtagagcgggtgaacgatttgccgttagaaattcaggagctattgctgtagttgaaggtgttggatgtcatggttgtgaatatatgacaaaaggtatagttgtcatattaggagaaattggatgtaactttgcggctggaatgagtggaggtattgcatacgtattagatataaatgaaaagaacgtaaaccatcaaatggttgatttaaaaatatgtaaaactatggatgaaaaaatgactttagaaaaattgttgcatgaacattatgatcgaacaaattcatatacagctaaaatgttattaaatgattttgataaaaatctagaaagattcacaaaagttattccaagagatataaaaagagtattaactgaagcatgcatagaatttgtaaaaacaggaaacgaagaagctgcatctatacttgatgattgggcatctttattaaaaagtgtagatcatcctgaaaatatgtacaaaaaagctatgcaattttttactacaatttctgatgatatatcaggtttatcaaaaacattagcattaaggaatgtagatggattaattatatatgatatattacaaggaagtaatcatagaaaattattaagaattaaaaatgtgggatctaatttggttaatgattccaattttaatacagaagaaaatatcagctttgaatccgaccaaaataaaatattcgattttgaaaagtttacatataatctagaattatgtagagctaataatagaaaatggaggagatacgtgcaaataccatttaaatgtactgctttttctgattttaaaaatatattcccaaatcgtcttgatgataagtctaaagaaattattaaaaagtacatactaaatgagcaatatttactagatgtacatcttaaatcacttaattcaaatcaatttattgaagggttgctaaatagagaagatgaaagagatgcttatattaaccaaaaacagattaatccaaatatttattcttttaaaaatatgttttatcccgctgattataatgatttattatgtataacagatgagaaaaaaagtgaacaatccatctctataaatcctgatactaacaagtcaaatacagaatccaacgaaaacattaataaaacagataaaggaactagcgaaaatactacaatagatacacaaattgttatacaagaaaaaatacctaaaaaaattaatataataaataatactgaaaatgaaacaggagaaaatattccacgaacatccattgataatataaatcaatcaaaaaatgataattcaattaaaccatttttagttgctaatccaaataaagttacagggtttatggaatatgaaagattatcacatccattaaaagatgtaagtagtagagtgttagattattctgaaattatagttccaataaatgtaaaaagtaagctacataatcaacttctaaaaacgcaatcttctagatgtgtagattgtggaacaccaacctgccattacccaaattctagaggtggaggatgcccattaggtaataggatatatgattggaataacctgatttatgaaaacgaatggaaaaaagcattggaacgattattagacacaaataattttccagaaattacgggaagagtatgtccagctccatgtgaagatgcatgcatattaagcataaatgaaaaaccagtttctataaagtttattgaattatctattattgaatgtggttttataaaaaaatggatacaaccaattataccacgtacaagaacgggaaaaaaagttgctataatcggatcaggaccaagtggtttaacagcagcacaacaattaaataaagctggacatcatgttgtcatatatgaaaaaggagaatatttcgggggattattaatgaacggtatacctagtgtaaggttagataaaaaaattatagaaagaagaataagtttaatgaaaaaagaaggaataactatgaaaaataatataaatattggagttgatataaaattaactgaattaatgcaaaattatgatgccattttattagctactggttatgaaatacctagaaaattaaatatacccggatctaatttaaataatatattttatgcaatggattttttatcatcctttcaaaaatccctaattaaatctgatttaatggatgaccaatatatagatgtatctgaaaaacatgttattatattaggtggtggtaaaacagctgcagattgtataagcttagctatacgtatgggtgcagctagcgttttacaatttacaagaaaagaagctccgcctattaataaaaataaaaattcttggcctggtttaaaaaatatatttaaagtcgaatattcacatgatgaagctattgttatacaaggaaaagatccaagagaattttgtataagaagtttggaatttattccttcaaataaagatcctaaaagagtatctggtataaaggctatcaaagttaagccaaaaagaggtaatatcacacgcaatggagttaataattctattaaaagagacttaagtaaacgtacaccctcccctcaatataataattcgactactaatttaaataccagtattagcggaattacaacaacaggaaatgaatctacaaatacaaatggcagtttttccactatactagctaatactccctctatggatactaattcgcaaaaaaacagtgccaaaaagcagtgtattaacaaaaacaataaattaaagcagaataaaaacacagctaaaagaaattcagatgaatctcctatttcaaataatagcaattacaatcataaaataaataatatgaataatgaagtagtgaaaaattatcaagttgtaaagccagaaaaggaatatgttgatattccatttacagaaagggtttataaagcagatatcataattttagctcttggatttttaaaaacagatgattcaatatgggaaaatgatactattaaaatagaattagataattataattgtataaaaacacataataatatttatcaaacagcacataaaaaaatatttgcgtgtggagattgcagaatcggaccaagtaccgtcgtacaagctattgcagaaggaagagatgttgcttctaaaatagatgagttcttgacaaattcaacttcaattttacccccttgtaacacatattattattatcctaaaaactataaatataccccatttagttctgcacattggggataa

SEQ ID NO: 4522 - protein, 2957 aa, Plasmodium yoelii yoelii
MKKKKSAKHGLYDSRYEKDACGVGVVADINGKSSRMVIQKAMQILLRLSHRGGVQSNNGDGAGILVGMPHEYFQMLSDTCQLPFLLPEKGDYAVAQIFLPHNEERRLFLYHEIEREVYNHGLVVLGWRSPIPVRSDVISATVKKSEPFIAQMFVCKRSVFKNYDDFNIYPFSDINFTDDTNLNLNELPGDIELLSFFIRKKLVRHNDMYFCSFSSRTIVYKGLLTPSQIYLYFEDLLSEQFTTYLAMVHVRFSTNTSPTWYAAHPFRRICHNGEINTISVNSLLFKERMQLAKAPDFFKSVSIKDLKPINEEKYIIYDNDDEIIHKRDTFEDIMLTKNRLKKKSRRNLLLKLKRDYTYNSSALNYQIKREYMNSDINSNSEFLNNMNEQSKSSSDDLLDINEKDSHMKNAKKFITGNTGISNPNDFGKSMKSQIKYGESKKTKGELSFPSDSSLFDNAIDFLTMTGREIEHAVMMLMPRAYQKDPNITPLEKAFYEYHTCLMEPWDGPALVIFTDGNKVGASLDRNGLRPARYSITNYGLFVLSSETGVVDLPYDKITHKGCVYPGKVVLVDFKEKTFLRHEDVLSKFLKLNNYKKWLDHYSIHLDNIIKPASNMENIRMTAYKYGAILNKDNYYHHTNHVNNNSTSKIGQINNPDRHDDSLIKKLKAFGYTYDAFNIIISPMVKHAADGLGAMGNDTAFPFLSYLRRNLVYYFQQTFAQVTNPAIDPIREENIMSLMSILGKEGDILHCTYTNCQRIFINGPILNEPLYNMLLQLPDFPHIIIDMTISLDLLEHLMSTENPTSPTANGENDDDNFIKFDVVKSYSSPKKSFIQDYTPKAEDSAKKYVKDDPTANNTGGNKKPRVFSKYLIKFIDRINTKVESAIRRGSQLIILSHGNVSESRVPIFSIIIVGALHKYLLSKNLRTKCSIIVKAGDCFEIHHLAVLLSFGADCIYPFILYESLQFIKYGSNEARLSNQQLISNYRHATNYGILKIMSKNGISTLPSYKGCGLMQPLGISDEILKKCFINVCDSIIGGVTFEFVEKEILRIFNHAYPKRILALNVKNANDELDDFGEYHFRNIGNAQIHMNHPETINLLQRATKTGNFDTYKKYSELQNELINHCEIRGQLEINYKKCPSYNKKKKKNEPININLVEPINKILLRFCTGAMSFGSLSEEAHTTVAIAMNSIGLKSNTGEGGEAEDRIIQPNNNNNNEPNTSSAVKQIASARFGVTAYSLVNAHELQIKVAQGSKPGEGGELPGYKVNAKIASVRRSTPGIGLISPPPHHDMYSIEDVGQLVYDLKNINKEAKISVKLVSKLGIGVITSGVVKGNCEQILISGMSGGTGASKWTSIKHAGLPWEIGLAEAHQTLCKSKLRKRVILQIDGQLKTGRDVILGALLGAESFSFSTQPLITLGCIMMRKCHLNICPVGICTQDPELRKKFAGKPEYVINFFFMVANEVREYLASMGFRKFSHIIGRSDLLKKKSHLKYDEKRKLLDFSKLLFPGWKYYTEEQNKEDGDKGYTNSEKRKKKKKEIEKEREKEKKKKTLNAYSMHNNIINKYKDQQSGSLTPSEKNIRKQVLINENLNTDIKYDPSKEEQHGVNTIKERVGKLSYEKIEEDEDGDDEEEEEREEEEKDKSTSEEDEDEEEEDEEEEEDDEEEEYGETDGDDVIEKNLSLTYREDMLKNVDKLNFQNKALRKKSKSISEKKSHVKKKKNKPIPIFCCETQNHKLCDIIDRELIRRSKIALLNCTPVNINMPIKNTDRAVGAMLSYHIIQKYGEKSLPMDTINVKFRGTGGLSFGVFLTSGCNFELEGDANDFVGKGLSGGIISVHFPKSSLFINECQKNMIVGNSVLYGATKGRAFFAGRAGERFAVRNSGAIAVVEGVGCHGCEYMTKGIVVILGEIGCNFAAGMSGGIAYVLDINEKNVNHQMVDLKICKTMDEKMTLEKLLHEHYDRTNSYTAKMLLNDFDKNLERFTKVIPRDIKRVLTEACIEFVKTGNEEAASILDDWASLLKSVDHPENMYKKAMQFFTTISDDISGLSKTLALRNVDGLIIYDILQGSNHRKLLRIKNVGSNLVNDSNFNTEENISFESDQNKIFDFEKFTYNLELCRANNRKWRRYVQIPFKCTAFSDFKNIFPNRLDDKSKEIIKKYILNEQYLLDVHLKSLNSNQFIEGLLNREDERDAYINQKQINPNIYSFKNMFYPADYNDLLCITDEKKSEQSISINPDTNKSNTESNENINKTDKGTSENTTIDTQIVIQEKIPKKINIINNTENETGENIPRTSIDNINQSKNDNSIKPFLVANPNKVTGFMEYERLSHPLKDVSSRVLDYSEIIVPINVKSKLHNQLLKTQSSRCVDCGTPTCHYPNSRGGGCPLGNRIYDWNNLIYENEWKKALERLLDTNNFPEITGRVCPAPCEDACILSINEKPVSIKFIELSIIECGFIKKWIQPIIPRTRTGKKVAIIGSGPSGLTAAQQLNKAGHHVVIYEKGEYFGGLLMNGIPSVRLDKKIIERRISLMKKEGITMKNNINIGVDIKLTELMQNYDAILLATGYEIPRKLNIPGSNLNNIFYAMDFLSSFQKSLIKSDLMDDQYIDVSEKHVIILGGGKTAADCISLAIRMGAASVLQFTRKEAPPINKNKNSWPGLKNIFKVEYSHDEAIVIQGKDPREFCIRSLEFIPSNKDPKRVSGIKAIKVKPKRGNITRNGVNNSIKRDLSKRTPSPQYNNSTTNLNTSISGITTTGNESTNTNGSFSTILANTPSMDTNSQKNSAKKQCINKNNKLKQNKNTAKRNSDESPISNNSNYNHKINNMNNEVVKNYQVVKPEKEYVDIPFTERVYKADIIILALGFLKTDDSIWENDTIKIELDNYNCIKTHNNIYQTAHKKIFACGDCRIGPSTVVQAIAEGRDVASKIDEFLTNSTSILPPCNTYYYYPKNYKYTPFSSAHWG

SEQ ID NO: 4523 - DNA, 1467 bp, Mycobacterium bovis
  CDS (1)..(1467)
atggctgatccgggcggcttcctcaaatacacccaccggaaattgccgaagcgacggccggtcccgctgcggctgcgagactggcgggaagtctacgaggaattcgacaacgagagcctgcgccaacaggcgacccgctgcatggattgcggcattccgttctgtcacaacggatgtccgctgggtaacttgatcccggaatggaacgatctggtccgccggggccgctggcgcgacgcaatcgaacggctgcacgccaccaacaacttccccgacttcaccggccggttgtgcccggctccgtgcgagccggcgtgtgtgctgggcatcaaccaggatccggtgacgatcaagcagatcgagctggagatcatcgacaaggccttcgacgaaggatgggtgcaaccacgtccgccgcggaagctgaccgggcaaacggttgctgtggtgggttcggggccggcgggtttggccgccgcccagcaactcacccgggcgggtcacaccgtcaccgttttcgagcgcgaagaccgcatcggcgggctgctgcgttacggcatcccggaattcaagatggaaaagcggcatcttgatcggcgtttggaccaaatgcgctccgaaggaaccgaattccggccgggcgtcaacgtcggggtcgacattagcgccgaaaagctgcgcgctgatttcgatgcggtcgtattggccggtggcgcaaccgcttggcgcgagctgccgattcccggccgcgagctggagggcgtccatcaggcgatggagtttctgccgtgggccaaccgggtgcaagaaggagatgacgtcctcgatgaggacgggcagccgccgatcaccgcaaagggcaagaaggtcgtcatcatcggtggcggcgacaccggggcggactgcctgggtaccgtgcaccgccagggcgcgatcgccgtgcaccagttcgagatcatgccgcgtccaccggacgcccgcgccgaatccaccccatggccgacttacccgctgatgtatcgggtatcggccgcgcatgaggagggtggcgagcgggtgttctcggtcaacaccgaggcgttcgtcggcacggacgggcgcgtgagcgcgctgcgggcacacgaagtgaccatgctggatggcaagttcgtcaaggttgagggctccgacttcgagctcgaagccgacctggtgttgctggcgatgggtttcgtcggcccggaacgggcgggcctgttgaccgacctcggagtgaagttcaccgagcatgggaacgtggcccgtggcgacgacttcgacacctcggttcctggtgtgttcgtagccggtgacatgggccggggccagtcattgatcgtctgggcgattgccgagggccgggccgctgccgcggccgtagaccggtacttgatgggttccagtgccctgccggcgcctgttaagccgaccgctgcaccgcttcaatag

SEQ ID NO: 4524 - protein, 488 aa, Mycobacterium bovis
MADPGGFLKYTHRKLPKRRPVPLRLRDWREVYEEFDNESLRQQATRCMDCGIPFCHNGCPLGNLIPEWNDLVRRGRWRDAIERLHATNNFPDFTGRLCPAPCEPACVLGINQDPVTIKQIELEIIDKAFDEGWVQPRPPRKLTGQTVAVVGSGPAGLAAAQQLTRAGHTVTVFEREDRIGGLLRYGIPEFKMEKRHLDRRLDQMRSEGTEFRPGVNVGVDISAEKLRADFDAVVLAGGATAWRELPIPGRELEGVHQAMEFLPWANRVQEGDDVLDEDGQPPITAKGKKVVIIGGGDTGADCLGTVHRQGAIAVHQFEIMPRPPDARAESTPWPTYPLMYRVSAAHEEGGERVFSVNTEAFVGTDGRVSALRAHEVTMLDGKFVKVEGSDFELEADLVLLAMGFVGPERAGLLTDLGVKFTEHGNVARGDDFDTSVPGVFVAGDMGRGQSLIVWAIAEGRAAAAAVDRYLMGSSALPAPVKPTAAPLQ

SEQ ID NO: 4525 - DNA, 1503 bp, Rhodopirellula baltica
  CDS (1)..(1503)
atgggcaagcccactggattcaaggaattcgatcgcgaaaaagttgcctggcgtctgccggtcattcgaatcaacgactacgacgagatctacaccgaacccaagaccgagcacctgcagcgccagggcgctcgttgcatggactgcggtgttccattttgtcagtctgccaccggatgtccgatcgacaacttgattcctgagtggaacgacctggtttacaacaaccgttggaaggaagcgatcgagcgtctgcacaagaccaacaacttccctgaattcaccggtcgtgtttgtccggcaccctgtgagggatcgtgcgtgttgggaatcaccaacccgcccgtgacgatcaagaacatcgaaaacgcaatcgtcgaccgtgcctgggaagaaggctggatcgttgccgagccgcctgaacaacgcactggcaaaaaggtcgctgtcatcggcagcgggcctgctggtttgactgccgcagaccaactgaacaaagcgggccatttggtcaccgtctacgaacgcgccgatcgcatcggtggtttgttgcagtacggcattcccaacatgaagttgtcgaagaaagccgttcaacgtcgcgtcgacaaaatgaccgaagaaggtgtgacgttcaaaaccggagtgaatgtcggcgtagacgtctcgcccaaggaattgcagagcgagttcgatgctgtgttgttggcttgtggtgcgaccaagccgcgtgatttgccgatcccgggccgcgaagccaagggcgttcatttcgcgatggacttcctcacctcaaacacaaagcagcgggttcacagtgataatttgggagccgaattcatcagtgccgagggcaaggatgtgatcgtgatcggtgggggtgacaccgggaccgactgcatcggaaccagccttcgtcatggttgtcgcagcatggtcaactttgaactgctgccccaaccacctgctgaacgcgccgatgacaacccgtggcctgaatggcctcgtatcttccgtgtcgattacggacatgaagaagccgaagcgaagtttggcaaggaccctcgtgagtatcagatcctcagcaaagagtatctggtcgacgacgaaggtaagctgaaaggcatcaagaccgtcaatgtcgaatggacaaagaatgacgaaggcggctggcaaatggccgaagtcgaaggcagcgagaaagaatggcctgcccaactgatcttgttggcgatgggtttcttgggaccagagcaaaccgttgcggaatcgctcggcctcgagacggacgctcgcagcaacttccaagcagaacatggcaagtacgcgaccaacatcgacggcgtgtttgccgcaggtgactgccgacgtggtcaaagcttggtggtttgggcgatcaacgaaggccgtggtgccgctcgtgcgatcgacatcttcttggaaggttccagcaacctaccagcccccggccaaacgatgggcacatcaatggccgccgtctga

SEQ ID NO: 4526 - protein, 500 aa, Rhodopirellula baltica
MGKPTGFKEFDREKVAWRLPVIRINDYDEIYTEPKTEHLQRQGARCMDCGVPFCQSATGCPIDNLIPEWNDLVYNNRWKEAIERLHKTNNFPEFTGRVCPAPCEGSCVLGITNPPVTIKNIENAIVDRAWEEGWIVAEPPEQRTGKKVAVIGSGPAGLTAADQLNKAGHLVTVYERADRIGGLLQYGIPNMKLSKKAVQRRVDKMTEEGVTFKTGVNVGVDVSPKELQSEFDAVLLACGATKPRDLPIPGREAKGVHFAMDFLTSNTKQRVHSDNLGAEFISAEGKDVIVIGGGDTGTDCIGTSLRHGCRSMVNFELLPQPPAERADDNPWPEWPRIFRVDYGHEEAEAKFGKDPREYQILSKEYLVDDEGKLKGIKTVNVEWTKNDEGGWQMAEVEGSEKEWPAQLILLAMGFLGPEQTVAESLGLETDARSNFQAEHGKYATNIDGVFAAGDCRRGQSLVVWAINEGRGAARAIDIFLEGSSNLPAPGQTMGTSMAAV

SEQ ID NO: 4527 - DNA, 1710 bp, Prochlorococcus marinus
  CDS (1)..(1710)
atgttggatcctgaagcttctccgccagggacacatacactctgtatatttctaccggaatctactccagagatcacactgccaaccgatggtaaggataaatatcataaccgtacatatcgagatcaaaagcagaaaaaagcatccgcaattattgattacttagaaaagaattatttcccagaacttaaaaaacatatcttggttcaggaaatagctaccccacagacgattcagcgctatacccttaaaagtcatggctctattggtggtccacaggtgaatatgagccaaagttatatgagtcggctggccgctcgcagtgattggcaagggctttattgtgtaggcgattccaccagtcaagggatcggcgtagtgtctgtgactgtgtccgcaatcagtgcagtcaatgccattttaaaggatcttcgtcaacctcaatatctaccattaaagcattatcctaaaaattatgttcattttgctaaagcctctctatctcaaaaacaacattctgcggatttgattcctgaccatcagaagataaaaactgtggaattagatccccgatcttgtttgtctccgcgctgcgttcgtgcgggtccagacagtactcatcaagcccatatcgctcgtcttgtcgaagccggcaattggctaggtgcagcccagtccttacgtgccgttaatccattttcagaatcaacctcttacctttctcaatcagacgatttttgtggctcgtcatgttcgcaatcgttatgtcctgatgcttctattcccattaagtcattaaatcgctatgtatgcgagaaagtccccaactacataccagaggcagctccggataatggtaagcgaatttctattgttggggctgggcctgctggtctaacatgtgcacattatttggcgcgtttgggctaccaaatagacatttacgagaagaaaagtgaagctggagggacgctgaaatcgattgctctagtatcaaggattcctctgtcagtattacatcgtgaaatatcaaacctattattaccttctattaggatttattttggtcaatctttaggagaagacattacaattgctgagcttaggcatcaatatgatgcactctttttagcctgtggtctaggagagaagcaaattcagactaaagatgtcgatcacgattttaacttgattcatgggttgaagtttttagaccaatttactcaggagtcaactattgttagagggaagaccttgacaatagttggcgctacctaccttgctatggatatctcaaagttggcaattcaaaacggtgcaaagaaggtttatctgattgacgagcagtctgaatttcaatcgaaatctcaggctaagcgtttaaatgaaatgcaagaacttggaattgagattcactccagaatagatccttcagctttctctaaactctgtagttcttctcatcaggtgatcatggcaggtttggaacaacagcgtattgaggctcaattaagggagcatctaagttcaagccttttggttgatgttgatgccttggttgacttagacacgctacaggttctgggtcacgtcaatgtattcgccggcggagatatcattagaggctccagtagcattcatgagtcaattagagacggtcgcaaggcagcagcagaaattaatcatgccttcatgatcaagcaatcttga

SEQ ID NO: 4528 - protein, 569 aa, Prochlorococcus marinus
MLDPEASPPGTHTLCIFLPESTPEITLPTDGKDKYHNRTYRDQKQKKASAIIDYLEKNYFPELKKHILVQEIATPQTIQRYTLKSHGSIGGPQVNMSQSYMSRLAARSDWQGLYCVGDSTSQGIGVVSVTVSAISAVNAILKDLRQPQYLPLKHYPKNYVHFAKASLSQKQHSADLIPDHQKIKTVELDPRSCLSPRCVRAGPDSTHQAHIARLVEAGNWLGAAQSLRAVNPFSESTSYLSQSDDFCGSSCSQSLCPDASIPIKSLNRYVCEKVPNYIPEAAPDNGKRISIVGAGPAGLTCAHYLARLGYQIDIYEKKSEAGGTLKSIALVSRIPLSVLHREISNLLLPSIRIYFGQSLGEDITIAELRHQYDALFLACGLGEKQIQTKDVDHDFNLIHGLKFLDQFTQESTIVRGKTLTIVGATYLAMDISKLAIQNGAKKVYLIDEQSEFQSKSQAKRLNEMQELGIEIHSRIDPSAFSKLCSSSHQVIMAGLEQQRIEAQLREHLSSSLLVDVDALVDLDTLQVLGHVNVFAGGDIIRGSSSIHESIRDGRKAAAEINHAFMIKQS

SEQ ID NO: 4529 - DNA, 1479 bp, Bordetella parapertussis
  CDS (1)..(1479)
atgaggattagcatgggaaagatcactggctttatggaattccagcgcctgcaggaggccgccgaggccccgcagaagcgcctcaagcactggcgcgagttcgtcctgcacctgaacgacgaacaggccaagcaacaggcggcgcgctgcatggactgcggcatcccgttctgcagcaacggctgtccggtcaacaacatcatccccgactggaacgacctggtctaccggcaggactggcgccgcgcgctggacgtcctgcactcgaccaacaacttccccgaattcaccggccgcatctgccccgcgccgtgcgaggccgcctgtacgctgaacatcaacagcgacgccgtcggcatcaagtcgatcgagcacgccatcatcgacaagggctgggccgagggctgggtgacgccgcaggtaccggtgcgcaagaccggcaaaaaggttgccgtggtgggctcgggccccgccgggctggcctgctcgcagcagctggcgcgcgccggccattcggtcaccctgttcgagaaaagcgatcgcatcggcgggctgctgcgttacggcattcccgacttcaagctggagaagtcgcagatcgaccgccgcatcgcgcagatggaagccgagggcgtggaattcgctccctcgacctacatcggcaacccggatgacgccgccgccgatgggctgacggtgcgtacgccgcagtcgctgctggcggacttcgacgccgtcgtcatgaccggcggctcggaaaccccacgcgacctgccggtgccgggccgcgagctgtccagcgtgtactacgccatggacttcctgcgccagcagaacaaggccgtcgccggcgatcgcctgagcggccagacgctggccaaggacaagcacgtggtcgtgatcggcggcggcgacaccgggtcggactgcgtcggaaccagcaaccgccacggcgcggcctcggtcacgcaattcgaactgctgccccagccgcccgaatgcgaggacaagcccatggtctggccgtactggccgctcaagctgcgcacctcgtcctcgcacgatgaaggctgcgagcgcgactggtcggtggccaccaaggcgttggccggcagcgacggccaggtcgagaagctggtcggcgtgcgcgtcgagtggttcaaggacgaagccaccggccagatgaagatgcgcgaggtcgaagactcggaattcgaaatcccggccgacctcgtcctgctggccataggctttgtctcgccggtggccacggtgctcgacgcgttcggcgtggaccgcgacgcgcgtggcaacgtgcgcgccaacaccgacgattaccgaaccaatgtcgacaaggtgttcgccgccggcgacatgcggcgcggccagtcgctggtcgtctgggccatacgcgaagggcgccagtgcgcgcgctcggtcgacgagtacctgatgggcgcatccgagctgccgcgttga

SEQ ID NO: 4530 - protein, 492 aa, Bordetella parapertussis
MRISMGKITGFMEFQRLQEAAEAPQKRLKHWREFVLHLNDEQAKQQAARCMDCGIPFCSNGCPVNNIIPDWNDLVYRQDWRRALDVLHSTNNFPEFTGRICPAPCEAACTLNINSDAVGIKSIEHAIIDKGWAEGWVTPQVPVRKTGKKVAVVGSGPAGLACSQQLARAGHSVTLFEKSDRIGGLLRYGIPDFKLEKSQIDRRIAQMEAEGVEFAPSTYIGNPDDAAADGLTVRTPQSLLADFDAVVMTGGSETPRDLPVPGRELSSVYYAMDFLRQQNKAVAGDRLSGQTLAKDKHVVVIGGGDTGSDCVGTSNRHGAASVTQFELLPQPPECEDKPMVWPYWPLKLRTSSSHDEGCERDWSVATKALAGSDGQVEKLVGVRVEWFKDEATGQMKMREVEDSEFEIPADLVLLAIGFVSPVATVLDAFGVDRDARGNVRANTDDYRTNVDKVFAAGDMRRGQSLVVWAIREGRQCARSVDEYLMGASELPR

SEQ ID NO: 4531 - DNA, 1491 bp, Streptomyces avermitilis
  CDS (1)..(1491)
atggccgatcccaagggttttctcaccacaccgcgcgaggaatggccccgccggcccgtcgaggaacgggtgcgggactgggacgaggtgtacgtccccggcgcgctgctgccgatcatcagtcggcaggccgaccgctgcatggactgcggggtccccttctgtcatgaggcctgtccgctgggcaatctgattcccgagtggaacgacctggtctcgcgggaggactggcgtgccgcgagcgaccggctgcatgccacgaacaactttcccgagttcaccgggcggttgtgtcccgcgccgtgcgaggcggggtgtgtgctggccatcaaccagcccgcggtcaccatcaagaacgtcgaggtcgccatcgcggatcgggcgtgggcggacgggttcacgccgccgtgtccgccggagcggctgtccgggaggacggtcgcggtcgtcggctcgggccccactggccttgccgcggcgcagcagttgacgcgggccgggcacacggtcgcggtgttcgagcgggccgaccggatcggcgggctgctgcggtacgggataccggccttcaagatggagaagcggcatctgaaccaacggctcgaacaaatgcgggacgagggaacgaagttccgcacgtcgacggcgatcgggcgggacatcggggcggaggagctgcgggcgcggtacgacgccgtggtccttgccgtgggcgcgacggcctggagggaactggacgtacccggacgggagttggccggcattcatcaggcgatggagtatctgccgctggccgaccgggtgtgcgagggggatctggaggtctcgccgctgtctgcggccggcaagcacgtcatcatcgtgggcggaggcgacaccggcgcggactgcctgggaaccgcggtgcgcgagggcgcggcgtccgtgacccagctcgacatctatccgctgcccgaggcggagcgggacgaggacatcgagccgtggccggtgtatccgaagatctaccggatgtcgcccgcgcacgaggaagcccgtgacctgaagacggcgcccgcggcggacgcggacgcacgactgttcgcggcgtccacgctccgcttcgccggggacgcggcggggcatgtgcgggccttgcacctggtcgaggtcgacgcgcggcgtcggccgctgcccggctccgggcgtacgctgcccgccgacctcgttctgctcgctctcggtttctccggtcccgaccgggacgacgggctggtcgaccagctcggtctcgcactcgacccgcgcggcacgatcactcgggacgcggacttcgcgaccaatgtccccggggtgttcgcggccggggacgcggcgcgcggacagtcgctgatcgtgtgggcgatcgcggaggggcgagcggtggcggcggcggtggaccgccggctgacgggcgccgcgtcgaagctgccggcgccgatagggccgtacgaccggccgatgagggcgtag

SEQ ID NO: 4532 - protein, 496 aa, Streptomyces avermitilis
MADPKGFLTTPREEWPRRPVEERVRDWDEVYVPGALLPIISRQADRCMDCGVPFCHEACPLGNLIPEWNDLVSREDWRAASDRLHATNNFPEFTGRLCPAPCEAGCVLAINQPAVTIKNVEVAIADRAWADGFTPPCPPERLSGRTVAVVGSGPTGLAAAQQLTRAGHTVAVFERADRIGGLLRYGIPAFKMEKRHLNQRLEQMRDEGTKFRTSTAIGRDIGAEELRARYDAVVLAVGATAWRELDVPGRELAGIHQAMEYLPLADRVCEGDLEVSPLSAAGKHVIIVGGGDTGADCLGTAVREGAASVTQLDIYPLPEAERDEDIEPWPVYPKIYRMSPAHEEARDLKTAPAADADARLFAASTLRFAGDAAGHVRALHLVEVDARRRPLPGSGRTLPADLVLLALGFSGPDRDDGLVDQLGLALDPRGTITRDADFATNVPGVFAAGDAARGQSLIVWAIAEGRAVAAAVDRRLTGAASKLPAPIGPYDRPMRA

SEQ ID NO: 4533 - DNA, 1461 bp, Streptomyces avermitilis
  CDS (1)..(1461)
atggctgatcccaagggcttccttacgcacggccgcgaggtcgccaggacccgtccggtcgaggagcgggtcaaggactggaacgaggtctacgtccccggctcgctgctgccgatcatctcgaagcaggccggccgctgcatggactgcggcatcccgttctgccacaacggctgtccgctcgggaacctgatccccgagtggaacgactacgcctaccgcgaggactggacctccgcgtccgagcggctgcacgccacgaacaacttcccggagttcacgggccgcctgtgccccgctccgtgcgagtcggcgtgcgtgctgggcatcaaccagcccgcggtgaccatcaagaacgtcgaggtctccatcatcgacaaggcgtgggacaccggcgacgtcaagccgcaggcccccgagcgcctgtcgggcaagacggtcgcggtcgtcgggtccggccccgccggtctcgccgccgcccagcagctgacccgggccggtcacacggtcgcggtgtacgagcgcgcggaccgcatcggcggcctcctgcgctacggcatccccgagttcaagatggagaagcggcacatcaaccgccgtatcgagcagatgcgcgcggagggcaccaagttccgcacgggtgtcgagatcggccgcgacatcgacgccgcgaagctgcgcaggcgctacgacgcggtggtcgtcgccgcggggtccacgaccgcccgtgacctcccggtccccggccgtgagctcaagggcgtctaccaggcgatggagtacctgcccctggccaacaaggtgcaggagggcgacttcgtggccccgccgatcaccgccgagggcaagcacgtcgtcgtgatcggcggcggtgacacgggcgcggactgcgtgggcaccgcccaccgtcagggcgcggcctcggtcacgcagctggagatcctggcgaagccgggcgaggagcgcgccgcgcaccagccctggccgacgttcccgatgctctacaaggtcacctccgcgcacgaggagggcggcgagcgggtctactccgtcagcaccacccacttcgagggcgacgaggacggcaacgtccagtggctgcacctggtcgaggtcgagttcgtcgacggcaagctgacccagaagccgggcacggagcgcaggatcccggcgcagctggtgacgctggcgatgggcttcacgggcacggaccaggacaacggactggtcacccagttcggcctgggcctcgacgagcgcggcaacatcgcgcgcgacgcggacttccagaccaacgtccccggtgtcttcgtcgcgggcgacgcgggccgcggccagtccctgatcgtctgggccatcgcggagggccgctcggccgccaagggcgtcgaccgcttcctcaccggcgcgagcgaactgccggcgccgatccgtcccacggaccgctcgctgatggtctga

SEQ ID NO: 4534 - protein, 486 aa, Streptomyces avermitilis
MADPKGFLTHGREVARTRPVEERVKDWNEVYVPGSLLPIISKQAGRCMDCGIPFCHNGCPLGNLIPEWNDYAYREDWTSASERLHATNNFPEFTGRLCPAPCESACVLGINQPAVTIKNVEVSIIDKAWDTGDVKPQAPERLSGKTVAVVGSGPAGLAAAQQLTRAGHTVAVYERADRIGGLLRYGIPEFKMEKRHINRRIEQMRAEGTKFRTGVEIGRDIDAAKLRRRYDAVVVAAGSTTARDLPVPGRELKGVYQAMEYLPLANKVQEGDFVAPPITAEGKHVVVIGGGDTGADCVGTAHRQGAASVTQLEILAKPGEERAAHQPWPTFPMLYKVTSAHEEGGERVYSVSTTHFEGDEDGNVQWLHLVEVEFVDGKLTQKPGTERRIPAQLVTLAMGFTGTDQDNGLVTQFGLGLDERGNIARDADFQTNVPGVFVAGDAGRGQSLIVWAIAEGRSAAKGVDRFLTGASELPAPIRPTDRSLMV

SEQ ID NO: 4535 - DNA, 3024 bp, Enterococcus faecalis
  CDS (19)..(3024)
ataaaaggagtgacgttaatgagtgatattatgcatcccatctcaattgaggctttattaaattggatttttagtgagtatcaacaagatggcacaatttttggcattcgtaaattttatcatgcggatcctacaaaaacgatttcgttatttggagaaaaaatggaaaccccttgtggtccagcagcaggtcctcatacacaattagcacaaaatattattgcggcctatttaacaggttctcgtttttttgaagttaagacagtccagatactggatggagaagatttacctgtgagtaaaccatgtatcgcagcagcagatgaatgttacaacgttgagtggtccacagaattgcgcgttccccaagcttatgatgaatacgtcaaagcatggttcgttttgaagttacttagtaaagagttcgagctaggtgacccgaatggtttcatttttaatatgagtgttggctatgatttggcagggattcaatcaccaaaaattgatcgttatattaacgaaatgcagaacgcagaaggaacgccgatttgggcggaatgccaagcagctgccaaaaaatatctatcttattttaaaaaagtagatgacttatatatcgaagcaattagtcctaaagtctgtcattctattacgctgtcgactttacacggttgtccatcagacgaaattgaacgaattgcggcctatttattaagtgaaaaagggctccattcctttattaaatgtaatccaaccatgttaggttatgaatatgcgcgtcaaacgatggatgagctagggtttgattatatggtttttgacgatcaccattttaaagaagatttacaatttgaagaagcagtaccgatgttacaacgtctgcaattattagctaatagtaaaaatctaagcttcggagttaaaattacgaacactttcccggtaacgattgcagcaaatgaattacctggtgatgaaatgtacatgtcaggacgttcgctatttcctcttagtatttcattggcacaaaaattatcagaagcatttgatgggaaactacaaatttcttattctggcggtgcagatattttcaatagtaaagaaatattcgatgctgggatttggccaatcactatggcaacgactctgttgaaacctggtggctatcaacgaatgaatcaagttgctaatgtattaagcgcagcagaatatcctcagatggtccatgtcaacttggataaattagctcaagttgttgagaaagctaaaacacaagcgcgttaccaaaaatcaattaaattaccagaaagtaccaaactaagaaaaacagttccgttaacagattgttatattgctccttgtcgaagtgacggtggttgtccaatcaatcaggatattcctgcttaccttcgttatgtcagtgaaggtaattatttaaaggccttgcaagtaattgtcgataagaatccgttgccttttattactggaaccatttgtgcacatccttgtatgactaaatgtacacgtcaattttatgaagaatctattcatattcgggaagtgaagttagaagcagctgaacatgcttatgatgaattattgacgacactagaaaagccacagccaaaagaaaatgcacctaaaacagctgttgtgggtggaggccctgcagggatctctgctgggtatttattagcacgtgaaggcatgcctgttactgtgtttgaaaaatccgagacaattgggggcgtttgtagccagattgtaccagaatttcgaatttctatggaatctgttcaaaaagacgttcagttagcggaatttatgggagccgaattccgtacaggacaagaggcgccatcattggcggaattgaaaaaccaaggctatacgaatgttatttatgccattggtgcatggaaacatggggtccttcgtttagaatctggtcgagcattgaactcgttagaatttttaaaagcaaatcgagaaaatccaacgattaatccttacggagaacaaattgtcgtcgttggtggcggaaatacagccatggactgtgctcgtgcagccacaacattacctggtgttaaaaaagtctcagtggtttatcgtcggaataaacgcaatatgccagcagatgaagaagaactttatttagctttagaagatggtgttgactttttagaattactttcgccaattaaacatgaaaatcaacaattaacttgtgaaaaaatggtcctaggtgaacgagatgcctctggacgccgtcgaccaattggtacaggagaaatgattgatattcctgctgatacagtgattgccgctgttggtgaaaaagtagatacagaattttaccaagcattaggcattcacacagacaactatgggaaagtcgtttcaaatcaagaaacattggaaacaaatataccaggtgtctatgtcattggtgacgctaatttaggaccagccacaattgttgaagcaatcgctgatgcaaccaaagcggccaataatatttgtcttgtccacaatcatcactatgaaaaagataatttaaatagtgatgtcgcatttgttagaaacaaacggggtatccttgtgacagacgagatgtcttgtagtcaagctagtcgttgcttagaatgctccacaatttgtgaatcttgtatggatgtctgtccaaaccgagcaaatattgttgtgtatgtcgaaggaaaaccacaaattgtccatgttgatcggatgtgtaacgaatgtggcaactgtgaaacattttgcccttatgcaagtgccccttacaaagacaaatttaccttatttaacagtgaagctgatttttatgacagtactaattcaggtttctatgttcaaaatcctgtggataaaatttgtttactgcgtctatggggaacggtgtcaacaattcaattaacagatcaaggattagatgtaccagaagatttaattgcattaatggtaactatgattgaagaatatgcttattgtatgcaagcataa

SEQ ID NO: 4536 - protein, 1001 aa, Enterococcus faecalis
MSDIMHPISIEALLNWIFSEYQQDGTIFGIRKFYHADPTKTISLFGEKMETPCGPAAGPHTQLAQNIIAAYLTGSRFFEVKTVQILDGEDLPVSKPCIAAADECYNVEWSTELRVPQAYDEYVKAWFVLKLLSKEFELGDPNGFIFNMSVGYDLAGIQSPKIDRYINEMQNAEGTPIWAECQAAAKKYLSYFKKVDDLYIEAISPKVCHSITLSTLHGCPSDEIERIAAYLLSEKGLHSFIKCNPTMLGYEYARQTMDELGFDYMVFDDHHFKEDLQFEEAVPMLQRLQLLANSKNLSFGVKITNTFPVTIAANELPGDEMYMSGRSLFPLSISLAQKLSEAFDGKLQISYSGGADIFNSKEIFDAGIWPITMATTLLKPGGYQRMNQVANVLSAAEYPQMVHVNLDKLAQVVEKAKTQARYQKSIKLPESTKLRKTVPLTDCYIAPCRSDGGCPINQDIPAYLRYVSEGNYLKALQVIVDKNPLPFITGTICAHPCMTKCTRQFYEESIHIREVKLEAAEHAYDELLTTLEKPQPKENAPKTAVVGGGPAGISAGYLLAREGMPVTVFEKSETIGGVCSQIVPEFRISMESVQKDVQLAEFMGAEFRTGQEAPSLAELKNQGYTNVIYAIGAWKHGVLRLESGRALNSLEFLKANRENPTINPYGEQIVVVGGGNTAMDCARAATTLPGVKKVSVVYRRNKRNMPADEEELYLALEDGVDFLELLSPIKHENQQLTCEKMVLGERDASGRRRPIGTGEMIDIPADTVIAAVGEKVDTEFYQALGIHTDNYGKVVSNQETLETNIPGVYVIGDANLGPATIVEAIADATKAANNICLVHNHHYEKDNLNSDVAFVRNKRGILVTDEMSCSQASRCLECSTICESCMDVCPNRANIVVYVEGKPQIVHVDRMCNECGNCETFCPYASAPYKDKFTLFNSEADFYDSTNSGFYVQNPVDKICLLRLWGTVSTIQLTDQGLDVPEDLIALMVTMIEEYAYCMQA

SEQ ID NO: 4537 - DNA, 1437 bp, Enterococcus faecalis
  CDS (19)..(1437)
aagagcaggtggagaaaaatggctagaaaaagtcgtataaaaacaccgattgcggaacaagcacctactatcagaaagaataattttgaagaggtttgcttaggctatacattagcagaagggcaagaagaagcgattcgctgtttacaatgtaaaaatgcaccttgtattgctaaatgccccgtgatgattgatattcctggatttattttagctattcgtgaaggaaacatggaacaagcagccgatattttaagtaaatatacgaatttacctgctatttgtggacgcgtttgtccgcaagagaaacaatgtgaacaagtttgtaaattagggaaagccaaaaactttgaaccagtggcaattggcaaattagaacgtttagttgccgattgggcattagaaaatcacaagtttcctaagaaaacagcggaaccaacaaaagggaaaatcgcagtggtcggttctggtccttctgggttaacagttgcgggggatttgtcaaagctaggctacgaagtaattatttttgaagcgcttcatgaagctggtggcgtattaacctatggcatacctgaatttcgattaccgaaaaaaattgttaaacaagaaattgcgagtattgaagccttaggtgtaacaatagaaaccaatgtggtagtaggtaaaacgattacgatggaagaaataatgtcagagtttgatgcctgttatctatcggttggtgcaggggcaccaaattttatgggaatcccaggaactagtttaaatggggtttattcttctagtgaatttttaacacgaatcaatttaatgcatagctatgagtttccagaatatgatacaccgattaaacgtgctaaaaatgttgttgtgattggcggcgggaatgttgcaatggatgccgctcgttcagccaaacgattaggcgctgaaaatgtgaacattgtgtatcgtcgttcgttagaagaattgccagcaagaattgaagaatatcaccattcccttgaagaaggaattaactattattggttaacgaatccaattgcttatttagatgaccaacaaggaaatctagccggtgttgaatgtgtcaaaatggttttaggtgaaccagatgcgtctggaagacgacggccagaaccaattccaaacagcacgtttaccattcctgctgatgcagtaatcgaggcaattggccaaggggcaaatcgagtcttgttatcaacatatccagaaatagaactaaaccaatggggttacattcaagctgatcctaaaacaggagcaacctcaatacctggcgtttttgctgggggcgatatagtcacaggtgctgccaccgttattttagcgatgggcgctgggaaaatcgcagctaatgcaattgatcagtatgtcaaaacacaaaaaacaacagtcacaagcaatgtttag

SEQ ID NO: 4538 - protein, 472 aa, Enterococcus faecalis
MARKSRIKTPIAEQAPTIRKNNFEEVCLGYTLAEGQEEAIRCLQCKNAPCIAKCPVMIDIPGFILAIREGNMEQAADILSKYTNLPAICGRVCPQEKQCEQVCKLGKAKNFEPVAIGKLERLVADWALENHKFPKKTAEPTKGKIAVVGSGPSGLTVAGDLSKLGYEVIIFEALHEAGGVLTYGIPEFRLPKKIVKQEIASIEALGVTIETNVVVGKTITMEEIMSEFDACYLSVGAGAPNFMGIPGTSLNGVYSSSEFLTRINLMHSYEFPEYDTPIKRAKNVVVIGGGNVAMDAARSAKRLGAENVNIVYRRSLEELPARIEEYHHSLEEGINYYWLTNPIAYLDDQQGNLAGVECVKMVLGEPDASGRRRPEPIPNSTFTIPADAVIEAIGQGANRVLLSTYPEIELNQWGYIQADPKTGATSIPGVFAGGDIVTGAATVILAMGAGKIAANAIDQYVKTQKTTVTSNV

SEQ ID NO: 4539 - DNA, 1239 bp, Shigella flexneri
  CDS (1)..(1239)
atgccgcaacaaaattatctggatgaactcactccggcttttacgccgttactggcgattaaagaagcctctcgctgtttattatgtcacgacgctccctgtagtcaggcttgcccggcacagaccgatccggggaaatttattcgctcaatctactttcgtaattttaaaggcgctgccgagacaattcgcgaaaataatgccctcggtgccgtttgtgccagagtgtgcccgacggagaaattatgccaaagcggttgtacccgtgccggtgttgatgctcccattgatatcggccgcttacagcgttttgttactgattttgaacaacaaaccgggatggaaatttatcagcccggtactaaaacgctcggcaaagtcgcgattattggcgcaggtcctgccggattgcaggccagtgtgacactgacaaaccagggttatgacgtcacgatttatgagaaagaagcgcaccccggtggctggttgcgtaacggtattccgcaattccggttaccgcaatcagtgctggatgcagagatcgcccgtattgaaaaaatgggcgtgaccattaagtgcaataacgaaatcggtaaaacactcaccctggagcaactgaaagcggaaaaccgcgcggtactggtcaccgtggggttatcaagcggttccgggctaccgctgtttgagcatagcgacgttgagattgccgtcgacttcctgcaacgtgtacgacaggcgcaaggcgatatcagcattccacaaagcgcattaattatcggcggcggtgatgtcgcgatggacgtagccagcacgctgaaagttctcggctgtcaggcggtaacttgcgtagcacgtgaagagttagatgagtttccggcaagcgaaaaagagtttgccagcgcccgggagctgggcgtttcgatcatcgatggattcacgccagtagccgtggaaggcaataaagtcacgtttaagcatgtacggttatcaggcgaactgacgatggcggcagataaaattattctcgccgtcggtcagcatgccagactggatgcctttgcggagttagagcagcagcgtaacaccatcaaaacacaaaattatcagacccgcgatccgcaagtctttgctgctggcgatattgttgagggtgacaaaaccgtggtctatgccgtgaaaaccgggaaagaagccgccgaggcgattcatcactatttagagggagcttgctcatgttaa

SEQ ID NO: 4540 - protein, 412 aa, Shigella flexneri
MPQQNYLDELTPAFTPLLAIKEASRCLLCHDAPCSQACPAQTDPGKFIRSIYFRNFKGAAETIRENNALGAVCARVCPTEKLCQSGCTRAGVDAPIDIGRLQRFVTDFEQQTGMEIYQPGTKTLGKVAIIGAGPAGLQASVTLTNQGYDVTIYEKEAHPGGWLRNGIPQFRLPQSVLDAEIARIEKMGVTIKCNNEIGKTLTLEQLKAENRAVLVTVGLSSGSGLPLFEHSDVEIAVDFLQRVRQAQGDISIPQSALIIGGGDVAMDVASTLKVLGCQAVTCVAREELDEFPASEKEFASARELGVSIIDGFTPVAVEGNKVTFKHVRLSGELTMAADKIILAVGQHARLDAFAELEQQRNTIKTQNYQTRDPQVFAAGDIVEGDKTVVYAVKTGKEAAEAIHHYLEGACSC

SEQ ID NO: 4541 - DNA, 1401 bp, Clostridium saccharobutylicum
  CDS (85)..(1329)
atttgtttttttaggataatattgaaaaataataataactaagttagtatactatatatatataaagaaatgaggaattttaagatgacatgtaacgacatacaattattagatgaagcagatagatgtttattgtgcaagaaaccaagatgtaaggaaaattgtccaatacaaacatctattccagagattatatctctttataaagaaaatagattaagagaagcaggagaaattttatttaataacaatccactttcagcagtttgttcactagtatgtattcatgaagatcaatgtaaaggtaactgtataaagggaattaaaggggaaccaataagatttcatgatatagaatatgagatatcaatgaagtatttagaagaggtgagatttgaaaatttaccaaaagataaagatagaatagcaataattggtggaggtccggcaggaataacaattgcattcatattagctaataaaggttatgatgttactatttttgatgcacacgtgaaaataggtggagtacttagatatggtataccagaatacagattgcctaaaaaaatactagatacaattgaagatagacttgttgaattaggaattaaaattagacctaatactcttattgggccagtaataactcttgatagattgtatgaggatggatataaggctatatttattgggactggagtatggaatcctaagactttgaatataaagggagaaactagaggaaatgcacattttgctatagattatttaaagtctccagaagcgtatagattaggagaaaaagttgcagttataggagctggaaatgttgcaatggatgcagcaagaagtgcaaagagaaatggtgctaaagaagtaactgtactttatagaaaaggctttgatgaaatgagtgcgaccaaacaagaaataatggaagctaaggaagatggagttatattcaatttattcaaatcacctattgaaataacagaaaaaggtattagattatcatctacagaaaatgtaacagatgaaaatggtaagatagtaactaaggttattgaaggaaaagaggaattttttgaatgtgattcaataataattgctgtaagccaaactcctaaaacaaatatagtatctaatacaaaagaacttaacactaataaatggggattaattattacagatgaaaaaggaaatacaactagaaaaggtacattcgcatctggagatgtagtcacaggagccaaaacagttgttgaagcagtagttcaagctaaaactgtagcaaatactatagaagaatattgtaaaaataattaagaatttgcgtaaattgaataaactaaaagttcgaaattaaagttttagttagagaaatattttacgagaaaa

SEQ ID NO: 4542 - protein, 414 aa, Clostridium saccharobutylicum
MTCNDIQLLDEADRCLLCKKPRCKENCPIQTSIPEIISLYKENRLREAGEILFNNNPLSAVCSLVCIHEDQCKGNCIKGIKGEPIRFHDIEYEISMKYLEEVRFENLPKDKDRIAIIGGGPAGITIAFILANKGYDVTIFDAHVKIGGVLRYGIPEYRLPKKILDTIEDRLVELGIKIRPNTLIGPVITLDRLYEDGYKAIFIGTGVWNPKTLNIKGETRGNAHFAIDYLKSPEAYRLGEKVAVIGAGNVAMDAARSAKRNGAKEVTVLYRKGFDEMSATKQEIMEAKEDGVIFNLFKSPIEITEKGIRLSSTENVTDENGKIVTKVIEGKEEFFECDSIIIAVSQTPKTNIVSNTKELNTNKWGLIITDEKGNTTRKGTFASGDVVTGAKTVVEAVVQAKTVANTIEEYCKNN

SEQ ID NO: 4543 - DNA, 1347 bp, Brevibacillus agri
  CDS (1)..(1347)
atgagcgtcccgaatgacctgcaaaaaaacttcagcgaagtggtgagcgccctcaagccgaaggaagcgatcgatgaagcgaatcgctgtctgtactgctacgacgcgccctgtatcaaggcttgtcccacctcgattgacattccttcgttcattcgcaaaatcgcgacaggcaatctgctcggctctgcgaggacgatcatggaatccaatccggttggggcaagctgcgcgcgcgtttgtccgacggaggagttgtgcgagggagcctgtgtgctcaatcacgcctccaaaccgatcatgatcgggctattgcaacgccatgcgacagactgggcgatccgcaacaacgcggccttgtttcaaaaaggcgatccgaacggcaagcgggtggcgattatcggagcggggccagccgggctgtcggcggcgcgagagcttgcccggctcggctacgaggtcacgatctacgaggcaaaagaaagagcgggcgggctgaacacatacggcatcgtgtctttccggctgccgcaggaaatatcgctctgggaggtcgagcaggtcgaggcgttgggcgtgacgatcaagacgaacacgcggatcggcgtcgacatcatgccagacgagctcgttgccaactacgattcggtgttgctggcggtggggatgagcagcgtgccttctttgcatattcccggggaagagctggaaggggtactggatgcgattgccttggtagaagatacgaaaacgaagccgcttaccacggacatggtcggcaaaaaagtggtcgtgatcggcgccggaaatacggcgattgacgccgcgacctgttcgaagcggctgggggcggacaatgtgcagattttgtaccgcagaacggtgcaggaaatgagctgctaccagttcgaatacgagttcgccaagcaggacggcgtggagtttcgctggctcgtggctccgacgcgcgttttggggaacaaagggcgcgtgacagggctggagctgatccggatggagctgggggagccggatgccaaaggccgaaaacgtccggtaccgatcccgggcagcgagtttttcatcgaggtggactttgtcgtcaaagcgattgggcaaaatcgccacctgtcgctgatcgaccagcttggcctgcagcatcaaaacggcatcgtcaccgtcgaggacggcacctaccggacgtcgcacccgaaagtgtttgccgcaggggacgtcatttttggcggaggaaaaacggacgcgatggtcgtcgacgcggccaatcacggaaagcgtgccgcttatgccatcgacaaggcgatccgcgaccagaagcagcttgtctag

SEQ ID NO: 4544 - protein, 448 aa, Brevibacillus agri
MSVPNDLQKNFSEVVSALKPKEAIDEANRCLYCYDAPCIKACPTSIDIPSFIRKIATGNLLGSARTIMESNPVGASCARVCPTEELCEGACVLNHASKPIMIGLLQRHATDWAIRNNAALFQKGDPNGKRVAIIGAGPAGLSAARELARLGYEVTIYEAKERAGGLNTYGIVSFRLPQEISLWEVEQVEALGVTIKTNTRIGVDIMPDELVANYDSVLLAVGMSSVPSLHIPGEELEGVLDAIALVEDTKTKPLTTDMVGKKVVVIGAGNTAIDAATCSKRLGADNVQILYRRTVQEMSCYQFEYEFAKQDGVEFRWLVAPTRVLGNKGRVTGLELIRMELGEPDAKGRKRPVPIPGSEFFIEVDFVVKAIGQNRHLSLIDQLGLQHQNGIVTVEDGTYRTSHPKVFAAGDVIFGGGKTDAMVVDAANHGKRAAYAIDKAIRDQKQLV

SEQ ID NO: 4545 - DNA, 3073 bp, Drosophila melanogaster
  CDS (966)..(2894)
acggtctggatctggattttgtttggatgaaccttccgcagtgtgattgttcaggctgatggacagctccgcacaggattcgatgtggttgtggctgcactgctgggtgctgatgagtttggtttcagtactgctccattgatcgtcatgggctgcactatgatgcgcaagtgtcacttgaacacctgtcccgtgggcattgccacccaggatccggagctgcgcaagaagttcacgggtaaaccagagcatgttatcaacttcttcttcatgctggccgaggatattcgcaaaattatggctggattgggcattcgaaagttccaggatctgattggtcgcaccgatttattgcgcgtggccagtcaacgcgatgccaaggctagtaacctggacctcaagttgctcctgcagccagctttggaactgcgtcccggcacgaacatcgttggaggttccgtaaagcaggacttccagctggagaagcgttccgacaacgaactaattgccaaggctcagcaaatattcagtggagcagacgataatgtaaccgtcaagatgcgcatccacaatgaggagcgagcctttggttctactctgagctatcatattgcatgcaaatatggagaggctggcttgcccgctggcaagagcatcgacatcttcctggagggttccgctggtcagagcttctgcgcgttcctggcgcggggtgttaatgtgacattgaagggcgatgccaacgattatgtgggcaagggtctttgcggtggtaatgttgtcatcatgccacaagatacggttcccttcgaatcacatctcaatgttatcgtgggcaacgtttgcttgtatggagccactgagggaactgccttttccgcggtattgcctccgaacgcttctgcgtacgaaactctggtgtaaccgccgttgttgaaggtgtgggcgatcacggatgtgaatacatgactggcggtgtagtggttatcctcggtcttacgggacgaaacttcgccgctggcatgtccggcggtattgcttatgtgtacgatttagatggttcctttaagcccaaggtaaacccggaaagtgtggaactcctgccgttggaaattgagaaggatgtgctgctcgtcaaggaactgttggctgatttcattgagaagacaggctcgaaggtggccaaggagttgcttgacaactgggccgaagcccagggcaagtttgtcaaggtcttcccgtatgaataccaaaaggctctaaaggacatggccgaacaacaagcagtggagcagcccctgaagtccgccatcgagaatggaaacggaaagcatgaaccgcacatcaaggacattgaggaagcgattcaggacgtggtgctcgagcagaagcgtgccgatcgcgtcctggacaagacccgtggctttgtaaagtacaagagggaatcggctccgtaccgagatgctggagagcgacagaaggattgggatgaagtctacaacttcccacatgtgcgcaagaacctcaaggttcaagcagctcgatgcatggaatgcggtgtgcccttctgtcagtccaactccacgggctgtccgctcggtaacatcattcccaagtggaacgacctcgttttccacggcgagtggcaggaggctctgcgtcaactgctgcagaccaacaacttcccggagttcactggtcgagtatgcccctctccctgcgagggttcctgcgttttgggcatctccgagccagctgtaacgatcaagaacatcgaatgcgccatcatcgatcatgccttcgagcagggctggattaagccagagattccggaagtgcgcactggcaaacgagttgcgattgtgggatcaggaccttccggcttggccgcctcgcagcagctgaaccgcgccggtcactttgtcaccgtttttgagcgcaacgatcgcgttggtggacttttgcagtatggtattcccacgatgaagctttccaaggaggtggtcaagcggcgggtagatctgatggctgacgagggtatcgagttccgcaccaatgtccatgtgggcaaggacctcaaggccgagcaactgctgcaggagtatgatgccgtcctcctcaccactggctccacctggccacgtgacttgccgctcgccaaccgtgacctgaagggcattcactttgccatggaattcctggaggcgcagcagaagaagcagctgggcggaaagaatgatataatatctgccgctggcaagaatgtgatcatcatcggcggtggcgataccggatgcgattgcattgccacgtcgttgcgtcaaggcgccaagagtatcactacattcgagatccttccggaaccgccacagaagcgtgctcaggacaacccctggcctcagtggccgaaggtcttccgcgtggactacggtcacgaggaggtgaagctgaagtggggcaaagatccgcgccagtactgcaccaccaccaaggagttcgtgggcgaaaatggagccatcaagggcgtgaacaccgtcgaggttgagtggaccaagacggaaacgggccagtggcgcatgcaggaggtggccggttcggagaagtacttccccgcagaccttattctcctggccatgggcttcctgggtccggagaagacggtgccgagcgaactgggcctggagctggacccgcgcggcaacatcaaggcatccaacggacagtatggcacctcgaactccaaggtctttgcggcaggagattgccggcgtggccagtcgctggtcgtctgggccattaccgagggtcgccaggccgcacgacaggtcgattcctatctgaccggccgtcccagtgggcttccaggacctggtggcgtcatcgcgacatcctaaagaggatccacagaggcagccagagcagctaatatcaagttttgtgtgcgtgcatcgtccttagcctatagtgcgaaattctttaacgatttgtgatttttattttcgcgattttagtttagtttacactaaaaagacttgagttttttacacaccaaaccaaaaaaaaaaaaaaaaaa

SEQ ID NO: 4546 - protein, 642 aa, Drosophila melanogaster
MTGGVVVILGLTGRNFAAGMSGGIAYVYDLDGSFKPKVNPESVELLPLEIEKDVLLVKELLADFIEKTGSKVAKELLDNWAEAQGKFVKVFPYEYQKALKDMAEQQAVEQPLKSAIENGNGKHEPHIKDIEEAIQDVVLEQKRADRVLDKTRGFVKYKRESAPYRDAGERQKDWDEVYNFPHVRKNLKVQAARCMECGVPFCQSNSTGCPLGNIIPKWNDLVFHGEWQEALRQLLQTNNFPEFTGRVCPSPCEGSCVLGISEPAVTIKNIECAIIDHAFEQGWIKPEIPEVRTGKRVAIVGSGPSGLAASQQLNRAGHFVTVFERNDRVGGLLQYGIPTMKLSKEVVKRRVDLMADEGIEFRTNVHVGKDLKAEQLLQEYDAVLLTTGSTWPRDLPLANRDLKGIHFAMEFLEAQQKKQLGGKNDIISAAGKNVIIIGGGDTGCDCIATSLRQGAKSITTFEILPEPPQKRAQDNPWPQWPKVFRVDYGHEEVKLKWGKDPRQYCTTTKEFVGENGAIKGVNTVEVEWTKTETGQWRMQEVAGSEKYFPADLILLAMGFLGPEKTVPSELGLELDPRGNIKASNGQYGTSNSKVFAAGDCRRGQSLVVWAITEGRQAARQVDSYLTGRPSGLPGPGGVIATS

SEQ ID NO: 4547 - DNA, 1485 bp, Xylella fastidiosa
  CDS (1)..(1485)
atgagtcgcaagcacgctttccaatttcttgatttgcctcggcagatgccgcaacgcatcccggtggagctgcgtacttccggggattggcgggagttatacggtaagttcgataagggtgaagcgcagtaccaagccggtcgctgtttggactgtggtaatccatattgcagttggaagtgtccggtgcataacgccatcccgcagtggttgcagttagtgcaggaaaatcgcattgatgaggccgcagcgttgtgccatgcaaccaacccgcttcctgaagtgtgcggcagggtgtgtccgcaggaccgtctctgtgaaggcagttgcacgctggaggagtttggtgcggtcactatcggtgcggtggaaaagtacattgtggataccgcgttgcagcaggggtggcgtcccgatttgagccatgtgcaaccgacgggttggcgtgtggcggtggtcggtgcagggcctgccggccttgcctgtgcggatcgtttggcgcgtgctggggtccaggcggtggtgtatgaccgctatgagcagatcggcgggttgctgcagttcgggattcccagttttaagcttgataaggcggtgatgagtacgcgccgccaagtgcttgagggcatgggcgtagagtttcgattgggtgtggagattggaaaggatctggggattgaagcgttgttggaggactacgatgctgtgttccttggcgtcggtgcgtatcgctacacggacggtggcttgccgggtcaggacttgaaaaacgtgttgccggcattaccgtttttggttcagaacggacgtatcatttctggcaatgatccgtatggccgtccgattgccggttgggaggatcaggtgcagttgccggatgtggcggggaagtctgtggttgtactcggtggcggtgataccggcatggattgtgtacggagtgcgatccgtttaggtgccaccaaagtcacctgtatctatcggcgtgatgaggcgaatatgcctggctcggcgcgtgaggttgctaacgcgcgggaagagggggtgcgctttctgtttaatcgtcagccattgtcgattcaatccggtaccgacaaacaagccattggtgtcactgtggtggaaacgaagcttgctgagccggatgccaatggtcgtcgcaacgcagtgcctatccagggtactgaagcggtgctggaagcggatgtggtgattattgcttttggtttttcgccgatgttgctggagtggttaactgcgcagggtgtacaagcgtcgagcaacggccgcattgtggtggcgttgtctgatactggcgatagactgacctatcagacaacgcatccgaagttgtttgctggtggtgattgtgtgcgtggtgccgatttggttgtcactgccgtggccgaggggcgcgacgcggctgagagcattgtgcggtggttgcgtgcgactgcacaggtgatggatgttgcggtgatctga

SEQ ID NO: 4548 - protein, 494 aa, Xylella fastidiosa
MSRKHAFQFLDLPRQMPQRIPVELRTSGDWRELYGKFDKGEAQYQAGRCLDCGNPYCSWKCPVHNAIPQWLQLVQENRIDEAAALCHATNPLPEVCGRVCPQDRLCEGSCTLEEFGAVTIGAVEKYIVDTALQQGWRPDLSHVQPTGWRVAVVGAGPAGLACADRLARAGVQAVVYDRYEQIGGLLQFGIPSFKLDKAVMSTRRQVLEGMGVEFRLGVEIGKDLGIEALLEDYDAVFLGVGAYRYTDGGLPGQDLKNVLPALPFLVQNGRIISGNDPYGRPIAGWEDQVQLPDVAGKSVVVLGGGDTGMDCVRSAIRLGATKVTCIYRRDEANMPGSAREVANAREEGVRFLFNRQPLSIQSGTDKQAIGVTVVETKLAEPDANGRRNAVPIQGTEAVLEADVVIIAFGFSPMLLEWLTAQGVQASSNGRIVVALSDTGDRLTYQTTHPKLFAGGDCVRGADLVVTAVAEGRDAAESIVRWLRATAQVMDVAVI

SEQ ID NO: 4549 - DNA, 4269 bp, Vibrio parahaemolyticus
  CDS (1)..(4269)
atgatagaaattgtcatcgatggaaaatatagaattgtagaagaggggctaacccttctggaagcagccaaagtgtgtggggtcgaaatcccttcactgtgcggaatgaacaaaagtaacgagaaaattccgtgtgatttgtgtgttgtcgaagtggagagtggcggaactaagcgcgcctgcgatctcaaagtgtaccgcggtctcaatgtcgtcacacaatcagaacaactgagtgagcaccgcagaaaagcgctcaaccgaatcatgacggaccactacgccgactgtgaagctccatgcaaaacggcgtgtcctgctggagtagacatccaatcttacctctaccatatctcgcaaaatgatcatcaaaaagcgattgaagttattaaacgcacactgccaatgccgttgtcgattgggcgcgtgtgtccggcattctgcgaaagtgagtgtcgccgctctttggtggatgagccgattgccattcgccaactcaaacgccatgccgcagacgcagatttagcggcgcatgaagcgtatgtcccagagaaaaaaccagcgaagcatcgcaagatcgccgttgttggtagtggccccggtggcttaacggcaggttattacttgtcgaatgaaggttatgacgttaccatatttgagtccatgccaaaagcaggcggttggctacgctacggtattcctgaatatcgcctacccaaagacattctagacaaagaaatcgaactgatgtgccgcaacggtatgcaagttgaaaccaacaaaaagcttggtgttgatttcacgctgtcgcaattgagtgaagactacgatgctgtctgtttggccgtgggggcgtctcaagcggtagaaatgaattatcctggtagcgacttggacggttgttatctcggtgttgattacctgaaagattacgttacagaacaaaactacgttacgggcaaaaaagttgccgtgattggtggtggtaacactgcgatcgactgtgcgcgtacggcgcgtcgtgcgggtgccgataccactttgatctatcgtcgaactcgcgacgaaatgccggccgaagactacgaaatcgtcgaagctgaacatgagggcgtgacgttccatttcttaacgaatccggcggaaaacatcgcggatgaaaacggccgcgtgaaggcaattcgattagaacgaatggcgttaggtgagccagatgcgtctggtcgtcgtagcccgaaaccaacgggtgagttctttactgaagcatttgataccgtgattgcagcggtatcgcaaaagccggatctcagcttcttagaaaacgatgatttgtctattccactaacacgttggaacacatctgagtccgactcgcaaaccatgcacacgggtacgggcaatatcttcagtatcggtgattttcgtcgtggtcctgcgactgcggttgaagcagtgggggatgggcgagttgcggcaaaagcgattgatctgttcctcaatggcgatatggcggatatgccgaaacctgcgttcaactctcgtaaagagaaaaaactggcgcaggttgacccacttcatttcgaaaacatccaaaaagttgctcgttcaatcatgccggagttgactccagcgcagcgtgagcagagttttgctgaagtggaactgggctttgataacgaagaggccatgaaagaagcggcgcgctgcttagagtgtggttgccaagcgaataccgactgtgccttgcgagattactcaacggaatatcatgccgagcaacatttcgatgtttccgtggacgtttcctctgctagcgtgattggccatcaagattggctcgatttacgtgcgaaagatcttcgtcataaatacgaagtagaccgcagttctgagttcattgaatttgatgctaaccgctgcatcagttgtggtcagtgtattcaagcatgccgcgagcaagcggtacatggtgtgttgagttttgtgtcggataaaaatggccgaccagctttacgcccagatgatcgcccacgattccgctccgatgaaaaaggcgtaggttgcagcggtttgacgctcatgggcgattcaaaatgcgtgcaatgtggggtgtgtgttcaggcatgtccaacgggcgcgatggtggacagccgtgaccgctctcaaggcagaaccgaacagctaaaagccgtcgataccatttgtacctattgtggtgtgggttgtaagttgaccatgtttgtcgatgagcgacaaaacaaaatccgctatgtaaaaggggcggattcgccggttaaccaaggtatgctgtgcgtgaaaggccgttttggttttgacttcattagcagcgaagagcgtttaacgacaccactgattcgtaaagatggttggttgcagccagcaacttgggacgaagcgattcagctagtggcttcgaagctttcgaccatcaagcaagattttggtagcaacgcactggccggattctcttcagcgaaaaccactaacgaagataactacgcgtttcaaaaattcatccgtcgtgaactgggtacgaacaacgttgatcactgcgcacgtttgtgtcacgcatcaagtgtgacagggcttgaagcatcgttggggagtggtgcgatgaccaacgacattccaagcattaagcattccgatgtgatctttattatcggttctgacaccacatctgcgcacccgatcatcgcttcgcacatcaaacaggcgatccgtcatcacggggcgcgcttgattgtggcagacccgaaacgagtagacatggccgaacatgcagagctgtacttggcgcatcgtccgggtacggatgttatgttgctcaatggcgtgatgcagcaaatcatcaaaaatggttggtacgatcaagaatacatcgaagagcgcgtagacggctttgataccttgcttcaagaggtgatgtcgccagcgtacaacctcgacaaagttgagttagtgacgggcgtaaaagcggacgatattttcgcgatggcgcgaatgattggtacggcaaaacgcacggcggtgtattactcaatgggtattacccagcatacaacagggcacgacaacgttcgttcgattgcaaacctgcaattgttgtgtggcaacatcggtattgagggtggtggtattaacccactgcgcggtcaatcaaacgtacaaggtgcgtgtgatatgggcgcattgccgaactgttatccgggataccaaaaagtgtataacccgattgttcgtcagaaattcgcgattgagtgggatgcgccgaacttaccttctgagcaagggcttaccctaacggaaatcatcgatgcggcgtgcaaacgagaagttcgcgggatgtacatcatgggcgaaaacccagtactgagcgatccaaaccaagcacacgtgattgaagggttggaagcactcgacttcttggtcgtgcaagacatcttcctcaccgagacggcgcagtacgccgatgtggtattgccttcttgttcatttgcggaaaaatccggtcacttcaccaatactgagcgacgcgtgcagcgcgttaatgcggcagtgaaagcgccgggtgaggcgaaagaagattggtggatcattcaagcgatcgcaaacgcgatgggcagcgattggcattaccagtgcgtttctgaaatcactagcgagatcgcgcgtgtaacgccgcaatatgcagggttgcgttgggacgcgatcacgccgaacggtgttcaatggccaagtaacaagaacaatccaaacggtactcgtattatgcaccaaacccaatttacccgagggaaagggcaaatggtgggcgtgccgttccgttatgcagccgagttacctgatgaagagtatcctttggtgcttacaacagggcgtgtgctagaacagttccacaccggtacgatgacgcgcaaaacgaaagggttggataaccttgctgggccaagagcgatgatcagtgttgaagatgctgaagcaattggtatccataatggtcagcgcctaaaagtctcgactcgtcgtggcaacatcgaaattgatgcgtttgtgaccaagcgaatgcaaaaaggcgtcgtgtttattcctttccatttcgttgagtcgccagtcaaccgcttgacgactacggcaacggacccgcatgcgaaaattcctgaattcaaagtcgcagcggttaagattgaaatcagtgaaacggccgctcaaccagagcctgtcgaggaggcggtacaccacgtctaa

SEQ ID NO: 4550 - protein, 1422 aa, Vibrio parahaemolyticus
MIEIVIDGKYRIVEEGLTLLEAAKVCGVEIPSLCGMNKSNEKIPCDLCVVEVESGGTKRACDLKVYRGLNVVTQSEQLSEHRRKALNRIMTDHYADCEAPCKTACPAGVDIQSYLYHISQNDHQKAIEVIKRTLPMPLSIGRVCPAFCESECRRSLVDEPIAIRQLKRHAADADLAAHEAYVPEKKPAKHRKIAVVGSGPGGLTAGYYLSNEGYDVTIFESMPKAGGWLRYGIPEYRLPKDILDKEIELMCRNGMQVETNKKLGVDFTLSQLSEDYDAVCLAVGASQAVEMNYPGSDLDGCYLGVDYLKDYVTEQNYVTGKKVAVIGGGNTAIDCARTARRAGADTTLIYRRTRDEMPAEDYEIVEAEHEGVTFHFLTNPAENIADENGRVKAIRLERMALGEPDASGRRSPKPTGEFFTEAFDTVIAAVSQKPDLSFLENDDLSIPLTRWNTSESDSQTMHTGTGNIFSIGDFRRGPATAVEAVGDGRVAAKAIDLFLNGDMADMPKPAFNSRKEKKLAQVDPLHFENIQKVARSIMPELTPAQREQSFAEVELGFDNEEAMKEAARCLECGCQANTDCALRDYSTEYHAEQHFDVSVDVSSASVIGHQDWLDLRAKDLRHKYEVDRSSEFIEFDANRCISCGQCIQACREQAVHGVLSFVSDKNGRPALRPDDRPRFRSDEKGVGCSGLTLMGDSKCVQCGVCVQACPTGAMVDSRDRSQGRTEQLKAVDTICTYCGVGCKLTMFVDERQNKIRYVKGADSPVNQGMLCVKGRFGFDFISSEERLTTPLIRKDGWLQPATWDEAIQLVASKLSTIKQDFGSNALAGFSSAKTTNEDNYAFQKFIRRELGTNNVDHCARLCHASSVTGLEASLGSGAMTNDIPSIKHSDVIFIIGSDTTSAHPIIASHIKQAIRHHGARLIVADPKRVDMAEHAELYLAHRPGTDVMLLNGVMQQIIKNGWYDQEYIEERVDGFDTLLQEVMSPAYNLDKVELVTGVKADDIFAMARMIGTAKRTAVYYSMGITQHTTGHDNVRSIANLQLLCGNIGIEGGGINPLRGQSNVQGACDMGALPNCYPGYQKVYNPIVRQKFAIEWDAPNLPSEQGLTLTEIIDAACKREVRGMYIMGENPVLSDPNQAHVIEGLEALDFLVVQDIFLTETAQYADVVLPSCSFAEKSGHFTNTERRVQRVNAAVKAPGEAKEDWWIIQAIANAMGSDWHYQCVSEITSEIARVTPQYAGLRWDAITPNGVQWPSNKNNPNGTRIMHQTQFTRGKGQMVGVPFRYAAELPDEEYPLVLTTGRVLEQFHTGTMTRKTKGLDNLAGPRAMISVEDAEAIGIHNGQRLKVSTRRGNIEIDAFVTKRMQKGVVFIPFHFVESPVNRLTTTATDPHAKIPEFKVAAVKIEISETAAQPEPVEEAVHHV

SEQ ID NO: 4551 - DNA, 1797 bp, Vibrio parahaemolyticus
  CDS (1)..(1797)
atgaacaatgtaatttttagccaaaagctatacgacaccgcgcaaatgattgtcgatggctgtatgggtgatgccgatccggcatgtcaaaccgcatgtccaatgcacacagacgtaaagcaatacgttcgcatggcgggtgaaggtaattttcaaggtgctctggatctgatccgcagcaaattatttcttcctcaaacgcttggccgcatctgtgcccacccttgtgaagcgtcttgtcgtcgtaacacagagttcggtcaaccaatcagcgttgcaggtatcaaacgtttcgtcgcagagaaaatggataaccaagatcactgggatctcaacattgcgcccctgaccaacaagcacatcgcgatcgtgggtgcaggccctgctggtgcgcaagcggctattgagcttcgtcgtcaaggccacgaagtaacgatttatgaaaagctagacgtatacggcggcatgatgcgtgtgggtatccctgaataccgtttaccgcgcgacgttatcgacttcgaatacagctacttggcgatgctgggtatcaaaactcagttcggcgttgagatcggcaaagacattagcttcgacactctacgtagcgaacatgatgctgtgattctggctcacggtgcacacgtcggttcgatcatccctctgccgggtcatgacaacgatggcgtgttttctgcggttgaatacctaaaagagatttctgaaactcgccaatttccacgtgcatgtaaacgagtgatggttatcggcggtggtgacgttgctatggactgtgcgcgctcttcatggcgtatcggtgcaagcgacgtttaccaatgttcacttgagagccttgaaagcctacctgcaagccaaatcgaaatcgacgagtcgctagaagaaggtgttgagttcaacgcaggttggggcccagtagctattgaacatgagaacggcaaagtaaccggcatcactatcaagaaagtcctgtctatctttgatgagcaaggcaactttgcacctcagtacagcgaagaaagtaaaaccatctctgtggataccgttgttttcgctacgggtcaaatcgtggcagatattactgacggtgcactagagcaaactcgcggtggtcgttacgtggtcgataaacaaacactagcatcgagcctagaagacgtctttgtagccggtgacgcgtgtggcggtaacatcgtaattgaagcgatggcattaggtcgcaaagcagcaatgagcgttgagcgtttcctaacagctcgcccactgactgaagatcgcgacttcgagcaagaatacagctactcatctcgtctagacgtaccactaccaaaaggtacggtagatacccctcgcctacacggtgaattgcgtgatgcagaagagcgtaaacaagactttgcacaagtggatttaggctttactgaagaacaaatcaaacaagaagcatctcgctgtctgcaatgtagctgcaagctatgtatgaccgagtgcatcatgatgaacgacttcagtgactgtccaaagaccatcttctctgacttcgtgaacaacaagtcgatggatccattgctggcttactcatgtaacgcctgtgaccagtgcaccatcgtgtgtccgaaagacttcccgatgaaggaaatgttcctaggcgcacgtactgactttgttaaggcaaacaatggtgaatcaccaatgccgggtcataaagcgatcaatatgcaccagaaactgggcttctcaaaaatcttcactatggcaaaacgagcggtatcgacaaaatga

SEQ ID NO: 4552 - protein, 598 aa, Vibrio parahaemolyticus
MNNVIFSQKLYDTAQMIVDGCMGDADPACQTACPMHTDVKQYVRMAGEGNFQGALDLIRSKLFLPQTLGRICAHPCEASCRRNTEFGQPISVAGIKRFVAEKMDNQDHWDLNIAPLTNKHIAIVGAGPAGAQAAIELRRQGHEVTIYEKLDVYGGMMRVGIPEYRLPRDVIDFEYSYLAMLGIKTQFGVEIGKDISFDTLRSEHDAVILAHGAHVGSIIPLPGHDNDGVFSAVEYLKEISETRQFPRACKRVMVIGGGDVAMDCARSSWRIGASDVYQCSLESLESLPASQIEIDESLEEGVEFNAGWGPVAIEHENGKVTGITIKKVLSIFDEQGNFAPQYSEESKTISVDTVVFATGQIVADITDGALEQTRGGRYVVDKQTLASSLEDVFVAGDACGGNIVIEAMALGRKAAMSVERFLTARPLTEDRDFEQEYSYSSRLDVPLPKGTVDTPRLHGELRDAEERKQDFAQVDLGFTEEQIKQEASRCLQCSCKLCMTECIMMNDFSDCPKTIFSDFVNNKSMDPLLAYSCNACDQCTIVCPKDFPMKEMFLGARTDFVKANNGESPMPGHKAINMHQKLGFSKIFTMAKRAVSTK

SEQ ID NO: 4553 - DNA, 1470 bp, Vibrio parahaemolyticus
  CDS (1)..(1470)
atgggtaagcctactggatttttagagcatggtcgtgaactaccacagaagatcgacccagctgaacgtatcaagaacaacaaagagttcgttctgaacgaggagtttggtagcaaaatcaatactcaggcttctcgttgtatggattgtggtgtgccgttttgtcataacggctgccctatcggcaacatcatcccagaatttaacgatgcggtttatcgtgatagctgggaagaagcatggaacattctaagttcaaccaacaacttcccggagtttactggtcgagtttgtcccgctccttgtgaaagtgcatgtgtgcttggcattaaccaagacccaatcactatctgtaatatcgagaaaaccatcgtggaaacggcgtatcgtgaaggatacgccaaaccaaaaactccgcgttctcgcactggtaaaaccgtcgctattattggttctggccctgcgggtcttgcggctgccgagcagctaaacagcgcaggccataccgtgaccgtattcgagcgtgacgagaaagtgggtggtctgctgcgtttcggtattccagatttcaaactgagcatggaagtcattgatcgtaagatcaatctaatggcagaagctggcgttgagtttagagtaaatcaacacgttggtgtcgatgtaaacgcgcaacaactacgtcaagagtacgatgtggtactgctgactggtggctcaaccgttcctcgcgatcttcctgttccgggacgcgatctaaaaggcgtgtactttgcaatgcagttcctaggacaaaacaatcgccgagcaaacaacatggatctaaaaggtgaagaaattcacgcagcaggaaaacatgttgtcgtaatcggtggtggtgataccggttcagactgtgtgggtacatcaaaccgtcacggcgcagcaagcataactcaagttgaaatcatgccgattccaccagagaagcgcccagccaatatgccatggccacagtacccgatgatcctacgcacttcgacttctcatgaagaaggtgtcgatcgtcactggaacatcttgaccaaagagttcatcggtaacgacaaaggtgaagttacaggtcttcgtcttgcagatatcgtttgggaagatgcgaaaccaggcgagcgcccaagctttaaagaagtagaaggcagcgaacgcgtgatcccatgtgacatggctttccttgcgatgggcttcctgcacccagaaccaactggcgtgcttgctcaactggatatcgcactcgatgatcgcggcaacgttgcaacgcaaggtttcgcgacgaatcaagaaggcgtattcgccgcaggtgatatgcgtacaggccaatctttggtggttcgttgtatcaacgaaggtcgcgaatgtgctcgtgctattgatgaatacctgatgggtggcactaaccttgaagcaaaagcaaattcgctaatgctttcagcataa

SEQ ID NO: 4554 - protein, 489 aa, Vibrio parahaemolyticus
MGKPTGFLEHGRELPQKIDPAERIKNNKEFVLNEEFGSKINTQASRCMDCGVPFCHNGCPIGNIIPEFNDAVYRDSWEEAWNILSSTNNFPEFTGRVCPAPCESACVLGINQDPITICNIEKTIVETAYREGYAKPKTPRSRTGKTVAIIGSGPAGLAAAEQLNSAGHTVTVFERDEKVGGLLRFGIPDFKLSMEVIDRKINLMAEAGVEFRVNQHVGVDVNAQQLRQEYDVVLLTGGSTVPRDLPVPGRDLKGVYFAMQFLGQNNRRANNMDLKGEEIHAAGKHVVVIGGGDTGSDCVGTSNRHGAASITQVEIMPIPPEKRPANMPWPQYPMILRTSTSHEEGVDRHWNILTKEFIGNDKGEVTGLRLADIVWEDAKPGERPSFKEVEGSERVIPCDMAFLAMGFLHPEPTGVLAQLDIALDDRGNVATQGFATNQEGVFAAGDMRTGQSLVVRCINEGRECARAIDEYLMGGTNLEAKANSLMLSA

SEQ ID NO: 4555 - DNA, 1413 bp, Vibrio parahaemolyticus
  CDS (1)..(1413)
atgagtcagaacgtttaccaatttatcgatgttcaacgcgtagatccggcgaaaaaaccaattaagattcgtaagattgagtttgttgaaatttacgagccgttcacgaaacaacaagcaacagcgcaggccgatcgctgtttggattgcggtaacccatattgtgaatggaagtgccccgtccataactacattccccagtggctaaaactggcgaatgaaggccgaattttagaagccgtggaactttcacaccaaaccaacagcttgcctgaagtgtgtggccgtgtgtgtccgcaagaccgtttgtgtgagggttcgtgcacactaaatgatgattttggtgcagtcacgataggtaacattgaaaagtacatcaccgacaaagcctttgaaatgggctggaagcctgacatgtccaaagtggagtggacaaataaaaaggtggcaatcatcggcgctggccctgctggtttggcagcagcagacattttagttcgcaacggtgtaaaacctgtggtgtttgaccgttacccagagattggtggcctacttacctttggtattccttctttcaaattggaaaaaggggtcatggaaaatcgtcgtcgggtatttaccgaaatgggcgttgagttccgcatgaatgtggaagtcggccaagatgtgcagatgcaagaactgcttgatgaatacgatgcggttttcttaggtgtgggcacatacaaatacatgcgcgccggtttggaaaatgaagacgcgccgggcgtttatgacgccctaccatttttgatttccaatacctataaggttatggagctagaacataaccaaccgtttatcgatatggctggcaaaaaagtcgtagtgcttggtggtggtgataccgcgatggactgcgtacgaacttcgatccgtcaaggcgcatctaacgtgatttgtgcctaccgtcgtgatgaagaaaacatgccaggctcccgtcgagaagtgaaaaatgccaaagaagagggcgtgaagttcatgtttaaccttcagcctttaggtattgaggttgatgcgtatggcaaagtttcaggcgtgaaagtggtcaaaactgctttaggcgagcctgatgacgcaggtcgccgtcgcccagaacccgtagaaggaagtgaacacgtactgcctgccgatgctgtcatcatggcatttggtttccaacctcatcaaatggactggctgactccgttcaatgttgaacttgatcaatgggggcgaatcaaagcacccaacaaccaagagtttcaatatcaaaccagcaatgaaaagatcttcgctgggggagacgcggttcgcggttctgatttagtggtaaccgccattgatgaaggacgaaaagcagcagaaggtattcttgattacttagacgtgtag

SEQ ID NO: 4556 - protein, 470 aa, Vibrio parahaemolyticus
MSQNVYQFIDVQRVDPAKKPIKIRKIEFVEIYEPFTKQQATAQADRCLDCGNPYCEWKCPVHNYIPQWLKLANEGRILEAVELSHQTNSLPEVCGRVCPQDRLCEGSCTLNDDFGAVTIGNIEKYITDKAFEMGWKPDMSKVEWTNKKVAIIGAGPAGLAAADILVRNGVKPVVFDRYPEIGGLLTFGIPSFKLEKGVMENRRRVFTEMGVEFRMNVEVGQDVQMQELLDEYDAVFLGVGTYKYMRAGLENEDAPGVYDALPFLISNTYKVMELEHNQPFIDMAGKKVVVLGGGDTAMDCVRTSIRQGASNVICAYRRDEENMPGSRREVKNAKEEGVKFMFNLQPLGIEVDAYGKVSGVKVVKTALGEPDDAGRRRPEPVEGSEHVLPADAVIMAFGFQPHQMDWLTPFNVELDQWGRIKAPNNQEFQYQTSNEKIFAGGDAVRGSDLVVTAIDEGRKAAEGILDYLDV

SEQ ID NO: 4557 - DNA, 1419 bp, Pseudomonas syringae
  CDS (1)..(1419)
atggctgaacgtctcagtaacgacttccagttcatcgacgtcgggcgtaaagacccgaagaagaaactgctgcgtcaacgcaagaaagagttcgtggaaatctacgaacccttcaaaccccagcagtccgccgatcaggcgcaccgctgcctgggttgcggcaacccgtattgcgagtggaagtgcccggtgcacaacttcattcccaactggctcaagctggttgccgagggcaatattctcgcggcggcggagttgtcccaccagaccaacaccctgccggaagtctgcggccgcgtgtgcccccaggatcgcctgtgtgaaggtgcctgcacgctgaacgacggctttggtgcggtcaccatcggctcggtcgagaagtacatcaccgacaccgcgttcgccatgggctggcgtccggacatgtccagggtcataccgaccggcaagcgcgtcgccatcattggcgcagggcctgcgggccttggctgtgccgacgtgctggtgcgtggcggcgtgaccccggtggtgttcgacaagaaccctgaaatcggcggtctgctgaccttcggcatccccgaattcaagctggaaaaatccgtgctcagccatcggcgtgaagtgttcaccggcatggggatcgagttccggctcaacaccgaagtcggcaaggacgtgaccatcgaccagttgctcgaagagtacgatgcggtgttcatgggcatgggcacctacacctacatgaaaggcggttttgccggtgaagacctgccgggcgtgcacgatgcgctcgacttcctgattgccaacgtcaaccgtaacctgggcttcgaaaaggcgccggaagactttgtcgacatgaaaggcaagcgcgttgtcgtgctgggcggcggcgacacggcgatggactgcaaccgtacttcgatccgtcagggcgccaaatcggtcacctgcgcctaccgtcgcgacgaagaaaacatgccgggttcacgcaaggaagtgaagaacgccaaggaagagggcgtgcgcttcctctacaaccgccaacccatcgccattgtcggcgaaggcaaggtcgaaggcgtcaaggtggtcgaaacgcgtcttggcgaacccgacgcccgtggccgtcgcagccccgagccgattccgggttctgaagagatcatcccggcagacgccgtggtcatcgcctttggcttccgcccaagcccggcaccgtggttcgagcagttcacgatcagcaccgacagtcagggccgcgtcgtcgccccggagcaggcgcagtacaagcaccagaccagcaatccgaaaatctttgccggtggtgacatggttcgcggctccgacctggtggtcactgcgatcttcgaaggccgcaatgcggctgaagggatcatggattacctcggcgtctag

SEQ ID NO: 4558 - protein, 472 aa, Pseudomonas syringae
MAERLSNDFQFIDVGRKDPKKKLLRQRKKEFVEIYEPFKPQQSADQAHRCLGCGNPYCEWKCPVHNFIPNWLKLVAEGNILAAAELSHQTNTLPEVCGRVCPQDRLCEGACTLNDGFGAVTIGSVEKYITDTAFAMGWRPDMSRVIPTGKRVAIIGAGPAGLGCADVLVRGGVTPVVFDKNPEIGGLLTFGIPEFKLEKSVLSHRREVFTGMGIEFRLNTEVGKDVTIDQLLEEYDAVFMGMGTYTYMKGGFAGEDLPGVHDALDFLIANVNRNLGFEKAPEDFVDMKGKRVVVLGGGDTAMDCNRTSIRQGAKSVTCAYRRDEENMPGSRKEVKNAKEEGVRFLYNRQPIAIVGEGKVEGVKVVETRLGEPDARGRRSPEPIPGSEEIIPADAVVIAFGFRPSPAPWFEQFTISTDSQGRVVAPEQAQYKHQTSNPKIFAGGDMVRGSDLVVTAIFEGRNAAEGIMDYLGV

SEQ ID NO: 4559 - DNA, 1419 bp, Pseudomonas putida
  CDS (1)..(1419)
atggctgaacgtctgaacaacgacttccagttcatcgaagtgggccgaaaggacccgaaaaaaaagctgctgcgccagcgcaagaaggagttcgtggaaatctacgaaccgttcaagccgcagcagtccgtggagcaggcgcaccgctgcctgggctgcggtaacccgtattgcgagtggaagtgcccggtacacaacttcatccccaactggttgaagctggtctccgaaggcaacatcctggccgcggcggaactgtcgcaccagaccaacaccctgccggaagtatgcggccgtgtttgcccgcaagaccgcctgtgcgagggtgcctgcaccctgaacgacggtttcggcgcggtgaccatcggctcggtggagaagtacatcaccgacaccgccttcgccatgggctggcgtccggacatgtccaaggtcaagccaaccggcaagcgcgttgccatcatcggcgccggcccggcgggcctgggctgcgccgacgtgctggtgcgcgccggggtaaccccggtggtgttcgacaaaaaccctgagatcggtggcctgctgaccttcggtatccccgagttcaagctggaaaagaccgtgctcagcaaccgccgtgaagtgttcaccggcatgggcatcgagttccgcctgaacaccgaggtgggcaaggatgtgaccatggaacagctgctcgccgagtacgacgcggtgttcatgggcatgggtacctacacctacatgaagggcggcttcccgggtgaagacctgccgggcgtgcatgacgcactggacttcctgatcgccaacgtcaaccgcaacctgggcttcgagaagtcgccggaagacttcgtcgacatgcagggcaagaaagtggtggtgctgggcggtggtgacaccgcgatggactgcaaccgtacctcgatccgtcagggtgccaaggcggtgacctgtgcttatcgtcgtgacgaagccaacatgccgggttcgcgcaaagaggttaagaacgccaaggaagagggcgtgaagttcctctacaaccgtcagcccattgccattgtgggcgaggacaaggtcgaaggcgtcaaagtggtcgagactcgcctgggcgagcctgatgcccgtggccgccgcagccctgagccaatcccgggctccgaagagatcctgccggcagacgccgtggtaatcgccttcggcttccgcccgagcccggcaccgtggtttgaacagcatggcattcagctggacagccaaggtcgtgtggttgccccggagaagggcaagttcaagcaccagaccagcaacccgaaagtgtttgccggtggcgacatggtgcgcggttcggacctggtggtgactgcgatcttcgaagggcgtacggctgccgagggtatcctggactacctcgaagtctag

SEQ ID NO: 4560 - protein, 472 aa, Pseudomonas putida
MAERLNNDFQFIEVGRKDPKKKLLRQRKKEFVEIYEPFKPQQSVEQAHRCLGCGNPYCEWKCPVHNFIPNWLKLVSEGNILAAAELSHQTNTLPEVCGRVCPQDRLCEGACTLNDGFGAVTIGSVEKYITDTAFAMGWRPDMSKVKPTGKRVAIIGAGPAGLGCADVLVRAGVTPVVFDKNPEIGGLLTFGIPEFKLEKTVLSNRREVFTGMGIEFRLNTEVGKDVTMEQLLAEYDAVFMGMGTYTYMKGGFPGEDLPGVHDALDFLIANVNRNLGFEKSPEDFVDMQGKKVVVLGGGDTAMDCNRTSIRQGAKAVTCAYRRDEANMPGSRKEVKNAKEEGVKFLYNRQPIAIVGEDKVEGVKVVETRLGEPDARGRRSPEPIPGSEEILPADAVVIAFGFRPSPAPWFEQHGIQLDSQGRVVAPEKGKFKHQTSNPKVFAGGDMVRGSDLVVTAIFEGRTAAEGILDYLEV

SEQ ID NO: 4561 - DNA, 1368 bp, Pseudomonas putida
  CDS (1)..(1368)
atgaccaacgccctgaaccatttgccgcgcccccgggccggcgccgaccagttggccgagcgcttcagcgacctggccccacccctcaccgcgcgtcaggccgccctggaaagtgcacgctgcctgtactgctacgacgccccctgcgtcaacgcttgccccagcgaaatagacattccctcgttcatacaccgcatcagtgacgaaaacctgcaaggcgccgccgagcgcattctttcggccaacattctgggcggtagttgcgcccgcgtgtgccccaccgaaatcctctgccagcaagcctgcgtgcgcaacaacgcccaggaatgcgcgccggtgctgatcggccaactgcagcgttacgccctggacaacgcccagttcagcgcacacccgttcaagcgctcggcagccaccggcaagcgtatcgccgtggtgggcgccggcccggcagggctgtcctgcgcccaccgcctggccatgcacgggcatgacgtggtggtgttcgaggcctgcgacaaagccggtggcctcaacgagtacggcatcgcccgctacaagctggtagacgactatgcccagcgtgaagtggatttcttgttgggcattggcggtatcgaagtccgccatggccagcgcctgggtggcaacctcagcctgggcgaactgcgcgatcagtacgacgcggtgttcctgggcctcggcctgaatgccgtgcgccagctagggctgcccgacgaggaagcccccggtgtggtcgccgccaccgaatacatccgcgagctacgccaggccgatgacctgagccagctcccgttggccgaccgctgcctggtgatcggtgctggcaacacggccatcgacatggctgtgcagatgagccgtctgggtgcccgcgacgtcaacctggtgtaccgccgtggccacgccgacatgggcgctaccggccacgagcaggacattgccaaggccaaccaggtacgcctgcacacctgggcccgccctgatgccgtgctgctggatgacgccggcaaggtccgcggcatgcgctttgcccgcaccgagctggcggaaggtcgtctgcgcgataccggcgaaaccttcgagctggctgcggacgccattttcaaggccattggccaacgctttgacgatgccagcctcggcgacccggtggctgcgcaactggcccgcgagggtgagcgcatccgcgttgacgaaaacctgcagaccagcctgccgggcgtgtacgcaggcggcgactgcaccgcgctggggcaggaccttaccgtgcaggccgtgcaacacggcaagctggccgccgaagccatccatgcccaactcatgctcaacgtggaggcagcgtaa

SEQ ID NO: 4562 - protein, 455 aa, Pseudomonas putida
MTNALNHLPRPRAGADQLAERFSDLAPPLTARQAALESARCLYCYDAPCVNACPSEIDIPSFIHRISDENLQGAAERILSANILGGSCARVCPTEILCQQACVRNNAQECAPVLIGQLQRYALDNAQFSAHPFKRSAATGKRIAVVGAGPAGLSCAHRLAMHGHDVVVFEACDKAGGLNEYGIARYKLVDDYAQREVDFLLGIGGIEVRHGQRLGGNLSLGELRDQYDAVFLGLGLNAVRQLGLPDEEAPGVVAATEYIRELRQADDLSQLPLADRCLVIGAGNTAIDMAVQMSRLGARDVNLVYRRGHADMGATGHEQDIAKANQVRLHTWARPDAVLLDDAGKVRGMRFARTELAEGRLRDTGETFELAADAIFKAIGQRFDDASLGDPVAAQLAREGERIRVDENLQTSLPGVYAGGDCTALGQDLTVQAVQHGKLAAEAIHAQLMLNVEAA

SEQ ID NO: 4563 - DNA, 1425 bp, Clostridium tetani
  CDS (1)..(1425)
atgtcacgtaggattagggggagatcattaatggatagattcaaaagaactcctataaaagttcaagatgccaaaaagagaataaaaaactttaaagaggtttgtcttggatatacagaagaagaagcgattaaagaagcttcaagatgtcttaattgtaaaaatccaatttgtgtgccaaattgtccagtggcaataaatatacctaaatttatacaacatgttaaaaatagggaatttgaggaagctgcaaaagttattaacgaagcaagttctctaccagctatatgtggaagagtatgtcctcaagaaactcaatgtgaaggtaaatgtgttttaggtgtaaaaggagagccaatagccattggaaagctagaaagatttgtaggagattggtctagggaaaataacgtagatttatcttttaaaggaaaaaagaaagataaaaaaattgcagttataggagcaggtcccgcaggattaacctgtgcaggggatttagctaaacttggatataatgttactatatttgaagctttacatgaaccaggaggagttttagtatatggtataccagaatttagattgccaaaggatactgtagtaaaacatgaaatagataatgttaaaaaactaggagtagaaattgaaacagatgtaatagttggaagaacaattacagtggatgaacttttaaatgaagaagggtttcatgcagtatttataggttcaggagcagggctacctaagttcatgggaatacctggagaaaacttaaatggtgtattttcatcaaatgaatttttaactagaaataatcttatgaaggcctatagagaagattatgatactcctataaaagtaggtgaaaagttagcagtagtaggtggtggaaatgttgctatggatgctgctagaaccgctaaaagacttggggcagaagttcatatagtgtatagaaggtcagaagaagaaataccagcaagaagagaagaagtagagcatgcaaaagaagagggaataatatttaatctacttaccaatccaacagaaataataggtggagaagatggatgggtaaaggcaatgaagtgtataaaaatggagttaggagaacctgataaatctggcagaagaagaccagtagaaattgagggatctgaatttattttagatgtagacactgtaataatggcattaggaacttcaccaaatccactaatatctggtacaacaaaaggactggaaacggacaaatggggctgcttagtagctaaggatgaaaatggagaaactactaaaagagcggtatttgcaggaggagatgtggtaactggtgctgcaactgtaatactagctatggaagcaggaaaaaaagctgctaaaggaatagatgaatttttgagtgatagtgaaaaaaaataa

SEQ ID NO: 4564 - protein, 474 aa, Clostridium tetani
MSRRIRGRSLMDRFKRTPIKVQDAKKRIKNFKEVCLGYTEEEAIKEASRCLNCKNPICVPNCPVAINIPKFIQHVKNREFEEAAKVINEASSLPAICGRVCPQETQCEGKCVLGVKGEPIAIGKLERFVGDWSRENNVDLSFKGKKKDKKIAVIGAGPAGLTCAGDLAKLGYNVTIFEALHEPGGVLVYGIPEFRLPKDTVVKHEIDNVKKLGVEIETDVIVGRTITVDELLNEEGFHAVFIGSGAGLPKFMGIPGENLNGVFSSNEFLTRNNLMKAYREDYDTPIKVGEKLAVVGGGNVAMDAARTAKRLGAEVHIVYRRSEEEIPARREEVEHAKEEGIIFNLLTNPTEIIGGEDGWVKAMKCIKMELGEPDKSGRRRPVEIEGSEFILDVDTVIMALGTSPNPLISGTTKGLETDKWGCLVAKDENGETTKRAVFAGGDVVTGAATVILAMEAGKKAAKGIDEFLSDSEKK

SEQ ID NO: 4565 - DNA, 1272 bp, Clostridium tetani
  CDS (1)..(1272)
atggaaaaaaataattattcaaaggaagttaaaaaaacttatactccactactagcaatagaggaagcttcaagatgtcttttatgttatgatgcaccctgtagtaagaattgtcctgtagatacgaaaccagatgaattcataagatctttaagatttaaaaatttaaaaggggcagcagaaaccatcagaaaaaataatatattaggtggagtatgctcaagactttgtccttatgataaatattgtcaaaaaaattgtacaagaggaaaaattgataagcctatagatataggatcacttcaaagatatttaatagaatttgagaaaaacataagattagatacgttaaataaagttgaaattaataaggaaaaggtggccattataggatcgggtcctggaggattatcagcggctgcatctttagctcaaaaaggatataaagttaatatttttgagaagaaagaaaaatttggtggttggttaacttatggaataccagaatacagattaccacaaaatttagtggattatgagattgatattataaggaaattaggggtggaatttaaggctaattgtaatgtaggtaaagatattacgatagacgatttaaaagagaaaggatttgaagctattctattagcttgtggacaacaacaaagtaaagaattaaacatagaaggaataaagttaaaaggagtattaaagggaacagaatttttatctgaggctaaattaagtaatgggaacttagaagtagggcaaaaggttatagttataggtggtggagatgtggctatagattccgcagtaacagctaaattacttggagcggaggatgtgaaaatagtatatagaagaaatatagaaaaaatgccctcaaataaaaatgagagaatctatgcacataatttaaatatacctatatttacgggaataaagccttatagcttaataggaaataatgagaaggttattagttttaaaggtgtagggatgtttgatgattctagtttagaattggaagtggatacagttatatttgctatagggcaagaattagaagatctttcctatatagatgaattaaaaattgaaaataatgaggttctggtggatgaaaatttaaataccagcatagaaggaatatttgcctgtggagatattataaaaggaaataaaacagtagtggatgcagttgcaacgggtaaaagagttgctatagaaatagaagaatatataagaagaaagggagatgttaggtaa

SEQ ID NO: 4566 - protein, 423 aa, Clostridium tetani
MEKNNYSKEVKKTYTPLLAIEEASRCLLCYDAPCSKNCPVDTKPDEFIRSLRFKNLKGAAETIRKNNILGGVCSRLCPYDKYCQKNCTRGKIDKPIDIGSLQRYLIEFEKNIRLDTLNKVEINKEKVAIIGSGPGGLSAAASLAQKGYKVNIFEKKEKFGGWLTYGIPEYRLPQNLVDYEIDIIRKLGVEFKANCNVGKDITIDDLKEKGFEAILLACGQQQSKELNIEGIKLKGVLKGTEFLSEAKLSNGNLEVGQKVIVIGGGDVAIDSAVTAKLLGAEDVKIVYRRNIEKMPSNKNERIYAHNLNIPIFTGIKPYSLIGNNEKVISFKGVGMFDDSSLELEVDTVIFAIGQELEDLSYIDELKIENNEVLVDENLNTSIEGIFACGDIIKGNKTVVDAVATGKRVAIEIEEYIRRKGDVR

SEQ ID NO: 4567 - DNA, 1452 bp, Bradyrhizobium japonicum
  CDS (1)..(1452)
atgggcaagatcacgggttttctggaaatcgaacggcacgaccgcaagtacaccccggtcgccgagcgcgtgaagcattttcacgagttcgtcgttcccttgaccgagagggaaacgcgcgaccaggccgcgcgctgtatgaactgcggcattccctattgccacggcacaggctcggtcgcgcccggcacgccgggctgcccggtcaacaaccagatccccgatttcaacgacctcgtctatcagggcaactgggaagaggcctcgcgcaacctgcactcgaccaacaatttcccggagttcaccgggcgcatctgccccgcgccgtgcgaagcgtcctgcacgctcaacatcgacgacaacccggtcaccatcaagacgatcgaatgcgcgatcgtcgaccgcgcctgggacaatggctggctgaagccggaagtcgcctccgtcaagaccggcaagaaggtcgcagtgatcggctctggacccgccggcatggcctgcgcgcagcagctcgcgcgcgccggccacgacgtgcacctgttcgagaagttcgccaaggccggcggcttgctccgttacggcatccccgacttcaagatggagaagggcatcatcgaccgccgcgtcaagcagatggaaggcgaaggcgtcaccttccactacaacagccatgtcggcgctgacggcaatgtcgatccgcgcgagatgctcaacgagtatgacgccgtggcgctgaccggcggcgcggaagccccgcgcgacctgccgatccccggccgcgatctccaaggcatccactacgccatggacttcctgccgcagcagaatcgccgcgtctccgaggagccgctgaacggcgtcaccgagattttggccggcggcaagcatgtcgtcgtcatcggcggcggcgacaccggaagcgactgcatcggcacctcgctgcgccagggcgcgctgtccgtgacccagctcgagatcatgcccgccccgcccgagcgcgagaacaagggcctgacctggccgaactggccgctgaagatgcgcacctcctccagccaggccgaaggcgcgatccgcgaattcgccgtgctgacccagaagttttccggcgagaacggccaggtcaagaagctgcactgcgtgcgcgtcgacgacaagttcaagccgattgccggcaccgagttcgagctggatgccgagctcgtcctgctcgccatgggtttcgtccaccccgtgcatgagggcctgctcaagctgctctcggtcgagctcgacccccgcggcaacgtcaaggccaacacgctcgactaccagacctcgcgtccgaacgtgttcaccgccggcgacatgcggcgtgggcaatcgctggtggtctgggcgatccgtgagggccggctgtgtgcaaggtcgattgatacgttcttgatggggaagacggatctgccgcggtag

SEQ ID NO: 4568 - protein, 483 aa, Bradyrhizobium japonicum
MGKITGFLEIERHDRKYTPVAERVKHFHEFVVPLTERETRDQAARCMNCGIPYCHGTGSVAPGTPGCPVNNQIPDFNDLVYQGNWEEASRNLHSTNNFPEFTGRICPAPCEASCTLNIDDNPVTIKTIECAIVDRAWDNGWLKPEVASVKTGKKVAVIGSGPAGMACAQQLARAGHDVHLFEKFAKAGGLLRYGIPDFKMEKGIIDRRVKQMEGEGVTFHYNSHVGADGNVDPREMLNEYDAVALTGGAEAPRDLPIPGRDLQGIHYAMDFLPQQNRRVSEEPLNGVTEILAGGKHVVVIGGGDTGSDCIGTSLRQGALSVTQLEIMPAPPERENKGLTWPNWPLKMRTSSSQAEGAIREFAVLTQKFSGENGQVKKLHCVRVDDKFKPIAGTEFELDAELVLLAMGFVHPVHEGLLKLLSVELDPRGNVKANTLDYQTSRPNVFTAGDMRRGQSLVVWAIREGRLCARSIDTFLMGKTDLPR

SEQ ID NO: 4569 - DNA, 1800 bp, Bradyrhizobium japonicum
  CDS (1)..(1800)
atgaaaccgaccgatatcgcggcccccgactactttcacaaagtggtcgactgtcagtgggcctgtcctgcacacaccccggttcccgaatacatccgactgatcgcccaaggccgctacagcgacgcctacatgatcaattggaaatcgaacgtgtttcccggcattctgggacgcacctgcgatcgtccatgcgagccggcgtgccgccgcggacgcgtcgaggaaacaccggtcgcgatctgccgcctcaagcgcgtcgcagccgacttcaaggacgacatcacgcagcgcctgccgcgcccttcgccgaagaacggcaagcgcgtcgcgctggtcggcggcggtccggcctcgctgacggtggcgcgcgatctggcgccgctcggctatcactgcaccgtgttcgatgccgatccggaagccggcggcatgatgcgctcgcagatcccgaagttccggttgcccaattccgtgatcgacgaggagaccggctatatcctcaatctcggcgtcgagttcaaaggcggtcaccgcatcgagagcatgaaggcgctgctcacggagaagtacgacgcgatcttcgtcggctccggcgcgccgcgcggccgcgagctcgacattcccggccgcaaggaggccgccgccaacatccatatcggcatcgactggctgtcctccgtttcgttcggtcacaccgacaagatcggcaagcgcgtgatcgtgctcggcggcggcaacaccgcgatggattgctgccgcaccgcgcgccgcctcggcggcgagaaagtcacggtgatcgtgcgctccggctttgaggagatgaaggcctcgccgtgggagaaggaggacgcgatccacgaggatattccgatcctcaactacatggtgccggtggcattcaagcatgtcgccggcaagctcatcggcgtcaccttccagcacgtcaaagccgaatacgacgccaaaggccgccgcaacctggtgccttcgggcgaccccgagcagaccattccctgcgacgacgtgctggtcgcggtcggccaggagaacgccttcccctggatcgagcgcgactgcggcatcgcgttcgacaagtggaatatgccgcaggtcgaccccaagaccttcgtctcgaccaacccaaaggtgttcttcggcggcgatgccgctttcggcccgaagaacatcatctgggcggtggcgcagggccatgacgccgcgctgtcgatccacagactgctgtcgggcgaggacatcaccgagcggccgctgccggaggtgcacgtctcctcgcagaagatgggcatccacgaatggagctatgacaacgacatctccgtcgacaagcgcttcaaggtgccgcaccgcgacaaggtgatcgcgctgaaggacatccgcaccgaggtcgagctcggctacgatgtcaagctcgcgctcggcgaagcccatcgctgcctgaactgcgacgtgcagacggtgttctcgacctcgctctgcatcgagtgcgacgcctgcgtcgacatctgcccgatggactgcatcaccttcaccgagaatggcgaggaacccgatctgcgccagcgactgaaggcgccgtcgctgcaccccgaccaggatctttacgtgtcctccgatctcaagaccggacgcgtgatggtgaaggacgaggatgtctgcctgcattgcgggctgtgtgccgagcgttgtcccaccggagcctgggacatgcagaaatatttgatcgaaatgactcacgcaggttcagcatgtccgacaaaaagccgatcagcagcgtaa

SEQ ID NO: 4570 - protein, 599 aa, Bradyrhizobium japonicum
MKPTDIAAPDYFHKVVDCQWACPAHTPVPEYIRLIAQGRYSDAYMINWKSNVFPGILGRTCDRPCEPACRRGRVEETPVAICRLKRVAADFKDDITQRLPRPSPKNGKRVALVGGGPASLTVARDLAPLGYHCTVFDADPEAGGMMRSQIPKFRLPNSVIDEETGYILNLGVEFKGGHRIESMKALLTEKYDAIFVGSGAPRGRELDIPGRKEAAANIHIGIDWLSSVSFGHTDKIGKRVIVLGGGNTAMDCCRTARRLGGEKVTVIVRSGFEEMKASPWEKEDAIHEDIPILNYMVPVAFKHVAGKLIGVTFQHVKAEYDAKGRRNLVPSGDPEQTIPCDDVLVAVGQENAFPWIERDCGIAFDKWNMPQVDPKTFVSTNPKVFFGGDAAFGPKNIIWAVAQGHDAALSIHRLLSGEDITERPLPEVHVSSQKMGIHEWSYDNDISVDKRFKVPHRDKVIALKDIRTEVELGYDVKLALGEAHRCLNCDVQTVFSTSLCIECDACVDICPMDCITFTENGEEPDLRQRLKAPSLHPDQDLYVSSDLKTGRVMVKDEDVCLHCGLCAERCPTGAWDMQKYLIEMTHAGSACPTKSRSAA

SEQ ID NO: 4571 - DNA, 2292 bp, Bacteroides thetaiotaomicron
  CDS (1)..(2292)
atgaacaaaatcattagcaaagaacgcttttctgagaaagtgtttaaacttgaaattgaagctcctttaattgctaaatcccgcaaagccggccacttcgtcattgtacgtgtaggcgacaagggagaacgtatgcctctgacgattgccggttctgatttgaagaaaggcaccatcactctggtgatacaggaagtcgggctctcctctacccgtctttgtgaattgaacgaaggtgattatatcactgatgtagtaggtccgctcggacaagctactcatattgagaatttcggaacagttgtttgtgctggtggtggtgtaggtgttgctccgatgcttcctatcgtacaggctttgaaagctgccggaaacagagtgatcactgtattggcaggacgtaacaaagaccttatcattctggaaaaagaaatgcgcgaaagctccgatgaggtgattattatgacggacgatggctcttacgggcgtaaaggtctggtaaccgaaggcgtggaagaagtcatcaaacgtgaaaaggtagataaatgcttcgccatcggccctgctatcatgatgaagttcgtttgtctgctgacaaagaaatatgagattcctaccgacgtttcattaaataccatcatggtagacggaaccggcatgtgtggtgcttgccgtatcacggtaggaggaaaaacgaagttcgtttgtgttgacggtcccgaattcgacggtcatcaggtggactttgatgaaatgctgaaacgtatgggtgcgttcaaaaaaatagagcgtgaagagatgaacaaactccagcccgaatgtgaagcaacgaaagagatagatgagaaaagccgcaacgcagcctggagacaggaactgcgcaaatcgatgaaaccgaaagaacgtacagctattccacgtgtcgagatgaacgaactcgatgccgaataccgttcacatagccgcaaggaagaagtaaaccagggtctgaccgctgagcaagctgttacagaagccaagcgttgtctggactgcgctaaccctggatgtatggaagggtgtccggtaggcatcgacattccgcgcttcattaagaacattgagcgtggcgaattcctcgaagcagccaaaacactgaaagagacaagtgcgcttccggctgtatgcggtcgtgtctgcccacaggaaaagcaatgcgaatccaaatgtatacacttgaagatgaatgaaaaaccggtagctatcggttatctggaacgcttcgctgctgacttcgaacgtgaaagcggacaaatttcagtacctgtcattgccgaaaagaacggcatcaaagtggcggtgatcggttcgggtcctgccggattatcattcgcaggtgatatggcaaaatacggttatgatgtaacagtattcgaggcactccacgaaatcggcggtgtattaaaatatggtattccggaattccgtctgccaaacaagattgtagatgtagaaatagacaacctcgttaaaatgggcgttactttcatcaaagactgcattgtaggaaaaacaatcagtgtggaagatttgaaggaagaaggttttaaaggaatatttgtcgcttccggtgccggtttgcctaactttatgaatataccgggcgaaaactcgatcaatatcatgtcttccaacgaatacctcactcgtgtcaatctaatggatgctgcgagcgaagactctgacactccggtagctttcggcaaaaatgtggctgtcatcggtggtggtaatactgctatggactctgtccgtacagccaaacgcctgggtgctgaacgtgctatgatcatctaccgccgttcggaagaagaaatgcctgcacgtatcgaggaagtgaagcatgccaaagaagaaggagtcgaattcctgacattgcacaatccgattgaatatattgccgacgaacaaggttgcgtgaaacaggtcattctccagaagatggaattaggagagccggatgcttccggacgtcgcagtcctgtagccattccgggagctacggaaacaatcgatatcgatctggccatcgtcagtgtcggtgtatctccgaacccgattgttccgagttccattaaaggactggaattaggacgcaaaggaaccattgccgtagatgacaacatggaatcatctattccgatgatctatgccggcggagacattgtgcgcggaggagctaccgtaatccttgccatgggagatggccgtaaagccgccgctgccatgaatgaacaactgcaaagcaagtaa

SEQ ID NO: 4572 - protein, 763 aa, Bacteroides thetaiotaomicron
MNKIISKERFSEKVFKLEIEAPLIAKSRKAGHFVIVRVGDKGERMPLTIAGSDLKKGTITLVIQEVGLSSTRLCELNEGDYITDVVGPLGQATHIENFGTVVCAGGGVGVAPMLPIVQALKAAGNRVITVLAGRNKDLIILEKEMRESSDEVIIMTDDGSYGRKGLVTEGVEEVIKREKVDKCFAIGPAIMMKFVCLLTKKYEIPTDVSLNTIMVDGTGMCGACRITVGGKTKFVCVDGPEFDGHQVDFDEMLKRMGAFKKIEREEMNKLQPECEATKEIDEKSRNAAWRQELRKSMKPKERTAIPRVEMNELDAEYRSHSRKEEVNQGLTAEQAVTEAKRCLDCANPGCMEGCPVGIDIPRFIKNIERGEFLEAAKTLKETSALPAVCGRVCPQEKQCESKCIHLKMNEKPVAIGYLERFAADFERESGQISVPVIAEKNGIKVAVIGSGPAGLSFAGDMAKYGYDVTVFEALHEIGGVLKYGIPEFRLPNKIVDVEIDNLVKMGVTFIKDCIVGKTISVEDLKEEGFKGIFVASGAGLPNFMNIPGENSINIMSSNEYLTRVNLMDAASEDSDTPVAFGKNVAVIGGGNTAMDSVRTAKRLGAERAMIIYRRSEEEMPARIEEVKHAKEEGVEFLTLHNPIEYIADEQGCVKQVILQKMELGEPDASGRRSPVAIPGATETIDIDLAIVSVGVSPNPIVPSSIKGLELGRKGTIAVDDNMESSIPMIYAGGDIVRGGATVILAMGDGRKAAAAMNEQLQSK

SEQ ID NO: 4573 - DNA, 1341 bp, Bacteroides thetaiotaomicron
  CDS (1)..(1341)
atgggagatcctaaagcttttttaaatatacctcggcaagaggcgggataccgccccgttagcgagcgcatcactgactatagtcaggtagaacaaacattgaatacgaacagccgtaaattacaggcatcacggtgtatggattgcggagtacctttttgtcactgggcttgtccaataggcaataaacagccggaatggcaggacgctttattcaaaggaaaatggaaagaagcgtatgaagtgctgtcatccacttgcgactttccggaatttacaggacgtatctgccctgccctctgtgagaaatcctgtgtactgaaactatcctgtgaccaaccggtgactatccgtgaaaatgaagctgccattgtagaagccgccttccgtgaaggatatatacaggtgcagcatccccaaagaaacggcaaaaaagtagcagttgtcggtgccggtccggccggattggtagttgccaaccaactgaatctaaaaggatacaccgtaacgttattcgataaagatgaagctgcgggaggattattacgtttcggtattccaaacttcaaactggacaaaaacgtaatcgaccgccgcatgaaaatacttgccgcagaaggtattcagtttgaaatgggagtagaaatagacgttaaccatttgccggaaggattcgatgcatattgcatttgcacgggtacaccgactgcccgtgatttaagcattccgggacgggagttgaaaggaatccatttcgcactggaaatgctggcgcaacagaacaggattctggaaggacaaactttccccaaagacaaactggtgaatgccaaaggcaaaaaagtgcttgtgatcggcggtggagacaccggttcggactgtatcggaaccagtgtacgacagggagcaaccagcgtcacgcaaattgaaattatgcccaaacctcccgtcggccacaatccttctacgccctggccgcaatggccggtagttttcaaaacgacctccagccatgaagaaggttgtacccgtcgctggtgcctgacttccaatcagtttttgggtaagaacggtaaagtaaccggcgtcgaggtggaagaagtagaatggacaccggcaacagatggcggacgtccgaccatgaacctcacagggaagaaagaagtaatcgaagcagatatggtgctgctggccatgggattcctgaaaccggaacaaccgaaatttgcagaaaacgtattccttgccggagatgcagctaccggagcaagcctcgtagtacgggcgatggcaggaggacgaaaggctgctgcggacatagatcactatttggtgaagtaa

SEQ ID NO: 4574 - protein, 446 aa, Bacteroides thetaiotaomicron
MGDPKAFLNIPRQEAGYRPVSERITDYSQVEQTLNTNSRKLQASRCMDCGVPFCHWACPIGNKQPEWQDALFKGKWKEAYEVLSSTCDFPEFTGRICPALCEKSCVLKLSCDQPVTIRENEAAIVEAAFREGYIQVQHPQRNGKKVAVVGAGPAGLVVANQLNLKGYTVTLFDKDEAAGGLLRFGIPNFKLDKNVIDRRMKILAAEGIQFEMGVEIDVNHLPEGFDAYCICTGTPTARDLSIPGRELKGIHFALEMLAQQNRILEGQTFPKDKLVNAKGKKVLVIGGGDTGSDCIGTSVRQGATSVTQIEIMPKPPVGHNPSTPWPQWPVVFKTTSSHEEGCTRRWCLTSNQFLGKNGKVTGVEVEEVEWTPATDGGRPTMNLTGKKEVIEADMVLLAMGFLKPEQPKFAENVFLAGDAATGASLVVRAMAGGRKAAADIDHYLVK

SEQ ID NO: 4575 - DNA, 4452 bp, Mus musculus
  CDS (100)..(3177)
ccacgcgtccgggcaagctgaggctttggtgcggggctggaggctgctgcagcagagggagggtctgtgtgcgggagtctgaggccagaaagcgctgccatggcgggtgtgctgagcagggacgcgccggacatcgagagtatcctggctttaaaccctcgagtacaagctcatgcaactctgcgttccaccgcagccaagaaactagacaagaaacactggaaaaggaacacggacaagaactgctttacctgtgagaagctggagagtaattttgatgacatcaagcacacgactcttggtgagcgaggagctctccgagaagcagtgagatgcctgaagtgcgcagatgctccctgccagaagagctgtcccacatctcttgacattaaatcatttatcacaagtatcgccaacaagaactactatggtgcagctaagctgattttttctgataaccctcttggtcttacttgtggaatggtttgtccaacatctgacctctgtgttggaggatgcaacttacatgctgctgaagagggaccaattaatattggtgggctgcagcagtttgctactgaggtgttcaaagcaatgaacatcccacagatcagaaacccatcgctgcctcctccggaacatatgccggaagcctactcagcaaaaattgcactttttggtgcagggcctgcgagtataagctgtgcctcctttttggctcggttgggctattccaacattactatattcgaaaaacaagaatatgttggtggtttaagcacttctgaaatccctcagtttcgactcccatatgacgtcgtgaattttgagattgagctcatgaaggaccttggtgtaaagataatttgtggtaaaagcctttccaccgatgaaatgactcttagctctttgaaagaaaatggctacagagctgcatttattggaataggcttgccagaacccaaaaaggaccatattttccaaggcttgacacaagtccagggattttacacatctaaagactttctgccacttgtcgccaaaagcagtaaaacaggaatgtgcgcctgtcactctccattgccatccataaggggagccgtgattgtactcggagctggagatactgcgtttgactgtgcaacatccgctctgcgctgtggagcccttcgcgtgttcatcgtcttcagaaagggctttgttaatattcgagctgttccagaggagatggagctcgctaaggaagagaaatgtgaatttttgcctttcctctcgccacggaaggttatagtcaaagatggaaagattgtggcaatgcaatttgttcgaactgagcaagatgaaaccggaaactgggtggaagatgaagagcagacggtgcggctaaaggctgatgtggttattagtgcctttggatctgtcctggaggatcccaaagtgaaagaagcattgagtcccatcaagtttaacagatggggtctcccagaagtaaatccagaaaccatgcaaaccagtgaaccatgggtgtttgcaggtggtgatgttgtgggtatggctaacaccacagtggaatctgtcaacgatggaaagcaagcttcatggtacattcacaagcacatacaggcacaatatggaacctcagtgccttctcagcctacaatgcccctattttacactccggttgacttagtggacatcagcgtggaaatggcagggttgaggtttcccaatccctttggccttgccagtgcgacaccagccactagcacaccaatgattcgaagggcctttgaagctggctggggttttgctctgaccaaaactttctctcttgataaggacatcgtgacaaacgtctcaccaagaatcatccgggggacaacttctggccccttgtatggccctggacaaagctcctttcttaacattgagctcatcagtgagaaaacagctgcatattggtgtcacagtgtcaccgaactaaaggctgacttcccggacaatatcctgatcgccagcatcatgtgcagttacaacaagagtgactggatggaactctccaaaatggctgaggcttctggagcagatgccctggagttaaatttatcgtgtccacatggcatgggggagagaggaatgggcctggcttgtgggcaggatccagagctggtgaggaacatctgtcgctgggttaggcaagctgttcgggttccattttttgccaagttgaccccaaatgtcactgatattgtaagcatcgcaagagcagcaaaggaaggtggagcagatggtgtaacagccaccaacaccgtctcgggtctgatgggactgaaagctgatggcacaccctggcctgctgtgggcattggaaggaggactacatatggaggagtgtcaggaactgctatcaggcccattgctttgagagctgtgaccgccattgcccgtgctttgcctgggtttcctattttggccacaggtggaattgactcagctgaaagtggacttcagtttcttcatagtggtgcttcagttcttcaggtatgcagcgctattcagaatcaggacttcactgtgattgaagattactgcactggactcaaagccctgctttatctgaagagcattgaagagttagcagactgggatggtcagagtccacccattataagtcatcagaaagggaaaccagttccacgcgttgctgagctcatgggacagaaactgcccagctttggaccttaccttgaacagcgcaagaaaatcatagcagcaagcaaaatcagacagaaagatcaaaacacagcttgctcacctctccagagaaagcactttaactcgcaaaagcctattcctgccatcaaggatgtaattggaaaatcactgcaatacctgggaacatttggtgagatgagcatcatggaacaagttgtggccctgatcgatgaggaaatgtgcatcaattgcggcaaatgttacatgacctgtaatgactctggctaccaggctatccagttcgatccagaaactcacctgcctaccgttagcgacacatgtacaggctgtactctctgcctcagcgtctgccctattatggactgtatcaggatggtttccagggcaacaccttatcaaccaaagagaggcctaccattagccgtgaagccggtgtgttaaggtgatttgtaagacagctgctgtgaactttgatattacccatgtaggctgatctttaagaacaataacaattgtaatcattatgatcagttctttccaaattttatagctgaacaataacaattgtaatcattatgatcagttctttccaaattttatagctatgcatatataatttctaaataagtgtctaaattggaaaacaatgtctaatgccagtgacaaattaatggtcataaaatggaataactcttctctgaggtagctggtgagtaactgcagaccagttaattggatgtgctctgtccgttgtgtgctgtgaaaaattaactttttcatggcaattagcgtgacaatttctaaattgccctatgccgtactcactctttgatttctaattgtaaacgaaatgaactattttggaacggagtgcactttcatatacaggaaaccgtttccaaggaaacgctttgtaattaaaaattacctgtaattttaacactgtttctaaggacatgtaattagttccattaagaacaattgaagaaagtcaaggcattatttactatgacaagggggaagaaaacctggaagagggtttctagagttttctaaagtccccctttgctgaagtaactcactcttcggtgctggacacggaaagggagattatttcctgactaaaatgctgttgaccacctgaaacaggtgtcagactgaccagggatggagtcctggccatttttatttgaataccaaagcggtgttcctaatgaaataagatatcgaggtgaatgtctggtgaatggcccactttcactgagcacagacagctagatctgcttcttttagtcaccttcattatgagagcaattaatgttcaaacaagggctagattacacagcgctgagccataggcttcaagattcaacaacaaagtgtgtcatatctgaacctgctacataataaacctaactaactttactttgatactcatgtgaattcaaaattaatgaaagagaaatgtgtatctttggatattgatcagtgtttttccccatatctttatttttataatcagtaaatagcatcacataaattcatttattccttctttatggcacattttaaaatgaatctatagaaagtaagtgagaaatgacaacctgtggaatatttctatgataaatgcaagatatctacaagtgcattttaaaaaatgtgtatgatttaaaaatcacaaataaaattttatgatctaaaaaaaaaaaaaaa

SEQ ID NO: 4576 - protein, 1025 aa, Mus musculus
MAGVLSRDAPDIESILALNPRVQAHATLRSTAAKKLDKKHWKRNTDKNCFTCEKLESNFDDIKHTTLGERGALREAVRCLKCADAPCQKSCPTSLDIKSFITSIANKNYYGAAKLIFSDNPLGLTCGMVCPTSDLCVGGCNLHAAEEGPINIGGLQQFATEVFKAMNIPQIRNPSLPPPEHMPEAYSAKIALFGAGPASISCASFLARLGYSNITIFEKQEYVGGLSTSEIPQFRLPYDVVNFEIELMKDLGVKIICGKSLSTDEMTLSSLKENGYRAAFIGIGLPEPKKDHIFQGLTQVQGFYTSKDFLPLVAKSSKTGMCACHSPLPSIRGAVIVLGAGDTAFDCATSALRCGALRVFIVFRKGFVNIRAVPEEMELAKEEKCEFLPFLSPRKVIVKDGKIVAMQFVRTEQDETGNWVEDEEQTVRLKADVVISAFGSVLEDPKVKEALSPIKFNRWGLPEVNPETMQTSEPWVFAGGDVVGMANTTVESVNDGKQASWYIHKHIQAQYGTSVPSQPTMPLFYTPVDLVDISVEMAGLRFPNPFGLASATPATSTPMIRRAFEAGWGFALTKTFSLDKDIVTNVSPRIIRGTTSGPLYGPGQSSFLNIELISEKTAAYWCHSVTELKADFPDNILIASIMCSYNKSDWMELSKMAEASGADALELNLSCPHGMGERGMGLACGQDPELVRNICRWVRQAVRVPFFAKLTPNVTDIVSIARAAKEGGADGVTATNTVSGLMGLKADGTPWPAVGIGRRTTYGGVSGTAIRPIALRAVTAIARALPGFPILATGGIDSAESGLQFLHSGASVLQVCSAIQNQDFTVIEDYCTGLKALLYLKSIEELADWDGQSPPIISHQKGKPVPRVAELMGQKLPSFGPYLEQRKKIIAASKIRQKDQNTACSPLQRKHFNSQKPIPAIKDVIGKSLQYLGTFGEMSIMEQVVALIDEEMCINCGKCYMTCNDSGYQAIQFDPETHLPTVSDTCTGCTLCLSVCPIMDCIRMVSRATPYQPKRGLPLAVKPVC

SEQ ID NO: 4577 - DNA, 1464 bp, Staphylococcus epidermidis
  CDS (1)..(1464)
atgggcgaatttaaaggatttatgaaatatgataaacagtcgctatcagaattgtctttggtagaccgtctttcgaatcatgaagcgtttcaacaacgcttcactaaagaagatgcttcgattcagggtgcgcgctgtatggattgtggaacacctttttgtcaaactgggcaatcttatggaagagaaacaataggatgccctattggtaattatatacctgagtggaacgacttagtctatcatcaagattttaaagctgcttacgaaagattgagagagacgaataattttcctgaatttacaggaagagtttgtcctgcaccatgtgagcaatcatgtgttatgaaaattaatagagaatccgtggcgattaaaggtattgaacgtacaattattgatgaagcatatgagaatgagtgggttcatcccgcatatcctgaagatcataaagaccaacgagttgctatcgtaggtagtggtccagcgggacttacagcagctgaagaattaaactttaaaggctataaagttactgtttatgaaaaggcgcatgaaccaggcggcttgctaatgtatggtataccaaatatgaaactagataaagacgtaatacgtcgacgtgtatcacttatgaaagatgctggggttttatttaaaacaggcgttgaaattggcgtcgatgtgagccgtgaaacacttgaagaaaattatgatgctattattttatgcacaggtgctcaaaatgcgagagatttaccattggaaggacgaatgggctctggtattcattttgcaatggactatcttactgaacaaacacagtatctaaatggtgagattgaaagtttgagcattactgctaaagataagaatgtaattattataggtgctggtgatactggtgcagactgtgtagcgacagcattacgtgaaaactgtaaatctattgttcaatttaataaatatacgaaacagcctgaagagattacttttgaaagtaatacttcctggccattagcaatgcctgttttcaaaatggattatgcgcataaggaatatgaagctaaatttggtcaagaaccaagagcctatggtgtacaaacaatgcgctatgatgttgacgagttaggaaatgttaaaggcttatatacacaaatattaaaagaaacgcctgatggcatggtgatggaagatggaccagaacgattttggccggctgatttagtcttattatctatagggtttgttggtactgaaaccactgttccgcatgcgtttgatatacacaccgagcgtaataaaattgtagctaatgatacaaattatcaaactaatcacgctaaaatatttgctgcaggagatgcaagacgaggtcagagtttggttgtttgggcaataaaagaaggtcgtgaagtagcacattctgttgatcaatacttaagtaaagaagttctagtgtag

SEQ ID NO: 4578 - protein, 487 aa, Staphylococcus epidermidis
MGEFKGFMKYDKQSLSELSLVDRLSNHEAFQQRFTKEDASIQGARCMDCGTPFCQTGQSYGRETIGCPIGNYIPEWNDLVYHQDFKAAYERLRETNNFPEFTGRVCPAPCEQSCVMKINRESVAIKGIERTIIDEAYENEWVHPAYPEDHKDQRVAIVGSGPAGLTAAEELNFKGYKVTVYEKAHEPGGLLMYGIPNMKLDKDVIRRRVSLMKDAGVLFKTGVEIGVDVSRETLEENYDAIILCTGAQNARDLPLEGRMGSGIHFAMDYLTEQTQYLNGEIESLSITAKDKNVIIIGAGDTGADCVATALRENCKSIVQFNKYTKQPEEITFESNTSWPLAMPVFKMDYAHKEYEAKFGQEPRAYGVQTMRYDVDELGNVKGLYTQILKETPDGMVMEDGPERFWPADLVLLSIGFVGTETTVPHAFDIHTERNKIVANDTNYQTNHAKIFAAGDARRGQSLVVWAIKEGREVAHSVDQYLSKEVLV

SEQ ID NO: 4579 - DNA, 1437 bp, Streptococcus mutans
  CDS (1)..(1437)
atggcagatccgtttggatttttaaagtatgagcgcaaggacaatccctatcgtcctgttaatgagcgtatcaaagattttgaagaattgcagacaactttatcagttgaggaacgtcaaaagcaagctgctcgctgtatgaattgtgggatccctttctgtcatgagggaactttctatggtggcggtcgtgctgtttcaggttgtcccaatgacaatttaatccctgaatggaatgatttgatttataagggcgatttcagacgtgcttttgaacgcttgacacgaactaaccctttaccagaaatgacaggtcgtgtctgcccggcaccttgtgaaaaggcctgtacagaaggcttaaatggttcgggtgttaccattcatgataatgaacgttttattattgataatgcatttgaagaaggctgggtagctgattctggtcgccctattgagcgtacaggttttaaagtagctgtcgtaggttcaggtcctgctggcctgtcagctgcttggcgtcttaaccagttgggtcacagtgtaactgtgtttgagcgttctgatcgctttggtggtttgctcatgtatggtattcccaatatgaaattggataagaaaattgtgcaacgccgtattgatacgatggcttcaattggtattaattttgttgccaatacagaaattggtcgtgatattacagcagaagaattattagaaaaatttgaccgtgtaatcttggcaactggagctagcgttcctcgtgacttggatattccaggccgtgacttaaaaggcattcgatttgctgttgatttcttaacagaaacgactaaaaatcttttggacagtgacacacacgaattaccgcccttgcttgaaggaaaacatgtcttagttattggcggtggcgatactggaaatgactgtatcggtacggctgttcgtttgggagctgctagtgttagacaattagaaattacgccgcaactgcctgaaaagcgtctgccaacaaatccatggccacaatatcctatgattaatcgtacaggctatggacaggaagaagccgattttgttcaacagactgatttgacggactatatcacgtcaacagtagaatttcttggtgaaaatggccaagtgactgcggtgaagacaattaaggttggacctggtttcaaagccattgaaggaactgaagaggtaattaaggcagatcttgttcttcttgctatgggcttcacaggtgctgaaaaagcgctctttgaccaattccgagttgaatgtgtttatgatgactattcaactcgaaatgagaaggtttttgttgcaggtgatgcacgccgtggtcctagtcttgttatttggggaattcgagaaggacgcaaaacagcagagaaaattgatcaaaacctcagaatgatggttacagagtag

SEQ ID NO: 4580 - protein, 478 aa, Streptococcus mutans
MADPFGFLKYERKDNPYRPVNERIKDFEELQTTLSVEERQKQAARCMNCGIPFCHEGTFYGGGRAVSGCPNDNLIPEWNDLIYKGDFRRAFERLTRTNPLPEMTGRVCPAPCEKACTEGLNGSGVTIHDNERFIIDNAFEEGWVADSGRPIERTGFKVAVVGSGPAGLSAAWRLNQLGHSVTVFERSDRFGGLLMYGIPNMKLDKKIVQRRIDTMASIGINFVANTEIGRDITAEELLEKFDRVILATGASVPRDLDIPGRDLKGIRFAVDFLTETTKNLLDSDTHELPPLLEGKHVLVIGGGDTGNDCIGTAVRLGAASVRQLEITPQLPEKRLPTNPWPQYPMINRTGYGQEEADFVQQTDLTDYITSTVEFLGENGQVTAVKTIKVGPGFKAIEGTEEVIKADLVLLAMGFTGAEKALFDQFRVECVYDDYSTRNEKVFVAGDARRGPSLVIWGIREGRKTAEKIDQNLRMMVTE

SEQ ID NO: 4581 - DNA, 1419 bp, Vibrio vulnificus
  CDS (1)..(1419)
atgaacatgagccagaatgtataccagtttatcgatgttcaacgtgtcgatcctgctaagaagccgctgcagattcgcaagatcgagttcgtcgaaatctacgaaccctttactaaacagcaagcgaccgctcaagcggatcgctgcttagattgtggtaacccttattgtgaatggaagtgcccggtacacaactacatccctcagtggctaaaactggccaatgaaggacgaattttggaagcggtcgagctttcacatcagaccaacagcttgccggaagtgtgtggccgagtttgccctcaagaccgactgtgtgaaggctcttgcacattaaatgacgactttggtgccgtcaccatcggtaatattgaaaaatacatcaccgacaaagcctttgagatgggctggaagccagacatgtccaaagtcgaatggacagataagaaagtggccatcattggcgcgggccctgcaggtctcgcggcggctgatattttggtgcgcaatggggtcaaacccgttgtcttcgaccgctacccagagatcggtgggctactgacgtttggtattccgtctttcaaactggaaaaaggggtgatggaaaaccgccgccgcattttcagcgaaatgggggttgagttccgcatgaacgtcgaagtcggtaaagatgtacagatgcaagaactgctggaagagtatgatgccgtgttccttggcgtcggcacctacaaatacatgcgtgctggtttggagaatgaggatgcctccggcgtgtatgacgccctgccttttttgatttccaacacttacaaagtaatgggccttgaacacgaccagcctttcatcgatatggcgggcaaaaatgttgtcgtgcttggtggcggtgataccgcgatggactgtgttcgtacttctatccgccaaggcgctgccaatgtcgtttgtgcctatcgtcgcgatgaagagaacatgccaggctcacgtcgtgaagtgaaaaacgccaaagaggaaggggtgaactttatgtttaacctgcaacctctgtcgattgacgtggacactcgcggacaagtgacgggcgtgaaagtggtgcagactgcgttaggtgagcccgatgaggcaggccgccgtcgtcccgaacctgtggcaggcagtgagcatgtgttacctgccgatgtggtgatcatggcctttggcttccaaccccatcaaatgagttggttggagccttatggagttgagctcgaccaatggggtcgcatcaaagctgctgcgaaacagacttaccaattccaaaccagcaatgagaagatttttgccggtggtgatgcggtgcgtggttccgatttggtggtgacggcgattgatgaaggccgtaaagccgcggaaggcatattagattatctcgaactctaa

SEQ ID NO: 4582 - protein, 472 aa, Vibrio vulnificus
MNMSQNVYQFIDVQRVDPAKKPLQIRKIEFVEIYEPFTKQQATAQADRCLDCGNPYCEWKCPVHNYIPQWLKLANEGRILEAVELSHQTNSLPEVCGRVCPQDRLCEGSCTLNDDFGAVTIGNIEKYITDKAFEMGWKPDMSKVEWTDKKVAIIGAGPAGLAAADILVRNGVKPVVFDRYPEIGGLLTFGIPSFKLEKGVMENRRRIFSEMGVEFRMNVEVGKDVQMQELLEEYDAVFLGVGTYKYMRAGLENEDASGVYDALPFLISNTYKVMGLEHDQPFIDMAGKNVVVLGGGDTAMDCVRTSIRQGAANVVCAYRRDEENMPGSRREVKNAKEEGVNFMFNLQPLSIDVDTRGQVTGVKVVQTALGEPDEAGRRRPEPVAGSEHVLPADVVIMAFGFQPHQMSWLEPYGVELDQWGRIKAAAKQTYQFQTSNEKIFAGGDAVRGSDLVVTAIDEGRKAAEGILDYLEL

SEQ ID NO: 4583 - DNA, 1407 bp, Shewanella oneidensis
  CDS (1)..(1407)
atgagtaacgattttcaatttattgaagtgggtcgcaaagacccaaccaaacaccctgcggcaaaacgttcgactcagtttattgagatttatcagccctttgcacaggctcaggtgagcgaacaagcggatcgctgtttagattgtggtaacccttactgtgagtggaagtgtccactgcacaactacattcctaactggctaaagctcgcgcaacagggccggattatggaggcggcagatttagtccatgagaccaataccctgcccgaaatttgcggccgcgtctgtccacaggacagactctgtgaaggcgcctgtaccctaaacgccgactttggcgctgtgactatcggtaatgtggaaaaatacattaccgataccgctatcgcccaaggctggcgtccggatatgagcaaggtcacgccacgtaaagaaaaggtcgcgattgtcggcgcaggaccagcgggtttaggctgcgccgatattcttgcccgcaatggagtaaaggctgtggtgtttgataagtatccccaaattggtggcctgctgacctatggtatccccgcctttaaactggataaagccgtaatggcgactcgccgcactgtgttagaaggcatgggcattgagttcaaactgggcgtaactgtcggcaaggacgttgcctttaatcaattgcttgaggaatacgatgccgtcttccttggcatgggaacctacaccgccatgaaagcgggccttgagggtgaagatgctcaaggcgtttaccaagccctgccctatttgattggtaatacccatcacctgatgggcagcacaagccctgatatgccttatcttaaccttgccggtaaacgcgtagtggtcttaggtggcggtgataccgccatggattgtgttcgtaccgccgtgcgccaaggtgccagcagtgtaatttgtgcctatcgccgtgatgaggccaacatgccaggttctcgccgcgaagtacaaaatgcccgtgaagagggagtgaacttcctgtttaaccgtcaacccgtggcgattaaaacccaggatggcaaagtgctaggtgtggaatgcgttgaaacccagatgggcaaggcggatgccagtggtcgtcaacgggccgaagcgattgtgggcagtgagcagttactcgaagccgatgcagtgattatcgccttcggtttccaaccaagcccagcgccttggtttgccgattacggcattgaactcgaccaatggggccgagtaaaagccagtaaacaggccgataatcctttccaaaccaccaatcccaaggtatttgctggcggcgatatggtaagaggctcggaccttgtcgttaccgcgattgccgaaggacgggatgccgcgcaaggcattcttaactatctggattaa

SEQ ID NO: 4584 - protein, 468 aa, Shewanella oneidensis
MSNDFQFIEVGRKDPTKHPAAKRSTQFIEIYQPFAQAQVSEQADRCLDCGNPYCEWKCPLHNYIPNWLKLAQQGRIMEAADLVHETNTLPEICGRVCPQDRLCEGACTLNADFGAVTIGNVEKYITDTAIAQGWRPDMSKVTPRKEKVAIVGAGPAGLGCADILARNGVKAVVFDKYPQIGGLLTYGIPAFKLDKAVMATRRTVLEGMGIEFKLGVTVGKDVAFNQLLEEYDAVFLGMGTYTAMKAGLEGEDAQGVYQALPYLIGNTHHLMGSTSPDMPYLNLAGKRVVVLGGGDTAMDCVRTAVRQGASSVICAYRRDEANMPGSRREVQNAREEGVNFLFNRQPVAIKTQDGKVLGVECVETQMGKADASGRQRAEAIVGSEQLLEADAVIIAFGFQPSPAPWFADYGIELDQWGRVKASKQADNPFQTTNPKVFAGGDMVRGSDLVVTAIAEGRDAAQGILNYLD

SEQ ID NO: 4585 - DNA, 4287 bp, Shewanella oneidensis
  CDS (1)..(4287)
atgatagaacttcgaatcgacaataagatagtctcggccgaaccgagcgataacctattacacgcagcccgtaaggcgggtattgctattcccagcctgtgcgatcccactgacgcctcacggcaattggacacgcaagcccatgccgaaaagcaggactgtaacctctgtctggtgcaaatcgaaaatagcgatgccagcctacgctgtgttaaagcctgtgaaaccccagcccaaacaggcatgaaggtcatcacccaatcggcgtttttaaccaaacaacgccaagcagcactgaacgctattttgagcgatcactttgccgactgtgaggcgccctgccaacaagcctgcccagcgggtgttgatgtgcagcgttatctgtaccacattgcccaaggtgaccacactcaagcggttaaagtcattaaagaaacattgccactgccactgtcgattggccgagtttgccccgcgttttgcgaaaccgaatgccgccgcggcctcatcgacgacccgattgccatccgccaacttaagcgccatgccgccgatttagatttagccgatgacgagcacggcaatagttatcaaccgccacgcctcgcagacactggcaagaaaattgcgattattggctctggcccagcgggcttaagcgcgggttattacctgtctaaccaagggcataatattgagatttttgaggccatgcccaaggccggtggttggctgcgctacggtattcccgaataccgtttacccaaagcgattctcgataaagaaattgagttgctgtgtcgtaatgggttaaccattcatacccaaatgcgcctaggtcatgagatccatttaaaccagctgatcaccgattttgatgcagtgtgccttgccatcggcgcccaaaaagcagtgccaatgcactataaaggctccgagcttgctggctgctatcttggggtggattttcttaaggatcattgcctcgataagcaattgaagcttggtaaaaaagtggcggtaattggcggcggcaacaccgccatagattgtgctcgcacagcggtgcgcgaaggctgcgatgtcaccttaatctaccgccgtacccgcgccgaaatgcccgctgaagcctacgaagtgcacgaggccgaagttgaaggggttaagtttcacttcttaaccaatccacttgaaaaccatagtgatgccgacggtcgagtgcagtcggtcacctttagcaaaatgacgctcggcgaagccgatgcctcgggcagacgtgcgccagtggacacgggggaaacctttaccgaagcctttgatacagtgatcgccgccgtatctcaagcgccagatctgagctttatgcaagatcctaaaggacagcttagccatggcgaactggcgctgagccgttggaacacactaatgggttgtgagcaaaccatgtcatcgggcgtggaaaagctgtttgtgatgggcgatgcccgccgcggcccagccaccgccgttgccgccattggtgatggccgaaaggcagcaaaagccattgataaaatgcttcaaattggccttagctgcgatttgcatgcccatgaatttaactcggtaaaaaccattccgggctcccttaaacaggctgaggtcaaatcagcagaagcaagttcacccctctacccccatacaaaacgtcagccccgcttaaaaatgcccgaactcacggcgctgcaacgactactcaattacagtgaagtagaattgggctttcccgcagatgccgccatgcaagaagcggcacgttgccttgagtgtgcttgccaagccaatactgactgtaaacttagggattacgccacggattacggtgttgagagcaaaagcttagccaccgaaaatgcacggtattttagcgtagataagagttcgccctttattcaattcgatgccaaccgttgtattagctgcggcaaatgcgtcgatgtgtgtcagcagcagagtggtcactgcgcgattcaattcgcgaaagactcctaccaagtactgccgcagagcatcagtcctgctgatgagcgaagagcccccagagttggctttagtgccagcatggccgatagccactgcgtacaatgtggtaactgtgtgcaggtttgcccaacgggcgcgctggtcgatgcgcgggataaacgccaaggcgattgtacagagttaacaaccgcctccaccatttgtacttactgcggtgtcggctgtcgtctcgatcttaaaatcgaccccagcaccaatcgtattcgccatatcgaaggcaacaaagactcggtcgttaaccaaggcatgttatgtgttaaagggcgttttggcttcgattttattcacagcgacaaacgcctaaccaccccactaatacgtaaaaacggcaaactgcaaccttgtagttggccggaagctatcgactatgtagcaaaacgtttaaccgagataaaacaaaaagatggcagcaatgccttcgcaagtctcgcctcggccaaggccaccaatgaagataactttgtactgcaaaagtttgtccgtagcgtccttggcaccaacaacatcgaccattgcgcccgcctgtgtcactcctcgaccgttacgggcctgcagcagagcattggtagcggcgccatgaccaatgatattctgagtataaaggactccgacgtcatttttattctgggttccgataccacctgcgcccatccgattatcgcctcaaaaatccagcaggcagtcaacctgtacggcgctcggttgatcgtggccgatccgaaacgcgttggcatagcagaaaaggccgaactctatgttgcccacagaccgggcacggatgtgatgctgctcaacgccattatggcagaaattattcgcaataattggcaggataaagactatattgccaagcggaccgaaggcattgaggcactgtatgccgagcttgccaaggaggattactcccttgaaaaagcggcacttatcacaggtgttaaagctgagaatatcgcccgtattgcgcgtaccataggcacggcgcaaaaaacggcggtgtactacgccatggggataacccaacataccacggggcacgataacgtcaccgccatatctaatctgcagctactttgcggcaatattggtgtgtcaggagctggcatcaacccactgcgcggccagagtaatgtgcagggcgcctgcgatatgggcgcgctgcccaactattttaccggttaccaaaaggtcacggatattcatgccagaatgcgcttcgaaagccattggcaaactccgttatcgggggagattggcgtcacagcaacccatatgatgcatgatattgccaagggcaaaatcaacgccttatatgtgatgggtgaaaacccagtgctgagcgatcctgaccaagcccatgtgcttaacgccttaagccagattgagtttttagttgtccaggacatctttttaaccgagaccgctgagcttgcccatgtggtgttgcccgccgccgcttttgtggaaaaacgcggccactttaccaacaccgaacgacgagtacagcgacttgagcaagcgcttgcctcaccgggtgaagcgctgcccgattggcaaatcgtacaagcgattgccaatgctatgggagcaaactgggattataaagatgaagcagcaatttgggctgaaattaatgcattaacgcctcagtatcgcggcattctttgggagagattaaccgctggtgaggatggtcaaatccctcaaggtattcaatggccttgtccggatgaaaagcatccgggaacaccgattatgcaccaaggtcaattcacccgcggtttaggtttatttacgccggtcagctatcgccttcccgctgaaatgccctgcaacgagtatccacttacgctctcgacaggtcgtctattggagcaattccatacgggcaccttaacgcgcaaaacgcccgggctggacttacttggtgcacctaaagtgatgatttctgtctacgatgccgaacaactcgggattaataacggcgataaaattcgcctaaccacccgccgtggcgagattgaaattgatgcctttgtgacaaaacgcgctcaggcaggcgtactgttcttacccttccattttgtcgaagccgcagcgaacaaactcaccatcaatgcattagatcccgtggcttatatccccgagtataaagtgtgtgcggtaagagttgaaaaggtgacaaagcagatgtgtgagcccacctaa

SEQ ID NO: 4586 - protein, 1428 aa, Shewanella oneidensis
MIELRIDNKIVSAEPSDNLLHAARKAGIAIPSLCDPTDASRQLDTQAHAEKQDCNLCLVQIENSDASLRCVKACETPAQTGMKVITQSAFLTKQRQAALNAILSDHFADCEAPCQQACPAGVDVQRYLYHIAQGDHTQAVKVIKETLPLPLSIGRVCPAFCETECRRGLIDDPIAIRQLKRHAADLDLADDEHGNSYQPPRLADTGKKIAIIGSGPAGLSAGYYLSNQGHNIEIFEAMPKAGGWLRYGIPEYRLPKAILDKEIELLCRNGLTIHTQMRLGHEIHLNQLITDFDAVCLAIGAQKAVPMHYKGSELAGCYLGVDFLKDHCLDKQLKLGKKVAVIGGGNTAIDCARTAVREGCDVTLIYRRTRAEMPAEAYEVHEAEVEGVKFHFLTNPLENHSDADGRVQSVTFSKMTLGEADASGRRAPVDTGETFTEAFDTVIAAVSQAPDLSFMQDPKGQLSHGELALSRWNTLMGCEQTMSSGVEKLFVMGDARRGPATAVAAIGDGRKAAKAIDKMLQIGLSCDLHAHEFNSVKTIPGSLKQAEVKSAEASSPLYPHTKRQPRLKMPELTALQRLLNYSEVELGFPADAAMQEAARCLECACQANTDCKLRDYATDYGVESKSLATENARYFSVDKSSPFIQFDANRCISCGKCVDVCQQQSGHCAIQFAKDSYQVLPQSISPADERRAPRVGFSASMADSHCVQCGNCVQVCPTGALVDARDKRQGDCTELTTASTICTYCGVGCRLDLKIDPSTNRIRHIEGNKDSVVNQGMLCVKGRFGFDFIHSDKRLTTPLIRKNGKLQPCSWPEAIDYVAKRLTEIKQKDGSNAFASLASAKATNEDNFVLQKFVRSVLGTNNIDHCARLCHSSTVTGLQQSIGSGAMTNDILSIKDSDVIFILGSDTTCAHPIIASKIQQAVNLYGARLIVADPKRVGIAEKAELYVAHRPGTDVMLLNAIMAEIIRNNWQDKDYIAKRTEGIEALYAELAKEDYSLEKAALITGVKAENIARIARTIGTAQKTAVYYAMGITQHTTGHDNVTAISNLQLLCGNIGVSGAGINPLRGQSNVQGACDMGALPNYFTGYQKVTDIHARMRFESHWQTPLSGEIGVTATHMMHDIAKGKINALYVMGENPVLSDPDQAHVLNALSQIEFLVVQDIFLTETAELAHVVLPAAAFVEKRGHFTNTERRVQRLEQALASPGEALPDWQIVQAIANAMGANWDYKDEAAIWAEINALTPQYRGILWERLTAGEDGQIPQGIQWPCPDEKHPGTPIMHQGQFTRGLGLFTPVSYRLPAEMPCNEYPLTLSTGRLLEQFHTGTLTRKTPGLDLLGAPKVMISVYDAEQLGINNGDKIRLTTRRGEIEIDAFVTKRAQAGVLFLPFHFVEAAANKLTINALDPVAYIPEYKVCAVRVEKVTKQMCEPT

SEQ ID NO: 4587 - DNA, 1485 bp, Oceanobacillus iheyensis
  CDS (1)..(1485)
atgggaaaacaaacgggttttatggagtatgaacgacaaacgcgtcctggtagaaatccacaagagcgtgttaaagactggaacgattatacggcaccgatgtcagatgaggaagtgcaaaaacagggtgctcgttgtatggattgtggtgttcctacgtgtcatcaaggaattgagatagcaggggtaacttcaggttgccctgtctatcacttaattccagagtggaataacttagtatatgaggggaaatggagagaagcacttgataaagaacatcaaatgaataatttccctgaatttacaggaatcgcatgtccggccccttgtgaaggtgcatgtgtgttaggaataaatgagcctgcggtagctatccgtacggtggaacgttcgattattgaaaaaggatttgaagaaggatgggttgtaccaaatccaccaaaaatccgaactggtaaacgtgtagcaatagttggatctggtccagccggtttagcagcagcagatcagttaaacaaagcaggacattctgttacagtttatgagcgagataagcgcgttggtgggctattaacatatggaattccagaaatgaaactatcttatgatattgtaatcagacgtgtgtccatcttagaacaagaaggcattgagtttattacgaatacagaagttggtaaagatattacaaatgaagagttacaagaaacatatgattccgttgtactatgtggcggtgcaagtttacatcgtgacatgccagtagaaggtagtcagcttaaaggagttcatcctgctatggactttttacatgccaatgttgaaagtctattagattctaacttagaagatggaagctatatttcagctaaagataagaatgttatcgtcattggtggtggtgatacaggaacggattgccttgctacctctgttcggcataattgtaaaagccttacacaatttgatatctatgaaaaacgtaatcttttacgtgatgaagaagcaaatccatggccccaatatccaaaaattcatcgagtggagtatggtcaaaaagaagcggaagcacaatttggtgaggatccacgagcttatgcagttcagactacaaagtttgtaggcgatgaaaacggtcatgtgaaagaagtgcacacgattaacgtaaagacacgttatgaaggtggtaagaaaattcgtgaagaaataccaggaacagaaaaagtgtggccagcggatctagtattagttgctattgggttccaaggaccagatcaagatctaatcgaatcattagatgttgaaacaacaacacgttctacagtgaaagcaaaatacggcgaatttcaaacgaatatcgacggtgtttttgcagctggagatatgcgacgaggtcagagtctaatcgtctgggcaataaatgaaggacgaggagctgcacgtgagtgtgatcgtttcttaatgggagacacgatacttccataa

SEQ ID NO: 4588 - protein, 494 aa, Oceanobacillus iheyensis
MGKQTGFMEYERQTRPGRNPQERVKDWNDYTAPMSDEEVQKQGARCMDCGVPTCHQGIEIAGVTSGCPVYHLIPEWNNLVYEGKWREALDKEHQMNNFPEFTGIACPAPCEGACVLGINEPAVAIRTVERSIIEKGFEEGWVVPNPPKIRTGKRVAIVGSGPAGLAAADQLNKAGHSVTVYERDKRVGGLLTYGIPEMKLSYDIVIRRVSILEQEGIEFITNTEVGKDITNEELQETYDSVVLCGGASLHRDMPVEGSQLKGVHPAMDFLHANVESLLDSNLEDGSYISAKDKNVIVIGGGDTGTDCLATSVRHNCKSLTQFDIYEKRNLLRDEEANPWPQYPKIHRVEYGQKEAEAQFGEDPRAYAVQTTKFVGDENGHVKEVHTINVKTRYEGGKKIREEIPGTEKVWPADLVLVAIGFQGPDQDLIESLDVETTTRSTVKAKYGEFQTNIDGVFAAGDMRRGQSLIVWAINEGRGAARECDRFLMGDTILP

SEQ ID NO: 4589 - DNA, 3099 bp, Escherichia coli O6
  CDS (1)..(3099)
atgggggatattatgcgtcccattccgtttgaggaacttttgacgcgcatatttgatgaataccaacaacaacgctcaatctttggtattcccgagcaacagttttactcacccgtaaaaggtaaaactgttagcgtcttcggtgaaacctgtgccactcccgtcggccctgccgctggcccgcacacgcaacttgcgcaaaacatcgtcacctcctggctgactggcggacgcttcatcgaactaaaaaccgtccaaattcttgaccgcctggagctggaaaagccctgtatcgatgccgaagacgagtgctttaacaccgaatggtctaccgaatttaccctgcttaaagcctgggatgaatacctcaaagcctggtttgccctgcaccttctcgaagcgatgttccagccttctgattccggtaaatcgttcatctttaatatgagcgtcggttacaacctcgaaggtattaagcaaccgccgatgcagcagttcatcgacaatatgatggacgcatctgaccatccgaaattcgctcaataccgcgatgcacttaataagctactccagaatgaggcatttttagcccgccacggattgcaggaaaaacgcgaaagcttgcaagccttacccgctcgcatccccaccagcatggtacaaggggttaccctctccaccatgcacggctgtcctccgcatgaaatcgaagccatttgccgctacatgctggaagaaaaagggctcaacacctttgtgaaactcaacccgaccttactggggtacgcgcgtgttcgtgagatcctcgatgtctgcggtttcggttacatcggcttaaaagaagagtcatttgatcacgacctcaagctgacgcaagcgctggaaatgctggaacgcctgatggcactggcaaaagaaaaatcactcggctttggcgtaaaactgactaacactctcggcaccattaataacaaaggcgcactgcctggtgaagagatgtatatgtcaggccgtgcgctgttcccgctctccatcaacgttgcagcagttctctctcgcgcctttgacggcaaactgcccatttcttattccggtggtgccagtcagctgactatccgcgatatttttgatactggtattcgccctattactatggcaaccgacctgctgaaacctggcggctatctgcgcttaagtgcctgcatgcgcgagctggaaggctccgacgcctggggacttgaccatgttgacgtcgaacgactgaacagactggcagcagacgcgttaaccatggaatacacccagaaacactggaagccagaagagcgtattgaagtggctgaagacctgccgctgaccgattgctacgttgccccctgtgttactgcctgcgctatcaagcaagatattccggaatacatccgtctgcttggcgaacaccgctatgccgacgcgctggaactcatctatcaacgcaacgccctgcccgccattaccggtcatatttgcgatcaccagtgccaatacaactgtacccgcctggattacgacagtgcgctgaatatccgcgaactgaaaaaagtcgcgctggaaaaaggttgggaggaatataagcaacgctggcacaaaccagccggttctggttcacgccatccggttgccgtgattggtgcaggtccggcgggtctggccgcaggttacttccttgccagagcgggccatccggttacgctgtttgaacgcgaagccaatgcgggcggcgtggtgaaaaatatcattcctcagttccgtattcctgcagagttaattcagcacgatatcgattttgttgccgatcacggcgtgaaatttgagtacggttgctcacccgatttgaccgttgaacagttaaaaaatcagggcttccactatgttctgattgccaccggtaccgataaaaatagcggtgtgaaactggcgggcgacaaccaaaatgtctggaaatcactccccttcctgcgtgaatacaacaagggcaccacactcaagctgggcaaacatgtggtcgttgtcggggcgggtaacaccgcaatggactgcgctcgtgcggcgttacgcgttccaggcgtagaaaaagcaacggtcgtttaccgtcgttcactgcaagagatgccagcatggcgcgaagagtatgaagaagcgttgcacgacggcgtggagttccgtttcctgaataatccggaacgtttcgatgctgatggcaccttaaccttgcgcgttatgtcgcttggcgaacctgatgagaaaggtcgtcgccgtccggttgaaaccaacgaaacagtaacactgcatgtagacagcctgatcaccgccattggtgaacagcaggatactgaagccctgaatgcgatgggcgtgccgctggacaaaaacggctggccagacgtcgaccataatggcgaaacgcgtctgagtgacgtctttatgatcggcgacgtacagcgcggaccatcctccattgtcgctgctgtcggaaccgcgcgtcgggcgaccgatgccatcctgagtcgggaaaatatccgttcccaccagaacgataaatactggaataacgtcaatccggcggaaatctatcaacgtaaaggcgatatctctgtcactctggtgaacagtgacgatcgtgatgcgtttgtcgcgcaggaagccgctcgctgccttgaatgtaactacgtttgcagcaagtgtgtggatgtctgcccgaaccgcgccaacgtatccattacggtcccaggcttccagaaccgtttccagacgctgcacctcgacgcttactgtaacgaatgtggcaactgcgcccaattctgcccgtggaacggtaaaccgtacaaagacaaaatcaccgtcttcagcctgtcgcaagactttgataacagcagcaacccaggcttccttgtggaagattgccgggtacgcgtacgtctgaataaccaaagctgggtgttaaacatcgacagcgaaggtcagttcaacaacgtaccaccggagctgaacgatatgtgccgtatcatcagccatgtccaccagcatcatcattatctgctgggccgcgtggaggtgtaa

SEQ ID NO: 4590 - protein, 1032 aa, Escherichia coli O6
MGDIMRPIPFEELLTRIFDEYQQQRSIFGIPEQQFYSPVKGKTVSVFGETCATPVGPAAGPHTQLAQNIVTSWLTGGRFIELKTVQILDRLELEKPCIDAEDECFNTEWSTEFTLLKAWDEYLKAWFALHLLEAMFQPSDSGKSFIFNMSVGYNLEGIKQPPMQQFIDNMMDASDHPKFAQYRDALNKLLQNEAFLARHGLQEKRESLQALPARIPTSMVQGVTLSTMHGCPPHEIEAICRYMLEEKGLNTFVKLNPTLLGYARVREILDVCGFGYIGLKEESFDHDLKLTQALEMLERLMALAKEKSLGFGVKLTNTLGTINNKGALPGEEMYMSGRALFPLSINVAAVLSRAFDGKLPISYSGGASQLTIRDIFDTGIRPITMATDLLKPGGYLRLSACMRELEGSDAWGLDHVDVERLNRLAADALTMEYTQKHWKPEERIEVAEDLPLTDCYVAPCVTACAIKQDIPEYIRLLGEHRYADALELIYQRNALPAITGHICDHQCQYNCTRLDYDSALNIRELKKVALEKGWEEYKQRWHKPAGSGSRHPVAVIGAGPAGLAAGYFLARAGHPVTLFEREANAGGVVKNIIPQFRIPAELIQHDIDFVADHGVKFEYGCSPDLTVEQLKNQGFHYVLIATGTDKNSGVKLAGDNQNVWKSLPFLREYNKGTTLKLGKHVVVVGAGNTAMDCARAALRVPGVEKATVVYRRSLQEMPAWREEYEEALHDGVEFRFLNNPERFDADGTLTLRVMSLGEPDEKGRRRPVETNETVTLHVDSLITAIGEQQDTEALNAMGVPLDKNGWPDVDHNGETRLSDVFMIGDVQRGPSSIVAAVGTARRATDAILSRENIRSHQNDKYWNNVNPAEIYQRKGDISVTLVNSDDRDAFVAQEAARCLECNYVCSKCVDVCPNRANVSITVPGFQNRFQTLHLDAYCNECGNCAQFCPWNGKPYKDKITVFSLSQDFDNSSNPGFLVEDCRVRVRLNNQSWVLNIDSEGQFNNVPPELNDMCRIISHVHQHHHYLLGRVEV

SEQ ID NO: 4591 - DNA, 1980 bp, Escherichia coli O6
  CDS (1)..(1980)
atgaatcgttttattatggccaacagtcagcaatgtctgggttgtcatgcttgtgaaatcgcctgtgtcatggctcacaatgacgagcaacatgtcctgagccaacaccattttcatccccgaattacggttatcaaacatcagcagcaacgtagtgcagtgacctgtcaccattgtgaagatgcgccctgcgcccgtagctgccctaatggcgcaatcagccacgttgatgacagcattcaggtcaatcagcaaaagtgtattggctgtaaatcctgcgtggtggcctgtccatttggtacgatgcaaatcgttctgacacccgttgcggtaggaaaagtaaaagccacggcgcataaatgcgacctttgtgcagggcgcgaaaacggtcctgcctgtgtcgaaaattgcccggcggacgcgctgcaactggtcactgacgccgcactctccggcatggcgaaatcccgccgcttgcgcaccgcacgtcaggaacatcaaccgtggcatgccagtaccgcggcgcaagaaatgccggtaatgagtaaagtcgagcaaatgcaggcaacgcccgcgcgtggcgagccagataaactggcgattgaagcgcgcaaaaccggttttgatgaaatttatctgccattccgtgccgatcaggcacaacgggaagcctcgcgctgccttaagtgcggcgagcacagcgtttgtgaatggacctgcccgctgcataaccatataccgcagtggattgaactggtgaaagccggaaacatcgacgccgccgtcgagctttctcaccagaccaacaccctgccggaaattaccggacgcgtttgcccgcaagaccgtttgtgtgaaggtgcctgtactattcgcgatgagcacggcgcagtaactatcggtaacattgaacgctacatttcagatcaggcgttggcgaaaggttggcgtcctgacttaagccatgtcaccaaagtggacaagcgggtggcgattatcggtgcgggtccggcagggctggcctgtgcagatgttctcacccgcaatggcgtggcggtgacggtgtacgatcgccatccagaaatcggtggcttgctcactttcggcattccttctttcaaactggataaatccctgctggcacgccgtcgggaaatcttcagcgcgatggggattcacttcgaactcaattgtgaagtgggtaaagatgtctctttgaattcgcttttggaacaatacgacgcggtcttcgttggcgtaggcacttaccgttccatgaaagcgggtttacccaatgaagatgcgccgggcgtttatgacgcgctgccgttcctcatcgccaatactaaacaggtgatgggactcgaagagctaccggaagagccgtttatcaatactgccggacttaacgtcgtggtactgggcggcggcgacaccgcgatggactgtgtgcgtactgcgctgcgccacggcgcgagtaacgtcacctgcgcttatcgtcgtgatgaagctaacatgccaggctcgaagaaagaggtgaagaacgcccgtgaagagggggccaacttcgaatttaacgtccagccggtggcgcttgaactgaatgaacaaggtcacgtctgcaggattcgtttcctgcgcacgcgtcttggcgagccggacgcccagggacgtcggcgtccagtgccggtggaaggcagtgaatttgtcatgccagccgatgcggtgattatggcgtttggcttcaatccgcacgggatgccgtggctggagtcgcacggtgtaacggtagacaaatggggccgcatcatcgcggatgtggaaagccagtaccgttaccagaccacgaatccgaaaatcttcgccggtggtgacgccgtgcgtggtgcggatctggtggttaccgcaatggcagaaggacgtcatgcggcacaggggatcattgactggctgggcgtaaaatcagtcaaatctcactga

SEQ ID NO: 4592 - protein, 659 aa, Escherichia coli O6
MNRFIMANSQQCLGCHACEIACVMAHNDEQHVLSQHHFHPRITVIKHQQQRSAVTCHHCEDAPCARSCPNGAISHVDDSIQVNQQKCIGCKSCVVACPFGTMQIVLTPVAVGKVKATAHKCDLCAGRENGPACVENCPADALQLVTDAALSGMAKSRRLRTARQEHQPWHASTAAQEMPVMSKVEQMQATPARGEPDKLAIEARKTGFDEIYLPFRADQAQREASRCLKCGEHSVCEWTCPLHNHIPQWIELVKAGNIDAAVELSHQTNTLPEITGRVCPQDRLCEGACTIRDEHGAVTIGNIERYISDQALAKGWRPDLSHVTKVDKRVAIIGAGPAGLACADVLTRNGVAVTVYDRHPEIGGLLTFGIPSFKLDKSLLARRREIFSAMGIHFELNCEVGKDVSLNSLLEQYDAVFVGVGTYRSMKAGLPNEDAPGVYDALPFLIANTKQVMGLEELPEEPFINTAGLNVVVLGGGDTAMDCVRTALRHGASNVTCAYRRDEANMPGSKKEVKNAREEGANFEFNVQPVALELNEQGHVCRIRFLRTRLGEPDAQGRRRPVPVEGSEFVMPADAVIMAFGFNPHGMPWLESHGVTVDKWGRIIADVESQYRYQTTNPKIFAGGDAVRGADLVVTAMAEGRHAAQGIIDWLGVKSVKSH

SEQ ID NO: 4593 - DNA, 1239 bp, Escherichia coli O6
  CDS (1)..(1239)
atgccgcaacaaaattatctggatgaactcactccggcttttacgcctttactggcgattaaagaagcctctcgctgtttattatgtcatgacgctccctgtagtcaggcttgcccggcacagaccgatccggggaaatttattcgctcaatctactttcgtaattttaaaggcgctgccgagacaattcgcgaaaataatgccctcggtgccgtttgtgccagagtgtgcccgacggagaaattatgccaaagcggttgtacacgtgccggtgttgatgctcccattgatatcggtcgtttacagcgttttgttactgattttgaacaacaaactgggatggaaatttatcagcccggtactaaaacgctcggcaaagtcgccattattggcgcaggtcctgccggattgcaggccagtgtgacgctgacaaaccagggttatgacgtcacgatccatgagaaagaagcacaacccggtggctggttgcgtaacggcattccgcaattccggttaccgcaatcggtgctggatgcagaaatcgcccgtatagaaaaaatgggcgtgaccattaagtgcaataacgaaatcggtaaaacacttaccctggagcagctgaaagcggaaaaccgcgcggtactggtcaccgtagggttatcgagcggttccgggttatcgctgtttgagcatagcgacgttgagattgccgtcgacttcctgcaacgtgcacgacaggcgcaaggcgatatcagcattccacaaagcgcattaattatcggcggcggtgatgtcgcgatggacgtagccagcacgctgaaagttctcggctgtcaggcggtaacctgcgtagcgcgtgaagagttagatgagtttccggcaagcgaaaaagagtttaccagcgccagagagctgggcgtttcgatcatcgatggatttacaccagtagccgtggaaggcaataaagtcacctttaagcatgttcgtttaccaggtgaactaacgatagcggcggacaaaattattctcgctgtaggtcaacatgccgaacttgctgttttttccgcactggaaccgcagcgtaacaccatcgaaacgcaacattaccagacccgcgacccgcaagtctttgctgctggcgatattgttgagggtgacaaaaccgtggtctatgcagtgaaaaccgggaaagaagccgccggggcgattcatcactatttagagggagcttgctcatgttaa

SEQ ID NO: 4594 - protein, 412 aa, Escherichia coli O6
MPQQNYLDELTPAFTPLLAIKEASRCLLCHDAPCSQACPAQTDPGKFIRSIYFRNFKGAAETIRENNALGAVCARVCPTEKLCQSGCTRAGVDAPIDIGRLQRFVTDFEQQTGMEIYQPGTKTLGKVAIIGAGPAGLQASVTLTNQGYDVTIHEKEAQPGGWLRNGIPQFRLPQSVLDAEIARIEKMGVTIKCNNEIGKTLTLEQLKAENRAVLVTVGLSSGSGLSLFEHSDVEIAVDFLQRARQAQGDISIPQSALIIGGGDVAMDVASTLKVLGCQAVTCVAREELDEFPASEKEFTSARELGVSIIDGFTPVAVEGNKVTFKHVRLPGELTIAADKIILAVGQHAELAVFSALEPQRNTIETQHYQTRDPQVFAAGDIVEGDKTVVYAVKTGKEAAGAIHHYLEGACSC

SEQ ID NO: 4595 - DNA, 1527 bp, Corynebacterium efficiens
  CDS (1)..(1527)
atgtccgacccacatggattccagaaatacacccgcgccgaacccgcccaccggccggtgcccctgcgcctcatggacttccacgaggtctacgaggcggcacccgccggccagatcgaggagcaggccgcccgctgcatggactgcggcgtgcccttctgccaccagggttgccccctgggcaacatcattcccgagtggaacaacctggtgcgcgagggacggtggaaggaggcctacgaccgcctgcacgccaccaacaacttccccgaattcaccggccgcctgtgccccgcgccgtgtgagggtgcgtgcgtgctcgacatcaacgatgacgccgtgaccatcaagaatgtggagctggagatcgtcgaacgggccttcgccgagggctgggtggaaccggtgcgtgcctccctggataccggcctgacggtggccgtggtgggttcgggcccggccggtctggccgccgcgcagcagctgacccgcgccggacaccgcgtgaccgtcttcgaacgctccgaccgcctgggtggcctgatgcgttatggcgtgccggactacaagatggagaaccgctggatcgaccgccgtctcgaccagatgcgggcggagggcaccgtgttccgggtcggggtctccccgaaggccgctgaactggcgcttttcgacgccgtcgtgctcgccaccggcacgcccgtcgcccgtgagctgggcatcccgggcgcagaactcgccggtgtccacccggcgatggactacctcaccgcgcagaacagggcgaatgaaggtgacggcccggtgcctgcggagtttgatgcccgcggcaggagggtcgtgatcatcggtggcggcgacaccggcaccgactgcttcggcaccgccctgcgccagggggcggcctcggtgacacagttcgacatccgcccgcgcggaccggtgctgcgcgccgaggagaccccgtggccgatgtaccccaaccagttccgcaccgccaccgcccatgaggagggttcctatgtcctccgcggggatgaatccgtcgccgagatcgaggccctgggcctgggtacccgcgccgtcggcgaaccgctgggtgagcggagattcgcggtgaacaccgtcgccctgcacggcgatgaccggggccgggtcaccggtctgaccggatgccagatcaaggtggtcggcggtcgccgcgaaccagtcgaaggcaccgagttccccttcgacgccgacctggtcctggtggccctgggcttcaccggcgccgaacagggcgggctggcccatgaactgggcgtgggtttcgatacccgcggccgcatgatccgcgacgccggttaccgcagtcccaccaactcccgcgtctacatcgccggcgacaacggccgtgggcagtccctgatcgtctgggccatcgccgagggccgggcgtgtgccgccgccgtcgacgccgacctcatgggtgaaaccgcactcccggttgccgtgacccctcaggacatgccgatggcggtgtga

SEQ ID NO: 4596 - protein, 508 aa, Corynebacterium efficiens
MSDPHGFQKYTRAEPAHRPVPLRLMDFHEVYEAAPAGQIEEQAARCMDCGVPFCHQGCPLGNIIPEWNNLVREGRWKEAYDRLHATNNFPEFTGRLCPAPCEGACVLDINDDAVTIKNVELEIVERAFAEGWVEPVRASLDTGLTVAVVGSGPAGLAAAQQLTRAGHRVTVFERSDRLGGLMRYGVPDYKMENRWIDRRLDQMRAEGTVFRVGVSPKAAELALFDAVVLATGTPVARELGIPGAELAGVHPAMDYLTAQNRANEGDGPVPAEFDARGRRVVIIGGGDTGTDCFGTALRQGAASVTQFDIRPRGPVLRAEETPWPMYPNQFRTATAHEEGSYVLRGDESVAEIEALGLGTRAVGEPLGERRFAVNTVALHGDDRGRVTGLTGCQIKVVGGRREPVEGTEFPFDADLVLVALGFTGAEQGGLAHELGVGFDTRGRMIRDAGYRSPTNSRVYIAGDNGRGQSLIVWAIAEGRACAAAVDADLMGETALPVAVTPQDMPMAV

SEQ ID NO: 4597 - DNA, 1455 bp, Brucella suis
  CDS (1)..(1455)
atgggtaaggtaactggttttcttgaaatcgaccggcaggtggcgaagtaccagccggcgtcggatcgtatccgccacttccgcgaattcaccatcccgatgacggatggcgaggtgcagaagcaggcggcgcgctgcatggattgcggcattccatactgccacgggccgacgggctgcccggtgcacaaccagatcccggactggaacgatctcgtctataacaacaactgggatcaggcgatcaggaacctgcacctgaccaacaatttcccggaattcaccggtcgtatctgcccggcgccttgcgaggaagcctgcacgctgaaccttgaggacatgccggttgcaatcaagaccgtggaacaggcgctgggcgacaaggcctatgagcttggctatatcgtgccgcagcctgccgccagcaagaccggcaagttggttgccatcatcggctccggcccggctggccttgcggcggcgcagcagcttgcgcgtgcgggccacatggttgatgtctatgagcgcgaaagccgtcccggcggattgctgcgctatggcattcccgatttcaagatggaaaagcacctgatcgaccgccgcgtcgcgcagatggaaggcgagggggtgcgtttccattgcggtgtgaatatcggcgtcgacaagccgttgcgcggccttctcgatacttatgatgcggtgctttattgcggcggttcggaaaccccgcgcccggcgggcattcccggcgccgatcttgatggtgtccatgatgccatgccctatctcgtgcagcagaaccgccgcgttggccgcgaaaacatcgagtccgtcgcctgggcttcggttccgattctcgcaggcggcaagcatgtcgtagttgtcggcggcggcgatacggcatcggattgcgtcggcacggctttccgtcagggcgcggtcaatgtgacccagctcgatatccgtccgcagccgccggaaaaggaagacaagctcagcgtctggccctattgggcgaccaagatgcgcacttcttccagccaggcggaaggcgcatcgcgtgagtttcaggtcgcgacgctggaatttatcggcgaggatggacgccttacccatgtgaagtgctgtcaggtcgatgaaaagcgcaggccgattgccggaacggaattcttcatcaaggccgatctggccttcatcgccatcggctttgccggtcctgtggaagacagtgtggtgaaggaaatggacgggaaactcgaaatcgccaccgaccggcgtggctcgaagtccgtcaaggcaaacgatcgtgattatcgcaccaatgtcgacaagctctatgcggcgggtgatatccgtcgcggccagtcgctggttgtctgggcgatccgcgaaggccgtcaggcagcccatgctattgatgcggatttgatgggcagttccgttttgcctcgttga

SEQ ID NO: 4598 - protein, 484 aa, Brucella suis
MGKVTGFLEIDRQVAKYQPASDRIRHFREFTIPMTDGEVQKQAARCMDCGIPYCHGPTGCPVHNQIPDWNDLVYNNNWDQAIRNLHLTNNFPEFTGRICPAPCEEACTLNLEDMPVAIKTVEQALGDKAYELGYIVPQPAASKTGKLVAIIGSGPAGLAAAQQLARAGHMVDVYERESRPGGLLRYGIPDFKMEKHLIDRRVAQMEGEGVRFHCGVNIGVDKPLRGLLDTYDAVLYCGGSETPRPAGIPGADLDGVHDAMPYLVQQNRRVGRENIESVAWASVPILAGGKHVVVVGGGDTASDCVGTAFRQGAVNVTQLDIRPQPPEKEDKLSVWPYWATKMRTSSSQAEGASREFQVATLEFIGEDGRLTHVKCCQVDEKRRPIAGTEFFIKADLAFIAIGFAGPVEDSVVKEMDGKLEIATDRRGSKSVKANDRDYRTNVDKLYAAGDIRRGQSLVVWAIREGRQAAHAIDADLMGSSVLPR

SEQ ID NO: 4599 - DNA, 1506 bp, Brucella suis
  CDS (1)..(1506)
atgcgatccatgaaacacacgggatcagcaggaagttcgtccattgatgcaggctctccagacattcgcggcgcgcggcttcctgctggcgattatgcgcatgtcttcgacgacctgcatccaccgctctcaccgcatgaagccattgtcgaaagcgaccgctgttatttctgttatgacgcgccttgcatgaacgcctgcccgacgggcatcgatattccgcttttcatccggcagatcaatgcaggcaacccggctggcgcggccaggaccattcttgccgaaaacattctgggcggcatgtgcgcccgcgtctgcccgaccgaaacgctctgcgaggaggtctgtgtgcgcgaggtggcggaaggcaagccggtgaagatcggccatttgcaacgctacgctaccgatatgctgatggccacgggcaaccacccgtttacccgcgcagccgaaacgggcaggcacattgccgttgtcggcgctggcccggcgggcatttcggctgcacatcgccttgccatgcatggccatcaggtgacgattttcgaggcccggcccaagggcggcggtctcaacgaatatggcatcgccgcctataagacggtgaacaatttcgcccagcgcgaacttgatttcgtgttgcagatcggcggcatccatatcgaatataaccagacgctgggccaggacattaccgtcgaggcgctgaaggccggatatgatgcggtgttcctcgccatggggctgccgggcgtgaacgacctcggccttgccggcgaagacgcgccgaacgtgctggatgccgtcgattacatcgccaatctgcggcaggccaggaacctttccaccctgcccgtcgggcgcgatatcgtcgttatcggtggcggcatgacggccatcgacgttgcaatccagaccaaaaagctcggcgcaaacaacgtcaccatcgtctatcgccgcggacaggaaagcatgaatgccagcgcctatgaacaggaactggcgcagatacatggcgtcgtcatccgccactggttgcagccccatgcgctggagcgcagtgaagacggcatcgtccatgcgatcacctttgaatatacggccaatcgggatggcaagcttgtcggcaccggcgaatatctgacccttgaggccgaccaggtgttcaaggccatcggccagaccttcgatccggaacccttgcgcgggtccggcatcgcccttgcgaaaggccgcatcagcgtggatgcggaagggcggacctcggtggagggtatctgggctggcggcgattgtgtggcaggcggaaaagatctgacggttgcctccgttgaagacggcaaggtcgcggccttatccattcatgcggcactgacgagccgcccggaagctgtggaaggttttgccgaagccgttctttccggtgccgcgcattatgcgcccgcagcgccatcccgtcacgcaaccgttcaacctggcagcgaacagggtttgggagattga

SEQ ID NO: 4600 - protein, 501 aa, Brucella suis
MRSMKHTGSAGSSSIDAGSPDIRGARLPAGDYAHVFDDLHPPLSPHEAIVESDRCYFCYDAPCMNACPTGIDIPLFIRQINAGNPAGAARTILAENILGGMCARVCPTETLCEEVCVREVAEGKPVKIGHLQRYATDMLMATGNHPFTRAAETGRHIAVVGAGPAGISAAHRLAMHGHQVTIFEARPKGGGLNEYGIAAYKTVNNFAQRELDFVLQIGGIHIEYNQTLGQDITVEALKAGYDAVFLAMGLPGVNDLGLAGEDAPNVLDAVDYIANLRQARNLSTLPVGRDIVVIGGGMTAIDVAIQTKKLGANNVTIVYRRGQESMNASAYEQELAQIHGVVIRHWLQPHALERSEDGIVHAITFEYTANRDGKLVGTGEYLTLEADQVFKAIGQTFDPEPLRGSGIALAKGRISVDAEGRTSVEGIWAGGDCVAGGKDLTVASVEDGKVAALSIHAALTSRPEAVEGFAEAVLSGAAHYAPAAPSRHATVQPGSEQGLGD

SEQ ID NO: 4601 - DNA, 1536 bp, Bifidobacterium longum
  CDS (1)..(1536)
atgggcgacccgagaggatttctgaaggtccgtacccgccgagagctggctgaacgccccgttgaggaacgtatcaaggactggttcgacgttcacgccgaaaccggcctgcaaccgtggacccaagcgcaggcggcccgctgcatggattgcggcaccccgttctgtatgaccggatgtccgctgggcaacctgattcctgagtggaacgatctggtccgtcagggcaagtgggaggacgcgtacaaccgtctgtccatgaccaacaacttccctgaagtcaccggtcgtatctgcccggctctgtgcgagcaggcctgcgtgctcggcatccaccagccgccgaccatgatcaagcttgacgagcagaccatcattgaccaggcatgggatttggactacgtcaagccgctgccgccgcagcgtctgaccgaccagacggtcgccgtcgtcggctccggccctgccggcctcgccgccgcacagcagctcacccgcgccggccacaccgtcgtcgtctacgagaaggacgacgccatcggtggtctgatgcgttacggcatcccgaacttcaagcttgagaagggtctgcttgaccgccgtgtcaagcagatggaggccgaaggcacccgcttccgcaccaacgtggaaatcggcaaggacatcacgtgggatgacctgcgtgaccgttacgacgccgtcgtagtggccatcggctcccgcgtgccgcgcgatatgaagattccgggccgcgagctcgacggcatccacttcgccctcgacttcctgcccgacgccacgcgccgtatcttcggcgtcaagccggtgcacgacatcaccgccaaggacaagcacgtcatcgtcatcggcggtggcgacaccggttccgactgcctcggcacctcgatccgtcagggtgcgaaggacgtcaccgtgctacagatcatgccgaaagagccgtcaagccgtccggacaacagcccgtggccgaccttcgcccgcacctaccagaagacctcctccatggaagagggcggcgagtacatctactccaccgactccgtgaacttcgagggcaccgaagaggagaaggccaaggtcaccattgataactcgaccaccgccgaaggcttcgtggccgatgagcgtggtcatgtcaccggcttgaaggtcgtctccgtggctcccggcgaaaatggtccgttcactcgccagcctggcaccgagcgcgtgctgcccgccgatctggtcctcatctccgtgggcttcctgcacccggacaccgagaccatcctcgaccagctgcccgtcgaactcgacaagcgtggcaacatcgctcgcaatgacaagttcgccacctcccaggatggcgtgttcgtgtgcggcgatgccggccgtggccagagcctcgtggtctgggccatcgccgaaggccgctcctgcgccgcagccgtggacgagtacctctccaaggaaaagagcgagctgccggccccgatcaaggccagccagcgtccgatgatgctgcctcgctga

SEQ ID NO: 4602 - protein, 511 aa, Bifidobacterium longum
MGDPRGFLKVRTRRELAERPVEERIKDWFDVHAETGLQPWTQAQAARCMDCGTPFCMTGCPLGNLIPEWNDLVRQGKWEDAYNRLSMTNNFPEVTGRICPALCEQACVLGIHQPPTMIKLDEQTIIDQAWDLDYVKPLPPQRLTDQTVAVVGSGPAGLAAAQQLTRAGHTVVVYEKDDAIGGLMRYGIPNFKLEKGLLDRRVKQMEAEGTRFRTNVEIGKDITWDDLRDRYDAVVVAIGSRVPRDMKIPGRELDGIHFALDFLPDATRRIFGVKPVHDITAKDKHVIVIGGGDTGSDCLGTSIRQGAKDVTVLQIMPKEPSSRPDNSPWPTFARTYQKTSSMEEGGEYIYSTDSVNFEGTEEEKAKVTIDNSTTAEGFVADERGHVTGLKVVSVAPGENGPFTRQPGTERVLPADLVLISVGFLHPDTETILDQLPVELDKRGNIARNDKFATSQDGVFVCGDAGRGQSLVVWAIAEGRSCAAAVDEYLSKEKSELPAPIKASQRPMMLPR

SEQ ID NO: 4603 - DNA, 9321 bp, Plasmodium falciparum
  CDS (1)..(9321)
atggggaaagaaaatatagataataaaggactttatgatagtaggaatgaaaaggatgcttgtggtgtcggtgtagtagctgatattaatgggaagttttctagaaatgtgatacagaaagctttacaaatattattacggttaagtcatagaggtggtgtacaaggaaataatggagatggtgctggtattttagttggaataccacatgaatactttcaaatgttaagtgatacttgtcaattaccttttttattaccagaaaaaggagaatatgctgttgctcaaatatttttaccacaaaatgaagaaagaagactttttttataccatgaaattgaaaaggaagtatataatcatggattagtcgtattaggatggagatctcctatacctgttcgacgtgatgttattagttgtagtgttaaaaaaagtgaaccttttattgctcaaatgtttgtttgtaaaagatcggtttttaaaaattatgatgatttcaatatatatccattttcagatataaattttacagatgatagtaatttgaaattaaatgaattaccagatgatattgaattattatcattctttataagaaaaaaattagttagacataatgatatgtatttctgtagcttttcatctagaactattgtatataaaggactattaacgccttcacaaatatatttatattttgaagatttattaagtgaaaattttacatcctatttagctatggtacatgtacgtttttcaactaacacatcacctacatggtatgctgctcatccttttagaagaatatgtcacaatggagaaataaatacgatcagtgttaattctattttatttcaagaacgtatggaatcagcaaaaactcctgaatgtttcaaatcagtatccataaaagatctaagaccaataaatgaagaaaattatatcatatatgataatgatgatgaaataatacaaaaaagagatacttttgaagatattatgttaacacaaaatagattgaaaaaaaagtctagaagaaatttacttttaaaattaaagaaggattatacttataatagttcagctattcattataatattaaaagagaatatatgaattctgatattaatagtaattcagaatttttaagtaatgtaaatgatgactccaaaagttcctctgatgtagataaaataagtgaagaaaatttaatgaaccatttgaaagaaaaaaataataaagcttttagaaagtctatgaaaaatcaaattaaacatggagaatcacaaaaaaccaaaggcgctattagttatccatctgattcttctatatttgataatgcaatcgattttcttactatgacaggtagggaaattgaacatgcagtcatgatgttaatgcctagagcatatcaaaaagatccaaatataagtccattagaaaaagctttttatgaatatcatacctgtattatggaaccatgggatggaccggctttaattatatttacagatggatataaagtaggtgcatcattagatagaaatgggttaaggccagcaagatatagtattactaattatggattgtttgttttatctagcgaaaccggagtagtagatttatcatatgacaaaattgttcataagggttcggtttatcctggtaaagttgttttagtagattttaaggaaaaaaaatttttaagacatgaagaagtattgagtaagtttttaagagaaagaccatataaaaaatggatagatcattattctatacatatggataacataattaggccagtaacaaatatggagaatattcgtatgaatgcatataagtatggtgctatattgaataaagacaattattatcataacaataatacaaatataaacaacagcaacaacaataataataataatatgattaaaagtaatagtaatgctcttagtattaataataataaaacatgtttaaatgatatagattattatgacgaatcattaattaaaaaattaaaagcatttggatatacatatgatgcttttaatatgatcatatcaccaatggttaaacatgcagctgatggattaggttcaatggggaatgatacagcctttccatttttaagttatttgcatcgtaatttattatattattttcagcaaacatttgcacaagtcaccaatccagctatagatcctattagagaagagaatattatgtctctaatgagtaatctaggaaaagaaggagatttgttacaatatagtcatgttaattgtcatcgtatatttataaatggacctatattaaatgaagctttatataatatgttacttcaattacctgattttccacatattataattgatatgacgatagatttggataaactacaatccatgatgattaatgtaaatagtaatttttcacctaataaagatggtgaccctagtcaaaacattcacaacaatattgttagtaataagaattcggaagatccttcaaaattggatgtgtgtaaaacaaaacaagcaaaagaggaacatactaagaaaaagcatatatcatctaaatatttaattaaatttattgatagcgttaattctaaagctgaaaatgctattaaaaaaggatgtcaattaatcattttatcacataataatgttaatgaaaagagagtgcccatattttctatattaattgtaggtgcattacataaatatttattaagtaaaaatttaagaacaaaatgttcattgattgttaaagctggagactgttttgagattcatcatttggctgttcttttatcttttggtgctgattgtatttatccatatattttatatgagagtttacagttcatcaaatttgctgataatgaagcaaggctaagtaataaccagatgataagtaattatagacatgcagctaattatggtatattaaaaataatgtctaaaaatggaatatctacattaccaagttataaaggttgtggtttaatgcaacccttgggaatatcagatgaaatattaaaaaaatgttttataaatgtatgtgattcaataattggtggagtgacttttgaatttgttgaaaaagaaatattaaatatattttatcttgcatatccaaagagaatcttaacactaaatttaaaagatgcaaatgaagaattagatgattatggtgaatatcattttagaaatatagggaaatctcaaatacatatgaatcatcctgaaactattagtttattacaaaaagctacaagaagtggtaataaagatacttataaaaaatattctgaattacaaaatgaattgattaatcattgtgaaattagaggacagttggaaattaattataaaaaatgtccatcatataataaaataaaaaagaaacatgaaccaattaatattcatttagtagaaccagtaaataaaatattattaagattctgtaccggggctatgtcctttggatctttgtcagaagaagcacatactactgtagctactgccatgaatagtatgggtttaaaatcaaataccggagaaggaggagaagcagaagaaagaataaaaacagccaataacgaaataaatacaaattctgccgtaaaacaaattgcttcagcccgatttggtgttactgcatatagtttagtaaatgcacaagaattgcaaataaaagtagcacaaggatccaaaccaggagaaggtggagaattaccaggttataaagtaagttctaaaatagcttctattcgtagaagtactccaggagttggtttaatatctcctccaccacatcatgatatgtattctattgaagacgtaggtcaattggtatatgatttgaaaaatataaataaagaagcaaaaatatcagtgaaacttgtatcaaagttaggtattggtgttataacatcaggggtggttaaaggaaattgcgaacaaattttaataagtggaacatcgggtggtacaggtgcttctaaatggacttcaattaagcatgcaggtttaccatgggaaattggtttagcagaagctcatcaaacgttatgtaaatcgaaactacgaaaaagagttattttacaaattgatgggcaactaaaaactggaagagatgtgattttaggagcattattaggtgctgaatcatttagtttttctactcaaccattaatatcattaggttgtattatgatgaggaaatgtcatttgaatatttgtcctgttggtatatgtacacaagatcctgaattaaggaaaaaatttgctggaaaacctgaatatattgttaatttcttttttatgttagctgaagaagttcgagaatacttggctagtatgggattccgaaaattttctcaaattataggtagatctgatttgttaaaaaaaaaagatcatttgaaatatgatgagaaaaggaaactcttggatttttcgaaactgttatttcctggatggaaatattatgcagaggatgaaatgaaagatgatcagaataaaagatataaaaatatatcaaataaaaaaaagaaatataatacaaattctttgtactctgcttcaaagcataaaaaaaaaaataccaaagctggtctacattcgattaaaaaaaaaatgaagaatagaaaacaggtcctaataaatgaaagttttaatactattaaaaagtataaaattaattccaaacaagcggatactatagaaagggttaatggacaaaatgaatatttcataaatgtagaatgtgatgaagcagatgcggaaaatgaaagtgatcagaacgacaataatgaggaagaagaaacggataagagtgatgtagaggaaaatattgataatgatgaaaatgaagatatggatcaaattgatgatatagatgaagaagatgacgaatattataatgatggtagtgatgatagtgatgatagtgatgatagtgatggtaatgatgatagtgatgataatgatgatgatatagatgatttagatgatgtagatgatgtagatgatttagatgatgtagatgatttagatgatgtagatgatttagatgatttagatgatgtagatgatatagatgatgtagatgatgtacataatgcagataatgtaaattgccgaaaagataatcatactgaccatgattatgatgataataacaatgttaaggatgaatatccaaataataatgacaagaaaggacaaaacagtagagagaagagaaacaaaaaaaaaagtatgaataggaacataatatataaatatcaatataaagaaaagggttcttataatataaataagaagaaccataataataataatattaataaaaagaatactaagaaaataaagaaaaaaattcatttaaaaaagaaaaaagtaaaaccaattcctatattttgttgtgaaactcaaaatcataaattatctgatgttattgatagagaattaatcaggagatcaaagattgccttattaaattgtacacctgtgaatattaaaatgcctattaaaaatacagatagagcggttggagctatgttaagttatcatataatacaaaaatatggagaagaaggattaccaattgatacgataaatgtgaaatttcgaggtacaggtggattatcatttggtgtatttttaacgagtggagtaaattttgaattagaaggagatgcaaatgattttgtaggtaaaggtttatcaggtggtatcatatcagtacattttccaaagaacgctttatttataaacgaatgtcaaaaaaatgttatagctggaaattctgttttatatggagctacaaaaggaagagcattttttgctggaagagcaggtgaaagatttgctgttcgaaattcaggagcaattgctgttgtagaaggtgttggtagtcatggttgtgaatatatgacaaaaggtatagtagtagtgttaggtgaaattggttgtaattttgctgctggtatgagtggaggtatagcatatgtattagatataaatgagaaaaatgtaaatcatcaaatggttgatttgaaagtttgtaaaactatggatgaaaaaatgactttagaaaaattattacatgaacattatgaaagaactaattcatatacagccaaaatgttattacaaaattttgatgaaaatttacaacgttttactaaaattatacctagagatattaaaagagttttaaccgaagcttgtattgaatttgttaaaacaggtaatgaagaagcagctgctattttagatgattgggcttccttattaaaaagtgtagatcaaccagaacatatgtataaaaaagctatgcaattctttacaactattactgatgatatatcaggattatccaaatctttagcattaagaagtgtagatggattaattatttatgatatattacaagaacaacgtagtcgaaatttattaagtataaaaaattcgtccaatgattttaatagtttaaataatgaagaacaaaatattaagaaaaaaaaatttttcgattttgaaagttttatacataatctagaattgtgcagaagtaataatagaaaatggagacgattctctgaaatccctttcaaatgtaatgcattttcagattttaaaaatacctttcctgaaaaattagatgataaatcaaaagaaatgataaaaaaatatattcttaatgaacaatatttattagatttacatttgaaatcattaaattcaaataaatttattgaaaaattgattattagagaaacagatgattatattcatatggatcaaaaacaactaagtccaaatatatacaccttaaaaaaatatttatatccatcggataattatgatgtttctaatatttccaattctatgacagcctataataaaattaatggggtacacttaatgaacaagcaaaatgaaaataagcaaaatgcagaagtgcctaattcctatgatttttctgggtatacattgggtgcaagaagaaaaacggctgatatggtaaatattcaaaaggatgatgaaaatgacatacgtattgcaaataatacgaaaagtataagtaatacaaatgatatgaacaatgtaagcaatatgaacaatatgaacaatgtaaacaatgtaaacaatgtaaacaatgtaaacaatgtaagcaatatgaacaatatgaacaatatgaacaatatgaacaatataaacaatatgaacaatataaacaatatgaataatataaataaagatgataataataatattaatggtgatgatacaaacaacaccgtcatttctgaagttaccaatactacgtatgctaacaaatcatcaaattattcacaatcgcaatatgctaaaacaagtggtgatggtaaaataaagaaatatagtgtagacaccgaaattagtgatatgactagggtttcatcagattatggaaatgcttcaagcatcagttctacgaaaccttttttagttgctaatccaaataaagttacaggatttaaagaatatgaaagattatctcatccacttaaagatattagtagtagagtattagattattccgaaattattgtacccataaacgttaaaagtaaactacataatcaattattaaaaacacaagcttctagatgtgttgattgtggtaccccaacttgtcattatcctaattcgagtggtggtggctgtcccttaggtaatagaatttttgattggaacaatttagtatatgaaaatgaatggaagaaagcactagaacgtttattagataccaataatttcccagaaattaccggtcgtgtttgtccagcaccttgtgaagatgcatgtgttttaagtataaatgagaaggctgtatcaataaaatttattgaattatctattattgaatatggattcataaaaaaatggatacaaccaatgataccaattagtcgtactggaaaaaaagtggcaattgtgggttcaggaccagcgggattaactgcagcacaacaattaaacaaagctgggcatgaagtaactgtttttgaaaaggatgaatattttggaggattattaatgaatggaataccaaatgtacgtttagataaaaaaattctagagagaagattaatattaatgaaaaaagaaggaattttaatgaaaaataatgtaaatgtaggtgtagatataacattatctgatttagtaaaagaatatgatgctatacttttagctactggttataaaattcctagaaagttagatattccaggtgctaatttaaataatatttattttgctatggatttcttaacatcatgtcaaatatcattaacaaaatcagatatgacagatgataattatatagatgtatctgaaaaacatgttatcatattaggtggaggaaaaacagcagtagattgcatcagtttagctattcgtatgggtgcgtctagtgtgttacaatttacacgacaagaaattcttcctatgaatacatcagaatattggtggccaggattaaaaaatattttcaaagttgaatattcacatgaggaagctatcattatacaaggtagagatccaagagaattttgtgtgaggagtttggaattcattccatctaataaagaccctaaaagagtttctggaattagagctataagagtaaaattaaaaaaaaacttaaaaagtgaaatgaaacaaaataataaaatgttatataataattatatggataatcatcgtaataattcatccaaaatagatttaaagaaacatctatctaaaacaaataaattaaaaagtattaaaagtatttcaaaaggcccaactcaagaaacaacaacagcaagttcttattcttcttcatctcctgcagaaaatgatattattcagaattaccaaataataaaggatcataatgaatattttgatataccatttactgaaagaatttataaagctgatgtagtcattttagcattgggattttcaaaaacagatgattccatatgggaaaatgataatataaaaattgaacttaataattataattgcataaaaacaaacaatagaatttatcaaactaatcataaaaatatatttgcatgtggagattgtagaataggacctagtacagtagtacaagcaattgccgaaggaagagatgtagcttctaaaatagatgaatatttaactaattcggtatctatacttcctccatgtaatacttattattattatcctaagaattataagaatgttccctttggttcttctaactggggataa

SEQ ID NO: 4604 - protein, 3106 aa, Plasmodium falciparum
MGKENIDNKGLYDSRNEKDACGVGVVADINGKFSRNVIQKALQILLRLSHRGGVQGNNGDGAGILVGIPHEYFQMLSDTCQLPFLLPEKGEYAVAQIFLPQNEERRLFLYHEIEKEVYNHGLVVLGWRSPIPVRRDVISCSVKKSEPFIAQMFVCKRSVFKNYDDFNIYPFSDINFTDDSNLKLNELPDDIELLSFFIRKKLVRHNDMYFCSFSSRTIVYKGLLTPSQIYLYFEDLLSENFTSYLAMVHVRFSTNTSPTWYAAHPFRRICHNGEINTISVNSILFQERMESAKTPECFKSVSIKDLRPINEENYIIYDNDDEIIQKRDTFEDIMLTQNRLKKKSRRNLLLKLKKDYTYNSSAIHYNIKREYMNSDINSNSEFLSNVNDDSKSSSDVDKISEENLMNHLKEKNNKAFRKSMKNQIKHGESQKTKGAISYPSDSSIFDNAIDFLTMTGREIEHAVMMLMPRAYQKDPNISPLEKAFYEYHTCIMEPWDGPALIIFTDGYKVGASLDRNGLRPARYSITNYGLFVLSSETGVVDLSYDKIVHKGSVYPGKVVLVDFKEKKFLRHEEVLSKFLRERPYKKWIDHYSIHMDNIIRPVTNMENIRMNAYKYGAILNKDNYYHNNNTNINNSNNNNNNNMIKSNSNALSINNNKTCLNDIDYYDESLIKKLKAFGYTYDAFNMIISPMVKHAADGLGSMGNDTAFPFLSYLHRNLLYYFQQTFAQVTNPAIDPIREENIMSLMSNLGKEGDLLQYSHVNCHRIFINGPILNEALYNMLLQLPDFPHIIIDMTIDLDKLQSMMINVNSNFSPNKDGDPSQNIHNNIVSNKNSEDPSKLDVCKTKQAKEEHTKKKHISSKYLIKFIDSVNSKAENAIKKGCQLIILSHNNVNEKRVPIFSILIVGALHKYLLSKNLRTKCSLIVKAGDCFEIHHLAVLLSFGADCIYPYILYESLQFIKFADNEARLSNNQMISNYRHAANYGILKIMSKNGISTLPSYKGCGLMQPLGISDEILKKCFINVCDSIIGGVTFEFVEKEILNIFYLAYPKRILTLNLKDANEELDDYGEYHFRNIGKSQIHMNHPETISLLQKATRSGNKDTYKKYSELQNELINHCEIRGQLEINYKKCPSYNKIKKKHEPINIHLVEPVNKILLRFCTGAMSFGSLSEEAHTTVATAMNSMGLKSNTGEGGEAEERIKTANNEINTNSAVKQIASARFGVTAYSLVNAQELQIKVAQGSKPGEGGELPGYKVSSKIASIRRSTPGVGLISPPPHHDMYSIEDVGQLVYDLKNINKEAKISVKLVSKLGIGVITSGVVKGNCEQILISGTSGGTGASKWTSIKHAGLPWEIGLAEAHQTLCKSKLRKRVILQIDGQLKTGRDVILGALLGAESFSFSTQPLISLGCIMMRKCHLNICPVGICTQDPELRKKFAGKPEYIVNFFFMLAEEVREYLASMGFRKFSQIIGRSDLLKKKDHLKYDEKRKLLDFSKLLFPGWKYYAEDEMKDDQNKRYKNISNKKKKYNTNSLYSASKHKKKNTKAGLHSIKKKMKNRKQVLINESFNTIKKYKINSKQADTIERVNGQNEYFINVECDEADAENESDQNDNNEEEETDKSDVEENIDNDENEDMDQIDDIDEEDDEYYNDGSDDSDDSDDSDGNDDSDDNDDDIDDLDDVDDVDDLDDVDDLDDVDDLDDLDDVDDIDDVDDVHNADNVNCRKDNHTDHDYDDNNNVKDEYPNNNDKKGQNSREKRNKKKSMNRNIIYKYQYKEKGSYNINKKNHNNNNINKKNTKKIKKKIHLKKKKVKPIPIFCCETQNHKLSDVIDRELIRRSKIALLNCTPVNIKMPIKNTDRAVGAMLSYHIIQKYGEEGLPIDTINVKFRGTGGLSFGVFLTSGVNFELEGDANDFVGKGLSGGIISVHFPKNALFINECQKNVIAGNSVLYGATKGRAFFAGRAGERFAVRNSGAIAVVEGVGSHGCEYMTKGIVVVLGEIGCNFAAGMSGGIAYVLDINEKNVNHQMVDLKVCKTMDEKMTLEKLLHEHYERTNSYTAKMLLQNFDENLQRFTKIIPRDIKRVLTEACIEFVKTGNEEAAAILDDWASLLKSVDQPEHMYKKAMQFFTTITDDISGLSKSLALRSVDGLIIYDILQEQRSRNLLSIKNSSNDFNSLNNEEQNIKKKKFFDFESFIHNLELCRSNNRKWRRFSEIPFKCNAFSDFKNTFPEKLDDKSKEMIKKYILNEQYLLDLHLKSLNSNKFIEKLIIRETDDYIHMDQKQLSPNIYTLKKYLYPSDNYDVSNISNSMTAYNKINGVHLMNKQNENKQNAEVPNSYDFSGYTLGARRKTADMVNIQKDDENDIRIANNTKSISNTNDMNNVSNMNNMNNVNNVNNVNNVNNVSNMNNMNNMNNMNNINNMNNINNMNNINKDDNNNINGDDTNNTVISEVTNTTYANKSSNYSQSQYAKTSGDGKIKKYSVDTEISDMTRVSSDYGNASSISSTKPFLVANPNKVTGFKEYERLSHPLKDISSRVLDYSEIIVPINVKSKLHNQLLKTQASRCVDCGTPTCHYPNSSGGGCPLGNRIFDWNNLVYENEWKKALERLLDTNNFPEITGRVCPAPCEDACVLSINEKAVSIKFIELSIIEYGFIKKWIQPMIPISRTGKKVAIVGSGPAGLTAAQQLNKAGHEVTVFEKDEYFGGLLMNGIPNVRLDKKILERRLILMKKEGILMKNNVNVGVDITLSDLVKEYDAILLATGYKIPRKLDIPGANLNNIYFAMDFLTSCQISLTKSDMTDDNYIDVSEKHVIILGGGKTAVDCISLAIRMGASSVLQFTRQEILPMNTSEYWWPGLKNIFKVEYSHEEAIIIQGRDPREFCVRSLEFIPSNKDPKRVSGIRAIRVKLKKNLKSEMKQNNKMLYNNYMDNHRNNSSKIDLKKHLSKTNKLKSIKSISKGPTQETTTASSYSSSSPAENDIIQNYQIIKDHNEYFDIPFTERIYKADVVILALGFSKTDDSIWENDNIKIELNNYNCIKTNNRIYQTNHKNIFACGDCRIGPSTVVQAIAEGRDVASKIDEYLTNSVSILPPCNTYYYYPKNYKNVPFGSSNWG

SEQ ID NO: 4605 - DNA, 1734 bp, Chlorobium tepidum
  CDS (1)..(1734)
atgaatgcagaatcaaacccgattctcgattttgcgacagagtacgtctaccctgccttcagcgaactgacagggaccgacaagatcgtcgcctttggggatcacagccacaaatgcccgatctacgtaccgcagaccccgccctgcaccgccgagtgcccggcaggcgaagacatccgggccatcaaccgttttctgaacggcaccgacccgtcggacgacccgctgaaatcggcctgggaaacggccaccgacaccaaccccttcccggcggtaatggggcgcatctgcccgcacccgtgccagagcaaatgcaaccgcggcgtgcacgacgaaagcgtggccatcaacgccgtcgagcaggtgctcggcaactacggcatcgagcacaacctcaaactcaaaggccccggtgccgacaccggcaagcgggtcgccatcatcggcggcggcccggcgggactctccgccgcctaccagctgcgccgcaaaggccacgccgtcaccatctacgacgccaacgaaaagctcggcggcatggtgctctatggcatcatgggctaccgcgtagatcgcaaagtgctcgaagccgaaatcgggcgcatcatcgaactcggcgtcgagacgaagatgggcgtcaccatcggcaaggacatcaccctcgaacagctcgaagcggagtacgacgcggtcttcatcgccgtcggcgcacagaagggaagagctcttcccgtgcccggctttgaaggcacgcccggcgccaccaacgccatcgacttcctgaaaagctacgaagtgctgggcgatgacattccggtcggcaagcacgtggtggtgatcggcgacggtaacgtagcgatggacgtcgcgcgtctggcgctgcgtctcggctcgcaagccaccatcatctccggcgtgccgcgcgaagagatggcctgcttcgagaacgaattcgacgacgccaaaaacgaaggcacaacgatgcactttctcaccggcacggtagaagtgctcggcggagcgagtggcgtcaccggcctgcgttgcacaaagatggtcaaaaaggagaaaggcgaggaaggctggaactccccgattccgttcctgcgctacaaaagcaatggcgaaagcttcgagatcgaagcggacatggtggtggcggccatcggccaggcgaccgacctgtcgggcctcggcagtgcggccagcggcccgtggctcaaggttgaccgcaacttccggattccgggccgcgaaaagctcttcggcggcggcgacgccctgaaggtcgatctcatcaccacggcggtgggtcacggccgcaaagccgcctacgccatcgacgccttcctgaaaggcgaaccgatgccggaggagccgtatcgcgagatcaccaagccgcacaagcaggacctgctctacttcctgcacaccccgcaggcaaaacgcaccagcatcaagccggaggtggtggtgggcaaccacgacgaactgctcgaagcgctgacgcccgaacaggccatcaccgaatcgaagcggtgtatgagctgcgggttctgcttcgactgcaagcagtgcgtctcgttctgcccgcaggaggcgatcacccgcttccgcgacaacccggcaggcgaaaaagtctataccgactacacaaaatgcgtcggctgccacctctgctccctggtctgcccctgcggctacatccagatgggcatgggcgacggactgtaa

SEQ ID NO: 4606 - protein, 577 aa, Chlorobium tepidum
MNAESNPILDFATEYVYPAFSELTGTDKIVAFGDHSHKCPIYVPQTPPCTAECPAGEDIRAINRFLNGTDPSDDPLKSAWETATDTNPFPAVMGRICPHPCQSKCNRGVHDESVAINAVEQVLGNYGIEHNLKLKGPGADTGKRVAIIGGGPAGLSAAYQLRRKGHAVTIYDANEKLGGMVLYGIMGYRVDRKVLEAEIGRIIELGVETKMGVTIGKDITLEQLEAEYDAVFIAVGAQKGRALPVPGFEGTPGATNAIDFLKSYEVLGDDIPVGKHVVVIGDGNVAMDVARLALRLGSQATIISGVPREEMACFENEFDDAKNEGTTMHFLTGTVEVLGGASGVTGLRCTKMVKKEKGEEGWNSPIPFLRYKSNGESFEIEADMVVAAIGQATDLSGLGSAASGPWLKVDRNFRIPGREKLFGGGDALKVDLITTAVGHGRKAAYAIDAFLKGEPMPEEPYREITKPHKQDLLYFLHTPQAKRTSIKPEVVVGNHDELLEALTPEQAITESKRCMSCGFCFDCKQCVSFCPQEAITRFRDNPAGEKVYTDYTKCVGCHLCSLVCPCGYIQMGMGDGL

SEQ ID NO: 4607 - DNA, 1419 bp, Chlorobium tepidum
  CDS (1)..(1419)
atggccattccccgtcagaagatgcccgctcaggatccagtggagcgcgtcggtaacttcaaggaggtcaaccttggcctaaccccggaacaggcacagcaggaagccctgcgctgtatccagtgcaaggacccggtctgcatcgcagggtgtccggtcaacatcaagatcgaccagttcatcaaactgatcgccgagggtgacttcatgggcgcggtcagaaagatcaaggaggacaacgtactgccgtcaatttgcggccgcgtctgcccgcaggaagaccagtgcgagaaggtgtgcgtcatcggcaagaagcacgagccggtggccatcggtaacctcgaacgcttcgtgggcgattacgaacgcaccagcggccagaagatcgatccgaaaatcgcgcctccgaccggcaaaaaggttgccgttgtcggcagtggtccggccggcctgagctgcgccaatgacctggcccagtacggccacaaggtggtggtgttcgaggcgctgcacgaactcggcggtgttttgatgtacggcattccggaattccgtctgccgaaggagatcgtccgcgaagagcttgacggcctgcgccgcatgggcatcgagttccgcaccgacgtggtggtcggacgcacgatcaccatcgacgagctgatggaagaggaaggtttcgacgcggttttcatcggcgtgggcgcgggtctgccctggttcatgggcattccgggcgagaacctcgtcggcgtactcgcggccaacgagttcctcaccagggtgaacctcatgaaggcctacgacttcctgaagagcagcgacacgccggtgttcgactgcaagggtaaaaacgtcgcggtcttcggcggcggcaacaccgcgatggacgccgtacgcacggccaaacggctcggagcggagcacgcctacatcgtctatcgccgctccgaaaaagagatgcccgcccgcgaggaggagattcacaacgccaaggaggagggcatcgagttcctgctgctcaccacaccgcttgaattcgtcggcgatgaaaaggcgtggctcaccggcgcgaagtgccagaaaatggagctgggtgaacccgacgattcgggacgccgccgcccggtaccagtcgaaggctcggagtacatcctgcccatcgacatggcgatcatctccatcggcaacggccccaacccgctcatccaccagacgacacccgacatcgaggtcagcaaacgcgagaccatcgtcgttgacgtcaacaccatgcagacctccaaggagaacgtttacgccggtggcgacatcgtcacgggcggcgcgaccgtgattctcgcgatgggcgcgggacgcaaagcggcggctgccatcaacgaaaagctcggcggcacggccaagaacttcaacgagtggtaa

SEQ ID NO: 4608 - protein, 472 aa, Chlorobium tepidum
MAIPRQKMPAQDPVERVGNFKEVNLGLTPEQAQQEALRCIQCKDPVCIAGCPVNIKIDQFIKLIAEGDFMGAVRKIKEDNVLPSICGRVCPQEDQCEKVCVIGKKHEPVAIGNLERFVGDYERTSGQKIDPKIAPPTGKKVAVVGSGPAGLSCANDLAQYGHKVVVFEALHELGGVLMYGIPEFRLPKEIVREELDGLRRMGIEFRTDVVVGRTITIDELMEEEGFDAVFIGVGAGLPWFMGIPGENLVGVLAANEFLTRVNLMKAYDFLKSSDTPVFDCKGKNVAVFGGGNTAMDAVRTAKRLGAEHAYIVYRRSEKEMPAREEEIHNAKEEGIEFLLLTTPLEFVGDEKAWLTGAKCQKMELGEPDDSGRRRPVPVEGSEYILPIDMAIISIGNGPNPLIHQTTPDIEVSKRETIVVDVNTMQTSKENVYAGGDIVTGGATVILAMGAGRKAAAAINEKLGGTAKNFNEW

SEQ ID NO: 4609 - DNA, 1473 bp, Chlorobium tepidum
  CDS (1)..(1473)
atgggtaaactgaaaggatttatggagtaccggagagcccttcccgtagaccgggagcctctggaaagaataaaggactggaacgagttccacgaggagatgtcggccgagcagctcagcgaccagggcgcgcgctgcatggattgtggcacgccgttctgccactcgggcttcatgctcaacggcatgactgctggctgcccgattcacaaccttatccccgagtggaacgatcacgtctatcgcggcttctggcgcgacgcctgggaacgactgatgaagaccaacaacttcccggaattcaccggcagggtgtgccccgcgccgtgtgaaggctcctgcgtgctcggcatcatccagccgccggtgaccatcaagaatatcgagtactcgatcatcgaacatgccttcgctgaagggtgggtcgagccgaagcagatcgccgtccgcactggtaaaaaggtggctattgtgggttccggtccgtcgggccttgcctgcgccgaccagctcaacaaggcggggcacacggtcacggttttcgagcgtgatgaccgcgttggcggccttctcatgtacggtattccgaacatgaagctcgacaagcggctggtggtgcagcgccgcgtcgatctcatgaaagaagagggcgtgagttttgtgaccggaaccgaagttggagtcaactacccggttgacaagctgctctcggagtacgacgccgtggtgctctgtatcggagcgaccaacccgcgcgatctcaatgccgatgggcgcaatcttgacggcattcacttcgcgatggagtttctccgtgccagcaccaaggctgtgctcgatggcaccgaacctgtgctctccgccaagggcaaggatgtggtggtgatcggcggcggtgacaccggaaccgactgcgtggctacatcgctgcgccaggggtgtaagagcgtcatacagcttgaaatcatgccgaaaccagccgacttccgccaagaagacaacccgtggcccgaatggccgaaggttttcaaggtcgattacggccaggaagaggcagctgccgtgcagggcggcgacccgcgtcgctatctcatgatgaccaagaagttcatcggcgagaacgggcggctcagtgccgtcgaggtctcgaaggtcgagtggatcaaacaggaggggcgcaccattcccgtgccggtatccggcagcgaagagatcattccagcccagctcgtgctgctggcgatgggcttcctcgggccagaagcgcagctcttgcagtcgcttggcgtcgagcaggacagccgcagcaacatcaaggctgacgagaaaagctaccgtaccagcgttgacaaggttttcgccgcaggcgatgcccgccgtggtcagagcctcgtggtgtgggcgatcaacgaagggcgcgccgctgccagagagtgcgaccgcttcctgatgggttgcaccagcctgccgtga

SEQ ID NO: 4610 - protein, 490 aa, Chlorobium tepidum
MGKLKGFMEYRRALPVDREPLERIKDWNEFHEEMSAEQLSDQGARCMDCGTPFCHSGFMLNGMTAGCPIHNLIPEWNDHVYRGFWRDAWERLMKTNNFPEFTGRVCPAPCEGSCVLGIIQPPVTIKNIEYSIIEHAFAEGWVEPKQIAVRTGKKVAIVGSGPSGLACADQLNKAGHTVTVFERDDRVGGLLMYGIPNMKLDKRLVVQRRVDLMKEEGVSFVTGTEVGVNYPVDKLLSEYDAVVLCIGATNPRDLNADGRNLDGIHFAMEFLRASTKAVLDGTEPVLSAKGKDVVVIGGGDTGTDCVATSLRQGCKSVIQLEIMPKPADFRQEDNPWPEWPKVFKVDYGQEEAAAVQGGDPRRYLMMTKKFIGENGRLSAVEVSKVEWIKQEGRTIPVPVSGSEEIIPAQLVLLAMGFLGPEAQLLQSLGVEQDSRSNIKADEKSYRTSVDKVFAAGDARRGQSLVVWAINEGRAAARECDRFLMGCTSLP

SEQ ID NO: 4611 - DNA, 1749 bp, Chlorobium tepidum
  CDS (1)..(1749)
atggtggtcgaaacgagcaatgccgagctcgacgccatgcgccgccagagccttgaacggctgcttgcccggcactgcggcgactgcctcgcgccgtgcgagctggcctgcccggcgggttgcgacattcccggattcgtctcggccatcgccaaaggtaacgaccgcgaagcgctcgaaatcatccgccgcaccattccgctgccgggcattctcggtcgcgtctgccccgcaccgtgcgaggaggcgtgccgccgccacggcgttgacgagccggtctcgatctgcgccctcaagcgcttcgctgctgatcaggatatggttgaaggatcgggacttccggagcgcaaaccggcctccggcaagcgcgtggccatcgtcggcgcaggcccggcgggtctgaccgccgcttggtatctgctgctcgacgggcacgcggtgacggttctcgatgcgaacgaaaaagcgggcggcatgatgcgttacggcatcccgaagttccgcctgcccgaagcggtgatcgacgccgacgtcaagccgctcgtgaagatgggcgcggagttccgcttctcgaccctgttcggcaaggacgcaaacctggaggaattgcagcaggagcacgatgccgtgctgctcaccatcggcgcgagccaggcatcgaagctcggcattccgggcgaagagcttgacggcgtacagagcggcatcggtttcctcgccaatgttgcggacggaaaagctgccgcgcccggcaagtcggtgatcgtcatcggcggcggcaacacagccatcgacgcggcacgaaccgccctgcggctcggtgcggaatcggtgacgattctctaccgccgcggacgcgaagagatgcccgctaaccggctggaaatcgaggaggcggtcgccgagggcgtcgagcttcgcctgctggccgcgccggtcgcgattgaaaaaggagcgaatagtcttgtcgtcacggcggtcgaaatgcagctcggcgaacccgacgcgagcggacgccgccgcccggttcccgtcgcgggatcggagttcacgctccacgccgacacggtcatctcggccaccggccagcaggttgacctcccggctgaagcggcagcgggtatcggcgtcgagcgcaacggaacagtcaaaatcaatggagaatctatgctcactggcgcggcgggcgtcttcgcggcgggcgactgcgtcagcggccccgacctcgccatcaaagctgtccggcagggtcgcctcgccgctgaagcgattgaccgctacctcaacggcggcgatccggcagcaacaggaatgtcgatgttcaactcatcgtacggagcgcgagacaaggccccgcaccagttctacgaccgggcgaggcctgcggcacgggttgccgtgccggagcttgaggcggaatcgagacgccagagcttcgaggaggcggtaacggggtacgatccggaaaaggcgcgagaggaggccaaacgctgcctgcgatgccgctgccaggcggttgacgattgccgcctgcggaatctggccacggcgttcggcgtggcaacaccggccaccgaagaggcccacgaatacttcagcatcgacaggtcaggcgacatgcgtttcgaacgggaaaagtgcatcgattgcggcatctgcatccgcacgttggagtcggcttcggcagatgcagtcacgatccgggaagagctgatcgaccactgcccgaccggagcgatcagcagataa

SEQ ID NO: 4612 - protein, 582 aa, Chlorobium tepidum
MVVETSNAELDAMRRQSLERLLARHCGDCLAPCELACPAGCDIPGFVSAIAKGNDREALEIIRRTIPLPGILGRVCPAPCEEACRRHGVDEPVSICALKRFAADQDMVEGSGLPERKPASGKRVAIVGAGPAGLTAAWYLLLDGHAVTVLDANEKAGGMMRYGIPKFRLPEAVIDADVKPLVKMGAEFRFSTLFGKDANLEELQQEHDAVLLTIGASQASKLGIPGEELDGVQSGIGFLANVADGKAAAPGKSVIVIGGGNTAIDAARTALRLGAESVTILYRRGREEMPANRLEIEEAVAEGVELRLLAAPVAIEKGANSLVVTAVEMQLGEPDASGRRRPVPVAGSEFTLHADTVISATGQQVDLPAEAAAGIGVERNGTVKINGESMLTGAAGVFAAGDCVSGPDLAIKAVRQGRLAAEAIDRYLNGGDPAATGMSMFNSSYGARDKAPHQFYDRARPAARVAVPELEAESRRQSFEEAVTGYDPEKAREEAKRCLRCRCQAVDDCRLRNLATAFGVATPATEEAHEYFSIDRSGDMRFEREKCIDCGICIRTLESASADAVTIREELIDHCPTGAISR

SEQ ID NO: 4613 - DNA, 1521 bp, Corynebacterium glutamicum
  CDS (1)..(1521)
atggccgacccacaaggattcatcaaatactcccgacgcgagcctgcacaccgcccggtcccgctgcgcctcatggaccactccgaggtctacgaaaaggcaccggcaggtcagatcgaggaacaggctgcccgctgcatggattgcggtgtcccgttctgccacgaaggctgcccactgggcaacatcatccctgagtggaatgatctggtacgccaaggtcggtggaaggaagcctacgatcgcttgcacgcgaccaacaatttccccgagttcaccggccgtttgtgccccgcaccctgcgaaggcgcctgcgtgctcggtatcaacgatgattctgtcaccatcaaaaacgttgagctggaaatcgtcgaaaaagcattccgcgaaggctgggtgcaaccagtaatcccatccatgtctaccgggctgtcagtcgccgtcgtcggttccggccccgctggccttgccgccgcgcagcagctcacccgcgcaggccacagcgttaccgtctttgaacgcgacgaccgcctcggcggcctcatgcgctacggcgtgccagaatacaaaatggagaaccgctggatcgaccgccgcatcgagcaaatggaagcagagggcacaactttccaggtaggcacctcgccgcgcgccgctgaactagcgcttttcgacgcgatcctcctcgcaaccggcaccccagtggcccgcgaactctcagttccaggccacgatctcaacggcatccatgcggcaatggattacctcaccgcccaaaaccgcatcaacgaaggcgacggtgaagtctctccaatcaacgccaaaggcaagaaagttgtcatcatcggtggcggcgacaccggcaccgactgcttcggcaccgcactgcgccaaggagcagaatcagtcacccaatttgatatccgcccccgcgctcctttccagcgcgccgattccaccccatggccgatgtaccccaacctcttccgcaccgcaacggctcacgaagaaggcgaatacatcatcactggcgatgaatcagccgatgaaatcgcagccctgggcctcgccgaacgtgccgcaggctccacgcttggtgaacgtaaatttgctgtcaacaccgtggaattccacggcaacaacggccacgtcaccggactcaccggcaaccaaatccgagttgtcaacggcaaacgtgaaccaatcgaaggcaccgaattccccttcgaagcagacctcgttcttgttgcacttggcttcaccggcgcagaacaaggcggattggcacacgaactaggcgtaggtttcgacgaccggggccgcatcctccgcgattccgaataccgcagccccaccaactcccgcgtttacatcgcaggcgacaacggccgtggccagtccctgatcgtgtgggcaatcgccgaaggccgcgcatgcgccgcagctatcgacgccgatctcatgggtgaaactgcactccctgtagcagttgcaccacaggacgtgccgctggctgtctag

SEQ ID NO: 4614 - protein, 506 aa, Corynebacterium glutamicum
MADPQGFIKYSRREPAHRPVPLRLMDHSEVYEKAPAGQIEEQAARCMDCGVPFCHEGCPLGNIIPEWNDLVRQGRWKEAYDRLHATNNFPEFTGRLCPAPCEGACVLGINDDSVTIKNVELEIVEKAFREGWVQPVIPSMSTGLSVAVVGSGPAGLAAAQQLTRAGHSVTVFERDDRLGGLMRYGVPEYKMENRWIDRRIEQMEAEGTTFQVGTSPRAAELALFDAILLATGTPVARELSVPGHDLNGIHAAMDYLTAQNRINEGDGEVSPINAKGKKVVIIGGGDTGTDCFGTALRQGAESVTQFDIRPRAPFQRADSTPWPMYPNLFRTATAHEEGEYIITGDESADEIAALGLAERAAGSTLGERKFAVNTVEFHGNNGHVTGLTGNQIRVVNGKREPIEGTEFPFEADLVLVALGFTGAEQGGLAHELGVGFDDRGRILRDSEYRSPTNSRVYIAGDNGRGQSLIVWAIAEGRACAAAIDADLMGETALPVAVAPQDVPLAV

SEQ ID NO: 4615 - DNA, 1482 bp, Xanthomonas campestris
  CDS (1)..(1482)
atgagccgcaagcaagccttccaattccttgacctgccgcggaccatgcccacgcgcatcccggtggagctgcgtacgtccggtgactggggcgagttgtacggcaagttcgacaaggccgacgcgcagtaccagtccggccgctgtctggattgcggcaacccgtactgcagctggaagtgcccggtgcacaacgccattccgcagtggctgcagctggtgcaggaagatcgcatcatcgaggccgccgcgctgtgccattccaccaacccgctgccggaagtgtgcgggcgcgtgtgtccgcaggaccgtctgtgcgaaggcagctgcacgctggaagaattcggcgcggtcaccatcggcgcggtggaaaagtacatcgtcgataccgccttcagcatgggctggcgcccggacctgggcaacgtgcaacccagcggccaccgcgtggccgtggtcggcgccggcccggcaggcctgtcctgcgcggaccgcctggtgcgcgccggcatcgaagcggtggtctacgaccgctacgaacagatcggcgggctgctgcagttcggcattcctagcttcaagctggacaagtcggtgatcggcaagcgccgcgagatcctggaaggcatgggcgtgcagttccgcctgggcgtggagatcggcaaggacgtcagcatcgaacagttgctcggcgaatacgacgccgtgttcctgggcaccggcgcgtaccgctacaccgacggcgggctggacggccaggacctgaagaacgttttgccagcgttgcccttcctggtgcagaacagccgcatcgtcagcggcaacgacccgcacggccggccgatcgccggctgggaagaccagatcgccctgcccgacctcaacggcaagcgcgtggtggtgctgggcggcggcgacaccggcatggactgcgtgcgcagcgccatccgcctgggcgcggccaaagtcacctgtgcctaccgccgcgacgaatccagcatgccgggctcggcgcgcgaagtggccaacgcgcgcgaagaaggcgtgcgcttcctgttcaaccgccagccgctgtcgatcgagtccggcgccgacgacgaagccatcggcgtgaccgtggtggaaaccaaactcggcgagcccgacgccagcggccgccgcaacgcggtgccggtggaaggcagcgaatcgttgctggaagcggacgtggtgatcatcgcgttcggcttctcgccgacggtgccggagtggctgtcctcgcaaggcgtggaggccggcagcaacggtcgcatcgtcgccccggccgagggcaacggccgcctgccctaccagaccagcaacccccgcctgttcgccggtggcgactgcgtgcgcggcgccgacctggtggtcaccgccgtggccgaaggccgcgatgcggccggcagcatcgtgcagctgctgggtgtcaaagcgcaggtcaaggagccggctgcggcgtga

SEQ ID NO: 4616 - protein, 493 aa, Xanthomonas campestris
MSRKQAFQFLDLPRTMPTRIPVELRTSGDWGELYGKFDKADAQYQSGRCLDCGNPYCSWKCPVHNAIPQWLQLVQEDRIIEAAALCHSTNPLPEVCGRVCPQDRLCEGSCTLEEFGAVTIGAVEKYIVDTAFSMGWRPDLGNVQPSGHRVAVVGAGPAGLSCADRLVRAGIEAVVYDRYEQIGGLLQFGIPSFKLDKSVIGKRREILEGMGVQFRLGVEIGKDVSIEQLLGEYDAVFLGTGAYRYTDGGLDGQDLKNVLPALPFLVQNSRIVSGNDPHGRPIAGWEDQIALPDLNGKRVVVLGGGDTGMDCVRSAIRLGAAKVTCAYRRDESSMPGSAREVANAREEGVRFLFNRQPLSIESGADDEAIGVTVVETKLGEPDASGRRNAVPVEGSESLLEADVVIIAFGFSPTVPEWLSSQGVEAGSNGRIVAPAEGNGRLPYQTSNPRLFAGGDCVRGADLVVTAVAEGRDAAGSIVQLLGVKAQVKEPAAA

SEQ ID NO: 4617 - DNA, 1482 bp, Xanthomonas axonopodis
  CDS (1)..(1482)
atgagccgcaaacaagccttccaattcctcgacctgccccggaccatgcccacgcgcattccggtggaactgcgcacgtccggcgactggggcgagttgtacggcaggttcgacaaggccgacgcgcaataccaggccggccgttgcctggactgcggtaatccgtattgcagctggaaatgcccggtgcacaacgccatcccgcaatggctgcagctggtgcaggaagaccgcatcatcgaggccgccgcgttgtgccattcgaccaacccgctgccggaagtgtgcgggcgggtgtgtccgcaggaccgcctgtgcgaaggcagctgcacgctggaagaattcggcgcggtcaccatcggcgcggtggagaaatacatcgtcgacaccgccttcaagatgggctggcgcccggacctgggcaacgtgcaggccagcggccaccgtgtggcggtgatcggcgccggcccggccggcctggcgtgtgcggaccgcctggcgcgcgccggtatcgaagcggtggtgtacgaccgctatgagcagatcggcggcctgctgcagttcggcatccccagcttcaagctggacaaatcggtgatcggcaagcgccgcgagatcctcgaaggcatgggcgtgcagttccgcctgggcgtggaggtcggccgcgacgtcagcatcgagcagttgctgggcgaatacgacgcagtgttcttagggaccggcgcgtatcgctacaccgacggcggcctgcccgggcaggacctgaagaacgtgctgccggccctgccgttcctggtgcagaacagccgcatcgtcagcggcaacgacccgcacggccggccgatcgctggctgggaagaccagctcgccctgcccgacctcaccggcaagcgcgtggtggtgctgggcggtggcgacaccggcatggactgcgtgcgcagcgccattcgtctgggcgcagccaaggtcacctgcgcgtatcgccgcgacgaagccagcatgcccggctcggcacgcgaggttgccaacgcacgcgaagaaggcgtgcgcttcctgttcaaccgccaaccgctgtcgatcgaatccggcgccgacgacgaagccatcggcgtgaccgtagtggaaaccaagctgggcgaacccgacgccagcggccgccgcaatgcggtgccggtggaaggcagcgaatcgctgctggaagcggacgtggtgatcatcgccttcggcttctcgcctaccctgcccgactggttggcctcgcaaggcgtggacgccggcagcaatggccgcatcgtcgccccgtccgacggcaacggccgcctgccctaccagaccaccaacccgcgcctgttcgccggcggcgactgcgtgcgcggcgccgatctggtggtgaccgcagtagccgaaggccgcgatgcggcgggaagcatcgtgcagctgctcggggtcaaagcgcaggtcaaggagccggctgcggcgtag

SEQ ID NO: 4618 - protein, 493 aa, Xanthomonas axonopodis
MSRKQAFQFLDLPRTMPTRIPVELRTSGDWGELYGRFDKADAQYQAGRCLDCGNPYCSWKCPVHNAIPQWLQLVQEDRIIEAAALCHSTNPLPEVCGRVCPQDRLCEGSCTLEEFGAVTIGAVEKYIVDTAFKMGWRPDLGNVQASGHRVAVIGAGPAGLACADRLARAGIEAVVYDRYEQIGGLLQFGIPSFKLDKSVIGKRREILEGMGVQFRLGVEVGRDVSIEQLLGEYDAVFLGTGAYRYTDGGLPGQDLKNVLPALPFLVQNSRIVSGNDPHGRPIAGWEDQLALPDLTGKRVVVLGGGDTGMDCVRSAIRLGAAKVTCAYRRDEASMPGSAREVANAREEGVRFLFNRQPLSIESGADDEAIGVTVVETKLGEPDASGRRNAVPVEGSESLLEADVVIIAFGFSPTLPDWLASQGVDAGSNGRIVAPSDGNGRLPYQTTNPRLFAGGDCVRGADLVVTAVAEGRDAAGSIVQLLGVKAQVKEPAAA

SEQ ID NO: 4619 - DNA, 1410 bp, Methanosarcina mazei
  CDS (1)..(1410)
atgcaagaattacacggagaaaagacaggaaaagcaaagaaagagagaaccccaatgccagagcagcctgcaggggaacgcaggaagaacttcaatgaagttgccctcggctacacgaaagaagatgcccttgcagaggcttccaggtgtcttgcctgcaaagaaccgaaatgtgttgaaggctgccctgtgaacgtggatattccgggatttattcagcttatatgtgaggagaattttgaaggggcaattgaaaggattaaagccacaaacgctctccctgcaatctgcggccgcgtctgccctcaggaaagccagtgcgaagcccactgtgtactggggaaaaagggccagcctgttgcaatcggaaggcttgagcgtttctgtgcagattatgagcgcgaaaaaggtgtgaagtctccacaggtcatgccgcccacaggcaagagggtggcagttgtaggttccggtcctgcaggacttactgccgcagcagacctggcaaaactcgggcacaaagtaacaatctttgagtccctgcacaaagccggaggagtcctgagttacggcatccccgagttcaggctgccaaaagaaattgtccggcaggaaatcgagtacattgaaaaactcggtgttgaggtcaggcccaactatatcataggcaggatcaagactcttgacgaattatgtgacgatttcgatgccgttttccttggaaccggggcagggctcccgagcttcatgggaatagagggcgaaaacctgaatggcgtatattcagctaacgaattcctgacccgggtaaacctcatgaaagcctatgaccccgaatacgataccacggtcaggcgcgggaagaatgttgtggttgtaggaggcggaaatgtggcaatggacgcagcccgctctgctctccgcctgggcgcagacgaggtaagcatagtctaccgccgcggagaggatgagatgcccgcccgccgtgaggagatcgagcacgccaaagaagagggcattactttcaggctccttacaaaccccgtacgcatccttggtgacgagaagttcaacgtcacaggtgtcgaatgcataaggatggaacttggcgaacccgataaatctggcaggagaagccctgtccctgttgaaggctcggaattccttgtgccggcagatgttgtggttattgcgataggcacctctccaaacccgatcatttttaaaggctcggaagggcttgaacagaataagagaggaactgtagttgctgatgaggagaccggagcgacctccaaatgtggagtctttgccggcggagacgtggttacaggggcagcaaccgttatcagcgcaatgggcgcaggtaagaaggctgcaaaagcaattgatgaatatttgaaagaaaagtga

SEQ ID NO: 4620 - protein, 469 aa, Methanosarcina mazei
MQELHGEKTGKAKKERTPMPEQPAGERRKNFNEVALGYTKEDALAEASRCLACKEPKCVEGCPVNVDIPGFIQLICEENFEGAIERIKATNALPAICGRVCPQESQCEAHCVLGKKGQPVAIGRLERFCADYEREKGVKSPQVMPPTGKRVAVVGSGPAGLTAAADLAKLGHKVTIFESLHKAGGVLSYGIPEFRLPKEIVRQEIEYIEKLGVEVRPNYIIGRIKTLDELCDDFDAVFLGTGAGLPSFMGIEGENLNGVYSANEFLTRVNLMKAYDPEYDTTVRRGKNVVVVGGGNVAMDAARSALRLGADEVSIVYRRGEDEMPARREEIEHAKEEGITFRLLTNPVRILGDEKFNVTGVECIRMELGEPDKSGRRSPVPVEGSEFLVPADVVVIAIGTSPNPIIFKGSEGLEQNKRGTVVADEETGATSKCGVFAGGDVVTGAATVISAMGAGKKAAKAIDEYLKEK

SEQ ID NO: 4621 - DNA, 1401 bp, Thermoanaerobacter tengcongensis
  CDS (1)..(1401)
atgccgttaaatagaagcaaaaagaaaacacccatgcctacccaaaagcctgaagtccgcaggcgtaattttaacgaagtagctttgggctattcggaagaggaggcagtaagtgaagcccagaggtgccttcagtgtaaaaaaccaggatgtgttgaagggtgccccgttcaggtacaaattccccagtttataaagcgtattgcagaaagagattttgaaggagctataaagattataaaggaaaccaacagcttgcccgccatatgtggcagagtctgtccacaagaaacgcaatgcgagaaaaactgtgttttgggcaaagtaggtgaacctgtggccataggtcgcctagaacggtttgcagcagactgggaaagagccaaaggcatccgtcccccggtaattcctaaaaagcttggtaaaaaagtggccatcatcggttccgggcccgccggtctcacctgtgcaggagatttggctaaactcggctacgatgtaacgatctttgaagctcttcacaaacccggcggcgtactggtatacggtattcctgaattcaggctaccgaaaattatagtggaacaagaagtaaagtttatacaacagctgggcgtagaaattaaaaccaacatggttatgggcaaagttttaacgatagacgacctttttgaaatggggtatgaggctgtctttatcagcaccggagctggcctcccgaaatttatgggcatacctggtgaaaactaccttggcgtgtattcagccaacgagtttctaaccaggataaacctgatgaaagcctattcttttcccaacactgacacccccataaaggtaggtaaaaaagtagcagtaatagggggtggcaatgtagctatggatgcagccaggtctgccctaagaatgggagctgacgaagttcatattgtgtatcgccgttctgaagaagaaatgcccgcaagaaaagaagaattcgagaacgctaaagaggaaggtattatattcgatttcctcacaaatccagtgagaataataggtaacgaaaatggttgggtcaaaggtattgagtgcatccgcatggaacttggagaacctgacgcttcgggtcgtcgtcgtccagttcctataacgggttctgaatttattatggatgttgatacgatagtaatcgccataggtactggccctaatcccctcctcacaaagaccactgaaggcttagaacttacaaaacacggttatattgctgtcgatgaagagggaagaacttccagagaaggggtatgggctggaggcgatattgtaacgggttcagctactgtaattttggccatgggtgccggaaaaaaagcagctcgttccatccatgaatacctacaaaacaaaaaatggcggtaa

SEQ ID NO: 4622 - protein, 466 aa, Thermoanaerobacter tengcongensis
MPLNRSKKKTPMPTQKPEVRRRNFNEVALGYSEEEAVSEAQRCLQCKKPGCVEGCPVQVQIPQFIKRIAERDFEGAIKIIKETNSLPAICGRVCPQETQCEKNCVLGKVGEPVAIGRLERFAADWERAKGIRPPVIPKKLGKKVAIIGSGPAGLTCAGDLAKLGYDVTIFEALHKPGGVLVYGIPEFRLPKIIVEQEVKFIQQLGVEIKTNMVMGKVLTIDDLFEMGYEAVFISTGAGLPKFMGIPGENYLGVYSANEFLTRINLMKAYSFPNTDTPIKVGKKVAVIGGGNVAMDAARSALRMGADEVHIVYRRSEEEMPARKEEFENAKEEGIIFDFLTNPVRIIGNENGWVKGIECIRMELGEPDASGRRRPVPITGSEFIMDVDTIVIAIGTGPNPLLTKTTEGLELTKHGYIAVDEEGRTSREGVWAGGDIVTGSATVILAMGAGKKAARSIHEYLQNKKWR

SEQ ID NO: 4623 - DNA, 1395 bp, Thermoanaerobacter tengcongensis
  CDS (1)..(1395)
atggccgttaaggatagagtacctatgagagaacaggacccgaaagtgaggataaagaattttgatgaggtagcgctaggttatactgaagaagaagctatcttagaggcttcaaggtgtttgcagtgcccaaatcctacctgtgtggccgggtgccccgtccatgtgagaatacctgaatttataaaagctataactgaaagaaaatttgaagaagcgtacaagataataaccagcactaacagtcttccagccgtttgtggaagagtttgtccacaggaagagcagtgtgagaagaactgcattttgaatagaataggcaagcccattgcaattggaaggttggagaggtttgtagctgattatgcgcttcagaataacattgaagaggaagtaaagccggagaagaagaacaaaaaagtcgccataatagggagcggtcctgcagggcttacctgtgctggagaccttttgaagatggggtacgatgttactatttttgaggcattgcacgctttaggtggagttttaacttatgggattcctgaatttagattgccaaaaagaattgtggaagctgagatagaaaggttaaagaaactgggagcaaaggtagagacaaacgtagtggtaggaaagacagttacaatagacgagctcatggaggaagaaggctttgaagcggtcttcattggcacgggagcaggccttccgaggtttatgggaattcctggagagaacttaaatggagtctattcagccaatgagtttttgacgaggataaacctcatgaaagcctataaatttccggagtacgatactcctatagctgtgggcaagagagtggcagttataggtggagggaatgtagctatggacgctgcccgttcagctttaaggcttgaaggggtagaagaggttatagttgtatacaggcgttcaaaagaagaaatgccagcaagggctgaggaaatagaacacgccattgaggaaggaataaagtttgaatttttggcaaatccaatacgaataaacggaacagaagacggctgggtcaagagcatggacgtaataagaatgaagttaggagagccagacagttcaggaagaagaaggcctatagagatacctggttcagaatttacaatggaagtagatacagtgatcatggcattaggaactagtcctaacaggcttataccctctactacaaaggatattcaagttcaaaaatggggtggaataataacagacgaggatggcaggacctcaaggccaggtgtatttgccggaggagatgccgtcactggagctgcaaccgtgattttagcaatgggagcagggaaaaaagctgcaaaagcgatagatgaatatttgaggagcaaaggagaataa

SEQ ID NO: 4624 - protein, 464 aa, Thermoanaerobacter tengcongensis
MAVKDRVPMREQDPKVRIKNFDEVALGYTEEEAILEASRCLQCPNPTCVAGCPVHVRIPEFIKAITERKFEEAYKIITSTNSLPAVCGRVCPQEEQCEKNCILNRIGKPIAIGRLERFVADYALQNNIEEEVKPEKKNKKVAIIGSGPAGLTCAGDLLKMGYDVTIFEALHALGGVLTYGIPEFRLPKRIVEAEIERLKKLGAKVETNVVVGKTVTIDELMEEEGFEAVFIGTGAGLPRFMGIPGENLNGVYSANEFLTRINLMKAYKFPEYDTPIAVGKRVAVIGGGNVAMDAARSALRLEGVEEVIVVYRRSKEEMPARAEEIEHAIEEGIKFEFLANPIRINGTEDGWVKSMDVIRMKLGEPDSSGRRRPIEIPGSEFTMEVDTVIMALGTSPNRLIPSTTKDIQVQKWGGIITDEDGRTSRPGVFAGGDAVTGAATVILAMGAGKKAAKAIDEYLRSKGE

SEQ ID NO: 4625 - DNA, 1410 bp, Methanosarcina acetivorans
  CDS (1)..(1410)
atgcaagaagtacaaggagaaaaaccgggaaaagcaaagaaagaaagaaccccgatgccggaacagcctgcagaagagcgcaggaaaaactttaatgaagtaaccctcggatacacaaaagaagatgcccttgccgaagcttctcgctgccttgcctgcaaagacccgaagtgtgttgagggatgccctgtgaatgtggacattccgggctttattcaacttatctgcgaggaaaacttcgaaggggcgatcgagagaatcaaagctacaaacgccctccctgcaatctgcggccgtgtctgcccccaggaaacccagtgtgaggcccgctgtgtactcgggaagaaaagccagcctgttgcaatcggaaggcttgagcgtttctgcgcagactatgaacgcgaaaagggtgtgaaggctcctgaagtcatgcccccgacaggcaagaaggtagcagttgtgggttcaggccctgcagggcttactgccgcagcagaccttgcaaagctcgggcataaggtcacaatctttgaatccttgcacaaagccggaggagtcctgagttacggcatccccgagttcaggctgccaaaagaaattgtgcggcaggaagtagagtacatcgaaaagcttggggtagaggtcaagcccaattatatcatcggcaggatcaagaccctggacgaactctgtgacgatttcgacgccgttttcctggttacgggcgcagggctcccgaacttcatgggaatcgaaggagaaaacttaaacggcgtatattccgcaaacgaattcctgacccgcgtaaacctcatgaaagcctatgaccccgaatatgatacaatggtcaggcacgggaaacatgtggttgtcgttggaggcggaaacgtagcgatggatgcagcccgttctgccctccgccttggcgccgacgaggtaagcatagtctaccgccgcggagaagacgaaatgcctgcccgccgggaagaaatcgaacacgccaaagaagaaggcataattttcaggctccttacaaaccctgtccgcatcctcggggacgaaaagttcaacgttacaggtgtcgaatgcataaaaatggaactaggagaacccgacaagtccggaaggagaagccctgttcccgtagaaggcacggagttccttgtccaggctgacgttgtgatcatcgctataggcacctccccgaacccgatcatattcaaaggctcagaaggacttgaacagaacaggcggggcactgttgttgctgacgaggaaaccggcgcaacctccaaatgcggagtctttgccggcggagacgcggtcacaggcgcagcaaccgtaatcagtgcaatgggcgcaggtaaaaaagctgcaaaagcaattgatgcgtttttgaaagaaaagtga

SEQ ID NO: 4626 - protein, 469 aa, Methanosarcina acetivorans
MQEVQGEKPGKAKKERTPMPEQPAEERRKNFNEVTLGYTKEDALAEASRCLACKDPKCVEGCPVNVDIPGFIQLICEENFEGAIERIKATNALPAICGRVCPQETQCEARCVLGKKSQPVAIGRLERFCADYEREKGVKAPEVMPPTGKKVAVVGSGPAGLTAAADLAKLGHKVTIFESLHKAGGVLSYGIPEFRLPKEIVRQEVEYIEKLGVEVKPNYIIGRIKTLDELCDDFDAVFLVTGAGLPNFMGIEGENLNGVYSANEFLTRVNLMKAYDPEYDTMVRHGKHVVVVGGGNVAMDAARSALRLGADEVSIVYRRGEDEMPARREEIEHAKEEGIIFRLLTNPVRILGDEKFNVTGVECIKMELGEPDKSGRRSPVPVEGTEFLVQADVVIIAIGTSPNPIIFKGSEGLEQNRRGTVVADEETGATSKCGVFAGGDAVTGAATVISAMGAGKKAAKAIDAFLKEK

SEQ ID NO: 4627 - DNA, 1431 bp, Pyrococcus furiosus
  CDS (1)..(1431)
atgcctaggcttattaaagagagggttcctactcctgagaggtctgttggggagagggttagggattttggtgaggttaatcttggttattcttgggagttggctttgagggaggctgagcgttgtctccagtgtcctgttgagtatgccccttgcattaaaggttgtcctgtgcatattaacattccgggtttcattaaagccttgagggagaatagggataatcctagtaaggctgtgagggaggctcttaggattatttggagggataatacgttaccagcaattactggtagggtttgtccccaggaagagcagtgtgagggtgcttgtgtggttggaaaggttggtgatccaataaacattggaaaattggagaggtttgtggctgattatgctagggagcatgggattgacgatgaattattactagaggagattaaggggattaagaggaatgggaagaaagtcgcaatcattggagctgggcccgctggcctaacttgtgccgcagacctggcaaaaatgggttatgaggtaacaatctacgaagccctccaccaaccaggaggagtactaacatacggaatcccagaattcagactaccaaaagaaatacttagaaaagagctgaagaagctaagccttttgggtgtagaaataaaaacggaccatatagttggtaaaactataacaattcaagagttacttcaggaatatgatgcagtatttataggaactggagctggaacaccaaaattgccaaatataccaggaataaaccttaatggtatttattctgcgaatgagttcctcacgagaattaacctaatgaaggcctacaaattcccagaatacgacactccaattgttgttgggaagaaggttgttgttattggagctggtaatactgcaatggatgctgctaggtcagcactgaggcttggagcggaggttactattgcttacagaagaggcagggaggatatgacagccaggattgaggaagttaagcatgctgaggaagagggagttaagttcatgttctttgttaatccagtggaattcattggagatgagaatggaaatgttaaggcggtgaagtttgagaagatgaagccactggaagagagggacagtagaggaaaaagaaaaatagttggaacaggagaatacataactgtggaagcagatacagtaataatagcgattggccaaactccaaataaggttctctggagggcaactcctgagcttaaggtggatgagtggggtaggattgttgtggatgagaatttgatgactagtattcccggggtttttgctggtggtgatgctattaggggtgaggctacggttattctagcaatgggcgacgggagaaaagcagcaaaagccatccaccaatacctaagcaagaaaggaaattga

SEQ ID NO: 4628 - protein, 476 aa, Pyrococcus furiosus
MPRLIKERVPTPERSVGERVRDFGEVNLGYSWELALREAERCLQCPVEYAPCIKGCPVHINIPGFIKALRENRDNPSKAVREALRIIWRDNTLPAITGRVCPQEEQCEGACVVGKVGDPINIGKLERFVADYAREHGIDDELLLEEIKGIKRNGKKVAIIGAGPAGLTCAADLAKMGYEVTIYEALHQPGGVLTYGIPEFRLPKEILRKELKKLSLLGVEIKTDHIVGKTITIQELLQEYDAVFIGTGAGTPKLPNIPGINLNGIYSANEFLTRINLMKAYKFPEYDTPIVVGKKVVVIGAGNTAMDAARSALRLGAEVTIAYRRGREDMTARIEEVKHAEEEGVKFMFFVNPVEFIGDENGNVKAVKFEKMKPLEERDSRGKRKIVGTGEYITVEADTVIIAIGQTPNKVLWRATPELKVDEWGRIVVDENLMTSIPGVFAGGDAIRGEATVILAMGDGRKAAKAIHQYLSKKGN

SEQ ID NO: 4629 - DNA, 1425 bp, Pyrococcus furiosus
  CDS (1)..(1425)
atgcctaggcttattaaagatagggttcctactcctgagaggtctgttggggagagggttagggattttggtgaggttaatcttggttattcttgggagttggctttgagggaggctgagcgttgtctccagtgtcctgttgagtatgctccttgcattaagggttgtcctgtgcatattaacattccgggtttcattaaagccttgagggagaatagggataatcctagtaaggctgtgagggaggctcttaggattatttggagggataatacgttaccagcaattactggtagagtttgtccccaggaagagcagtgtgagggtgcttgtgtggttggaaaggttggtgatccaataaacattggaaaattggagaggtttgtggctgattatgctagggagcatgggattgacgatgaattattactagaggagattaaggggattaagaggaatgggaagaaagtcgcaatcattggagctgggcccgctggcctaacttgtgccgcagacctggcaaaaatgggttatgaggtaacaatctacgaagccctccaccaaccaggaggagtactaatatatggcattcccgaatttaggttaccaaaggagatcgtcaagaaggagcttgagaatctgaggaggcttggagttaaaattgaaacaaatgttttggtaggaaaaactattacatttgaagagcttagggaagagtacgatgcaatattcataggaactggagctggaacgccaaggatatacccctggcctggggtaaatctcaatggtatttattctgcaaatgagttcctcacgaggattaacctaatgaaggcctacaaattcccagaatacgacactccaataaaagtcgggaagagagttgcggttataggtggaggaaacacagcaatggatgctgctaggtcagcactaagactaggggctgaagtttggattctttacagaagaacaaggaaggagatgacggctagagaggaagaaataaagcatgccgaggaggagggagttaagttcatgttcttggtaacccccaagaggttcattggggatgaaaatggaaacttaaaagctatagagctggagaagatgaagctaggagagcccgatgaaagtggaagaagaagaccaattccaacaggagaaaccttcataatggagttcgatacagcaataatagcaataggccaaaccccgaacaaaacattcttggagaccgtcccagggcttaaggtggatgagtggggtaggattgttgtggatgagaatttgatgactagtattcctggggtttttgctggtggtgatgctattaggggtgaggctacggttattctagcaatgggcgacgggagaaaagcagcaaaagccatccaccaatacctaagcaaagaaaagtaa

SEQ ID NO: 4630 - protein, 474 aa, Pyrococcus furiosus
MPRLIKDRVPTPERSVGERVRDFGEVNLGYSWELALREAERCLQCPVEYAPCIKGCPVHINIPGFIKALRENRDNPSKAVREALRIIWRDNTLPAITGRVCPQEEQCEGACVVGKVGDPINIGKLERFVADYAREHGIDDELLLEEIKGIKRNGKKVAIIGAGPAGLTCAADLAKMGYEVTIYEALHQPGGVLIYGIPEFRLPKEIVKKELENLRRLGVKIETNVLVGKTITFEELREEYDAIFIGTGAGTPRIYPWPGVNLNGIYSANEFLTRINLMKAYKFPEYDTPIKVGKRVAVIGGGNTAMDAARSALRLGAEVWILYRRTRKEMTAREEEIKHAEEEGVKFMFLVTPKRFIGDENGNLKAIELEKMKLGEPDESGRRRPIPTGETFIMEFDTAIIAIGQTPNKTFLETVPGLKVDEWGRIVVDENLMTSIPGVFAGGDAIRGEATVILAMGDGRKAAKAIHQYLSKEK

SEQ ID NO: 4631 - DNA, 2553 bp, Azoarcus evansii
  CDS (1)..(2553)
atggaagccgtacagacatcggaaatcaggtggtggaaggcgagcaagccggccggcatggccgagttcggcgcgcccgtgaagctgagcatcgacggcgttgaggtcgaggcgcccgccggcgcgtcggtcctgaatgccgccaccgccgcaggcctctacattccggccctgtgtgcgcaccccgatctgccgcccgccggccagcgtggggcgggagagggcggctgcaatctctgtatggtcgagatcgacggtgttgatggcgttgtgaaggcctgttcgacgaccgtcacggccggcatggtcgtgacgaccaagtcgccggcgatccaggaagtgcgccaggccagcctcgccaagatcctcggcccgcatccccatgtctgcctgacctgtccgcagcgcgacggctgttcgcgctcgcagtgctcctacggcaacccgcaggaaacgcgctgctgcacgatcttctcgtcctgtgagctgcgcaaggtctccgactacatcggcatcccgaacacgacgccgccgtacaagcccgcgcagctgccggtcgtgctcgacgagcccttcttcgaccgcgactacaacctgtgcatcgactgccgccgctgcctggtcgcctgtaatgacgtgcgcggggtgggctgtctcgagttcaagggaagtcgagacgcctggcagggcaagcgcacctatgtcggcacgatcgcgccgacgctgatcgaatccggctgtaccttctgccaggcctgtgtgaccgtttgcccgaccggcgcgctgatggaccgcacgctcgaccctgccaaacgcgaggagtcgatggtgccgtgcaagaacgcctgtccggcgggtatcgacgtgccgcgctacgtgcagctcgccgccgaaggcaagtacggcgaggcgatcgcggtagtgcgcgaacggcttcccttcccgggcatcctcggtcgcgcctgtttcgcgatgtgtgaatcggcctgccgccgcaaggacctggacgatccgctgtcgatccgcaacctgaagcgcatcgccgcggacaacgacacgggggtctggcgcgagcatgcgaagaagctgccggcgaccggcaagaaggccgcggtgatcggcgccggcccggccggcctgacggtcgcgtactacctcgccaagcagggccatggtgtcacggtgttcgacgcacagccggccgcagcgggcatggcgcgctacggcatcccgtcctaccgcgtgccggccgaagtgatcgacaacgaggttgccgaagtgtcggcgttgggcgtcgagttccgcttcggtgcgaaggtcgagaacgtcgatacgctcttcaatgacggctatggcgccgtgttcgtcggcatcggcgcgcagggcggcgacaagctgggcatccccggcgacgacctgccgggcgtggtcgacagcccgacctacctcaaggccgtgacgatgggcctcgtgaatacccctgagggcatccagaccggcaagaaggtcgcggtgatcggcggcggcaacgtcgcgaccgacaacgcgcgttcatcgcgccgcttcggcgccgaggtcgacatggtgtaccgccgcacccgcgaggagatgccggcacgcctggaggagttcgagggctgcgtggaggagggcgtgaatatccgctacctgctcgcgccgaagaagatcgagccgggcaccaacggtttccgcctgcagatcacctacgcgaagatggcgctgggcgagcccgacgcatccggtcgccgcaagccggtcgagaccggcgaggaagtcgtcgagggcgtggatctggtgatcgccgcgatcggccagttcccgaaccgcttcgaaggtttcggcgtcgagaccgatcgcaagggccgcatcacggtgcgcgaggattcgatgctgacgagccggcccaaggtgtatgccggcggcgattgcgtgctcggaccttcgacgctgatcgagtcggtcgcgcagggacgtgtggcggcgtccgcgatggacatcgtgctcggcggcgacggcgacatctccgaagtgctgctgcgcaccggctgggagaccaacccgtgcatcggccgcaaggaaggcttcaacaagatccgcaagttccatccgatcatgctggcgcccgagcagcgcacgggctgggacgaggtggaactgggcttcgacgatgcgacggcgcgtgcggaggcggctcgctgcttcaagtgcaacctggcgccgaagatcgccgacgcgatcctgcccccggagtcctcactgaagttcgacgaagcgacgatcgcgtccgtgccgaccgagtcgggcgtgttccagctgctcgatggcgacaagaacgtgctgatcatcaaaggcgtggagaacctgcgcgagggcttgatggagcagctcgagcgcggcggcgacgcaacgaatttcgtgttcgaggaggcggcgctcttcacgtcccgcgagagccagatgatccaggcctacctgcagcagtacgggaagatgccgggcggagggtccgacgaactcgacgacctgttctga

SEQ ID NO: 4632 - protein, 850 aa, Azoarcus evansii
MEAVQTSEIRWWKASKPAGMAEFGAPVKLSIDGVEVEAPAGASVLNAATAAGLYIPALCAHPDLPPAGQRGAGEGGCNLCMVEIDGVDGVVKACSTTVTAGMVVTTKSPAIQEVRQASLAKILGPHPHVCLTCPQRDGCSRSQCSYGNPQETRCCTIFSSCELRKVSDYIGIPNTTPPYKPAQLPVVLDEPFFDRDYNLCIDCRRCLVACNDVRGVGCLEFKGSRDAWQGKRTYVGTIAPTLIESGCTFCQACVTVCPTGALMDRTLDPAKREESMVPCKNACPAGIDVPRYVQLAAEGKYGEAIAVVRERLPFPGILGRACFAMCESACRRKDLDDPLSIRNLKRIAADNDTGVWREHAKKLPATGKKAAVIGAGPAGLTVAYYLAKQGHGVTVFDAQPAAAGMARYGIPSYRVPAEVIDNEVAEVSALGVEFRFGAKVENVDTLFNDGYGAVFVGIGAQGGDKLGIPGDDLPGVVDSPTYLKAVTMGLVNTPEGIQTGKKVAVIGGGNVATDNARSSRRFGAEVDMVYRRTREEMPARLEEFEGCVEEGVNIRYLLAPKKIEPGTNGFRLQITYAKMALGEPDASGRRKPVETGEEVVEGVDLVIAAIGQFPNRFEGFGVETDRKGRITVREDSMLTSRPKVYAGGDCVLGPSTLIESVAQGRVAASAMDIVLGGDGDISEVLLRTGWETNPCIGRKEGFNKIRKFHPIMLAPEQRTGWDEVELGFDDATARAEAARCFKCNLAPKIADAILPPESSLKFDEATIASVPTESGVFQLLDGDKNVLIIKGVENLREGLMEQLERGGDATNFVFEEAALFTSRESQMIQAYLQQYGKMPGGGSDELDDLF

SEQ ID NO: 4633 - DNA, 1242 bp, Clostridium perfringens
  CDS (1)..(1242)
atgacagtaaatgagcaaaacttaaaagaagaagctttaagatgcttaatgtgcaaaaatccaagatgtaaggctaattgcccaataagtacacctattccagaggtaataggattatttaaagaagataaaataaaagaggctggggaaattttatttgaaaacaatcctttatcagtagtttgttccatagtatgtcctcatgaaaatcaatgtaaggggaattgtataaaaggaataaaggatacaccagtaaactttagtgaaatagagagagaaatatcagaagagtttttagataatctagaacttactcaagatactattttagaagataaaattgctataataggtggaggtcctgcgggaataacagctgcatttatattagctaaaaagggatatcaagtaacaatatttgatgaaaatgataaaattggtggagtattaagatatggaataccagagtttagactttctagagatataatagataaatatgaagaggcccttattaaattaaatgttaaaataagacctaacactttaataggaacagttataactttagatatgttaaaaagtgatggttataaagcaatatttatagcaactggggtttggaatcctaagactttaaatgttaagggagaaactttaggcaatgttcactatgctatagattatttaaaagcaccaaaatcatataatcttggagagagagtagttgtaataggagctggaaatgttgcaatggatgctgctagaactgcaaagagaaatggtgcagatacatatgtgctttatagaaaaagctttgaagatatgccagctactaaggttgaaatagaagaggctaaggaagatggcgtaaaatttgaactttataaagctcctttagagatttatgaggatggagtaaaatacatacaaacagaaagagtaatttctgaggatggaagagtatcatttaaaaccttagaaggtagtgaaggtgtgtttaaatgcgattcaataatagttgccataagccaagcgcctagaactaatatagtatctagtagtagagatctttcaacagataaatatggcttagtagtaactgacgaaaagggaataacaacacttaatggagtttttgcttcaggagatgttgtaagtggtcctaagactgtagttgaggcagttgcaaatagtaaaaaggttgctcatgctatagatgaattttgtaaaaacaattaa

SEQ ID NO: 4634 - protein, 413 aa, Clostridium perfringens
MTVNEQNLKEEALRCLMCKNPRCKANCPISTPIPEVIGLFKEDKIKEAGEILFENNPLSVVCSIVCPHENQCKGNCIKGIKDTPVNFSEIEREISEEFLDNLELTQDTILEDKIAIIGGGPAGITAAFILAKKGYQVTIFDENDKIGGVLRYGIPEFRLSRDIIDKYEEALIKLNVKIRPNTLIGTVITLDMLKSDGYKAIFIATGVWNPKTLNVKGETLGNVHYAIDYLKAPKSYNLGERVVVIGAGNVAMDAARTAKRNGADTYVLYRKSFEDMPATKVEIEEAKEDGVKFELYKAPLEIYEDGVKYIQTERVISEDGRVSFKTLEGSEGVFKCDSIIVAISQAPRTNIVSSSRDLSTDKYGLVVTDEKGITTLNGVFASGDVVSGPKTVVEAVANSKKVAHAIDEFCKNN

SEQ ID NO: 4635 - DNA, 1407 bp, Clostridium perfringens
  CDS (1)..(1407)
atgagtaatttaaaaaagaaaagagttaaatctagggagcaagatccaatagaaagagggaaaaactttaaggaggtttccttaggatatggagaagaagaggctattgaagaggcaaatagatgtttagggtgtaaaaatcctaagtgtgtggaagggtgtcctgtttcagtaaacataccaagttttatatctttcataaaaaaaggagatttttctgcttcttttgaagaattatcaaaatataatgctttacctgctgtatgtggaagagtttgcccacaagaatctcaatgtgaagggaagtgtgttttaggaataaagggagaaccattagccattggtcaattagaaagattcatagcagactttgcaagaaataataaattaagctctttaaaaaagagtgaaaagattttagagaaggtagctgttattggaagtggccctgctggattaacctgtgcaggagagctagctaaactaggatatagagtaactatttttgaagcattacatgaatctggaggggttttagtttatggaattccagagtttagattaccaaagaaggatgtagttaaatatgaaatagaggaaataaaaaaactaggagttaaaatagaaaacaatgtggtagttggtaaaactgtggacattgatgaattaatagaaaatgaaggatttaaggctgtctttataggttctggagcaggtcttccaaaattcatggggattaaaggggaaaatgccaatggagttttttcagctaatgaagttttaactagggtaaatcttatgaaggcttttaaaaatgaaagccatactcctttaaatttaggaaaaaaggttgctgtagttggtggaggaaatgttgccatggatgcagctagaacttccttaagattaggagcagaaactcacataatttatagaagaagtgaaaaggagctgccagctagattagaagaaattcatcatgctaaggaagaaggagttattttagatgttttaactaatcctactgaaattttaactgatgaaaagggttgggtaaagggtataaagtgtataaggatgaaacttggagaggaagattcttcaggaagaagaagaccaattgaaattgaaaattcagagtttattatggaagtagatagtgtaataatgtccttaggaacttctcctaatcctctaatatctaatgccacaaagggattaaagacaaataagagaggatgtctccttgtagatgaagaaagcttaaaaacctccttaaaggggatttatgcaggaggagatgctgttacaggagcagctacagttattcttgctatgggagctggaaagaaagctgcaaagtccattgattcttatttaagaaaagaagagcaaaataatatttag

SEQ ID NO: 4636 - protein, 468 aa, Clostridium perfringens
MSNLKKKRVKSREQDPIERGKNFKEVSLGYGEEEAIEEANRCLGCKNPKCVEGCPVSVNIPSFISFIKKGDFSASFEELSKYNALPAVCGRVCPQESQCEGKCVLGIKGEPLAIGQLERFIADFARNNKLSSLKKSEKILEKVAVIGSGPAGLTCAGELAKLGYRVTIFEALHESGGVLVYGIPEFRLPKKDVVKYEIEEIKKLGVKIENNVVVGKTVDIDELIENEGFKAVFIGSGAGLPKFMGIKGENANGVFSANEVLTRVNLMKAFKNESHTPLNLGKKVAVVGGGNVAMDAARTSLRLGAETHIIYRRSEKELPARLEEIHHAKEEGVILDVLTNPTEILTDEKGWVKGIKCIRMKLGEEDSSGRRRPIEIENSEFIMEVDSVIMSLGTSPNPLISNATKGLKTNKRGCLLVDEESLKTSLKGIYAGGDAVTGAATVILAMGAGKKAAKSIDSYLRKEEQNNI

SEQ ID NO: 4637 - DNA, 1464 bp, Ralstonia solanacearum
  CDS (1)..(1464)
atgggcaaggcgaccggctttctcgaatttccccgccagaacgaggcatacgaagcgcccgcagcgcgcgtgaagcattacaaggagttcgtgttcgcgctggcggacagcgaagccaagatccagggcgcgcgctgcatggactgcggcattccgttctgcaacaacggctgcccggtcaacaacatcatccccgacttcaacgacctggtgtaccgccaggactggaagacggcgatcgaggtgctgcactcgaccaacaatttccccgagttcacgggccgcatctgtccggcgccgtgcgaggcggcctgcacgctgggcatcaatgaggcgccggtcggcatcaagtcgatcgagcacgccatcatcgacaaggcgtgggccgagggctgggtgcagccgcaggtgcccaggcacaagaccggcaagaccgtggccgtggtcggctcgggcccggccggcctggcggcggcgcagcagctggcacgcgccggccacgacgtgacggtgttcgagaagaacgaccgcatcggcggcctgctgcgctacggcattcccgacttcaagctggaaaagacgcagatcgaccgccgcatgcagcagatggaagccgagggcgtgaccttccgcaccggcgtgatggtgggcgacaagaccgtccccgccggcatctgcaacgacgcgcgcgagaccctcgccgcacaggacatcctcaagaccttcgacgccgtggtgctcacgggcggctcggaagtcccgcgcgacctgccggtgccgggccgcgacctggatggcgtgcattacgcgctcgaattcctgatcccgcagaacaaggaagtggccggcgacgcgcccaacccgatccgcgccgacggcaagcacgtcatcgtcatcggcggcggcgatacggggtcggactgcgtgggcacctccaaccgccacggcgccgcctcggtcacgcagttcgagctgttgccgcgtccccccgaggaagagaacaagccgctggtgtggccgtactggccgatcaagctgcgcacctcgtcgtcgcatgacgagggctgcgagcgcgactggtcggtggccaccaaggcgctgatcggcgagaacggccgcgtgacgggcctcaaggccgtgcgcctggagtggaaggacggcaagatggccgaggtcgaaggcagcgagttcttgctcaaggccgacctcgtgctgctggcgatgggcttcacccatccggtcggcggcgtgctggaagcgttcggcgtggccaaggatgcgcgcagcaatgcccgcgccgccaccgagggtgacaacgcctacgccaccaatgtgccgaaggtgttcgccgctggcgacgtgcgccgcgggcagtcgctggtcgtgtgggccatccgcgaaggccggcaggccgcgcgtgcggtggacgcgttcctcatgggccattcggtgctgccgcgctga

SEQ ID NO: 4638 - protein, 487 aa, Ralstonia solanacearum
MGKATGFLEFPRQNEAYEAPAARVKHYKEFVFALADSEAKIQGARCMDCGIPFCNNGCPVNNIIPDFNDLVYRQDWKTAIEVLHSTNNFPEFTGRICPAPCEAACTLGINEAPVGIKSIEHAIIDKAWAEGWVQPQVPRHKTGKTVAVVGSGPAGLAAAQQLARAGHDVTVFEKNDRIGGLLRYGIPDFKLEKTQIDRRMQQMEAEGVTFRTGVMVGDKTVPAGICNDARETLAAQDILKTFDAVVLTGGSEVPRDLPVPGRDLDGVHYALEFLIPQNKEVAGDAPNPIRADGKHVIVIGGGDTGSDCVGTSNRHGAASVTQFELLPRPPEEENKPLVWPYWPIKLRTSSSHDEGCERDWSVATKALIGENGRVTGLKAVRLEWKDGKMAEVEGSEFLLKADLVLLAMGFTHPVGGVLEAFGVAKDARSNARAATEGDNAYATNVPKVFAAGDVRRGQSLVVWAIREGRQAARAVDAFLMGHSVLPR

SEQ ID NO: 4639 - DNA, 1962 bp, Salmonella typhimurium
  CDS (1)..(1962)
atgaatcgttttattatggccaatagccagcagtgtctgggctgccatgcctgcgaggtcgcctgcgtaatggctcacaatgatgagcgacatgtcctgacgtcacagcgctatcagccccgaattactgtcattaaacatcagcaccagcgcagcgcggttacatgtcaccattgcgaagatgcgccctgcgcccgtagctgtccgaacggcgcgatcgcgcatattaacgacagcgtgcaggtcaatgcgcagaagtgcatcggctgtaaatcctgcgtcgtcgcctgtccattcggcaccatgcagatggtattgacgcccgtcgcgccaaaccagttcaaagccagcgcgcataaatgcgatctgtgtcagggacgtgaacaggggccggcctgtgtggaaaattgcccggcggatgcgctgcaactggtcaccgaagactcgttgacccgtctggctaaaacgcgacggctgcgtaccgcccggcaggagattcgcccctggcataccgtggatacacaacacagtggggcagcaagcagcaaagccgagcgtatgcaggcgacgccgccgcgcggcgaaccggataaactggcgattgaagcgcgtaaaaccacctttgaggaaatttatctgccgtttcgcgccgcgcaggcggagcgtgaggcgtcccgctgcctcacatgcggggaacacagtatctgcgaatggacctgtccgctgcataaccatattccccagtggatcgaactggtgaaagccggcgatattgatgcggcggtagagctttcccaccagaccaactgtctgccggaaattaccgggcgcgtctgtccgcaggatcggctatgcgaaggcgcgtgtacactccgcgatgagtatggcgcggttaccatcggcaatattgagcgctatatctccgatcgcgctctgagcaaaggctggcgtcccgacctgtcggacgtacagaagagcgataagcgcgtggcgattatcggcgcggggccggcaggtcttgcctgcgctgacgtgctggcgcgccatggcgtaagcgccaccgtctacgatcgccatccggaaatcggcggtttactcacctttggtattccggctttcaaactggataaatctctgctggcgcgccgtcgggaaatcttcagcgcgatggggattcgtttcgagcttaactgcgaagtagggaaagatatttctctggagacgctgctggagagttatgacgccgtctttgttggggttggaacctatcgttccatgaaggctgatttaccgaatgaagatgcgccgggggtatatgatgcgttgccattcctcatcgccaataccaaacaggtgatggggcttccggcgttgcctgacgagccgtttattgatactgcgggccttaacgtggttgtgctgggcggcggtgacaccgcaatggactgcgtacgtacggcgctgcgtcatggcgctgctaacgtcacctgcgcttatcgccgcgatgaggccaatatgccagggtcgaaaaaagaggtgaaaaacgcgcgggaagagggcgcgaactttgaatttaacgttcagccggttgagttggtgctggatacgcacgggcgcgccagcggtattcgctttttgcgtacgcggcttggcgaaccggatggtcaggggcgacgccgcccggtacctgtaccggacagcgagttcgtgatgccggcggatgcggtcattatggcgtttggttttcatccgcatggtatgtcgtggctggaatcgcatggcgtgaaggtggataactggggacgtattgccgccagcgtcgagagcgagtttcgttaccagacgtccaacccgaaaattttcgccggcggcgatgcggtgcgcggcgccgatctggtggtgacggcgatggcagaaggccgacatgctgcgcaggggatactcgactggttagctaaataa

SEQ ID NO: 4640 - protein, 653 aa, Salmonella typhimurium
MNRFIMANSQQCLGCHACEVACVMAHNDERHVLTSQRYQPRITVIKHQHQRSAVTCHHCEDAPCARSCPNGAIAHINDSVQVNAQKCIGCKSCVVACPFGTMQMVLTPVAPNQFKASAHKCDLCQGREQGPACVENCPADALQLVTEDSLTRLAKTRRLRTARQEIRPWHTVDTQHSGAASSKAERMQATPPRGEPDKLAIEARKTTFEEIYLPFRAAQAEREASRCLTCGEHSICEWTCPLHNHIPQWIELVKAGDIDAAVELSHQTNCLPEITGRVCPQDRLCEGACTLRDEYGAVTIGNIERYISDRALSKGWRPDLSDVQKSDKRVAIIGAGPAGLACADVLARHGVSATVYDRHPEIGGLLTFGIPAFKLDKSLLARRREIFSAMGIRFELNCEVGKDISLETLLESYDAVFVGVGTYRSMKADLPNEDAPGVYDALPFLIANTKQVMGLPALPDEPFIDTAGLNVVVLGGGDTAMDCVRTALRHGAANVTCAYRRDEANMPGSKKEVKNAREEGANFEFNVQPVELVLDTHGRASGIRFLRTRLGEPDGQGRRRPVPVPDSEFVMPADAVIMAFGFHPHGMSWLESHGVKVDNWGRIAASVESEFRYQTSNPKIFAGGDAVRGADLVVTAMAEGRHAAQGILDWLAK

SEQ ID NO: 4641 - DNA, 1437 bp, Rhizobium meliloti
  CDS (1)..(1437)
atggagatcgaccggcaggtggcgaagtaccagccggcatccgaccgcatccgccatttccgcgaattcaccattccgatgtccgaccaggaagtgcagaagcaatccgctcgctgcatggactgcggcatcccctattgccatgggccgaccgggtgcccggtgcacaaccagatccccgactggaacgatctcgtctataacggcaattgggacgaggcgatccgcaacctgcactccaccaacaacttcccggaattcaccggccgcgtctgcccggcgccctgcgaggaagcctgcacgctgaacctcgaagacgtgccggtggcgatcaagacgatcgagcaggcgatcgccgacaaggcctatgagatgggctatatcgtgccgcagcccgccgtgaccaagaccggcaagaaggtcgcggtcatcggctccgggccggccggcatggcggctgcccagcagctggcgcgcgccggccacgaggtgcatgtctacgaacgcgagtccaagcccggcgggctgctgcgctacggaatcccggacttcaagatggagaagaacttcatcgaccggcgtgtcgagcagatgcggggcgagggcgtgaccttccattgcggcgtcaatgtcggtgtcgatgtcgcggtgcaaaagctcgtcgatgaaaacgacgccgtgctctattgcggcggctccgagacgccgcgcgacgccggcattcccggcgtggagttcttcggcgtgcacgacgccatgccttatctggtacagcagaaccgtcgcgtcggccgcgagaacatcgacagcgtgggctggccgtccgagccgatcctcgccggcggcaagcacgtcgtcgtcgtcggcggcggcgacacggcatcggactgtgtcggtaccgccttccgccagggcgccgtcaaggtgacccagctcgacattcgtccgcaaccgcccgagaaggaagacaagcttgcggtttggcccttctgggcaacgaagatgcgcacctcctccagccaggccgagggcgctgtccgcgagttccaggtcgcgacgctcgagtttgtcggcgacgaggacggcaatctcaccggcgtcaaatgctgtcaggtcgacgagcgccgcaagccgatcgccggtaccgagttcatcatcaaggccgatctcgccttcatcgcgatcggtttccgtggtcccttcgcagacagcgtgctcaaggatctcggcgagaagctgacggtcaacaccgaccgccgcggttcgaccaatgtcgtcgccaacgagcgcgactacaggacttcggtcgacaaattgtgggcggcaggcgacattcgccgcggccagtcgctcgtcgtatgggcgatccgcgaaggccggcaggcggcacgcgcgatcgacgaggcgctgatgggctcgacggtgctgccgcggtag

SEQ ID NO: 4642 - protein, 478 aa, Rhizobium meliloti
MEIDRQVAKYQPASDRIRHFREFTIPMSDQEVQKQSARCMDCGIPYCHGPTGCPVHNQIPDWNDLVYNGNWDEAIRNLHSTNNFPEFTGRVCPAPCEEACTLNLEDVPVAIKTIEQAIADKAYEMGYIVPQPAVTKTGKKVAVIGSGPAGMAAAQQLARAGHEVHVYERESKPGGLLRYGIPDFKMEKNFIDRRVEQMRGEGVTFHCGVNVGVDVAVQKLVDENDAVLYCGGSETPRDAGIPGVEFFGVHDAMPYLVQQNRRVGRENIDSVGWPSEPILAGGKHVVVVGGGDTASDCVGTAFRQGAVKVTQLDIRPQPPEKEDKLAVWPFWATKMRTSSSQAEGAVREFQVATLEFVGDEDGNLTGVKCCQVDERRKPIAGTEFIIKADLAFIAIGFRGPFADSVLKDLGEKLTVNTDRRGSTNVVANERDYRTSVDKLWAAGDIRRGQSLVVWAIREGRQAARAIDEALMGSTVLPR

SEQ ID NO: 4643 - DNA, 1362 bp, Rhizobium meliloti
  CDS (1)..(1362)
atgggaacgacgcaatctgggattctcggcgggcggctgccgcttgccgagtacgaagccaatttctccgaccttcatccgtcgctcgacaggcacgaggcgctggtcgccgccgaccgctgttatttctgtcatgacgcgccctgcatgaccgcctgtccgacctccatcgacatcccgctcttcattcgccagatcgcgacgggcaatccgatcggctcggcgaagacgatcttcgaccagaacatactgggcggcatgtgcgcccgcgtctgtcccaccgagacgctctgcgaagaggcctgcgtacgcaacacggccgaggagcggccggtcgaaatcggccgcctgcagcgctacgcgacggacatcgccatgcgggagaacaagcagttctattcgcgcgccgctcgttccggccgcagggtcgccgtcgtcggcgccgggccggcggggctcgcctgcgcgcatcggctggccgtgaaaggccacgacgtggtgatctacgatgcgcgcgaaaaatccggcggcctcaacgaatacggcatcgccgcctataaggcggtcgacgacttcgcccagagagaggtggaatacgtgctttcggtcggcggcatcgaggtcagccacggcaaggcgctcggccgcgacttctctcttgccgatctggcggaagaattcgatgccgtctttctcggcctcggtcttgcaggtgtcaatgcactgcggatcgaaggcgagaatgccgaaggcgtcgaggacgccgtcgacttcatcgccgcacttcgccagtcgaagacaaaggccgacattccggtcggccggcgcgtcgtggtgctcggcggcggcatgactgcgatcgacgccgccgtccaggcgaagctgctcggcgccgaggaagtgacgatctgctatcgccgcggcaaggagcacatgaacgcctcggaattcgagcaggaccttgcggcttccaagggcgtcaccatccgccactggctgcagccgaagcgcatcgccgtcaaggatggccgggtcgccggcatcgaactcgactacaccacgcttgaaaacgggaagctgacaacgaccggcgagaccggaatcattgccgccgaccagatcttcaaggccatcggccaggccttcgaggcctccggcctcggcgcccttcgcatggaaagcggacgcatcgtcgtcgattcggaaggacgcacctcgctggaaaaggtctgggccggcggtgactgcgtgctcgggggcgaggacctcaccgtttcggccgtcgcgatgggacgcgatgccgccggatcgatcgaccgggctttcgccgtggctcagccgctggcgagcgccgttgcttga

SEQ ID NO: 4644 - protein, 453 aa, Rhizobium meliloti
MGTTQSGILGGRLPLAEYEANFSDLHPSLDRHEALVAADRCYFCHDAPCMTACPTSIDIPLFIRQIATGNPIGSAKTIFDQNILGGMCARVCPTETLCEEACVRNTAEERPVEIGRLQRYATDIAMRENKQFYSRAARSGRRVAVVGAGPAGLACAHRLAVKGHDVVIYDAREKSGGLNEYGIAAYKAVDDFAQREVEYVLSVGGIEVSHGKALGRDFSLADLAEEFDAVFLGLGLAGVNALRIEGENAEGVEDAVDFIAALRQSKTKADIPVGRRVVVLGGGMTAIDAAVQAKLLGAEEVTICYRRGKEHMNASEFEQDLAASKGVTIRHWLQPKRIAVKDGRVAGIELDYTTLENGKLTTTGETGIIAADQIFKAIGQAFEASGLGALRMESGRIVVDSEGRTSLEKVWAGGDCVLGGEDLTVSAVAMGRDAAGSIDRAFAVAQPLASAVA

SEQ ID NO: 4645 - DNA, 1428 bp, Klebsiella aerogenes
  CDS (10)..(1428)
ggggttaagatgagtcagaacgtttatcaatttatcgacctgcagcgcgttgatccgccaaagaaaccgctgaagatccgtaaaattgagtttgtggaaatttacgagccgttttcagaaggccaggccaaggcgcaggcggatcgctgcctctcctgtggcaacccgtactgcgaatggaagtgccctgtgcataactacatcccgaactggctgaagctggccaacgaggggcgtatttttgaagcggccgagctgtcgcatcaaaccaacactctgccggaagtctgcgggcgcgtctgcccgcaggaccgcctgtgtgaaggctcctgtacgctgaacgatgagttcggcgcggtgaccatcggcaacatcgaacgctatatcaacgataaggcattcgagatgggctggcgtccggatctctccgacgtgaagccgaccggtaaaaccgtcgcgatcatcggcgctggcccggcgggcctcgcctgcgccgacgtgctgacccgtaacggcgtcaaggcggtggtatttgaccgccatccggaaatcggcggcctgctgaccttcggtatcccggcgttcaagctggaaaaagaggtgatgacccgccgccgggagatcttcaccggcatgggcattgagttcaaactcaataccgaagtgggccgcgacgtgcagctcgatgacctgctgaaggagtacgatgcggtgttcctcggcgtcgggacctatcagtcgatgcgcggtggactggacaacgaagacgccccgggtgtttacgacgcgctgccgttcctgatcgctaacactaagcagatcatgggctttggtgaaaccgccgatgagccctatgtcagcatggaaggcaaacgcgtggtggtgctcggcggtggcgacaccgcgatggactgcgtacgcacctccgtccgtcagaatgcggcgcacgtgatctgcgcctatcgccgtgacgaagagaacatgcccggctcaaaacgcgaagtgaaaaacgcgcgcgaagaaggcgttgagttccagtttaacgtccagccgctgggcgtggaagtgaatgccaacggtaaggtttgcggcgtgaagatggcgcgcaccgaaatgggccagccggatgcgaagggccgccgccgcgcggagatcgtccccggctctgagcacgtggtgccggctgacgccgtagtcatggcgtttggcttccgtccgcacagcatggagtggctggcgaagcacagcgtcgaactggactcccagggccgtattatcgccccggaaggcagcgaaaacgccttccagaccagcaacccgaaaatcttcgccggtggcgatatcgttcgcggttccgatctggtggtcaccgcgattgccgaaggtcgtaaagcggcggacgggatcctcaactaccttgaagtctga

SEQ ID NO: 4646 - protein, 472 aa, Klebsiella aerogenes
MSQNVYQFIDLQRVDPPKKPLKIRKIEFVEIYEPFSEGQAKAQADRCLSCGNPYCEWKCPVHNYIPNWLKLANEGRIFEAAELSHQTNTLPEVCGRVCPQDRLCEGSCTLNDEFGAVTIGNIERYINDKAFEMGWRPDLSDVKPTGKTVAIIGAGPAGLACADVLTRNGVKAVVFDRHPEIGGLLTFGIPAFKLEKEVMTRRREIFTGMGIEFKLNTEVGRDVQLDDLLKEYDAVFLGVGTYQSMRGGLDNEDAPGVYDALPFLIANTKQIMGFGETADEPYVSMEGKRVVVLGGGDTAMDCVRTSVRQNAAHVICAYRRDEENMPGSKREVKNAREEGVEFQFNVQPLGVEVNANGKVCGVKMARTEMGQPDAKGRRRAEIVPGSEHVVPADAVVMAFGFRPHSMEWLAKHSVELDSQGRIIAPEGSENAFQTSNPKIFAGGDIVRGSDLVVTAIAEGRKAADGILNYLEV

SEQ ID NO: 4647 - DNA, 1491 bp, Streptomyces coelicolor
  CDS (1)..(1491)
atggccgatcccaagggttttctgacgacgccccgcgaggagtggccccgcagaccggccggcgagcgggtccgggactgggacgaggtgtacgtcccgggagcgctgctgccgatcgtcggccggcaggccgaccggtgcatggactgcggcgtccccttctgccacgaggcctgtccgctgggcaacctgatcccggagtggaacgacctggtctcccggtcggactggcgggcggcgagcgagcggctgcacgccacgaacaacttcccggagttcaccggccggttgtgtccggcgccgtgcgaggcgggttgtgtgctcgccatcaaccagcccgcggtcaccatcaagaacgtcgagtgcgcgatcgcggacacggcctgggaggagggcttcgtcccgcccctgccgccggagcggctgtccgggaggacggtggcggtgatcggctcgggaccggcggggctcgcggcggcgcagcagttgacccgggccgggcacacggtcgcggtgtacgagcgcgacgaccggatcggtgggctgctgcggtacgggatccccgcgttcaagatggagaagcggcacctggagcggcgtgtcggccagatgcgggcggaggggacgaggttccgtacgtcggcggcggtcggacgggacgtggacgccgcggcgctgcggacccgctacgacgcggtggtgatcgccaccggggcgacggcgtggcgggagctgaccgtgcccggccgggagctggcgggggtgcatcaggcgatggagtaccttccgctggccaaccgggtgtgcgagggcgacctcgagcgctccccgctgtccgccgccgggcggcacgtggtcgtcgtcggtggtggcgacacgggcgcggactgtctcggcacggcggtgcgggagggggccgcctccgtgacgcaactggacatctacgcgcggccgggtgcggagcgcgacgagcgggccgagccctggccgacctatccgcgcctgtaccggctgtcggcggcgcacgaggaggcacgcgacctgcggtccgcgccggcggcggacgcggacgcgcggctgttcgcggcgtccacgctccgcttcaccggcgacgagcgggggcatgtacgtgcgctgcacctggtcggggtggacacgggacgccgtccgctgcccggcagcgagcggtcgctcccggcggacctggtccttctcgccctcggcttctcggggcccgaccggcacgacgggctcgtcgacgggctgggactggacatggagccccgtggcacgatcacccgggaccggggcttcgcgaccaacgtcccgggggtgttcgccgccggggacgcggcgcgcgggcagtcactcgtcgtctgggcgatcgcggaggggcgggcggtggcggcggccgtggaccgccacctgtccggcggcagcacccggctgccggccccggtcggcccgtacgaccggccgatgacggcctga

SEQ ID NO: 4648 - protein, 496 aa, Streptomyces coelicolor
MADPKGFLTTPREEWPRRPAGERVRDWDEVYVPGALLPIVGRQADRCMDCGVPFCHEACPLGNLIPEWNDLVSRSDWRAASERLHATNNFPEFTGRLCPAPCEAGCVLAINQPAVTIKNVECAIADTAWEEGFVPPLPPERLSGRTVAVIGSGPAGLAAAQQLTRAGHTVAVYERDDRIGGLLRYGIPAFKMEKRHLERRVGQMRAEGTRFRTSAAVGRDVDAAALRTRYDAVVIATGATAWRELTVPGRELAGVHQAMEYLPLANRVCEGDLERSPLSAAGRHVVVVGGGDTGADCLGTAVREGAASVTQLDIYARPGAERDERAEPWPTYPRLYRLSAAHEEARDLRSAPAADADARLFAASTLRFTGDERGHVRALHLVGVDTGRRPLPGSERSLPADLVLLALGFSGPDRHDGLVDGLGLDMEPRGTITRDRGFATNVPGVFAAGDAARGQSLVVWAIAEGRAVAAAVDRHLSGGSTRLPAPVGPYDRPMTA

SEQ ID NO: 4649 - DNA, 1455 bp, Thermoplasma volcanium
  CDS (1)..(1455)
atgctcagttttgaaagagtcaggatccggaaagcagaccctgtcaagcgagtgggaacgttcgaattagagccattagaaaactacaatgatggagaagcaatagctgaggccagcagatgcataggttgtaatatgtgctctgctgcatgtcctgctagtctagatattggtggttacgtaagaagcacagccgctggagatcctgcacaaacgatcagaataataatggaaacacttccgtttccagcaataattggcagagtatgcacacatatgtgcgaggatgtctgcgtattgtacgatggaggggggccaatagccataaggcacctgaagaggtacgcagctgacaaatttgatgattatggcgaaatattaaaaccccagaagagaaagtttattggaaagcgtgttgctgttgttggcggtggcccggctgggctgactgttgcttactatctcaccttacagggcgtgaaagtcactgtttttgaagagaggcctgctttaggcgggtttatgaaaactggcataccaaggtacagacttccgcagaatgttcttgacaaggagatagggtatatattatccagaggtgttcaagtcaagctcaacactgctgttggacgagatgtcaaattcgaagacttaatgaaggaatatgatgctattttcctgggtgttggaaaccacaaaccacgcatgaccggcactcctggaagcgatgcacctaatgtaatgcacgctacggaatttttagagagagtaagttttggtgaaaagataaacgtcggagaaaccgtagcagtaataggtggtggtttcacagccaacgactctgctaggacttccttaagactgggagcgaagcacgtatatataatgtatcggagaagggacgtggataggcctggatatccaagtatgaatgcagacgaggagatggaagaggcggaagaggaaaatgtagagtatgtatgggaagtgacgcctttcgaatatgtaaaggaaaatgggagagttgtggctatgaaatactggaaaaacgaaatggtgtcacagggaaaaggaagggcaaagcctgtaccaataaaagataaattctatactataaaagtcgatatggtaattgaggctactggccaggaaacagattattcgttcctaggcagctatgtagaaaagctcagacttaacgataggggggagcccatagttgatcaatacggaatgacgtcaataccgggtgtatttaccggaggggattctaccaaccctaacagggatctcataagtgcggttagggatggggatatagcagttcagggtattttaagatacctcaatgttatggatcaggtatcctacgatgatctgccgcttttagataggtttaagccatattcatatacagcagcagcggaggcttacgcgtctcgtgggcttgagtaa

SEQ ID NO: 4650 - protein, 484 aa, Thermoplasma volcanium
MLSFERVRIRKADPVKRVGTFELEPLENYNDGEAIAEASRCIGCNMCSAACPASLDIGGYVRSTAAGDPAQTIRIIMETLPFPAIIGRVCTHMCEDVCVLYDGGGPIAIRHLKRYAADKFDDYGEILKPQKRKFIGKRVAVVGGGPAGLTVAYYLTLQGVKVTVFEERPALGGFMKTGIPRYRLPQNVLDKEIGYILSRGVQVKLNTAVGRDVKFEDLMKEYDAIFLGVGNHKPRMTGTPGSDAPNVMHATEFLERVSFGEKINVGETVAVIGGGFTANDSARTSLRLGAKHVYIMYRRRDVDRPGYPSMNADEEMEEAEEENVEYVWEVTPFEYVKENGRVVAMKYWKNEMVSQGKGRAKPVPIKDKFYTIKVDMVIEATGQETDYSFLGSYVEKLRLNDRGEPIVDQYGMTSIPGVFTGGDSTNPNRDLISAVRDGDIAVQGILRYLNVMDQVSYDDLPLLDRFKPYSYTAAAEAYASRGLE

SEQ ID NO: 4651 - DNA, 1455 bp, Rhizobium loti
  CDS (1)..(1455)
atgggcaaggtaacaggctttctcgagatcgaccggcaggtgcacaagtaccagccggcctccgaccgtatccggcatttccgcgagttcacgctgccgatgtcggacaaggaggtcgagaaacaggccgcgcgctgcatggattgcggcattccgttctgtcacgggccgacgggctgtccgatccacaaccagatcccggactggaacgacctcgtctacaacagggactgggacaacgcgatccgcaacctgcattcgaccaacaatttcccggagttcaccggccgcatctgtcccgccccttgcgaggaagcctgcacgctgaacctcgaggacattccggtcgccatcaagacggtggaacaggcgatcgccgacaaggcctacgagaccggacacatcaggccctatccgccggagaagaagaccggcaagcgggtcgccatcatcggctccggcccggccggcatggcggccgcccagcaattgggccgcgccggccatgatgtccatgtctatgagcgcgagagccgcccgggcgggctgatgcgctacggcattcccgacttcaagatcgagaagcactatatcgaccggcgcatcgaacagatgcagggcgagggcgtgaccttccattgcggcgtgaatgtcggcgtcgacaagcccgtcgccgaactgctggccgaacatgacgcggtgctctattgcggcggctcggaaacgccgcgcgcggccaacattccgggtgacgatctcggcggcgtgcatgacgccatgccctatctggtgcagcagaaccgccgcgtcggcggcgagccgatccagtcggtggcatggccctcgcatccgatcatcgccggcggtcagcatgtcgtcgtcgttggtggcggcgataccgcctccgactgcgtcggcaccgccttccgccagggcgcggtgcgcgtcacccagctcgacatccgcccgcagccgcccgagaaggaagacaagctcgcggtgtggccctactgggcgaccaagatgcgcacctcgtcctcgcaggccgagggcgcggagcgcgaattccaggtggcgacgctcgaattcatcggcgaggacggccaactgaccggcgtcaaatgctgcgaggtcgatgagaagcgcaagccgatcgccggcaccgaattcgtcatccgcgccgatctcgccttcatcgccatcggctttgctggaccggcgatggtgggcgtggcgaaggaactcgagggtgagatgaagatcaccaccgacagccgccgctcccggaatgtcgaggccaatgaccgcgactacaagaccagtgtcgaccggctctatgcggcgggcgacgtgcgccgtggccagtcgctcgtcgtctgggcgatccgcgaaggccgccaggcggcgcgctcgatcgatgaagcgctgatggggacgagtgtgttgccgcgctga

SEQ ID NO: 4652 - protein, 484 aa, Rhizobium loti
MGKVTGFLEIDRQVHKYQPASDRIRHFREFTLPMSDKEVEKQAARCMDCGIPFCHGPTGCPIHNQIPDWNDLVYNRDWDNAIRNLHSTNNFPEFTGRICPAPCEEACTLNLEDIPVAIKTVEQAIADKAYETGHIRPYPPEKKTGKRVAIIGSGPAGMAAAQQLGRAGHDVHVYERESRPGGLMRYGIPDFKIEKHYIDRRIEQMQGEGVTFHCGVNVGVDKPVAELLAEHDAVLYCGGSETPRAANIPGDDLGGVHDAMPYLVQQNRRVGGEPIQSVAWPSHPIIAGGQHVVVVGGGDTASDCVGTAFRQGAVRVTQLDIRPQPPEKEDKLAVWPYWATKMRTSSSQAEGAEREFQVATLEFIGEDGQLTGVKCCEVDEKRKPIAGTEFVIRADLAFIAIGFAGPAMVGVAKELEGEMKITTDSRRSRNVEANDRDYKTSVDRLYAAGDVRRGQSLVVWAIREGRQAARSIDEALMGTSVLPR

SEQ ID NO: 4653 - DNA, 1356 bp, Rhizobium loti
  CDS (1)..(1356)
atgccagaaggccagttcaaggaaggtatcgtcggcggcaggcttgcggccgagcagtacgccgataatttttccgacctgcatccgccgctcgatcatcatgaggggttggtcgaatccgaccgctgctatttctgctatgacgcgccatgcatgaacgcgtgcccgacctcgatcgacatcccgctgtttatccgtcagatctcgaccggcaacccgatcggctcagccaagaccatcttcgaccagaacattttgggcggcatgtgcgctcgcgtctgcccgaccgagacgctgtgcgaagaggtctgcgtgcgcgaggtggcggaaggcaagccggtgcagatcggacgcctgcagcgctacgccaccgatgtcgccatggccgagaacaagcagttctacccgcgcgcggagccgaccggaaagacggtcgccgtggtcggggccggcccggccggccttgccgccgcgcaccggctcgcccgtcatggccatgacgtaaccatactggaagcacggccgaaggccggcggcctcaacgaatacggcatcgccgcctataagagcgtcgacaatttcgcccaggccgaggtcgaatatgtcaccgcgatcggcggcatcgacatccagaacggcaaggcgctcggccgcgactaccagctttccgacctgatccgcaactacgacgcggtgttcctcggcatggggcttggcggcgtcaacgcgctgcgcgccgatggcgaggatgccgaaggcgtcaccaatgcggtggagttcatcgccgagctgcgccaggccagcgatctctccggcctgccggtcggccggcgcgtcgtcgtcatcggcggcggcatgacggcgatcgacgccgccgtgcagtctaagctgctcggcgccgaggaggtgacgatctgctaccgtcgtggtcaggagcacatgaacgcttctgggttcgagcaggatcttgccgccgccaacggcgtcaccatccgccactggctgcagccgaagcgggtgatcgccgaggccggccaggtgtcgggcatcgaactcgaatacacggcattgaagggcgacaagctcgccggcaccggcgagacgttgacgctcgtcgccgaccaggtgttcaaggcgatcggccagagctttgtcccggccgcgctcaacggcagcgaggcctcgatcgagctcgaagccggccgcatcaaggtcgacggggaagggcggacatcgctggcgaaagtctgggccggcggcgactgcatctttggcggtgacgacctgaccgtctcggccgtggcgcaagggcgcgatgcggcggaaagcatacacaggagtctgacgcagggataa

SEQ ID NO: 4654 - protein, 451 aa, Rhizobium loti
MPEGQFKEGIVGGRLAAEQYADNFSDLHPPLDHHEGLVESDRCYFCYDAPCMNACPTSIDIPLFIRQISTGNPIGSAKTIFDQNILGGMCARVCPTETLCEEVCVREVAEGKPVQIGRLQRYATDVAMAENKQFYPRAEPTGKTVAVVGAGPAGLAAAHRLARHGHDVTILEARPKAGGLNEYGIAAYKSVDNFAQAEVEYVTAIGGIDIQNGKALGRDYQLSDLIRNYDAVFLGMGLGGVNALRADGEDAEGVTNAVEFIAELRQASDLSGLPVGRRVVVIGGGMTAIDAAVQSKLLGAEEVTICYRRGQEHMNASGFEQDLAAANGVTIRHWLQPKRVIAEAGQVSGIELEYTALKGDKLAGTGETLTLVADQVFKAIGQSFVPAALNGSEASIELEAGRIKVDGEGRTSLAKVWAGGDCIFGGDDLTVSAVAQGRDAAESIHRSLTQG

SEQ ID NO: 4655 - DNA, 1965 bp, Chromatium vinosum
  CDS (1)..(1965)
atggcgacttccagcgacgagatgaagatgaagccgacctggcgtcgattcgaggacggcgaacacgtctgggacaacctgaccgacaagatcttcaatcaggaccgctcccacaagtgtccgacctatgtccacaagacgccgccctgtcaggggagctgtccctcgggcgaggacatccgcggctggctgcagatcgtgcgcggcatggagaagccgccgcagggcatggactggcaggagtatgccttccgtcgttccaccgatgccaaccccttcccggcgatgatgggccgcgtctgtccggcgccctgtcaggacggctgtaatcgcaacgagctggaagacttcgtcggcatcaactcggtcgagcagttcatcggcgacaccgccatcgccaacggttacaccttcgaggcgcccgaactcgacaccggcaagcgcatcgccatcgtcggcggcggtcccgccggtctggcggcggcgtatcaactgcgtcgcaagggccatagctgcaccatcttcgaggccaacgacggtctgggcggcatgttccgcttcggcatccccggctatcgcgtgccgcgcgacaagctcgacgccgagatccagcgcatcctcgacatgggccgggtcgaggtcaggctcaagacccgcatcggcaccgatgtcacggtcgagcagctcgaaaaggactatgacgccatcctctgggccatcggttgtcagagcggtcgcggtctgccggtgcccggctgggaaggcacgccgaactgcgtcacgggtgtcgccttcctcaaggcgttcaacgaaggccgcatgaaggtcacggccggcaaagtcgtctgcgtcggcggtggcgacacctcgatcgacgtggtctcggtcgcgcgtcgtctcggccatgtcaacaagagcaacccgaacgagctgcccgagaccgtgatccgcgacggctatgtcgcccacgatgccgccagtgccgccgccgctcagggcgccgaggtcacgctgacctcgctcttcacccgcgacaagatgaccgcctccgagcacgaggtcgatgatgcgacccgcgagggcgtgaccatactcgacggcgtgatgccggtcgaggtcatcaaggacgccaatggccgcgccatcggtttgaaagtcgccgactgcaccatgaccgacggtcgtccgactccggtcgagggcacagagcgcgtgctcgaagccgacctgatcgtctcggcgatcgggcagggcggcgatctctcgggcctggagcagctcgacaacgggcgcggtctgatggactccgacaagttctatcaggtgccgggcaaggccggacacttcgtcgccggcgacatcatccgtccgcacctgctgaccaccgccatcggtcaggcctggatcgccgccgactcgatcgacgcctatgtgatgcaggccgagcacaagcgccgtccgaaagtcgacgtgcaccacttcaacctgctcgacaagctcaccgaagcccatctggcgcctgagtccttcgtcgccggtcaggccggcgatatgcgcggaacctcggatgccaactatgcgatccacaactatgaggatcgctccggcgccgaagtcattccgcacgaagagttgttcctggggcacttcaactatgtgccgcgcaatctgcgcaaggaagaggtgccgagcgccgacgaggtgctgggccacttccacgagcgcgtcatcggtctgaccgagccggaagcgatcgacgaggccaaacgctgcatgagctgcggtctgtgcttcgagtgcgacaactgcgtcatcttctgtccgcaggatgccgtgttccgggtcgacaagggtagccgcaccacgggtcgctatgtcgataccgactatgccaagtgcatcggctgtcacatctgtgccgacgtctgtccgaccggctacatcaagatgggtctgggcgagtga

SEQ ID NO: 4656 - protein, 654 aa, Chromatium vinosum
MATSSDEMKMKPTWRRFEDGEHVWDNLTDKIFNQDRSHKCPTYVHKTPPCQGSCPSGEDIRGWLQIVRGMEKPPQGMDWQEYAFRRSTDANPFPAMMGRVCPAPCQDGCNRNELEDFVGINSVEQFIGDTAIANGYTFEAPELDTGKRIAIVGGGPAGLAAAYQLRRKGHSCTIFEANDGLGGMFRFGIPGYRVPRDKLDAEIQRILDMGRVEVRLKTRIGTDVTVEQLEKDYDAILWAIGCQSGRGLPVPGWEGTPNCVTGVAFLKAFNEGRMKVTAGKVVCVGGGDTSIDVVSVARRLGHVNKSNPNELPETVIRDGYVAHDAASAAAAQGAEVTLTSLFTRDKMTASEHEVDDATREGVTILDGVMPVEVIKDANGRAIGLKVADCTMTDGRPTPVEGTERVLEADLIVSAIGQGGDLSGLEQLDNGRGLMDSDKFYQVPGKAGHFVAGDIIRPHLLTTAIGQAWIAADSIDAYVMQAEHKRRPKVDVHHFNLLDKLTEAHLAPESFVAGQAGDMRGTSDANYAIHNYEDRSGAEVIPHEELFLGHFNYVPRNLRKEEVPSADEVLGHFHERVIGLTEPEAIDEAKRCMSCGLCFECDNCVIFCPQDAVFRVDKGSRTTGRYVDTDYAKCIGCHICADVCPTGYIKMGLGE

SEQ ID NO: 4657 - DNA, 1455 bp, Thermoplasma acidophilum
  CDS (1)..(1455)
atgctgagttttgaaagagtccggattaaaaaggcggatcccgacgagagggttaagaccttcgatatcgaaccgctggataattatacagacgaagaagccatagcagaggccagcaggtgccttggatgcaacatgtgctcggctgcatgccccgcaagcctagacatatcgggctacataaggagcaccgcggcgggtgatccggctcagaccgtgaggatcataatggaaacgcttccctttccggccataatagggagggtatgcacacacatgtgcgaggatatctgcgtgatgtatgacggaggcggtccgatagccataaggcacctgaagcgatatgctgctgataaattcgacgattatggagagatcctgaggccacagaagagaaagttcataggaaaaaaggttgcggtcataggtggcggcccggctggactcacagtggcctactatctcagcctgcagggtgttaaggtaacgctttttgaggagaggccagccctcggaggcttcatgaagaccggaatacccaggtacaggctgccgcagagcgtcttggacaaggagataggctatgttgtatcccgcggcgttgacgtgaagctgaacacaaaggtgggccgcgacatctcgttcgatcagataatgaaggaatacgatgccgtatttctcggcgtgggcaatcacaagccaaggatgaccgggactcccggcagcgatgcaccgaacgtgatgcacgccaccgaattcctcgagcgtgtgagtttcggcgaaaggatagatgttggagataccgttgccgtcataggcggaggcttcacggcaaacgattcggccaggacttcacttcgcctcggtgccaagcacgtttacataatgtacaggaggagggatgtcgatcgtcccggttaccccagcatgaacgcagatgaggagatggatgaagccgaagaggaaaaggttgagtacgtatgggaggttacgccctttgaatacgtgaaggagaatggaagggtcgtggccatgaagtactggatgaacgagatggtgaaggagggcaagggaagggccaagcctgttccgataaaggacaaggtgtacaccataaaggtggacatggtaatagaggctacaggccaggagactgattactccttcctgggcgattacgtgaaaaaactccggctaaatccacacggtgaacccatcgtggaccagaacggcatgacctcaatagagggggttttctccggcggagattcaacaaaccccaacagggatctgataagcgctgtcagggacggggatatagccgtgcagggcatactaaagtacctcaacgtcatggataaggtatcatacgatgatctgcccatactggacaggttcaagccatactcctatacggccgcacaggaagcctatgcggtgagaggcctgatctga

SEQ ID NO: 4658 - protein, 484 aa, Thermoplasma acidophilum
MLSFERVRIKKADPDERVKTFDIEPLDNYTDEEAIAEASRCLGCNMCSAACPASLDISGYIRSTAAGDPAQTVRIIMETLPFPAIIGRVCTHMCEDICVMYDGGGPIAIRHLKRYAADKFDDYGEILRPQKRKFIGKKVAVIGGGPAGLTVAYYLSLQGVKVTLFEERPALGGFMKTGIPRYRLPQSVLDKEIGYVVSRGVDVKLNTKVGRDISFDQIMKEYDAVFLGVGNHKPRMTGTPGSDAPNVMHATEFLERVSFGERIDVGDTVAVIGGGFTANDSARTSLRLGAKHVYIMYRRRDVDRPGYPSMNADEEMDEAEEEKVEYVWEVTPFEYVKENGRVVAMKYWMNEMVKEGKGRAKPVPIKDKVYTIKVDMVIEATGQETDYSFLGDYVKKLRLNPHGEPIVDQNGMTSIEGVFSGGDSTNPNRDLISAVRDGDIAVQGILKYLNVMDKVSYDDLPILDRFKPYSYTAAQEAYAVRGLI

SEQ ID NO: 4659 - DNA, 6651 bp, Arabidopsis thaliana
  CDS (1)..(6651)
atgtcggcagcttcttctagctccgttcttcacctccgaaccaaccaacaactgttatcactccgatctctcaaaaattccacctccgttgcttctcaattggccgttacgtctggtgttagccgtagaagatcgtgtacggcgcgatgctctgtgaagaaaccggtgattcctgagagtcctttcctagggactcgtgtgcggagatccggatccgagacgcttcagttctggagatcagatggtcctggacggtctgcgaagcttcgaacggtggttaaatcgtcattttccgctgttccggagaagcctcttggtctttatgatccttcctatgataaagactcttgtggtgttggttttgtagcagagttgtccggcgagaccacccgcaaaacggtgactgattcgttggagatgttgatacggatgactcatagaggtgcttgtggttgtgagagcaacactggtgacggcgctgggattcttgttggtctgcctcatgatttctatgcagaggctgcgacagagcttggctttgtacttccttctgctggaaattatgctgttggtatgttcttcttgccaactgttgaaagcaggagagaagaaagcaagaatgttttcactaaggttgctgaatcacttggccactcggttcttggatggagattagtgcctaccgataattctggactgggaaactccgctttgcagactgaaccgattattgcgcaagttttccttactcctacaactaaatctaaagctgactttgagcaacagatgtatatccttagaagggtttctatggttgctattcgagctgcgttgaaccttcaacatggtgcgatgaaggacttctacatctgttcgttgtcttctaggactatcgtctacaaaggacaattgaagcctgatcaactaaaggactattactatgcggatcttgggagtgaaaggtttacgagctacatggccctggttcattctcggttctctaccaatacatttcccagctgggatcgtgctcagccgatgcgtgttttgggccacaatggggagatcaatacactcaggggaaacgtgaactggatgagggcacgtgagggtctgctcaagtgcaatgaacttggattatcaaagaaagagttgaagaagcttctacctattgtggacgttagctcttctgactcaggtgcttttgatggtgttcttgagcttcttgtccgagctggtagaagtcttcctgaagctgttatgatgatgatccctgaagcatggcaaaatgacaaaaacattgatccaagcaggaaagagttttatgaatacttatctgctctaatggagccatgggatggacctgccctcatatcattcactgatggtcgctacttgggtgccacattggaccgtaatggacttcgtcctggtaggttctacataacccacagtggaagggttatcatggctagtgaagttggggtagtggatgtaccacctgaagatgtgatgaggaaaggaagacttaacccgggtatgatgcttcttgtcgattttgagaagcatattgttgttgatgacgatgccttgaagcagcagtattcactggcaaggccttatggtgagtggcttaaaaggcaaaagattgaacttaaagacatcattgagtcagttccggaggctgaacggattgctccttcaatttctggggttgtaccgttaacctttttcttggaaactaaggcctctaatgatgatgactcaatggagagcatgggcattcatggtttattgtctccactaaaagcctttggctacacagttgaggccttggagatgttgctgcttccgatggctaaagatggctctgaagcacttggttctatgggaaatgatacccctctagctgtaatgtcaaacagagaaaaattatgctttgagtacttcaagcaaatgtttgctcaagtaacaaatcctccaattgatcctattcgtgagaaaattgttacatcaatggagtgcatgatcggtccagaaggcgatctaaccgaaacaactgaagagcaatgtcaccgtctctccctaaaaggtcctcttttgaaaatcgaagagatggaagccatcaagaaaatgaactacagaggctggcggactaaagttctggatataacttatgcaaaagaaagaggtacaaaagggttagaggagactttggaccgaatttgtgatgaagcaaatgaagcaataaaggagggctacacattactggttttgtctgatcgagctttctctgcaacacgtgttgctgtgagctccctcatggctgttggtgccgttcatcaccacctggttaagacacttgcgcgcacccaagttggtttggtagtggaatctgctgaaccacgtgaagtgcatcatttctgcacacttgtcggatttggagcagatgctatctgcccatatttggctgtagaggccgtttatagattacaggttgatggcaaaataccacccaaatctaatggggaattccattccaaagaagagttggtcaagaagtattacaaggcaagtaactatggaatgatgaaggttcttgccaaaatgggaatttctactctagcctcatacaaaggtgctcagatatttgaagctcttgggctttcatctgaagtaattcagaaatgttttgccggtaccccaagccgagtggaaggagcaacatttgagatgcttgcacgagatggacttcaattgcatgagttggcctttccaacccgtggctatgccccaggaagtgcagaagcttcagcacttaccaaccctggaaactatcactggaggaaaaatggagagattcatctcaacgatcctcttgcaatagccaaattacaagaggcagcacggaccaacagtgtggccgcctacaaggaatactcaaagcgtatcaatgaattgaacaagcaaagtaatttgcgtgggctcatgaagtttaaagacgcagatgtgaaaattccactagatgaagtcgagcctgccagtgaaattgttaagcggttctgcactggtgccatgagttatggatcaatttctctggaggcgcatacaacccttgcaatggccatgaacaagcttggaggaaagtcgaatacaggtgagggaggggaactgccatcccgtatggagcctcttgcggatggttcaaggaaccccaaaagaagttcgatcaaacaaattgctagtggaagatttggagtttctagctactatcttacaaatgctgatgagctgcagataaagatggctcagggtgccaaacctggggaaggtggggagctaccaggccacaaggtcataggagacattgctataaccagaaattccactgctggtgtaggacttatcagtccacctcctcatcatgatatctactctatcgaggatcttgcccagctaattcacgatcttaagaatgccaatcctggcgcacgtattagtgttaagcttgtatctgaagctggtgttggagttattgctagcggtgtggtgaaggggcatgctgaccatgttctgatagcaggtcatgatggaggtactggtgcatctcgctggaccggtattaaaaatgctggtcttccatgggaactgggtctagctgagacacaccaaactcttgttgccaatgaccttcgtggccgtactgttcttcagacagatggccagctaaaaactggcagagacgttgcagttgctgcacttcttggtgcagaagaatttggttttagtactgcaccccttatcacactagggtgtatcatgatgagaaagtgccacaagaacacctgccctgtgggaattgctacccaagatccagttctccgtgaaaaatttgctggggagcctgaacatgttattaacttcttctttatgcttgctgaggaagttagggagatcatgtctggacttggttttagaactgtaactgagatgattggtcgtgcggatatgcttgaacttgatagggaagttgtcaagaacaacgataagctggagaacattgacctatctcttttgctcagacctgctgctgagattcgtcctggggctgctcagtactgtgttcagaaacaagatcatggtttagacatggctttggatcaagagctgattgcattgtctaaatctgctctggagaaatctcttccggtgtacattgaaactcctatctgcaacgttaaccgtgctgttgggacaatgctgagccatgaggtaaccaaacgttaccacttgactgggcttccaaaggacacaattcatatcaagttcacaggaagtgctgggcagagtcttggagctttcttgtgtcctggaattatgctagaacttgaaggagatagcaatgactatgttggaaaagggctctctggaggtaaagttgttgtttaccctccaaaaggaagcagctttgatccaaaagaaaatatcgttattggtaatgtagcactttacggtgccactagtggtgaagcatacttcaatgggatggctgctgaaaggttctctgttcgtaattctggtgctaaagctgttgtggaaggtcttggtgatcatggttgtgagtacatgactggtggtactgttgtggtgcttggaaagactggtagaaactttgctgctggtatgagtggtggtattgcttatgtccttgatgtggacggaaagtttaacaccagatgcaaccttgaactggttgatttggataaagttgaagatgaggaggacaaaatgacgctcaaaatgatgatccagcaacatcaaagacacaccaacagccaacttgctcaagaagttcttgcagactttgagaatttgctgcccaagtttatcaaggttttcccaagagattacaaacgtgttttatcagccatgaaacacgaagaggtctccaagcaagcaatcgagcgggcttctgaggaagctgacgagactgaagagaaagaactcgaggagaaagatgcatttgcagaactgaagaacatggcagctgcttcgtcaaaagaggagatgtcaggaaacggagtggcagctgaagctagaccttctaaggtagataatgctgttaaaaacggtggtttcattgcttatgagcgtgagggagttaagtacagggatcccaatgttcgtcttaatgactggaacgaagtcatggaggaatcaaaacctggaccactccttacaactcagtcagctcgttgcatggattgtggaactccattctgccaccaggagaactctgggtgtcctctcggtaataagatccctgaattcaatgaacttgtctaccagaacagatggcaagaagccttgaatcgtctacttgagacaaacaactttccagaatttactgggcgagtatgccctgcaccatgtgaaggttcttgtgttcttggaataattgagaaccctgtttctatcaaaagcattgaatgtgctattatcgataaagcctttgaggaagggtggatggtaccaaggcctcctctcaagagaacagggaaaaaggttgctattatcggaagtggaccggctgggttagctgcggctgaccagctgaacaaaatgggccatttagtaaccgtgtatgagcgctcggacagaattggtgggctgatgatgtatggagtaccaaacatgaagactgacaaaattgacgtcgttcaacggcgggttgatcttatgaccaaagaaggtatcaactttgtggtcaatgccaatattggaaaggacccatcttactcccttgatggacttaaggaagagaatgatgcaatcgttcttgctgttggttccacaaaaccaagagatcttccagtgcctggtcgtgatctatctggtgttcactttgccatggagtttcttcatgcaaacaccaaaagtttacttgacagcaatcatgaggatggcaattacatttctgcaaaagggaaaaaggttgttgttattggtggaggtgataccggcacagattgcatcggaacatctatccgccatggatgtaccaacattgtaaacctagaacttcttcctcagccaccctcaacaagagctcctggaaacccttggccacagtggcctcgtgtattccgtattgactacggacatcaagaagctaccaccaaattcggaaaagaccctaggacctatgaggtcttaacgaagaggttcataggagatgacaatggaaacgtgaaggggcttgaacttgtgcgtgtgagttgggagaaggatgaaaccgggaggttccagttcaaggagatcgaaggctctgaggaaatcattgaagcagacctcgttttcttggccatgggtttccttggacctgagccaacacttgctgagaagctaggtctcgaatgtgacaacaggtcaaactttaaggccgagtatggccggttttccacaaccgtggaaggtgttttcgcagcaggtgattgtcggagaggccagtctttggttgtctgggctatctcagaaggacgtcaagctgcagatcaggtagacaaattcctcaccaaaacggatgatgacgaagacgccaagctacaacaagaccttaaccagatgaaacacaacactatcacaaactga

SEQ ID NO: 4660 - protein, 2216 aa, Arabidopsis thaliana
MSAASSSSVLHLRTNQQLLSLRSLKNSTSVASQLAVTSGVSRRRSCTARCSVKKPVIPESPFLGTRVRRSGSETLQFWRSDGPGRSAKLRTVVKSSFSAVPEKPLGLYDPSYDKDSCGVGFVAELSGETTRKTVTDSLEMLIRMTHRGACGCESNTGDGAGILVGLPHDFYAEAATELGFVLPSAGNYAVGMFFLPTVESRREESKNVFTKVAESLGHSVLGWRLVPTDNSGLGNSALQTEPIIAQVFLTPTTKSKADFEQQMYILRRVSMVAIRAALNLQHGAMKDFYICSLSSRTIVYKGQLKPDQLKDYYYADLGSERFTSYMALVHSRFSTNTFPSWDRAQPMRVLGHNGEINTLRGNVNWMRAREGLLKCNELGLSKKELKKLLPIVDVSSSDSGAFDGVLELLVRAGRSLPEAVMMMIPEAWQNDKNIDPSRKEFYEYLSALMEPWDGPALISFTDGRYLGATLDRNGLRPGRFYITHSGRVIMASEVGVVDVPPEDVMRKGRLNPGMMLLVDFEKHIVVDDDALKQQYSLARPYGEWLKRQKIELKDIIESVPEAERIAPSISGVVPLTFFLETKASNDDDSMESMGIHGLLSPLKAFGYTVEALEMLLLPMAKDGSEALGSMGNDTPLAVMSNREKLCFEYFKQMFAQVTNPPIDPIREKIVTSMECMIGPEGDLTETTEEQCHRLSLKGPLLKIEEMEAIKKMNYRGWRTKVLDITYAKERGTKGLEETLDRICDEANEAIKEGYTLLVLSDRAFSATRVAVSSLMAVGAVHHHLVKTLARTQVGLVVESAEPREVHHFCTLVGFGADAICPYLAVEAVYRLQVDGKIPPKSNGEFHSKEELVKKYYKASNYGMMKVLAKMGISTLASYKGAQIFEALGLSSEVIQKCFAGTPSRVEGATFEMLARDGLQLHELAFPTRGYAPGSAEASALTNPGNYHWRKNGEIHLNDPLAIAKLQEAARTNSVAAYKEYSKRINELNKQSNLRGLMKFKDADVKIPLDEVEPASEIVKRFCTGAMSYGSISLEAHTTLAMAMNKLGGKSNTGEGGELPSRMEPLADGSRNPKRSSIKQIASGRFGVSSYYLTNADELQIKMAQGAKPGEGGELPGHKVIGDIAITRNSTAGVGLISPPPHHDIYSIEDLAQLIHDLKNANPGARISVKLVSEAGVGVIASGVVKGHADHVLIAGHDGGTGASRWTGIKNAGLPWELGLAETHQTLVANDLRGRTVLQTDGQLKTGRDVAVAALLGAEEFGFSTAPLITLGCIMMRKCHKNTCPVGIATQDPVLREKFAGEPEHVINFFFMLAEEVREIMSGLGFRTVTEMIGRADMLELDREVVKNNDKLENIDLSLLLRPAAEIRPGAAQYCVQKQDHGLDMALDQELIALSKSALEKSLPVYIETPICNVNRAVGTMLSHEVTKRYHLTGLPKDTIHIKFTGSAGQSLGAFLCPGIMLELEGDSNDYVGKGLSGGKVVVYPPKGSSFDPKENIVIGNVALYGATSGEAYFNGMAAERFSVRNSGAKAVVEGLGDHGCEYMTGGTVVVLGKTGRNFAAGMSGGIAYVLDVDGKFNTRCNLELVDLDKVEDEEDKMTLKMMIQQHQRHTNSQLAQEVLADFENLLPKFIKVFPRDYKRVLSAMKHEEVSKQAIERASEEADETEEKELEEKDAFAELKNMAAASSKEEMSGNGVAAEARPSKVDNAVKNGGFIAYEREGVKYRDPNVRLNDWNEVMEESKPGPLLTTQSARCMDCGTPFCHQENSGCPLGNKIPEFNELVYQNRWQEALNRLLETNNFPEFTGRVCPAPCEGSCVLGIIENPVSIKSIECAIIDKAFEEGWMVPRPPLKRTGKKVAIIGSGPAGLAAADQLNKMGHLVTVYERSDRIGGLMMYGVPNMKTDKIDVVQRRVDLMTKEGINFVVNANIGKDPSYSLDGLKEENDAIVLAVGSTKPRDLPVPGRDLSGVHFAMEFLHANTKSLLDSNHEDGNYISAKGKKVVVIGGGDTGTDCIGTSIRHGCTNIVNLELLPQPPSTRAPGNPWPQWPRVFRIDYGHQEATTKFGKDPRTYEVLTKRFIGDDNGNVKGLELVRVSWEKDETGRFQFKEIEGSEEIIEADLVFLAMGFLGPEPTLAEKLGLECDNRSNFKAEYGRFSTTVEGVFAAGDCRRGQSLVVWAISEGRQAADQVDKFLTKTDDDEDAKLQQDLNQMKHNTITN

SEQ ID NO: 4661 - DNA, 1473 bp, Zymomonas mobilis
  CDS (1)..(1473)
atggcgcaaaataaaatgctgtcctttgttcatctgaaacaggcctatcctgaaaaacgatcagcacaggaaagagacaaagactttaacgagatttatcggtctttctctgacgaacaggcgagctgtcaggcatcccgttgttctcaatgtggggtgccttattgttcagcttactgtccgctgcataacaatattccagactggctaaaaatgacggcagaaggccggttgcaggatgcttatgccctttccagtgcaacctcgaccatgccggaaatttgtggccgcatttgcccgcaagaccgtctttgtgaaggtaactgcgttattgagaattccggtcatggcgctgtaaccattggatcggttgagaaatacatcaccgatacggcatggaaagaaggttgggttgaacccttacagcctataactgaacttggtatttcggttggtattatcggttcagggcctgccggattgacggcggctgagaaattacggcagcaagggtatcaggtgcatgtttatgatcgccatgttcgtgccggtggccttttgacctattgtattccgggcttcagactcgacaaagacattgttgcacgccgtgttaaacggttagccgattgggggtgtcaccttccataccaatttgcacgtcgggtaaagatgccagccttgaagaattgcgtgacgcacgcggctattctgatcgcaaccggtgtttataaagcccgcggtctggctacccccggaaaagaattaaacggtattgttgatgcgctggatttcctgattagctccaaccggaaatcttttggtgacaaggtcgaagcctttgataatggcacccttgatgccaagggtaaaaaagtagtggttatcggtggtggtgataccgcaatggactgcgtcagaacggctatccgtcagggtgcagaatctgtccgctgcctctatcgtcgcgatcgagtcaatatgcccggttccgcacgcgaagtaaaaaatgccgaggatgaaggcgcagaatttgtctggctatctgcaccggaatcttttgtcggaaaagaccatgttcaatctgtaaaagtccgtggaatgcgcctgggtgcgccagatggttctggccgtcgttctcctgaacctgatccagcacgtctttttgacatggatgcggatcttgtcatttgcgctttgggtttttcaccggaagacctgccaacgctgttcaatgcgccggaattatcggttaccccttggggaaccgtagaggctgatccggtcacattacagactagcatcgaaggggtctttgctgctggtgatattgtccgcggtgccagccttgtggtttgggccatccgtgacggtctggtcgcaagcgaacagatgcatcaatggctagcaacccgccagcaggacaaacaggacgcaccgacaaaggctaaaaagaaagctgtttttgcctga

SEQ ID NO: 4662 - protein, 490 aa, Zymomonas mobilis
MAQNKMLSFVHLKQAYPEKRSAQERDKDFNEIYRSFSDEQASCQASRCSQCGVPYCSAYCPLHNNIPDWLKMTAEGRLQDAYALSSATSTMPEICGRICPQDRLCEGNCVIENSGHGAVTIGSVEKYITDTAWKEGWVEPLQPITELGISVGIIGSGPAGLTAAEKLRQQGYQVHVYDRHVRAGGLLTYCIPGFRLDKDIVARRVKRLADWGCHLPYQFARRVKMPALKNCVTHAAILIATGVYKARGLATPGKELNGIVDALDFLISSNRKSFGDKVEAFDNGTLDAKGKKVVVIGGGDTAMDCVRTAIRQGAESVRCLYRRDRVNMPGSAREVKNAEDEGAEFVWLSAPESFVGKDHVQSVKVRGMRLGAPDGSGRRSPEPDPARLFDMDADLVICALGFSPEDLPTLFNAPELSVTPWGTVEADPVTLQTSIEGVFAAGDIVRGASLVVWAIRDGLVASEQMHQWLATRQQDKQDAPTKAKKKAVFA

SEQ ID NO: 4663 - DNA, 1473 bp, Clostridium saccharobutylicum
  CDS (1)..(1473)
atgggtaaaccaactggatttttagagtatgatagagaagtaggcagaaatagagaacctaaagaaagattgaaagattataaagagtttcatcaaaggcttcctctagaaaagcaatgcattcagggcgcaagatgtatggattgtggtgtaccattttgccaagctggagtattattttcaggtatggtatcaggatgtccgcttcacaatttaattcctgaatggaacgatttagtatacagaggaaaatgggaattagcttatgaaagattaaataagactaatccattcccagaatttacaggaagagtatgtccagcaccttgtgaagctggatgtactgcaggattgaatggtccagcaataactattaaggaaaatgaaagatctataatagataatgcatttgaaaatggatttgttaaagcaaatacacctcttaagagaacaggaaagaaagttgcagtaattggttctggtccatcgggattagcggttgctaatacgttaaataaatgtggtcataaggttacagtatttgaaagaagtgatagaccaggtggactattaatgtatggaattcctaatatgaaacttgataaagaagttattttaagaagagttcaccttatggcggaagaaggcataaaatttgtaaacaatgcaaatgttggtgacaactatgatgcaaaggaaattttagatgaatttgatgcagtagttcttgcgacaggagcatctcagcctagagatcttcaagctgaaggaagagataatgttaatggtatccattttgctgtagatttcttaaaagctaatactaagagtcttttagattcagatcatgaagataataattacatttctgcaaaagataaaaatgtaattattattggaggtggagacacaggaacagactgcgttgcaacatctcttagacatggatgtaaatcagtagttcaatttgaaataatgggtgaaccagctcacgaaagaactgaaagcaaccccatgccagaatggcctaaagttcttaaggttgattatggccaagaagaatttatagaactatatggaaaagatcctagagaatatttaacaacagttacagcagttcattcagataaagatggaaatctagaaagcgtagatactgtaaaagttgaatggaaaaaaggtgacaatggaagaatgttcccagctcatgttgaaggttcggaaaagaactggccagcagaacttatattacttgcaatgggattcacaggttcagaagattatcttaaaaatgcctttggtattgaatcagatgaaagaagcaatgtaaaagctggtaatgttgactttatgactaatgtaccgaaagtatttgcaacaggtgatgcaagacgtggtcaatcattagttgtaacagctataagtgaaggtatagcagcaggaatagcagttgataaattcttaagagcttaa

SEQ ID NO: 4664 - protein, 490 aa, Clostridium saccharobutylicum
MGKPTGFLEYDREVGRNREPKERLKDYKEFHQRLPLEKQCIQGARCMDCGVPFCQAGVLFSGMVSGCPLHNLIPEWNDLVYRGKWELAYERLNKTNPFPEFTGRVCPAPCEAGCTAGLNGPAITIKENERSIIDNAFENGFVKANTPLKRTGKKVAVIGSGPSGLAVANTLNKCGHKVTVFERSDRPGGLLMYGIPNMKLDKEVILRRVHLMAEEGIKFVNNANVGDNYDAKEILDEFDAVVLATGASQPRDLQAEGRDNVNGIHFAVDFLKANTKSLLDSDHEDNNYISAKDKNVIIIGGGDTGTDCVATSLRHGCKSVVQFEIMGEPAHERTESNPMPEWPKVLKVDYGQEEFIELYGKDPREYLTTVTAVHSDKDGNLESVDTVKVEWKKGDNGRMFPAHVEGSEKNWPAELILLAMGFTGSEDYLKNAFGIESDERSNVKAGNVDFMTNVPKVFATGDARRGQSLVVTAISEGIAAGIAVDKFLRA

SEQ ID NO: 4665 - DNA, 1521 bp, Corynebacterium glutamicum
  CDS (1)..(1521)
atggccgacccacaaggattcatcaaatactcccgacgcgagcctgcacaccgcccggtcccgctgcgcctcatggactactccgaggtctacgaaaaggcaccggcaggtcagatcgaggaacaggctgcccgctgcatggattgcggtgtcccgttctgccacgaaggctgcccactgggcaacatcatccctgagtggaatgatctggtacgccaaggtcggtggaaggaagcctacgatcgcctgcacgcgaccaacaatttccccgagttcaccggccgtttgtgccccgcaccctgcgaaggcgcctgcgtgctcggcatcaacgatgattctgtcaccatcaaaaacgttgagctggaaatcgtcgaaaaagcattccgcgaaggctgggttcagcctgtcgtcgcatccatgtccaccggcctgtccgtagccgtcgtcggctccggtcccgctggccttgccgccgcgcagcagctcacccgcgcaggtcacagcgtgaccgtcttcgaacgcgacgaccgcctcggcggcctcatgcgctacggcgtgccagaatacaaaatggaaaaccgctggatcgaccgccgcatcgagcaaatggaagcagagggcacaactttccaggtaggcacctcgccacgcgccgctgaactagcgcttttcgacgcgatcctcctcgcaaccggcaccccagtggcccgcgaactctcagttccaggccacgatctcaacggcatccatgcggcaatggattacctcaccgcccaaaaccgcatcaatgaaggcgacggtgaagtctctccaatcaacgccaaaggcaagaaagttgtcatcatcggtggcggcgacaccggcaccgactgctttggtacagcgctgcgccaaggagcggaatcagtcacccaatttgatatccgcccccgcgctcctttccagcgcgccgattccaccccatggccgatgtaccccaacctcttccgcaccgcaacggctcacgaagaaggcgaatacatcatcactggcgatgaatcagccgatgaaatcgcagccctgggcctcgccgaacgcgccgcaggctccacgcttggtgaacgtaaatttgctgtcaacaccgtggaattccacggcaacaacggccacgtcaccggactcaccggcaaccaaatccgagttgtcaacggcaaacgtgaaccaatcgaaggcaccgaatttcccttcgaagcagacctcgttctcgtcgcactcggattcaccggcgcagaacaaggcggattggcacacgaactaggcgtaggtttcgacgaccgaggacgcatcctccgcgattccgaataccgcagccccaccaactcccgcgtttacatcgcaggcgacaacggccgtggccaatccctgatcgtgtgggcaatcgccgaaggccgcgcatgcgccgcagctatcgacgccgacctcatgggtgaaactgcacttccagtagcagttgcaccacaggacgtgccgctggctgtctag

SEQ ID NO: 4666 - protein, 506 aa, Corynebacterium glutamicum
MADPQGFIKYSRREPAHRPVPLRLMDYSEVYEKAPAGQIEEQAARCMDCGVPFCHEGCPLGNIIPEWNDLVRQGRWKEAYDRLHATNNFPEFTGRLCPAPCEGACVLGINDDSVTIKNVELEIVEKAFREGWVQPVVASMSTGLSVAVVGSGPAGLAAAQQLTRAGHSVTVFERDDRLGGLMRYGVPEYKMENRWIDRRIEQMEAEGTTFQVGTSPRAAELALFDAILLATGTPVARELSVPGHDLNGIHAAMDYLTAQNRINEGDGEVSPINAKGKKVVIIGGGDTGTDCFGTALRQGAESVTQFDIRPRAPFQRADSTPWPMYPNLFRTATAHEEGEYIITGDESADEIAALGLAERAAGSTLGERKFAVNTVEFHGNNGHVTGLTGNQIRVVNGKREPIEGTEFPFEADLVLVALGFTGAEQGGLAHELGVGFDDRGRILRDSEYRSPTNSRVYIAGDNGRGQSLIVWAIAEGRACAAAIDADLMGETALPVAVAPQDVPLAV

SEQ ID NO: 4667 - DNA, 7037 bp, Oryza sativa
  CDS (262)..(6762)
cgggaagagacccgcgagagaggcggcgccccgtttcgtccccaaaaccgatccattcattcgccaaccacgccgtccgccgcgtcgccggtagagaaggccgccgtgcgtgcgggagagaagggggaagcacaaaccgcgctcggggacgagagccgcgaggcgaaggtgtggggaggatcgggacgcggcgtcggcgtcggtctcacctccgggctacaagagcgagaggtagcagagggagagtcgtgaggtgcagccatgtcggcggcgcaagggatggcctacaagctccgcaccgacgcggcgcccacgggcgctggccgcagggctcggcgcagccactcctccgtggcggcgccttaccgcgcggctaggctggtacagggcggcgtgtccatcgagggcggtttggtcggcggatgccagctcaccgaggagcgcgtcgccgcacggccgccccgcgccgccgcgcgcgacgccgagccggtcaggccactttcgacgctccccgagagcagcattgggctgtacgacccctcgcgcgagcgcgactcgtgcggcgttggtttcgtcgccgagctgtcgggcgattacaagcgcgcgacggtcaatgacgccctcgagatgcttgagagaatggcgcaccgtggtgcctgcggctgtgagaagaacactggcgatggtgccggcatccttgtggctctaccgcataactttttcagagaggtgacaaaggatgctgggtttgagctaccgcagccaggcgagtatgctgtcggtatggtcttcctgccaatcgatgagaagcgccgtgagcggagcaaagctgagtttcagaaggtagcggaatcgctgggacatgtaatacttgggtggcgccgggttcccactgacaactcagacttaggtgaatctgcgctccagactgagccagttattgagcaggttttcctcaccaaaagttcaagttcggaggctgattttgagcagcagttgtatatcctgaggaggctctcgattctatctatccgtgcagctctgaatctccgtcgtggaggaaagagggacttctacatgtgttctctctcctcaaggactattgtctacaagggccagcttaagccatgccaacttaaggggtactactatgcagatctaggtcatgaaaacttcacaagttatatggctctggttcactcaaggttctccacgaacaccttccccagctgggaccgtgcacagccgatgcgtgtattaggtcataatggagagatcaataccctcaaagggaacaagaattggatgaaagcacgagaaggtctcttagagtgtgagaagcttggcctaacaaaggatcagttttcaaaaattctaccaattgtggatgctacctcgtctgattcaggtgctttcgatggtgttcttgaacttcttatccgtggtggaagaagcctgccagaagctgtgatgatgatgatacctgaggcatggcagaacgatgtgaacatggaacctgagaagaaagctctctatgagttcttgtctgcccttatggagccttgggatggacctgctctaatatcttttactgatggccgttaccttggagccaccctggatcgcaatgggttgaggcctggtcgattttatgtgacacacagtggacgtgtagtcatgggaagtgaagttggtgttgttgatgttccttccaaagatgtattgagaaagggtagactaaaccctggaatgatgctgttggttgattttgagaaccatactgtagtggatgatgaagcattgaaggcacagtactcgaaagctcacccatatggggagtggctcaagagacaaaaaatatacctcaaagacattgtagaatctgtgccagaaactgagagagttgctcctggaatttctggttcactcacacaaaagaatgagaaaaaggaacatgcaggcgtcaatgggattgtgactccactaaaagcctttggatacacagttgaagcccttgaaatgctgcttctcccgatggctaaagatggagttgaagctcttggatccatgggaaatgacacacccttggcagtcatgtcaaacagagagaagttgacttttgagtacttcaaacagatgtttgcacaagttacaaacccgccaatcgacccaattagggagaaaattgttacatctatggagtgtatgattgggccagaaggtgacttgttggaaacaactgaaaagcaatgcaaccgccttgcacttgagggtcctttggtgtcgattgatgaaatggaggctattaagaagatgaactaccgtggttggcgaagcaaggtgctcgacataacttatccaaagaagtctggaaggaagggcttggaagaaactttggacagaatttgcacagaagctcggggagctataaagaagggctacactgttttagttctctcagatagaggattttcctcagaccgtgttgctgtcagttcgctcttagcagttggcgcggtacatcagcatcttgtggccaatcttgagaggacgcgcgtaggtttggtggagtctgctgaacctcgtgaagtgcaccacttctgcacccttgttgggtttggtgctgatgctgtatgcccttatttggctatcgaagcaatttggtgcttgcagaatgatgggaagattcctcctaatggtgatgggaaaccctactcaaaggaagaacttgtcaagaaatatttctatgcttctaactatggaatgatgaaagttcttgcaaagatgggaatttccacccttgcatcttacaaaggtgcacagatttttgaagctcttggcctttcctctgaagtcatccgtaagtgttttgatggtacacctagccgaattgaaggcgccacttttgaaatgcttgcacgagatgctctacgtcttcatgagttggcatttccatcaagagcacctccaccaggaagtgcagatgcaaaggcccttcccaatccaggggactaccactggaggaaaaatggtgaagtccacctcaatgatccccttgcaatggcaaaactacaagaagctgctagagtaaacagccgggcagcatacaaagaatattctaggcgtattcaggagctcaacaaaacctgcaacctgcgtggtatgcttaaatttaaagacactgctgacatgatttctgtggacgaggttgaacctgcaagtgagatcgttaaacgctttgttactggtgcaatgagttatggatccatttctttggaagcacatactgcccttgctatggccatgaacaaacttggagggaaatctaatacaggtgagggaggggaacagccttctcgtatggaaccacttgctaatggttcaatgaatccaaaaagaagtgcaatcaagcaagttgccagtggaagatttggagtttcaagctattatctgactaacgctgatgaactgcagataaaaatggctcagggtgctaagcctggtgaaggtggtgagcttccaggccacaaggttattggtgacattgcggttacaagacactctactgctggtgtaggactgattagcccacctcctcaccatgacatatattctattgaggatcttgcacaacttatccacgaccttaagaattcaaatcctagagctcgcataagcgtcaagctagtttctgaggctggtgtaggagttgttgctagtggtgttgtaaaaggacatgcagaccatgtccttatatctggccatgatggagggacgggagcttctaggtggacaggtattaaaaatgctggccttccatgggaacttggattggctgagacacatcaaactctagtggcaaatgggcttcgtggccgagctattctgcaaactgacgggcagttaaaaactggcaaagatgtagctgttgcttgcttacttggcgcagaagaatttggtttcagtactgctccgttgatcacacttggttgcatcatgatgcggaaatgtcataccaacacttgccctgttggtatagctactcaagatccagtgctacgagaaaagtttgctggagaaccagagcatgttatcaacttcttcttcatgcttgctgaggagctaagagaaatcatgtctcagcttggcttccgtaccattactgaaatggttgggcgctctgacatgcttgaggttgatccagaagtagtgaagagcaacgagaaacttgagaacattgatctctcattgattttgaaaccagctgcagagattcgccctggggctgctcagtactgtgttgaaaagcaagatcatggtcttgacatggcattagataacaaactcatagctttatcaaaagctgcacttgagaaggaagttcgtgttttcattgagactccaatccagaatactaaccgagcagtaggcactatgcttagtcatgaagtcacaaagcgttatcacatgaagggattacctgcaggtacgattcatgtgaagctcactggaagtgctggtcaaagtcttggcgcttttctctgtcctggaatcacccttgagcttgaaggagacagcaatgattatgttggcaaaggattgtctggcggaaaaattgttgtctacccaccaagagatagtacatttattccagaagacaatattgtaattggtaatgtggctctatatggtgctactataggagaggcatatttcaatggaatggctgcagaaaggttttgcgtgcgcaattcaggtgctcaagctgtggttgaaggaattggtgatcatgggtgtgagtacatgacagggggtactgtggttatccttggtaaaacaggaagaaactttgctgctgggatgagtggaggcattgcttatgtttatgatattgatgggaaattcagcgtccgctgtaaccatgagttagttgatctctatcatgtggaggaagaggaagacattaccacattgaaaatgatgatagaacaacatcgacttaacactgggagtgttgttgctagagatatactctctaattttgatactcttcttccaaaatttgtcaaggtattcccaagagattataagagggttttggacaatatgaaggctgaaaaggctgctgctaagcttgcaaaggaaccaaagatttcaaatggtgtttctgtaaccactaagaaagtgcaaccggagcaatcaacaaaccgaccaacacgtgtttccaatgccaaaaagtaccgaggtttcatttcatatgagcgagagagtatttcttaccgggatccaaatgagcgtgtaaaagattggaaggaagttgcaattgaatcagtgccagggccactactgaacacacagtctgctcgttgtatggattgtggaactcctttctgtcatcaggaaagctcaggtgctggctgtcctcttggaaataagattccagagttcaatgaactggttcaccagaacagatggcgtgaagcactagatcgtctgcttgagacgaacaacttccctgaatttactggaagagtatgccctgctccctgtgagggatcatgtgttcttggcattattgaaaatccagtatctatcaaaagcatagaatgtgcgatcatagacaaaggttttgaagagggatggatggtaccgcggcctccacttcaaagaacaggaaagaaggttgccatcattggaagtggtccggctggtttggctgctgcagatcaactaaacaaaatgggccattttgttactgtgtttgaacgtgctgatcgtattggtggtctgatgatgtatggagtgccaaacatgaagacagacaagattgaaattgtgcaacgccgtgtcaatttaatggcagaagagggcattacatttgtagtgaacgctaatgtaggcagtgatcctttgtattcaattgagcgcctccgttctgagaatgatgcagtcattttggcttgtggagctactaaaccaagggatctaggtattcctggacgcgagttatcaggagttcattttgccatggagttcctccatgcaaatacgaaaagtttacttgacagcaacttggaggatggtagatacatatctgccaaggggaaaaaggttgtggttattggtggtggtgacacaggcacagattgcattggtacatctattcggcatggttgcaccagcattgtaaaccttgaacttcttaccaaaccaccaagcaagagagcagctgataacccatggccacagtggcctagaatcttccgtgttgactatgggcaccaggaagcatctagtaagtttggaaatgacccaagaacttacgaagtcctgaccaagcgttttattggtgatgaaaatggaaacgtgaaggcccttgaggtggtccgggtcaagtgggagaaagtcgatgggagattccagttgaaagaaattgaaggctcaaacgagaccattgaggctgatcttgtcctcctagctatggggttcctaggccctgaagcgactattgctgagaaactaggtttggagaaagacaaccggtctaacttcaaagctcaatttggaaactttgcaaccagtgtggatggcatttttgctgccggggactgcagacgtggacaatcacttgttgtttgggccatcaccgaggggcggcaagctgctgcagctgtcgacaagtacttgtcaaggaatgaacaagatgccgcagaggacataaccccctcgggtgcaggttttgtgcagcctgttgcagcataaatgaaacaggcaaacttttcaagaccagtgcaatctaaattaggatcaacgtttttagtctttgatcacagcaagttgtctttgaaagataaggccgggctcaatagggaaaagagaagagccttcttatattttggtagataaacaattggaaattttggtgtgttctgcttgttacttttccagtaaaatgatttgcatggtgaaatgccgttttgtaatctgaataataatgtacagttgttttggtttaattaatagatgtaaatttgtct

SEQ ID NO: 4668 - protein, 2166 aa, Oryza sativa
MSAAQGMAYKLRTDAAPTGAGRRARRSHSSVAAPYRAARLVQGGVSIEGGLVGGCQLTEERVAARPPRAAARDAEPVRPLSTLPESSIGLYDPSRERDSCGVGFVAELSGDYKRATVNDALEMLERMAHRGACGCEKNTGDGAGILVALPHNFFREVTKDAGFELPQPGEYAVGMVFLPIDEKRRERSKAEFQKVAESLGHVILGWRRVPTDNSDLGESALQTEPVIEQVFLTKSSSSEADFEQQLYILRRLSILSIRAALNLRRGGKRDFYMCSLSSRTIVYKGQLKPCQLKGYYYADLGHENFTSYMALVHSRFSTNTFPSWDRAQPMRVLGHNGEINTLKGNKNWMKAREGLLECEKLGLTKDQFSKILPIVDATSSDSGAFDGVLELLIRGGRSLPEAVMMMIPEAWQNDVNMEPEKKALYEFLSALMEPWDGPALISFTDGRYLGATLDRNGLRPGRFYVTHSGRVVMGSEVGVVDVPSKDVLRKGRLNPGMMLLVDFENHTVVDDEALKAQYSKAHPYGEWLKRQKIYLKDIVESVPETERVAPGISGSLTQKNEKKEHAGVNGIVTPLKAFGYTVEALEMLLLPMAKDGVEALGSMGNDTPLAVMSNREKLTFEYFKQMFAQVTNPPIDPIREKIVTSMECMIGPEGDLLETTEKQCNRLALEGPLVSIDEMEAIKKMNYRGWRSKVLDITYPKKSGRKGLEETLDRICTEARGAIKKGYTVLVLSDRGFSSDRVAVSSLLAVGAVHQHLVANLERTRVGLVESAEPREVHHFCTLVGFGADAVCPYLAIEAIWCLQNDGKIPPNGDGKPYSKEELVKKYFYASNYGMMKVLAKMGISTLASYKGAQIFEALGLSSEVIRKCFDGTPSRIEGATFEMLARDALRLHELAFPSRAPPPGSADAKALPNPGDYHWRKNGEVHLNDPLAMAKLQEAARVNSRAAYKEYSRRIQELNKTCNLRGMLKFKDTADMISVDEVEPASEIVKRFVTGAMSYGSISLEAHTALAMAMNKLGGKSNTGEGGEQPSRMEPLANGSMNPKRSAIKQVASGRFGVSSYYLTNADELQIKMAQGAKPGEGGELPGHKVIGDIAVTRHSTAGVGLISPPPHHDIYSIEDLAQLIHDLKNSNPRARISVKLVSEAGVGVVASGVVKGHADHVLISGHDGGTGASRWTGIKNAGLPWELGLAETHQTLVANGLRGRAILQTDGQLKTGKDVAVACLLGAEEFGFSTAPLITLGCIMMRKCHTNTCPVGIATQDPVLREKFAGEPEHVINFFFMLAEELREIMSQLGFRTITEMVGRSDMLEVDPEVVKSNEKLENIDLSLILKPAAEIRPGAAQYCVEKQDHGLDMALDNKLIALSKAALEKEVRVFIETPIQNTNRAVGTMLSHEVTKRYHMKGLPAGTIHVKLTGSAGQSLGAFLCPGITLELEGDSNDYVGKGLSGGKIVVYPPRDSTFIPEDNIVIGNVALYGATIGEAYFNGMAAERFCVRNSGAQAVVEGIGDHGCEYMTGGTVVILGKTGRNFAAGMSGGIAYVYDIDGKFSVRCNHELVDLYHVEEEEDITTLKMMIEQHRLNTGSVVARDILSNFDTLLPKFVKVFPRDYKRVLDNMKAEKAAAKLAKEPKISNGVSVTTKKVQPEQSTNRPTRVSNAKKYRGFISYERESISYRDPNERVKDWKEVAIESVPGPLLNTQSARCMDCGTPFCHQESSGAGCPLGNKIPEFNELVHQNRWREALDRLLETNNFPEFTGRVCPAPCEGSCVLGIIENPVSIKSIECAIIDKGFEEGWMVPRPPLQRTGKKVAIIGSGPAGLAAADQLNKMGHFVTVFERADRIGGLMMYGVPNMKTDKIEIVQRRVNLMAEEGITFVVNANVGSDPLYSIERLRSENDAVILACGATKPRDLGIPGRELSGVHFAMEFLHANTKSLLDSNLEDGRYISAKGKKVVVIGGGDTGTDCIGTSIRHGCTSIVNLELLTKPPSKRAADNPWPQWPRIFRVDYGHQEASSKFGNDPRTYEVLTKRFIGDENGNVKALEVVRVKWEKVDGRFQLKEIEGSNETIEADLVLLAMGFLGPEATIAEKLGLEKDNRSNFKAQFGNFATSVDGIFAAGDCRRGQSLVVWAITEGRQAAAAVDKYLSRNEQDAAEDITPSGAGFVQPVAA

SEQ ID NO: 4669 - DNA, 4421 bp, Bos taurus
  CDS (75)..(3152)
actttcgtctctggctgaagcctgaggacgcggaagggttcgtggcaaggaaaccccaggctctgggcatcgccatggcccctgtgctaagcaaggacgtggcggatatcgagagtatcctggctttaaatcctcgaacacagtctcgtgcaactctgcgttccactttggccaagaaattagacaagaaacattggaaaagaaatcctgataagaactgctttaattgcgagaagctggagaataattttgatgacatcaagcacacgactcttggtgagcgaggagctctccgagaagcaatgagatgcctgaaatgtgcagatgccccctgtcagaagagctgtccaacaaatctagatatcaaatcgttcatcacaagtatctcaaacaagaactattatggagctgctaagatgatattttctgacaacccacttggtctgacctgtggaatggtatgccccacctctgatctttgtgtaggtggatgtaatttgtatgccactgaagagggaccaattaatattggtggattgcagcaatatgctactgaggtattcaaagcaatgaatatcccacaaatcaggaatccttctctgcctcccccagaaaaaatgcctgaagcctattctgcaaagattgctcttttgggtgctgggcctgcaagtataagttgtgcttcgttcttggctcgattaggctacaatgacatcactatatttgaaaaacaagaatacgttggtggtataagtacttctgaaatccctcagttccggctgccatatgatgtagtaaattttgagattgagcttatgaaggaccttggtgtaaagataatttgtggtaaaagcctttcagtgaatgacattactcttagtactttgaaagaagaagggtacaaagctgctttcattgggataggtttgccagaacccaagaaggatcacatcttccaaggcctgacacaggaccaggggttttacacttccaaagactttctgcctcttgtagccaaaagcagtaaagcaggaatgtgcgcctgtcactctccattgctgtcgatacggggaaccgtgattgtactcggagctggagacacagctttcgactgtgcaacatccgctttacgttgtggagcccgccgagtgttcatcgtcttcagaaaaggctttgttaatataagagctgtccctgaggaggtggagcttgctagagaagaaaaatgtgaatttttgcctttcttgtctccacggaaggttatagtaaaaggtgggagaattgttgccatgcaatttgttcggacagagcaagatgaaactggaaaatggaatgaagatggagatcagatagcctgtctgaaagccgatgtggtcatcagtgcctttggctcagttctgagtgatcctaaagtaaaagaagccttgagccctataaaatttaacagatgggatctcccagaagtagatccagaaactatgcaaaccagtgagccatgggtgtttgcaggtggtgatgtggttggtatagccaacactacagtggaagccgtgaatgatggaaagcaagcctcttggtacattcacagatatatacagtcacaatatggagcttcagtttctgctaagcccgaactccccctgttttatactcccattgatctggtggacattagtgtggaaatggctgcattgaagtttacaaatccttttggtcttgccagtgcaactccaactaccagttcgtcaatgattcgaagagcttttgaagctggatgggcctttgctctgaccaaaactttctctcttgataaggatatagtgacaaatgtttcacccagaatcatccgggggaccacctctggccccatgtatggccctggacaaagctctttcctgaatattgagctcatcagtgaaaaaacggctgcatattggtgtcaaagtgtcactgaactaaaagccgactttccagacaatattgtgattgctagcatcatgtgcagttacaacagaaatgactggatggaactctccagaaaggctgaggcttctggagcagacgccctggagttaaatttatcgtgtccgcatggcatgggagaaagaggaatgggtctggcttgtggacaggatccagagctggtgcggaacatctgtcgctgggttaggcaagctgttcggattcctttttttgccaagttgaccccaaatgtcactgatattgtaagcatagccagagctgcaaaggaaggtggggcaaatggtgttacagctaccaacactgtctcaggtctcatgggattaaaagctgatggcacaccctggccagcagtgggccgtgagaagcggactacatacggcggagtgtccggcacagccatcagacctattgctttgagagctgtgaccaccattgctcgtgctttgcctgaatttcccattttggccactggtggaattgactcagctgaaagtggtcttcagtttctccacggtggtgcttcggtgctccaggtatgcagtgctattcaaaatcaggatttcactatcatccaagactactgcactggcctcaaagccttgctttatctgaaaagcattgaagaactacaggactgggatgggcagagtccagccacgaagagtcaccagaaagggaaaccagtcccttgtattgctgaacttgtgggaaagaaactgccaagctttggaccttatcttgagaagtgcaagaaaatcatagcagaggaaaagttgagactgaaaaaagaaaatgtgaccgttctaccacttgaaagaaaccattttatcccaaaaaaacctattccttctgttaaggatgtgattggaaaagctctgcagtaccttggaacatatggtgaactgaacaacacagagcaggttgtggctgtgatcgatgaagagatgtgtatcaactgtggcaaatgctacatgacctgtaatgactctggctaccaggctatccagtttgatcctgaaacccacctgcccaccgttactgacacttgtacaggctgtaccctgtgtctctccgtctgccctattatcgactgcatcaaaatggtttccaggacaacaccttatgaaccaaagagaggcttgcccttggctgtgaatcctgtgtcttaaggtgatttgtgaaacagttgcagtgaacttcgaggtcacctacttatgctgatcttttcaatagtgatcattatgctcagctttttctaaattcaaacatataatttctaaatttaaaaaaagattatttctaaagaaatttctaaattttaaaaatgtctgctttcagtgatcattcaattaatggtcataaaatagaataattcttttctgagcagaattgttcaatataactatggagcagttaattggatgttcaccatcagttgtccattatgaaaaaattaacttttttgtagcaattaatgctacacttttcaaattgccctatgccgagttctgtctttgatttctaattgtaagggaaattaagtattttagaacaaagtacaatttaacttacaacaaatgtttccaaggaaacattttataattaaaaattacatttaattttaactctgtttctaagcaaaagtaattagctccataaagctcagatgaagtcaaataattatttactgtggtagcaaaagaaagccaatgagggtttgggaaactttccttaaggtctcttcactgaaataactggatactgaaggcgagagtgttcagtaaccatttgtatcaagctatgctattcaccgctcaggcctgagatgtgtgtccaaatgctaccaatgaatcaacatgacattcctgtttaaatatttaaactatgttcctaacaaagtaagacattaggatggaactctggttaaagccactcttttgctgtgcacagatctgttctatctgcttctaatatagtcaccttcgtgatcctagcaattaatgtttgaacacagcacagattatacagaagtggggtcatgtgcttctttattcaagaatgagaaatccagtatgggtaatatatattatatgggtgataccactttaccaactctttattttagtgtccatgttgaatttcgaaagtgattaaaaaagaaatggtattttctgttactgccaaataatatttttatattcctcgatttttaaaatcagcaaatagcatcttataaacttgtttatctcttctttgtggcatattttaatatgaatccataagtagtaaatcttcatgtaatcatccatagcacctttctatgacaaatgcaagatcaagagaaaaataaatgtttgattatgcacttttagaaatgcacatttaccacaaaatctgtatgatcaaataatattaaataaaattttataaagcatttt

SEQ ID NO: 4670 - protein, 1025 aa, Bos taurus
MAPVLSKDVADIESILALNPRTQSRATLRSTLAKKLDKKHWKRNPDKNCFNCEKLENNFDDIKHTTLGERGALREAMRCLKCADAPCQKSCPTNLDIKSFITSISNKNYYGAAKMIFSDNPLGLTCGMVCPTSDLCVGGCNLYATEEGPINIGGLQQYATEVFKAMNIPQIRNPSLPPPEKMPEAYSAKIALLGAGPASISCASFLARLGYNDITIFEKQEYVGGISTSEIPQFRLPYDVVNFEIELMKDLGVKIICGKSLSVNDITLSTLKEEGYKAAFIGIGLPEPKKDHIFQGLTQDQGFYTSKDFLPLVAKSSKAGMCACHSPLLSIRGTVIVLGAGDTAFDCATSALRCGARRVFIVFRKGFVNIRAVPEEVELAREEKCEFLPFLSPRKVIVKGGRIVAMQFVRTEQDETGKWNEDGDQIACLKADVVISAFGSVLSDPKVKEALSPIKFNRWDLPEVDPETMQTSEPWVFAGGDVVGIANTTVEAVNDGKQASWYIHRYIQSQYGASVSAKPELPLFYTPIDLVDISVEMAALKFTNPFGLASATPTTSSSMIRRAFEAGWAFALTKTFSLDKDIVTNVSPRIIRGTTSGPMYGPGQSSFLNIELISEKTAAYWCQSVTELKADFPDNIVIASIMCSYNRNDWMELSRKAEASGADALELNLSCPHGMGERGMGLACGQDPELVRNICRWVRQAVRIPFFAKLTPNVTDIVSIARAAKEGGANGVTATNTVSGLMGLKADGTPWPAVGREKRTTYGGVSGTAIRPIALRAVTTIARALPEFPILATGGIDSAESGLQFLHGGASVLQVCSAIQNQDFTIIQDYCTGLKALLYLKSIEELQDWDGQSPATKSHQKGKPVPCIAELVGKKLPSFGPYLEKCKKIIAEEKLRLKKENVTVLPLERNHFIPKKPIPSVKDVIGKALQYLGTYGELNNTEQVVAVIDEEMCINCGKCYMTCNDSGYQAIQFDPETHLPTVTDTCTGCTLCLSVCPIIDCIKMVSRTTPYEPKRGLPLAVNPVS

SEQ ID NO: 4671 - DNA, 6336 bp, Schizosaccharomyces pombe
  CDS (1)..(6336)
atggctgtcttatcttcagtccaacccatcaatcataactctgccctcgttgaggctcgtgacgaacaagtgaacacgaccgcttgttccgatgaccttctcaatgctcctccctatgagtatgatactgagggaaatccctcttgggctggtgcccttcccaaggctcaagctttatacgatcctgcctacgaaaaagactcttgcggtgttggtttcacttgtcacatcaagggtcaagtctctcacaaaatcgtcaccgatgctcgcttacttttgtgcaacatgactcatcgtggtgccactggtgccgatactcgtgatggtgatggtgcaggtgtcatgaccggtatgccttacacttttatgcaaaaggagtttggtcaaatcggatgtacccttcccaaaagcggcgagtatgccatcggtaatgtgtttttctctcctgaagccgacgtttgtcgtgaagccatgaccgctttcacccaagtcgccgaaaaacttggtcttgcaatccttgcttggcgttccgtcccttgtgataacagcatcttgggccccgctgctctttctcgtgagcctaccatcttacagccttgtgttgtcctcaaggccgcttacgatggtgaagccgagtttgataccgatctcttcgaaagacagctttacgttcttcgcaagcagtcttctcatttgatcggtaaggaaaaatggttctacatttgctctttgcatcgtgagaccattgtctataagggtcaacttgctcctgttcaagtctacaattatttccttgatttgaacaacgccgagtatgtatcccactttgccctcgttcactcccgtttctctacaaacactttcccgtcctgggaccgtgctcaacccatgagattggccgctcacaacggtgaaattaacaccctacgtggtaacaaaaattggatgcatgctcgtgaaggcttgatgaagtccagtcgttttggcgaagagttcgcctctttgcttcccatcatcgagcgcggtggttcggactccgctgcttttgataacgttattgagttgttatgtgctagcggtgttgtctccttacccgaagctgtcatgctcttgattcctgaagcttggcaaaacgacaaaaacatcagcgacgagaaggctgctttttacgagtgggctgcttgtcaaatggagccttgggatggtcctgctttgtttacatttgccgacggtcgctattgcggtgccaatcttgatcgtaacggtcttcgcccttgccgtttctatcttacttccgatgacatgatgatttgcgcttctgaagttggtacagtcggcattgaacctgaccgcatcgttcagaaaggtcgtctatatccaggccgtatgttgcttgttgacaccaaagagggtcgtattgtcgacgataaggagctcaagcacaacattgccagtcgctacgacttccgtagttggctcgaccaagagcttatcgacatgaactcgattgttgactctcttatagaatccactagcgttgatcttactcccattgtcgatgatgttcctcttgccgatgacaaaaccatgttagcatttggttacactttggaacagattaacatgattatggctcccatggctaatggcggcaaggaaactttgggaagtatgggtaatgatgctgcaatcgcatgcctttccgaccagcctcgtttactttacgactatttccgtcaacttttcgctcaagtcactaatcctcctattgatcctattcgtgaggctatcgtaatgagtttgcaatgctacatcggtcctagtggtaacttgcttgaaattaatcaaagccaatgtcgtcgtctccgcatgcctactcccattttgactgttgaggagttcaatgctttgaaaaatgttgaccgtatttaccctgactggaaagtcgcttctatcgacatcacttttttcaagagtgaaggcgttgctggctatgctgccgccatcgagcgtatttgttccgaagctgatactgccgtcaatgagggctataaagctatagtcctttccgaccgtaacgttaacagtgagcgcgtacctttggcttccattgccgcatgcggtgccgttcatcattatttggtacaaaacaaattgcgttctagagttgctcttgtttgtgaatctggtgacgcgcgtgaagttcaccatatgtgcacacttcttggctatggtgccgatgccgtttgtccctatttagccatggaagctttaacaaagctagtcagacagaacgcaatgaaacctggcatcacagaagaaactgccataaagaatttcaagcatgctatcaatggcggtattttgaaggttatgtccaagatgggtatttcaactttgcaatcatataaaggtgcccagatttttgaggctcttggcattgacaacgaggtcatcaacaaatgtttccttggtaccgcatcccgtatccgtggtgtaacttttgagcatattgctcttgatgcttttgctcttcatgagcgtggatatccaaccgatcaatccattcgcagtcttcaaatccccgatatgggtgacttttactatcgtgatggtggtgagcagcacgtcaaccatccaaaggctatcgccagtcttcaagatgccgtccgcaataagaacgaggctgcttatgcggaattctctcgtacacactacgaacaaactaggaggtgtactcttcgtggtatgttggatttcgattttgattcttctcaagctattcccattgaacaggttgagccttggactgagattgttcgccgtttctgcactggtgctatgtcttacggttcgatcagtatggaatctcattcttctttggccattgccatgaatcgtttgggcggtaagtctaacactggtgaaggtggtgaagaccctgctcgcagtcagcgtcttgccaatggcgatacaatgcgttctgccatcaaacagattgcatccggtcgtttcggtgttacttcttggtacttgtctgatgctgatgagcttcaaattaaaatggctcaaggtgccaagcctggtgagggtggtgaattgcctggtaataaggtgagtgaatcaattgcgaaaactcgtcattccactgctggtgttggtttgatttctcctcctcctcatcatgatatctactctattgaagatttgaagcagttgatttatgacatgaagagtgccaaccctcgtgctcgtgtatccgttaagcttgtttctgaagtaggtgtcggtattgttgcttctggtgttgcaaaagccaaagcagatcatattttggtttcaggtcatgatggtggtaccggtgcctctcgttggactggtattaaatacgctggtttaccatgggagctaggtgttgccgaaacccatcaaactttggtattgaacgaccttcgtgggcgagttgttatccaaactgatggtcaaattcgtaccggtcgtgatgttgctatcgcttgcttgcttggtgctgaagaatgggggtttgcgactactcctttgattgcattgggctgtatcatgatgcgtaaatgtcatctgaatacttgtcccgttggtatcgcaactcaagatcctgaattgaggaagaaatttgagggtcaaccggagcacgttgtaaactttttctactacgtcgcagaagagctccgtggaattatggctaaacttggtttccgaactattaatgagatggttggtcgttctgacaagcttaaggtcgccgagccaattaacaacaagtcaaagcttcttgacttgactcccttgctgactcctgctttcactcttcgacctggcgctgctacttacaacgttcgtaagcaagaccatagactttataccagacttgacaacaagctcattgacgaagctgaagttactttggaagaaggcatcccttctgtcgttgaatgtgaaattattaacaccgatcgtactcttggtgctactctttccaataagatcagtaagcgttatggtgaagagggtcttcctactgattctattcgtgtcaatgtttttggttcagctggccaatcttttggtgctttcttagctccaggtgttacactccaattagaaggtgactgtaacgattatgtcggcaaaggcttatctggcggtcgcttgattatttatcctcctagggtttctccctttaagcccgaagaaaatatgatcattggtaatgtctgtctgtatggtgccacttctggtcatgcttttatttctggtgtggcagcagagcgtttcgctgttcgtaactctggtgcaattgctgtagttgaaggcgttggtgaccacggttgtgagtacatgactggtggtcgtgttgtaattcttggttcaactggcagaaacttcgctgctggtatgtctggtggtattgcatatgtctacgatatgcaaatggactttgctggtaaaattaacacagaaatggtcgatatttcttctgtcactgatgctgctgaaattgctttcctcagaggacttattcaagaccataggcattacacgggctcacaggtggctgaccgtatattaagtgatttccctcgtcaccttagccgctttgttaaggttcttccaagagagtacaaggctgtattggaacgtgaagctgctaagaaggaagaagccaagagactacagtatcccaaagctttcatgccaggaaatcctattcgtcaacaaattgaggaaactaatgctcagattgctgatgtggaagataccttaggtgctactgtgaaaaagagcgctcctttggacaagcttcgtggatttatgaaataccaacgccgcagtgaacattatcgtaaccctcttaagagaacgaatgattggaaagaactttccgttcgtcttcgtgaagatgaattacgtgttcaaactgccagatgtatggactgtggtactcctttctgtcaatctgattatggttgtcctatttccaacaaaattttcacttggaatgatttggttttcaaacaacagtggaaagaggccttaacccagcttttgttgaccaataattttccagaatttacaggccgtgtctgccctgctccttgtgaaggcgcttgtaccttaggtattattgaatcgcctgttggaatcaagagtgttgagcgtgctattattgacaaggcttgggaggaaggctggattgtccccagacctcctgctgaacgtactggtcgtcgtgttgccattatcggttctgggcctgcaggtcttgctgccgctgaccaactcaaccgcgctggtcaccatgtagtaatttatgagcgtgccgatcgtccaggtggtcttcttcaatatggtattcctaatatgaaactagacaagaaggttgttgagcgtcgtatccagctcatgattgacgaaggtattgaagtacttacaaacgttgaagtcggtaagaacggtgatgttagccttgatgaacttcacaaggtttacgatgctgttgttctcgcctctggctctacggttcctcgtgatttgcccattcccaaccgtgattctaagggtattcactttgccatggagttccttcacaaaaatactaagagtcttcttgatagtgaactcaaagatggcaattatattagtgctaagggcaaggatgtaattgttattggaggaggtgatactggtaatgattgtttgggtaccagtgttcgtcatggtgctaaaagtgttagaaatttggagttacttcccattcctcctcgtgaacgtgccttcgacaacccttggcctcaataccctcgtgtcttccgcgttgattatggacatgctgaagtacaagctcattatggtcaagatttccgtgaatactctattttaactaagagttttgaaaaggatgaagatggcaatgttaagggtattaatactgttcgtattgagtggactaagaacagtaagggtcgctggatcatgaaggagattcgtaactctgaggagtttttccctgcagatttagtcatccttgctttaggtttcttaggtcctgaggagcaagctactgctggaatgaacgttgatagagatgctcgttctaacatcagcactcctactaaatcgtatgaaactagtgttcctggcatttacgctgctggtgattgccgccgtggtcaaagtttggtcgtatggggtattcaagaaggtcgtcaatgtgctcgtgaaattgatttgaaattccagggtaagacatttttgcctggtgatggaggccttgtaaagcgcactgttaattgttaa

SEQ ID NO: 4672 - protein, 2111 aa, Schizosaccharomyces pombe
MAVLSSVQPINHNSALVEARDEQVNTTACSDDLLNAPPYEYDTEGNPSWAGALPKAQALYDPAYEKDSCGVGFTCHIKGQVSHKIVTDARLLLCNMTHRGATGADTRDGDGAGVMTGMPYTFMQKEFGQIGCTLPKSGEYAIGNVFFSPEADVCREAMTAFTQVAEKLGLAILAWRSVPCDNSILGPAALSREPTILQPCVVLKAAYDGEAEFDTDLFERQLYVLRKQSSHLIGKEKWFYICSLHRETIVYKGQLAPVQVYNYFLDLNNAEYVSHFALVHSRFSTNTFPSWDRAQPMRLAAHNGEINTLRGNKNWMHAREGLMKSSRFGEEFASLLPIIERGGSDSAAFDNVIELLCASGVVSLPEAVMLLIPEAWQNDKNISDEKAAFYEWAACQMEPWDGPALFTFADGRYCGANLDRNGLRPCRFYLTSDDMMICASEVGTVGIEPDRIVQKGRLYPGRMLLVDTKEGRIVDDKELKHNIASRYDFRSWLDQELIDMNSIVDSLIESTSVDLTPIVDDVPLADDKTMLAFGYTLEQINMIMAPMANGGKETLGSMGNDAAIACLSDQPRLLYDYFRQLFAQVTNPPIDPIREAIVMSLQCYIGPSGNLLEINQSQCRRLRMPTPILTVEEFNALKNVDRIYPDWKVASIDITFFKSEGVAGYAAAIERICSEADTAVNEGYKAIVLSDRNVNSERVPLASIAACGAVHHYLVQNKLRSRVALVCESGDAREVHHMCTLLGYGADAVCPYLAMEALTKLVRQNAMKPGITEETAIKNFKHAINGGILKVMSKMGISTLQSYKGAQIFEALGIDNEVINKCFLGTASRIRGVTFEHIALDAFALHERGYPTDQSIRSLQIPDMGDFYYRDGGEQHVNHPKAIASLQDAVRNKNEAAYAEFSRTHYEQTRRCTLRGMLDFDFDSSQAIPIEQVEPWTEIVRRFCTGAMSYGSISMESHSSLAIAMNRLGGKSNTGEGGEDPARSQRLANGDTMRSAIKQIASGRFGVTSWYLSDADELQIKMAQGAKPGEGGELPGNKVSESIAKTRHSTAGVGLISPPPHHDIYSIEDLKQLIYDMKSANPRARVSVKLVSEVGVGIVASGVAKAKADHILVSGHDGGTGASRWTGIKYAGLPWELGVAETHQTLVLNDLRGRVVIQTDGQIRTGRDVAIACLLGAEEWGFATTPLIALGCIMMRKCHLNTCPVGIATQDPELRKKFEGQPEHVVNFFYYVAEELRGIMAKLGFRTINEMVGRSDKLKVAEPINNKSKLLDLTPLLTPAFTLRPGAATYNVRKQDHRLYTRLDNKLIDEAEVTLEEGIPSVVECEIINTDRTLGATLSNKISKRYGEEGLPTDSIRVNVFGSAGQSFGAFLAPGVTLQLEGDCNDYVGKGLSGGRLIIYPPRVSPFKPEENMIIGNVCLYGATSGHAFISGVAAERFAVRNSGAIAVVEGVGDHGCEYMTGGRVVILGSTGRNFAAGMSGGIAYVYDMQMDFAGKINTEMVDISSVTDAAEIAFLRGLIQDHRHYTGSQVADRILSDFPRHLSRFVKVLPREYKAVLEREAAKKEEAKRLQYPKAFMPGNPIRQQIEETNAQIADVEDTLGATVKKSAPLDKLRGFMKYQRRSEHYRNPLKRTNDWKELSVRLREDELRVQTARCMDCGTPFCQSDYGCPISNKIFTWNDLVFKQQWKEALTQLLLTNNFPEFTGRVCPAPCEGACTLGIIESPVGIKSVERAIIDKAWEEGWIVPRPPAERTGRRVAIIGSGPAGLAAADQLNRAGHHVVIYERADRPGGLLQYGIPNMKLDKKVVERRIQLMIDEGIEVLTNVEVGKNGDVSLDELHKVYDAVVLASGSTVPRDLPIPNRDSKGIHFAMEFLHKNTKSLLDSELKDGNYISAKGKDVIVIGGGDTGNDCLGTSVRHGAKSVRNLELLPIPPRERAFDNPWPQYPRVFRVDYGHAEVQAHYGQDFREYSILTKSFEKDEDGNVKGINTVRIEWTKNSKGRWIMKEIRNSEEFFPADLVILALGFLGPEEQATAGMNVDRDARSNISTPTKSYETSVPGIYAAGDCRRGQSLVVWGIQEGRQCAREIDLKFQGKTFLPGDGGLVKRTVNC

SEQ ID NO: 4673 - DNA, 7056 bp, Saccharomyces cerevisiae
  CDS (263)..(6697)
acaccaaactaatcgtctccacatcataggaagataggaaattgctatctcagtcctatactacgcagacggatacctcagttgctctctttcttccccttcttttagctcattgaggtagtgattaacgtttaacttatttatttatttttctgcttcagtttttttttatttatttttgtctttctactctctcttttttcttaatctatttgccatttatttattttgaagaactagaaaaagaattagaaaagaaagcatgccagtgttgaaatcagacaatttcgatccattggaagaagcttacgaaggtgggacaattcaaaactataacgatgaacaccatcttcataaatcttgggcaaatgtgattccggacaaacgaggactttacgaccctgattatgaacatgacgcttgtggtgtcggtttcgtagcaaataagcatggtgaacagtctcacaagattgttactgacgctagatatcttttagtgaatatgacacatcgtggtgccgtctcatctgatgggaacggtgacggtgccggtattctgctaggtattcctcacgaatttatgaaaagagaattcaagttagatcttgatctagacatacctgagatgggcaaatacgccgtaggtaacgtcttcttcaagaagaacgaaaaaaataacaagaaaaatttaattaagtgtcagaagattttcgaggatttagctgcatccttcaacttatccgtattaggttggagaacgtcccgtagattctactatttaggagacgttgcattatctcgtgaacctactattctacagccattattggttccattgtatgatgaaaaacaaccggagtttaatgaaactaaatttagaactcaattgtatcttttaaggaaggaggcctctcttcaaataggactggaaaactggttctatgtttgttccctaaacaataccaccattgtttacaagggtcaattgacgccagctcaagtgtataactactatcccgacttgactaatgcgcatttcaaatcccacatggcgttggtccattcaagattttccactaatactttcccctcttgggatagagctcaacctttacgttggctagctcataatggtgaaattaacaccttaagaggtaacaagaattggatgcgctccagagaaggtgtgatgaattcagcaactttcaaagatgagttagacaaactatacccaattatcgaagaaggtggttctgattcagctgcattggataacgttttagaactattgactattaatggcacattatctctacctgaagctgttatgatgatggttcctgaagcgtatcataaggatatggattctgacctaaaagcatggtacgactgggctgcatgtctgatggaaccttgggatggtccagctttgttaactttcactgatggacgttactgtggtgctatattggatagaaatggtttaagaccttgtcgttattacatcactagtgatgacagagttatctgtgcttcagaggtaggtgtcattcctatcgaaaattcattggttgttcaaaaaggtaaactgaagccaggtgatttgattcctagtgatactcaattgggtgaaatggtcgatactaaaaagttaaaatctcaaatctcaaaaagacaagattttaagtcttggttatccaaagtcatcaagttagacgacttgttatcaaaaaccgctaatttggttcctaaagaatttatatcacaggattcattgtctttgaaagttcaaagtgacccacgtctattggccaatggttataccttcgaacaagtcacatttctgttaactccaatggctttaacaggtaaagaagctttaggttcgatgggtaacgatgcgccactggcttgtttaaatgaaaatcctgtcttactttatgattatttcagacaattgtttgctcaagtgaccaatcctccaattgacccaattcgtgaagcaaatgttatgtcgttagaatgttatgtcggacctcaaggcaaccttttggaaatgcattcatctcaatgtgatcgtttattattgaaatctcctattttgcattggaatgagttccaagctttgaaaaacattgaagctgcttacccatcatggtctgtagcagaaattgatatcacattcgacaagagtgagggtctattgggctataccgacacaattgataaaatcactaagttagcgagcgaagcaattgatgatggtaaaaagatcttaataattactgacaggaaaatgggtgccaaccgtgtttccatctcctctttgattgcaatttcatgtattcatcatcacctaatcagaaacaagcagcgttcccaagttgctttgattttggaaacaggtgaagccagagaaattcaccatttctgtgtcctactaggttatggttgtgatggtgtttatccatacttagccatggaaactttggtcagaatgaatagagaaggtctacttcgtaatgtcaacaatgacaatgatacacttgaggaagggcaaatactagaaaattacaagcacgctattgatgcaggtatcttgaaggttatgtctaaaatgggtatctccactctagcatcctacaaaggtgctcaaatttttgaagccctaggtttagataactctattgttgatttgtgtttcacaggtacttcttccagaattagaggtgtaactttcgagtatttggctcaagatgccttttctttacatgagcgtggttatccatccagacaaaccattagtaaatctgttaacttaccagaaagtggtgaataccactttagggatggtggttacaaacacgtcaacgaaccaaccgcaattgcttcgttacaagatactgtcagaaacaaaaatgatgtctcttggcaattatatgtaaagaaggaaatggaagcaattagagactgtacactaagaggactgttagaattagattttgaaaattctgtcagtatccctctagaacaagttgaaccatggactgaaattgccagaagatttgcgtcaggtgcaatgtcttatggttctatttctatggaagctcactctacattggctattgccatgaatcgtttaggggccaaatccaattgtggtgaaggtggtgaagacgcagaacgttctgctgttcaagaaaacggtgatactatgagatctgctatcaaacaagttgcttccgctagattcggtgtaacttcatactacttgtcagatgctgatgaaatccaaattaagattgctcagggtgctaagccgggtgaaggtggtgaactaccagcccacaaagtgtctaaggatatcgcaaaaaccaggcactccacccctaatgttgggttaatctctcctcctcctcatcacgatatttattccattgaagatttgaaacaactgatttatgatttgaaatgtgctaatccaagagcgggaatttctgtaaagttggtttccgaagttggtgttggtattgttgcctctggtgtagctaaggctaaagccgatcatatcttagtttctggtcatgatggtggtacaggtgctgcaagatggacgagtgtcaaatatgcgggtttgccatgggaattaggtctagctgaaactcaccagactttagtcttgaatgatttaagacgtaatgttgttgtccaaaccgatggtcaattgagaactgggtttgatattgctgttgcagttttattaggggcagaatcttttaccttggcaacagttccattaattgctatgggttgtgttatgttaagaagatgtcacttgaactcttgtgctgttggtattgccacacaagatccatatttgagaagtaagtttaagggtcagcccgaacatgttatcaacttcttctattacttgatccaagatttaagacaaatcatggccaagttaggattccgtaccattgacgaaatggtgggtcattctgaaaaattaaagaaaagggacgacgtaaatgccaaagccataaatatcgatttatctcctattttgaccccagcacatgttattcgtccaggtgttccaaccaagttcactaagaaacaagaccacaaactccacacccgtctagataataagttaatcgatgaggctgaagttactttggatcgtggcttaccagtgaatattgacgcctctataatcaatactgatcgtgcactcggttctactttatcttacagagtctcgaagaaatttggtgaagatggtttgccaaaggacaccgttgtcgttaacatagaaggttcagcgggtcaatcttttggtgctttcctagcttctggtatcacttttatcttgaatggtgatgctaatgattatgttggtaaaggtttatccggtggtattattgtcattaaaccaccaaaggattctaaattcaagagtgatgaaaatgtaattgttggtaacacttgtttctatggtgctacttctggtactgcattcatttcaggtagtgccggtgagcgtttcggtgtcagaaactctggtgccaccatcgttgttgagagaattaagggtaacaatgcctttgagtatatgactggtggtcgtgccattgtcttatcacaaatggaatccctaaacgccttctctggtgctactggtggtattgcatactgtttaacttccgattacgacgattttgttggaaagattaacaaagatactgttgagttagaatcattatgtgacccggtcgagattgcgtttgttaagaatttgatccaggagcattggaactacacacaatctgatctagcagccaggattctcggtaatttcaaccattatttgaaagatttcgttaaagtcattccaactgattataagaaagttttgttgaaggagaaagcagaagctgccaaggcaaaggctaaggcaacttcagaatacttaaagaagtttagatcgaaccaagaagttgatgacgaagtcaatactctattgattgctaatcaaaaagctaaagagcaagaaaaaaagaagagtattactatttcaaataaggccactttgaaggagcctaaggttgttgatttagaagatgcagttccagattccaaacagctagagaagaatagcgaaaggattgaaaaaacacgtggttttatgatccacaaacgtcgtcatgagacacacagagatccaagaaccagagttaatgactggaaagaatttactaaccctattaccaagaaggatgccaaatatcaaactgcgagatgtatggattgtggtacaccattctgtttatctgataccggttgtcccctatctaacattatccccaagtttaatgaattgttattcaagaaccaatggaagttggcactggacaaattgctagagacaaacaatttcccagaattcactggaagagtatgtccagcaccctgtgagggagcttgtacactaggtattattgaagacccactcggcataaaatcggttgaaagaattatcattgacaatgctttcaaggaaggatggattaagccttgtccaccaagtacacgcactggctttacagtgggtgtcattggttctggtccagcaggtttagcgtgtgctgatatgttgaaccgtgccggacatacggtcactgtttatgaaagatccgaccgttgtggtgggttattgatgtatggtattccaaacatgaagttggataaggctatagtgcaacgtcgtattgatctattgagtgccgaaggtattgactttgttaccaacaccgaaattggtaaaaccataagcatggatgagctaaagaacaagcacaatgcagtagtgtatgctatcggttctaccattccacgtgacttacctattaagggtcgtgaattgaagaatattgattttgccatgcagttgttggaatctaacacaaaagctttattgaacaaagatctggaaatcattcgtgaaaagatccaaggtaagaaagtaattgttgtcggtggtggtgacacaggtaacgattgtttaggtacatctgtaagacacggtgcagcatcagttttgaatttcgaattgttgcctgagccaccagtggaacgtgccaaagacaatccatggcctcaatggccgcgtgtcatgagagtggactacggtcatgctgaagtgaaagagcattatggtagagaccctcgtgaatactgcatcttgtccaaggaatttatcggtaacgatgagggtgaagtcactgccatcagaactgtgcgcgtagaatggaagaagtcacaaagtggcgtatggcaaatggtagaaattcccaacagtgaagagatctttgaagccgatatcattttgttgtctatgggtttcgtgggtcctgaattgatcaatggcaacgataacgaagttaagaagacaagacgtggtacgattgccacactcgacgactcctcatactctattgatggaggaaagacttttgcatgtggtgactgtagaagagggcaatctttgattgtctgggccatccaagaaggtagaaaatgtgctgcctctgtcgataagttcctaatggacggcactacgtatctaccaagtaatggtggtatcgttcaacgtgattacaaactattgaaagaattagctagtcaagtctaaaaagcttgagttattatttattttatgatcgtatattatttatttatttatttatttatttatttatttatttatttatttatttattttatttagtttattaattttgctgatgaatgttatttcaattaaacatagttttcaaagaactgaaaaaccctgatttcttcttcttcttcttcttcttctctttaccattgtcatctttcaaattaaacttatcttcatcatcatcgtttaagttatggttgatagtgttcctgcttgactttggagaaattatgtttccagcgccacctcttccaatagcaaatttttccggtgcgcttttgcccttgagcttattttaggcttcttgg

SEQ ID NO: 4674 - protein, 2144 aa, Saccharomyces cerevisiae
MPVLKSDNFDPLEEAYEGGTIQNYNDEHHLHKSWANVIPDKRGLYDPDYEHDACGVGFVANKHGEQSHKIVTDARYLLVNMTHRGAVSSDGNGDGAGILLGIPHEFMKREFKLDLDLDIPEMGKYAVGNVFFKKNEKNNKKNLIKCQKIFEDLAASFNLSVLGWRTSRRFYYLGDVALSREPTILQPLLVPLYDEKQPEFNETKFRTQLYLLRKEASLQIGLENWFYVCSLNNTTIVYKGQLTPAQVYNYYPDLTNAHFKSHMALVHSRFSTNTFPSWDRAQPLRWLAHNGEINTLRGNKNWMRSREGVMNSATFKDELDKLYPIIEEGGSDSAALDNVLELLTINGTLSLPEAVMMMVPEAYHKDMDSDLKAWYDWAACLMEPWDGPALLTFTDGRYCGAILDRNGLRPCRYYITSDDRVICASEVGVIPIENSLVVQKGKLKPGDLIPSDTQLGEMVDTKKLKSQISKRQDFKSWLSKVIKLDDLLSKTANLVPKEFISQDSLSLKVQSDPRLLANGYTFEQVTFLLTPMALTGKEALGSMGNDAPLACLNENPVLLYDYFRQLFAQVTNPPIDPIREANVMSLECYVGPQGNLLEMHSSQCDRLLLKSPILHWNEFQALKNIEAAYPSWSVAEIDITFDKSEGLLGYTDTIDKITKLASEAIDDGKKILIITDRKMGANRVSISSLIAISCIHHHLIRNKQRSQVALILETGEAREIHHFCVLLGYGCDGVYPYLAMETLVRMNREGLLRNVNNDNDTLEEGQILENYKHAIDAGILKVMSKMGISTLASYKGAQIFEALGLDNSIVDLCFTGTSSRIRGVTFEYLAQDAFSLHERGYPSRQTISKSVNLPESGEYHFRDGGYKHVNEPTAIASLQDTVRNKNDVSWQLYVKKEMEAIRDCTLRGLLELDFENSVSIPLEQVEPWTEIARRFASGAMSYGSISMEAHSTLAIAMNRLGAKSNCGEGGEDAERSAVQENGDTMRSAIKQVASARFGVTSYYLSDADEIQIKIAQGAKPGEGGELPAHKVSKDIAKTRHSTPNVGLISPPPHHDIYSIEDLKQLIYDLKCANPRAGISVKLVSEVGVGIVASGVAKAKADHILVSGHDGGTGAARWTSVKYAGLPWELGLAETHQTLVLNDLRRNVVVQTDGQLRTGFDIAVAVLLGAESFTLATVPLIAMGCVMLRRCHLNSCAVGIATQDPYLRSKFKGQPEHVINFFYYLIQDLRQIMAKLGFRTIDEMVGHSEKLKKRDDVNAKAINIDLSPILTPAHVIRPGVPTKFTKKQDHKLHTRLDNKLIDEAEVTLDRGLPVNIDASIINTDRALGSTLSYRVSKKFGEDGLPKDTVVVNIEGSAGQSFGAFLASGITFILNGDANDYVGKGLSGGIIVIKPPKDSKFKSDENVIVGNTCFYGATSGTAFISGSAGERFGVRNSGATIVVERIKGNNAFEYMTGGRAIVLSQMESLNAFSGATGGIAYCLTSDYDDFVGKINKDTVELESLCDPVEIAFVKNLIQEHWNYTQSDLAARILGNFNHYLKDFVKVIPTDYKKVLLKEKAEAAKAKAKATSEYLKKFRSNQEVDDEVNTLLIANQKAKEQEKKKSITISNKATLKEPKVVDLEDAVPDSKQLEKNSERIEKTRGFMIHKRRHETHRDPRTRVNDWKEFTNPITKKDAKYQTARCMDCGTPFCLSDTGCPLSNIIPKFNELLFKNQWKLALDKLLETNNFPEFTGRVCPAPCEGACTLGIIEDPLGIKSVERIIIDNAFKEGWIKPCPPSTRTGFTVGVIGSGPAGLACADMLNRAGHTVTVYERSDRCGGLLMYGIPNMKLDKAIVQRRIDLLSAEGIDFVTNTEIGKTISMDELKNKHNAVVYAIGSTIPRDLPIKGRELKNIDFAMQLLESNTKALLNKDLEIIREKIQGKKVIVVGGGDTGNDCLGTSVRHGAASVLNFELLPEPPVERAKDNPWPQWPRVMRVDYGHAEVKEHYGRDPREYCILSKEFIGNDEGEVTAIRTVRVEWKKSQSGVWQMVEIPNSEEIFEADIILLSMGFVGPELINGNDNEVKKTRRGTIATLDDSSYSIDGGKTFACGDCRRGQSLIVWAIQEGRKCAASVDKFLMDGTTYLPSNGGIVQRDYKLLKELASQV

SEQ ID NO: 4675 - DNA, 1449 bp, Azospirillum brasilense
  CDS (1)..(1449)
atggcgaaccagaggatgttgggcttcgtgcacaccgcgcagcggatgcccgacaaacgcccggccgcggagcgccgccaggatttcgccgagatctacgcccgcttctccgacgagcgcgccaacgagcaggccaaccgctgctcgcagtgcggcgttcccttctgccaggtgcactgcccggtctccaacaacatccccgactggttgaagctgacctccgaaggccggctggaggaggcgtacgaggtctcccaggccaccaacaacttcccggagatctgcggccgcatctgcccgcaggaccgcctgtgcgaaggcaactgcgtcatcgagcagtccacccacggcgccgtcaccatcgggtcggtggagaagtacatcaacgacaccgcctgggatcagggctgggtgaagccgcgcacgccgtcgcgcgagctgggcctgtcggtcggcgtcatcggcgccggtcccgccggcctcgccgccgccgaggaactgcgcgccaagggctacgaggtgcacgtctacgaccgctacgaccgcatgggcggcctgctggtctacggcatccccggcttcaagctggagaagtcggtggtcgagcgccgcgtgaagctgctggccgacgccggggtgatctaccacccgaacttcgaggtcggccgcgacgcctccctgccggagctgcgccgcaagcacgtcgccgtgctggtcgccacgggcgtctacaaggcgcgcgacatcaaggcgccgggctcgggcctgggcaacatcgtggcggcgttggactatctgaccacctccaacaaggtcagcctgggcgacacggtggaggcgtacgagaacggctccctgaacgccgcgggcaagcatgtggtggtgctgggcggcggcgacaccgccatggactgcgtgcgcacggccatccgccagggcgccacgtcggtcaagtgtctgtaccgccgcgaccgcaagaacatgccgggctcgcagcgcgaggtcgcccacgccgaggaagagggcgtggagttcatctggcaggccgcccccgaaggcttcaccggcgatacggtggtgaccggcgtgcgcgccgtgcgcatccatctgggtgtcgccgacgccaccggccgccagaccccgcaggtgatcgaggggtcggagttcaccgtccaggctgatctggtcatcaaggcgctcggcttcgagcccgaggacctgccgaacgccttcgacgagccggaactgaaggtgacccgctggggcacgctgctggtcgatcatcgcaccaagatgaccaacatggacggagtcttcgccgccggtgatatcgtgcgcggcgcctcgctggtggtgtgggccatccgcgacggccgcgacgcggccgagggcatccacgcctacgccaaggcgaaggccgaggcaccggttgccgtggcggctgaataa

SEQ ID NO: 4676 - protein, 482 aa, Azospirillum brasilense
MANQRMLGFVHTAQRMPDKRPAAERRQDFAEIYARFSDERANEQANRCSQCGVPFCQVHCPVSNNIPDWLKLTSEGRLEEAYEVSQATNNFPEICGRICPQDRLCEGNCVIEQSTHGAVTIGSVEKYINDTAWDQGWVKPRTPSRELGLSVGVIGAGPAGLAAAEELRAKGYEVHVYDRYDRMGGLLVYGIPGFKLEKSVVERRVKLLADAGVIYHPNFEVGRDASLPELRRKHVAVLVATGVYKARDIKAPGSGLGNIVAALDYLTTSNKVSLGDTVEAYENGSLNAAGKHVVVLGGGDTAMDCVRTAIRQGATSVKCLYRRDRKNMPGSQREVAHAEEEGVEFIWQAAPEGFTGDTVVTGVRAVRIHLGVADATGRQTPQVIEGSEFTVQADLVIKALGFEPEDLPNAFDEPELKVTRWGTLLVDHRTKMTNMDGVFAAGDIVRGASLVVWAIRDGRDAAEGIHAYAKAKAEAPVAVAAE

SEQ ID NO: 4677 - DNA, 27 bp, Artificial sequence
  Primer sequence
atgagtcagaatgtttatcaatttatc

SEQ ID NO: 4678 - DNA, 26 bp, Artificial sequence
  Primer sequence
ttaaacttccagccagttcataatac

SEQ ID NO: 4679 - DNA, 1434 bp, Escherichia coli K12
  CDS (1)..(1434)
atgcaggttttacatgtatgttcagagatgttcccgctgcttaaaaccggcggtctggctgatgttattggggcattacccgcagcacaaatcgcagacggcgttgacgctcgcgtactgttgcctgcatttcccgatattcgccgtggcgtgaccgatgcgcaggtagtatcccgtcgtgataccttcgccggacatatcacgctgttgttcggtcattacaacggggttggcatttacctgattgacgcgccgcatctctatgatcgtccgggaagcccgtatcacgataccaacttatttgcctataccgacaacgtattgcgttttgcgctgctggggtgggttggggcagaaatggccagcgggcttgacccattctggcgtcctgatgtggtgcatgcgcacgactggcatgcaggccttgcgcctgcgtatctggcggcgcgcgggcgtccggcgaagtcggtgtttactgtgcacaacctggcctatcaaggcatgttttatgcacatcacatgaatgacatccaattgccatggtcattctttaatattcatgggctggaattcaacggacaaatctctttcctgaaggccggtctgtactatgccgatcacattacggcggtcagtccaacctacgctcgcgagatcaccgaaccgcagtttgcctacggtatggaaggtctgttgcaacagcgtcaccgtgaagggcgtctttccggcgtactgaacggcgtggacgagaaaatctggagtccagagacggacttactgttggcctcgcgttacacccgcgatacgttggaagataaagcggaaaataagcgccagttacaaatcgcaatggggcttaaggttgacgataaagtgccgctttttgcagtggtgagccgtctgaccagccagaaaggtctcgacctggtgctggaagccttaccgggtcttctggagcagggcgggcagctggcgctactcggcgcgggcgatccggtgctgcaggaaggtttccttgcggcggcagcggaataccccggtcaggtgggcgttcagattggctatcacgaagcattttcgcatcgcattatgggcggcgcggacgtcattctggtgcccagccgttttgaaccgtgcggcttaacgcaactttatggattgaagtacggtacgctgccgttagtgcggcgcaccggtgggcttgctgatacggtttctgactgttctcttgagaaccttgcagatggcgtcgccagtgggtttgtctttgaagatagtaatgcctggtcgctgttacgggctattcgacgtgcttttgtactgtggtcccgtccttcactgtggcggtttgtgcaacgtcaggctatggcaatggattttagctggcaggtcgcggcgaagtcgtaccgtgagctttactatcgcttgaaatag

SEQ ID NO: 4680 - protein, 477 aa, Escherichia coli K12 [sequence omitted]

SEQ ID NO: 4681 - DNA, 1314 bp, Pyrococcus abyssi
  CDS (1)..(1314)
atgaaggtgttattgcttggatttgagtttcttccggttaaagtgggaggccttgctgaggcccttacggcgatatctgaggctttagcatccctcggtcatgaggttctggtatttacaccttcacatggaaggtttcagggtgaggaaataggtaagattagagtctttggggaagaagtccaggtaaaggtaagttacgaggagagagggaacctaaggatatatagaatagggggaggtcttctcgattccgaagatgtttacggcccaggatgggatggtttaattagaaaagctgtaacttttggaagggcaagtgttttgctattgaacgatcttcttagggaggaaccccttccagatgtcgttcacttccatgactggcatacggtatttgcgggggcattaataaagaagtacttcaagatccccgcggttttcacaatacatagactgaacaaatcaaaattgccggctttctacttccatgaagcgggattgtctgagttggctccttatccagatatagatccagagcacactgggggatacatagctgatatcgtgacaaccgtaagtaggggatacctaattgacgaatggggtttctttagaaacttcgagggcaaaataacttacgtcttcaatgggattgattgtagcttttggaacgagtcatatttaacgggaagtagggatgagaggaagaaatccctgctctcaaagtttggaatggacgaaggagtaacattcatgttcattggaaggttcgataggggccaaaagggcgttgatgttctattgaaggcaattgaaattctgtcatctaagaaagaattccaggaaatgagatttataataattggaaagggagatcctgaacttgaaggttgggctagaagccttgaggagaagcatggaaatgtgaaagttatcacggagatgctatcaagggaattcgttagggaactttacggctctgtggatttcgttattataccatcttactttgaaccattcggtttagtggctttagaggcaatgtgtttgggggcgatccctatagcttcagcagttggagggcttagggatatcataacgaacgaaacgggaatcctcgtgaaggctggcgatcctggagaattggcaaatgctatcttaaaggcccttgaactttctaggagcgatctaagtaaattcagggaaaactgcaaaaagagagcaatgtcattttcctgggaaaaatcggcggagagatacgtaaaagcatatacaggaagtatagatagggcgtttgacttcatcctatga

SEQ ID NO: 4682 - protein, 437 aa, Pyrococcus abyssi
MKVLLLGFEFLPVKVGGLAEALTAISEALASLGHEVLVFTPSHGRFQGEEIGKIRVFGEEVQVKVSYEERGNLRIYRIGGGLLDSEDVYGPGWDGLIRKAVTFGRASVLLLNDLLREEPLPDVVHFHDWHTVFAGALIKKYFKIPAVFTIHRLNKSKLPAFYFHEAGLSELAPYPDIDPEHTGGYIADIVTTVSRGYLIDEWGFFRNFEGKITYVFNGIDCSFWNESYLTGSRDERKKSLLSKFGMDEGVTFMFIGRFDRGQKGVDVLLKAIEILSSKKEFQEMRFIIIGKGDPELEGWARSLEEKHGNVKVITEMLSREFVRELYGSVDFVIIPSYFEPFGLVALEAMCLGAIPIASAVGGLRDIITNETGILVKAGDPGELANAILKALELSRSDLSKFRENCKKRAMSFSWEKSAERYVKAYTGSIDRAFDFIL

SEQ ID NO: 4683 - DNA, 1425 bp, Chlamydia muridarum, Chlamydia trachomatis MoPn
  CDS (1)..(1425)
atgaaaattactcacacagctatcgaatttgctccggtaatcaaagccggtggcttaggagacgcactatacggactagcaaaagctttagccgtcaatcatacaacagaagtcgttatccctttatatcccaaattattcacttcgctccacgagcaggatcttttcgcaactcaaaaaatcccttatttttttgccggagaacaagaagcaacagccttctcttatttttatgaaggaatcaaagtaactctactcaaattagactcgcagccagaactatttgaagaagcagaaacgatctatacaaacgatgatgcttttcgtttttgtgctttttctgctgctgctgctgcttacattcaaaaagaaggagcagacattgttcacctgcatgattggcatgttggattagtcgcagggttactcaaacaacagccttgcccccagctacaaaaaatcgtgcttaccttacataattttggctatcggggatatacaacacgagaagtattagaagcgtcttctttgaacgaattttacttgagccactatcaactatttcgcgatccacaaacctgcgtcttattaaaaggagctttatactgttcggactttgtgactacagtttctcctacatatgccaaagaaatccttcaagactattcggactatgaaattcatgacgccattaccgctagacaacatcatcttaaagggatcctgaatggaatagactatacgattttggaccctgaaacagacccccatttagctaagaactatagtaaagtccttttcgaggatcctaaagctttcttcgaagcaaaagcggaaaataaaaaagctctgtacgaaacgttaggactgtctttagacaaatccccctgcatgtgcatcatttctagaattgctgagcaaaaaggcccagaatttatgaagcaagcaattcttcatgcactagaaaacgcctataccctgatcattataggcacctgctatggaggccagatacataaagaattttctaatcttcaagaatctttagcagactcccctaacgtgcggattcttttaacctatagcgatgtactagcacggcaaatttttgctgcagcagatatgatctgcattccctctatgtttgaaccatgcggactcacccaaatgattggcatgcgctatgggaccgtccccgtagtaagagctacaggaggtctggctgacaccgtaacagatggagtaaatggattctctttctctaaccctcatgatttccacgagtttcgaaatatgctttcaaaagcgattgccacctaccgagacgaccaagataagtggcaacagattgttcgctcttgcttagagttttcttcggacttagaaactgcagccaataaatatttagaaatttatcaacaataa

SEQ ID NO: 4684 - protein, 474 aa, Chlamydia muridarum, Chlamydia trachomatis MoPn
MKITHTAIEFAPVIKAGGLGDALYGLAKALAVNHTTEVVIPLYPKLFTSLHEQDLFATQKIPYFFAGEQEATAFSYFYEGIKVTLLKLDSQPELFEEAETIYTNDDAFRFCAFSAAAAAYIQKEGADIVHLHDWHVGLVAGLLKQQPCPQLQKIVLTLHNFGYRGYTTREVLEASSLNEFYLSHYQLFRDPQTCVLLKGALYCSDFVTTVSPTYAKEILQDYSDYEIHDAITARQHHLKGILNGIDYTILDPETDPHLAKNYSKVLFEDPKAFFEAKAENKKALYETLGLSLDKSPCMCIISRIAEQKGPEFMKQAILHALENAYTLIIIGTCYGGQIHKEFSNLQESLADSPNVRILLTYSDVLARQIFAAADMICIPSMFEPCGLTQMIGMRYGTVPVVRATGGLADTVTDGVNGFSFSNPHDFHEFRNMLSKAIATYRDDQDKWQQIVRSCLEFSSDLETAANKYLEIYQQ

SEQ ID NO: 4685 - DNA, 1434 bp, Clostridium acetobutylicum
  CDS (1)..(1434)
atgaaaattttatttgcttcttctgaaagttatccttttataaaaacaggtgggcttggtgatgtatcctatgcccttcctaaagctttaagaaaaataggaattgatgcaagagtaataattccaaaatattcagatatacctgaatactttagatataatactcaccatattgcaagttttggtgttccagttggctggaggagtcagtatggaggccttgaatactatgaatacgatggagttcctttttacttcatagataacgactactatttcaaaagatctggactttatggatactatgatgatggagaacgcttcgcctatttttcaagaggagtacttcaagccataacttatatgcaggactttaatccagatattattcaatgcaacgattggcaaacagcgataatacctgttcttcttaaagatcattatcgaaattacagaaactataatcatataaaaactatatttacaatacacaatctaaaatatcaaggtgtttttggaaaatcagtacttggagagcttttgtgtttaaatgaaggctattataacgaaaatgcattaaagttttacgatggtatttcctttatgaaaggcggtattttattttcagataaactttcaactgtaagcagaacttatgctgaagaaattaaagacccttattatggagaacatcttgatggcttacttagaagtcgttcttatgacttatggggtattgtaaatggaattgattacgatatattaaatcctgaaacagacaaagacttgttttttaattttgattcttcaaccttgtataataaaacaaaaaataaaatagagcttcaaaaaatgctgaatttacctgtgtcagaaaatataccaatgataggtatagtctctagacttgtaagtcaaaaaggtttagatttaatttcctgcgttttagaagacttacttcaagatggaatacaacttgtagtacttggtactggtgatgctaaatatgaaaatatgtttaaatatttcgcatggaagtacccaaataaactatctgcaaatattcaattcaataacagcttagctcaaaaaatatatggtgcatccgatatgttcttaatgccttcaaaattcgaaccttgtggtataggacaattaatagctcttagatacggtagtctccctatagtacgtgagacaggaggtcttaaagacactgtaagaccttttaatccaataacaggtgaaggaaatggtttctcttttaccaattataatgcacatgatatgctgcatgttataagaaatgcagaatatttctattacaacgaaaaatacaattggaataagcttgtacaaactgcaatgaatgatgataacagttggagtaaatcagcagaaatttacagaaatttgtacatgtcagtactttaa

SEQ ID NO: 4686 - protein, 477 aa, Clostridium acetobutylicum
MKILFASSESYPFIKTGGLGDVSYALPKALRKIGIDARVIIPKYSDIPEYFRYNTHHIASFGVPVGWRSQYGGLEYYEYDGVPFYFIDNDYYFKRSGLYGYYDDGERFAYFSRGVLQAITYMQDFNPDIIQCNDWQTAIIPVLLKDHYRNYRNYNHIKTIFTIHNLKYQGVFGKSVLGELLCLNEGYYNENALKFYDGISFMKGGILFSDKLSTVSRTYAEEIKDPYYGEHLDGLLRSRSYDLWGIVNGIDYDILNPETDKDLFFNFDSSTLYNKTKNKIELQKMLNLPVSENIPMIGIVSRLVSQKGLDLISCVLEDLLQDGIQLVVLGTGDAKYENMFKYFAWKYPNKLSANIQFNNSLAQKIYGASDMFLMPSKFEPCGIGQLIALRYGSLPIVRETGGLKDTVRPFNPITGEGNGFSFTNYNAHDMLHVIRNAEYFYYNEKYNWNKLVQTAMNDDNSWSKSAEIYRNLYMSVL

SEQ ID NO: 4687 - DNA, 1431 bp, Yersinia pestis
  CDS (1)..(1431)
atgagggttttacatgtatgttctgagctgttccctttactaaaaacaggcgggttggctgatgttatcggtgctttacccgcagctcagcttgccgagggggctgatgtgcggatcatcttgcccgccttcccggatttgcgtagagggatccctgagaccgtactggtcagggagattgacacttttgcggggcgggtagcattacgctatggccattatcgggggattggcatttatctgattgatgcgccagcgctctatgatcgtgcgggtagcccttatcacgatgcttctttatatgcctatagcgataactatctacgctttgccttgctgggatggatggcgtgcgaactggcttgtggcctggacggttactggcgtccagaggttgtccatgcccatgattggcacgcgggattaacctgtgcttatctggctgcgcgtgggcggcctgcacgatcggtgtttaccgtccataatttggcttatcaggggctattttctgcagatcacttatctgaattacacctgcccgctgagtttttccagatctatgggctggagttttacgggcagatctcttatctgaaagccgggttgttctttgccgaccatgtcacgaccgtcagcccgacctatgcaaaagagatcactcagcctgcttttggctatggcatggaggggttgctacaagcattggcgcgtcaaggccggttgacggggatcctgaacggggtcgacagtgatatttgggatccgcagagcgataccttgctacctactcgttatgatgcggagaacctgcaagcaaaggccatcaataaaacacatttgcaaacggctatgggtttgcaactggcagaaaataaacccatttttgctgttgtcagtcgattgaccgtccagaaagggttggatctggtattggaagcactgcccgaattactggcactgggggggcagttggtcgtcttggggagcggagatgccacgctgcaagaggcatttctagccgccgcagcagagcattctggccaggttggggtgcaaataggttatcacgaggcattctctcatcgaattattgccgggtcggatgtcattctggtgcccagccgctttgaaccctgtgggctaacacagttgtatgggttgaaatatggcacgttgccgctggtgcgacataccggtgggctggctgataccgtggtggattgcgcgttggaaaacctggctgacggcagcgcttcgggatttgtattcaatgaatgtgaggcgcaagccttagtgaaggcgatacgccgtgcctttgtactgtggagcaggccgaagcattggcgtcacgtccagcgccatgcgatgaggctcgactttggttggcaacttgccgccgtagattatttgtcactttatcgacgtctgtaa

SEQ ID NO: 4688 - protein, 476 aa, Yersinia pestis
MRVLHVCSELFPLLKTGGLADVIGALPAAQLAEGADVRIILPAFPDLRRGIPETVLVREIDTFAGRVALRYGHYRGIGIYLIDAPALYDRAGSPYHDASLYAYSDNYLRFALLGWMACELACGLDGYWRPEVVHAHDWHAGLTCAYLAARGRPARSVFTVHNLAYQGLFSADHLSELHLPAEFFQIYGLEFYGQISYLKAGLFFADHVTTVSPTYAKEITQPAFGYGMEGLLQALARQGRLTGILNGVDSDIWDPQSDTLLPTRYDAENLQAKAINKTHLQTAMGLQLAENKPIFAVVSRLTVQKGLDLVLEALPELLALGGQLVVLGSGDATLQEAFLAAAAEHSGQVGVQIGYHEAFSHRIIAGSDVILVPSRFEPCGLTQLYGLKYGTLPLVRHTGGLADTVVDCALENLADGSASGFVFNECEAQALVKAIRRAFVLWSRPKHWRHVQRHAMRLDFGWQLAAVDYLSLYRRL

SEQ ID NO: 4689 - DNA, 1443 bp, Agrobacterium tumefaciens
  CDS (1)..(1443)
atgaatgtcctttcggtttcatccgaaatttatcccctgatcaagaccggagggctcgccgacgttgtcggcgcgctccccatcgcgctcgaagcccatggcgtcagaacgcggacattgatacccggctatccggcggtgaaagccgccgtgacggaccccgtcaaatgttttgagttcaccgacctgcttggcgaaaaggccgatctgctcgaagtccaacacgagaggctagaccttttgatcctcgacgcgcccgcctattacgagcgttccggcggcccctatctcggccagaccggcaaggattatcctgataactggaagcgttttgcggcgctgtcactggcggcggcgcggatcggcgccggtgtgctccccggctggcggccggatatggtgcacgcgcatgactggcaggccgccatgacgcctgtctatatgcgttacgccgaaacaccggaaattccgagccttctcaccatccacaacattgcctttcagggccagttcggcgcaaacatcttcagcaaacttgccctgcccgcccacgccttcggcatggagggcatcgaatattacaacgacgtcagcttcctcaagggcggcttgcagacggcaaccgcgctcagcacggtcagcccatcctatgcggaagaaatcctgaccgcggaattcggcatggggcttgaaggggtgatcggcagccgcgcccatgtgctgcacggcatcgtcaacggcatcgacgccgatgtctggaacccggccaccgaccatctgatccacgacaattattccgccgccaatctcaagaaccgtgccctgaacaagaaggcggtcgccgaacatttccgtatcgatgatgatggcagcccgctattctgcgtcatctcccgcctcacctggcagaagggcatcgacctcatggcggaagccgtggatgagatcgtttccctcggcggccgcctggtcgtgctgggcgcgggcgatgtggcactggaaggcgcgcttcttgcggcggcatcccgccaccatggacgcgtcggtgttgccatcggttacaacgagccgctgtcgcatctcatgcaggcgggttgcgacgcgatcatcattccctctcgcttcgagccctgcggcctgacccagctttacgcgttgcgttacggctgcattccggtcgtcgcccgcaccggcggccttgccgacaccgtgattgacgccaaccatgccgccctcgccagcaaggcggcaactggcgtacaattttcacccgtcacacttgacggtctgaaacaggcgatccgccggaccgtccgttattatcacgacccgaaactgtggacacaaatgcagaaactcggaatgaaatccgatgtttcctgggaaaaaagcgccggtctctacgccgcgctttatagccagcttatttcgaaaggccattga

SEQ ID NO: 4690 - protein, 480 aa, Agrobacterium tumefaciens
MNVLSVSSEIYPLIKTGGLADVVGALPIALEAHGVRTRTLIPGYPAVKAAVTDPVKCFEFTDLLGEKADLLEVQHERLDLLILDAPAYYERSGGPYLGQTGKDYPDNWKRFAALSLAAARIGAGVLPGWRPDMVHAHDWQAAMTPVYMRYAETPEIPSLLTIHNIAFQGQFGANIFSKLALPAHAFGMEGIEYYNDVSFLKGGLQTATALSTVSPSYAEEILTAEFGMGLEGVIGSRAHVLHGIVNGIDADVWNPATDHLIHDNYSAANLKNRALNKKAVAEHFRIDDDGSPLFCVISRLTWQKGIDLMAEAVDEIVSLGGRLVVLGAGDVALEGALLAAASRHHGRVGVAIGYNEPLSHLMQAGCDAIIIPSRFEPCGLTQLYALRYGCIPVVARTGGLADTVIDANHAALASKAATGVQFSPVTLDGLKQAIRRTVRYYHDPKLWTQMQKLGMKSDVSWEKSAGLYAALYSQLISKGH

SEQ ID NO: 4691 - DNA, 1479 bp, Nostoc sp. PCC 7120
  CDS (1)..(1479)
atgtacattgtacagattgcctcggaatgcgctcctgtaattaaggcagggggtttaggggatgtcgtttacggattgagtcgagaattagagattcggggcaattgcgtcgagctaattctgcctaagtatgattgtatgcgctacgaccatgtttggggactgcacgaggcttacttaaacttgtgggttccctggtttggtgcagcaattcactgtactgtctactgcggttgggtacatgggcgagtatgttttttcattgaaccccattccgaggacaatttctttaatcggggctgctattacggttgtgatgatgatgatatgcgctttgccttttttagcaaagccgctttagaatttctccatcaaagcaataagcgccctgatattatccattgtcatgattggcaaacaggcttaattcctgtcatgctctatgagatctacaagtatcatggcatggacacccaacgggtttgctacaccatccacaactttaaacatcaaggaattggtggtgtcaaaactctctgggcgacagggttaaacagagaagcttattacttccaagatgacaagctaagggatgaccataacccctttgcattgaattacatgaaaggcggtatagtctactcgaacgctgtcaccacagtttcaccaaaccacgccttagaagcacaatatacagacgttggttgtggcttaggtcatactttgtatctacacaaagaaaaatttagcggggttctcaacggtattgattacgatttttggaatccagaaattgaccgtcacatccccgataactacagccaagacgattttgaacaaaaactatataacaaaaaagctttgcgtgagcgcttgttgttgcaagctgctgataaaccaatcattgcttacatcgggcgtttagataatcaaaaaggcgtgcatcttgtccaccatgccatttatcatgccttgaataaaggagcgcaatttgtattattgggttcagcaacagaagcaggaatcaatgctcattttcgtcatgaaaaacagtttttaaatagcaatcctgatgtccatttagaattgggctttaacgaagagttgtctcatctgatttatgccggggctgatatgattgttgttcccagcaattatgaaccctgcggtttaacgcaaatgattggtttgaagtatggtactgttcccattgtgcgcggtgttggtggactggtaaatacagtatttgaccgagattacgatcaaaatttaccaccagaaaaacgcaatggttatgtattttatcaatctgataaccaagctttagagtcagcaatgaatcgggcaattgatttgtggtatcagtctcctgaacagttccaacaattagcgattcagggaatgaaatatgactactcatggaataatccaggcacggaatatttaaatatttacgaatggattaagtacaaatggtag

SEQ ID NO: 4692 - protein, 492 aa, Nostoc sp. PCC 7120
MYIVQIASECAPVIKAGGLGDVVYGLSRELEIRGNCVELILPKYDCMRYDHVWGLHEAYLNLWVPWFGAAIHCTVYCGWVHGRVCFFIEPHSEDNFFNRGCYYGCDDDDMRFAFFSKAALEFLHQSNKRPDIIHCHDWQTGLIPVMLYEIYKYHGMDTQRVCYTIHNFKHQGIGGVKTLWATGLNREAYYFQDDKLRDDHNPFALNYMKGGIVYSNAVTTVSPNHALEAQYTDVGCGLGHTLYLHKEKFSGVLNGIDYDFWNPEIDRHIPDNYSQDDFEQKLYNKKALRERLLLQAADKPIIAYIGRLDNQKGVHLVHHAIYHALNKGAQFVLLGSATEAGINAHFRHEKQFLNSNPDVHLELGFNEELSHLIYAGADMIVVPSNYEPCGLTQMIGLKYGTVPIVRGVGGLVNTVFDRDYDQNLPPEKRNGYVFYQSDNQALESAMNRAIDLWYQSPEQFQQLAIQGMKYDYSWNNPGTEYLNIYEWIKYKW

SEQ ID NO: 4693 - DNA, 1419 bp, Nostoc sp. PCC 7120
  CDS (1)..(1419)
atgcggattctatttgtggcagcagaagcagcacccattgcaaaagtaggagggatgggtgatgttgtcggtgcattacctaaggtcttgagaaaaatggggcatgatgtacgtatcttcttgccctattacggctttttgccagacaaaatggagattcccaaagatccaatatggaagggatacgccatgtttcaggactttacagttcacgaagcagttctgcctggtactgatgttcccttgtatttatttggacatccagcctttaccccccggcggatttattcgggagatgatgaagactggcgcttcaccttgttttccaatggtgcggctgagttttgctggaattactggaaacccgacattattcactgtcatgattggcacacgggcatgattcctgtgtggatgaaccaatcaccagatatcaccacagtcttcactatccacaatctggcttaccaagggccttggcgttggtatttagataaaattacttggtgtccttggtatatgcagggacacaacacaatggcggcggctgtccagtttgcggacagggtaaatacagtttctcccacatacgccgagcaaatcaagaccccggcttacggtgagaaaatagaaggtttgctgtctttcatcagtggtaaattatctgggattgttaacggtatagatacggaagtttacgacccagctaatgataaatatattgctcaaacgttcactgccgatactttagataaacgcaaagccaacaaaattgctttacaagaagaagtaggattagaagttaacagcaatgcctttttaattggcatggtgacaaggttagtcgagcagaagggcttagatttagtcatccaaatgctcgatcgctttatggcttatactgatgctcagttcgtcttgttgggaacaggcgatcgctactacgaaacccaaatgtggcaattagcatcccgctaccccggtcgtatggctacttacctcctgtataacgatgccctatctcgccgcatctacgctggtactgatgcctttttgatgcccagtcgctttgaaccatgcggtattagtcaaatgatggctttacgctacggttccattcccatcgtccgccgcactggaggcttggttgacaccgtatcccaccacgaccccatcaacgaagcaggtacaggctactgcttcgaccgctacgaacccctcgacttatttacctgcatgattcgcgcctgggaaggcttccgctacaaaccacaatggcaagaactacaaaaacgcggtatgagtcaagacttcagctggtacaaatccgctaaggaatacgacaaactctatcgctcaatgtacggtttgccagacccagaagagacacagccggagttaattctgacaaatcagtag

SEQ ID NO: 4694 - protein, 472 aa, Nostoc sp. PCC 7120
MRILFVAAEAAPIAKVGGMGDVVGALPKVLRKMGHDVRIFLPYYGFLPDKMEIPKDPIWKGYAMFQDFTVHEAVLPGTDVPLYLFGHPAFTPRRIYSGDDEDWRFTLFSNGAAEFCWNYWKPDIIHCHDWHTGMIPVWMNQSPDITTVFTIHNLAYQGPWRWYLDKITWCPWYMQGHNTMAAAVQFADRVNTVSPTYAEQIKTPAYGEKIEGLLSFISGKLSGIVNGIDTEVYDPANDKYIAQTFTADTLDKRKANKIALQEEVGLEVNSNAFLIGMVTRLVEQKGLDLVIQMLDRFMAYTDAQFVLLGTGDRYYETQMWQLASRYPGRMATYLLYNDALSRRIYAGTDAFLMPSRFEPCGISQMMALRYGSIPIVRRTGGLVDTVSHHDPINEAGTGYCFDRYEPLDLFTCMIRAWEGFRYKPQWQELQKRGMSQDFSWYKSAKEYDKLYRSMYGLPDPEETQPELILTNQ

SEQ ID NO: 4695 - DNA, 1431 bp, Haemophilus influenzae
  CDS (1)..(1431)
atgaaaatactacacgtttgttcggaactctatccgctcttaaaaacaggcgggcttgccgatgttttaggggcattaccccaagcacagaaccaaattgggctagatgcccgctttttattgcctgcttatcctgcaattacaacaggtattccgaatactcaagtggttgctgaatttgacaacttcgctgggcacgtggtgttgcgttatggagaatataatggtgtcgggatctatttgattgacgctccgcacttatacggtcgcgaaggcaatccttatcatgatgcctattacaatgactacggcgacaactacaaacgttttgccttgctcggttgggtgggggcagaattagccacaggtttagatagctggtggcgtgcagaagtggtacacgcccacgattggcacgcaggtttgtgtgtagcatatctgttcaacaaaggcaagccagcaaaatcggtgttcactattcataacttggcgtatcaaggtcagttttcttatcatcatttgtatgaaatcggcttgccaacaggaatgttccacgtagaaggcttggaattatttgggcagatttcttacttgaaatcaggcttgttctattccgatgcaagtacggcggtaagtccaacttatgcccaagaaatcacgacaccagaatttgcctacggtttgcaaggcttgctttctggcttaaaagctcaaggtcgtttggtggggatattaaacggcgtggacgaaaatatttggcatccgaacgtggatcaatacatcccacaccattacaagctgaaatatatggcaggtaaaaagaaaaacaaagctgaactgcaagcctatttcaatttgccacaagatgaatctgctttggcatttgtgatggttacccgtttaaccgagcaaaaaggtgttgatttattaatcgaaagtgcagacgaaatcgtcaaacaaggcgggcagttgatgattttaggttcaggtgcaccgcacttggaacaaggtattcgtgagcttgctgaacgttatccacaaaatattgcggtaaaaatcggctatgatgaagccctttcgcatttaatggtggcaggtggtgatgtgattttagtgccaagccgtttcgagccttgtggcttaacccaactttatggtttgcaatatggcacactgccacttgttcgtaaaacaggtggtttggcagatacggtggtggatagcacttcagaaagcatcaaagctcgcaccgcaacaggttttgtgtttgaaagtgcaacgcctgaagctctccgccattgcttgcaacgtgcctttgccttatggcaaaaaccgcgtgcgtgggcgatggttcgcaccgatgcaatggaacaagacttcagctggcgtaaggctgcagagcaatatagaacactttatgaacgcttgtag

SEQ ID NO: 4696 - protein, 476 aa, Haemophilus influenzae
MKILHVCSELYPLLKTGGLADVLGALPQAQNQIGLDARFLLPAYPAITTGIPNTQVVAEFDNFAGHVVLRYGEYNGVGIYLIDAPHLYGREGNPYHDAYYNDYGDNYKRFALLGWVGAELATGLDSWWRAEVVHAHDWHAGLCVAYLFNKGKPAKSVFTIHNLAYQGQFSYHHLYEIGLPTGMFHVEGLELFGQISYLKSGLFYSDASTAVSPTYAQEITTPEFAYGLQGLLSGLKAQGRLVGILNGVDENIWHPNVDQYIPHHYKLKYMAGKKKNKAELQAYFNLPQDESALAFVMVTRLTEQKGVDLLIESADEIVKQGGQLMILGSGAPHLEQGIRELAERYPQNIAVKIGYDEALSHLMVAGGDVILVPSRFEPCGLTQLYGLQYGTLPLVRKTGGLADTVVDSTSESIKARTATGFVFESATPEALRHCLQRAFALWQKPRAWAMVRTDAMEQDFSWRKAAEQYRTLYERL

SEQ ID NO: 4697 - DNA, 1392 bp, Aquifex aeolicus
  CDS (1)..(1392)
atgagggttttattctgctcaagtgagatttacccttacgcaaaaacggggggactggctgatttttccttttgcttgataaagtatctgaaaaagtacggcgttaaagtcaagggagttatgccctactacaaaactttaaaggcggaaaacctgagaaaaacggataaaggagttactctaaatctcaacggaaaagattacacctttgaggtttacgagagtgaggactgttacttcctgagaaatgacgagctctttgggagggattacatttacggtcctccgggatgggggtatgaggacaacgatatcaggttcgggggatttagcagggctgtttcggagctgataagtactggacagctggaggcggatgtagttcacgcaaacgactggcaaaccgcgcttattcccctttttctgaaggaggtttttaaaactcccgtaaagactgtgtttaccatacacaacttagcttatcagggactatttccaaaggaaacagtagaaagggttggcatccccccttacctgtttcacatggaagcggtagagttttggggactcgtcaacttcatgaaagggggtatagtgttttcagacctgataactaccgtcagcccgacttacgccaaggaaatacaaactcaagaatacggttacggacttgagggagttcttaaaaaatactcttacaaattaaggggaattttaaacggaattgattacgaagtctggaatcctgagaaagataaatacatttaccagaattactccctgaggaattactccaaaaagttcaagaataaggaatttctgtcaaaggaactcggaattgaggctgaaaaaccattaatttccttcataaacaggtttacccatcagaagggtgttgaacttatacttaactgcgcggaagagatgtctaaactcaacgcgaactttgtattcttgggaacgggtgagtacgaaaacgcctttcttgatgtgagtaaaatctacaaaaactttaaagtgtttgccgaatttaacgaaggttttgcgaggaaactttacgcctcttcggacttcatactcatgccctcgtactttgagccctgcggactcactcagatgataggcatgaggtacggatgcgttcccatagtgagaaaaacgggaggccttagggacacggtaaaggacatttcagaaggcgggtacgggatcacctttgaagaaccatcaaaagagactttcctttgttcacttaaaagggccattgaactttacgaaaatgcgaagaagttcagaaattccgttaagatagtgatgagccttgacttttcctgcgataggatgacaaaagaatacatagagtgctatgaagaagttcagtctcatcagtga

SEQ ID NO: 4698 - protein, 463 aa, Aquifex aeolicus
MRVLFCSSEIYPYAKTGGLADFSFCLIKYLKKYGVKVKGVMPYYKTLKAENLRKTDKGVTLNLNGKDYTFEVYESEDCYFLRNDELFGRDYIYGPPGWGYEDNDIRFGGFSRAVSELISTGQLEADVVHANDWQTALIPLFLKEVFKTPVKTVFTIHNLAYQGLFPKETVERVGIPPYLFHMEAVEFWGLVNFMKGGIVFSDLITTVSPTYAKEIQTQEYGYGLEGVLKKYSYKLRGILNGIDYEVWNPEKDKYIYQNYSLRNYSKKFKNKEFLSKELGIEAEKPLISFINRFTHQKGVELILNCAEEMSKLNANFVFLGTGEYENAFLDVSKIYKNFKVFAEFNEGFARKLYASSDFILMPSYFEPCGLTQMIGMRYGCVPIVRKTGGLRDTVKDISEGGYGITFEEPSKETFLCSLKRAIELYENAKKFRNSVKIVMSLDFSCDRMTKEYIECYEEVQSHQ

SEQ ID NO: 4699 - DNA, 1371 bp, Pyrococcus horikoshii
  CDS (1)..(1371)
atgaggatgaactctcaatggggttttaaaatgaagatactcatcatggggtttgaatatctccctgtaaaagtgggaggcttggctgaagctttaacttccattgcagaagccctcgcctctttaggacatgaagtcctagtcttcacgccttcccatggaaggtttcagggttcagaaattgggattataaaagcttttggggggaaagttgccatcaaagttcacttggaggagaatggaaatttgaggatctatagaattggcggggggttgttagatcatcaagacgtatacggcccaggatgggagggtttgataaggaaaaccgttatatttgggaaagctagcgttctcttgctgaatgaactcttaaagagtgaagaccttcccgatgttctccacttccatgactggcacaccgtatttgctggagctttaattaaaaagtactttaggattccagcggtattcacaatccataggcttaacaagtcgaagatcccagcattttatttccatgaagcgggattacctgagctcgctccttatccggatctagaccctgagcacactggaggttacatagctgacatagtgacaacggttagtagggggtacctcctggatgagtgggacttctttaggaacttcaatggaaaggtaacctacgttttcaatggaatagattgtagtttttggaatgagaattatctaaagggttccaggaaggaaagaaggagctccatacttgcgaaatttggaatgagtgatgggataactttcatgttcataggaaggtttgatagaaggcagaagggagttgatactttgctcagggccatagagcttctatccgagagacctgagtttaaggaaatgagatttatcatcattggaatgggggatccagagttggaaaactgggccagggaattagaaaagaggtatgacaacgttagggtattaacggaaatgctcagcagagaattcgtgagagaactctatggttcggtagacttcgtaataatcccttcatattttgaaccatttggactagtttccctagaggcgatgtgtctcggggccattcccatagcttcatcagttggtggacttagggatgtcattgtgagtatagatgaagatcacgttgatggtaccggattactagtaaaacctggagacccatgggatctagctaatgcaattcttaggatgcacagtatcgcaatggataatgagtttgtggagaaattaagggataactgcaagaaaagagcaaagtcattttcctgggagaattcggcaaaaaggtatttaagggcatataaagggaatatcgacaggatttttgactttgcaatgtga

SEQ ID NO: 4700 - protein, 456 aa, Pyrococcus horikoshii
MRMNSQWGFKMKILIMGFEYLPVKVGGLAEALTSIAEALASLGHEVLVFTPSHGRFQGSEIGIIKAFGGKVAIKVHLEENGNLRIYRIGGGLLDHQDVYGPGWEGLIRKTVIFGKASVLLLNELLKSEDLPDVLHFHDWHTVFAGALIKKYFRIPAVFTIHRLNKSKIPAFYFHEAGLPELAPYPDLDPEHTGGYIADIVTTVSRGYLLDEWDFFRNFNGKVTYVFNGIDCSFWNENYLKGSRKERRSSILAKFGMSDGITFMFIGRFDRRQKGVDTLLRAIELLSERPEFKEMRFIIIGMGDPELENWARELEKRYDNVRVLTEMLSREFVRELYGSVDFVIIPSYFEPFGLVSLEAMCLGAIPIASSVGGLRDVIVSIDEDHVDGTGLLVKPGDPWDLANAILRMHSIAMDNEFVEKLRDNCKKRAKSFSWENSAKRYLRAYKGNIDRIFDFAM

SEQ ID NO: 4701 - DNA, 1431 bp, Chlamydophila pneumoniae, Chlamydia pneumoniae
  CDS (1)..(1431)
atgagaatcgtacaagtcgctgtagaattcactccaatcgttaaagtaggcggtctaggcgatgctgtagctagtctatctaaggagttagcgaaacaaaatgatgtggaagtacttctccctcattatcctttaatttccaaattctcttcgtctcaagttctttccgagcgttctttctattatgaatttttaggcaagcagcaagcctctgcaatttcttattcttacgagggtcttacgcttactataattacgttggattcacaaatagagcttttctcaaccacgtccgtgtactctgagaataatgttgtacgtttctctgcttttgcagctgcagctgcagcttatcttcaagaagcggatcctgctgacattgtgcacttgcatgactggcatgtaggtttacttgcgggtttattaaaaaaccctttaaaccctgtgcattcgaagattgtctttactatccataattttggttatcgagggtattgtagtacgcagctattagcagcgtcgcaaattgatgattttcatttgagtcactaccaactatttcgcgatccgcaaacttctgttctaatgaagggagctctctattgttcggattacattacgacagtgtctcttacttatgtgcaggaaattataaacgactattctgattacgaacttcatgatgcgattctagcaagaaattctgtattttctgggatcatcaatggcattgatgaagacgtttggaacccgaagacagatcctgctttagctgtacagtacgatgcaagcctattaagcgaacctgacgttctctttactaaaaaagaagagaacagagcggtattatatgagaagttggggatcagttcagactattttcctttgatttgtgtgatctcacgcattgttgaggaaaagggtcctgaatttatgaaagagattattctccatgctatggagcacagttatgcctttatcttgattgggacaagtcaaaatgaggttcttcttaatgagttccgtaacttacaagattgtttagcgagctcccccaacattcgtttgatcttggactttaatgatcctttagccaggctaacttatgctgctgccgatatgatctgcatcccttcacatagggaggcttgtggacttacccagctgatagcgatgcgttatggcacagttcctttagttcgtaaaactggagggcttgctgatacagtgattcctggggtaaatggtttcactttctttgatacaaacaattttaatgaatttcgggctatgcttagcaacgctgtaacgacgtatcgtcaggagcctgacgtttggttgaatttgattgagtcgggaatgcttcgggcctctggcttagatgccatggctaagcattacgtaaatctttatcaatctttactctcatga

SEQ ID NO: 4702 - protein, 476 aa, Chlamydophila pneumoniae, Chlamydia pneumoniae
MRIVQVAVEFTPIVKVGGLGDAVASLSKELAKQNDVEVLLPHYPLISKFSSSQVLSERSFYYEFLGKQQASAISYSYEGLTLTIITLDSQIELFSTTSVYSENNVVRFSAFAAAAAAYLQEADPADIVHLHDWHVGLLAGLLKNPLNPVHSKIVFTIHNFGYRGYCSTQLLAASQIDDFHLSHYQLFRDPQTSVLMKGALYCSDYITTVSLTYVQEIINDYSDYELHDAILARNSVFSGIINGIDEDVWNPKTDPALAVQYDASLLSEPDVLFTKKEENRAVLYEKLGISSDYFPLICVISRIVEEKGPEFMKEIILHAMEHSYAFILIGTSQNEVLLNEFRNLQDCLASSPNIRLILDFNDPLARLTYAAADMICIPSHREACGLTQLIAMRYGTVPLVRKTGGLADTVIPGVNGFTFFDTNNFNEFRAMLSNAVTTYRQEPDVWLNLIESGMLRASGLDAMAKHYVNLYQSLLS

SEQ ID NO: 4703 - DNA, 1452 bp, Lactococcus lactis subsp. lactis
  CDS (1)..(1452)
atgaaagagagaaaaatgaaagttttatttgcatcgagtgaatgtgcccccttttttaagacgggaggacttggagatgtagctggagcactgcccaaagaattggctaaaaaaagtgaaatagattcagttgctgtgatccttccttattttaagaatgaaatgaaagaagaatatcgttcacttttaaaagatgaattttatgattttgttgatgttggttggcggcacgaatatgttggagttaaaagtctagaaaaagagggtgtgaagtattattttctagataatgaacattattttggtagggggcaactctatggttatggcgatgatggagagcgctttgccttttttgacttggctctttgccaactcttagaaaagttagatttcattccagatgttttgcatgtcaatgattggcagactgcaatggttccctttttacttaaagaaaaatacaactggattaaggcctatgaaaaaattaaaacagtactgaccattcataatattgaatttcaaggcttgatgcatggagatgctttaagtgagctttttggtatgggaatggagcgctattttgaaggagtggtccgtcataatggtatgctaaatatgttaaaaacaggaattttatatgcggatcgggttaatacagtttcgccaacttacgctaaggaaatccagacctcagaatttggttgtggtttagaatcgattttgcaatatgtagatggaaaagtttctggaattttaaatgggatagattatgatatttataatcccgaaaatgatatattaattccttaccatttcagcgaggaagagctttctggtaaaggtcaaatgaaagcagagctccaaaagcgaacaggattaccattgaatccaaatgttccattgattgggatggtttcccgtttaacgaatcaaaaaggatttgatttagttttgagtcagttggaaaaagtattggaagaaaatgtgcaaattgtcctattaggaacaggtttccctgaaattgaagaaggttttagatatttttctcaaaaatatccagataagttgtcagcaaatattgcatttgacattcaatttgcacaggaaatttatgctggttctgatttcttcttgatgccatctgcttttgaaccttgtggcctatcacagatgattgcaatgagatatggaactttaccaatcgttcatgaaattggtggtttgaaagatactgtgattccatttaatcctattagcaaagaaggaacaggatttggttttgttgattttgaaggacagattttagtggagacgattaatcgtgcacttgaagtttatggaaaagaaccagaagtcttaaataaaatggttttatcagcaatgagtaaagatttttcttggggaacgaaggctcagcaatacattgaactctatcaagaattataa

SEQ ID NO: 4704 - protein, 483 aa, Lactococcus lactis subsp. lactis
MKERKMKVLFASSECAPFFKTGGLGDVAGALPKELAKKSEIDSVAVILPYFKNEMKEEYRSLLKDEFYDFVDVGWRHEYVGVKSLEKEGVKYYFLDNEHYFGRGQLYGYGDDGERFAFFDLALCQLLEKLDFIPDVLHVNDWQTAMVPFLLKEKYNWIKAYEKIKTVLTIHNIEFQGLMHGDALSELFGMGMERYFEGVVRHNGMLNMLKTGILYADRVNTVSPTYAKEIQTSEFGCGLESILQYVDGKVSGILNGIDYDIYNPENDILIPYHFSEEELSGKGQMKAELQKRTGLPLNPNVPLIGMVSRLTNQKGFDLVLSQLEKVLEENVQIVLLGTGFPEIEEGFRYFSQKYPDKLSANIAFDIQFAQEIYAGSDFFLMPSAFEPCGLSQMIAMRYGTLPIVHEIGGLKDTVIPFNPISKEGTGFGFVDFEGQILVETINRALEVYGKEPEVLNKMVLSAMSKDFSWGTKAQQYIELYQEL

SEQ ID NO: 4705 - DNA, 1461 bp, Sinorhizobium meliloti
  CDS (1)..(1461)
atgcagatactgtctgtcacggccgaaatttttccgctcgtcaagaccgggggcctggcagatgtagcgggatcgctccccaaggcactcagggcccacggcatccacacgcgcagcttcgttccgggttaccccggcgtcatgcgcgcgctcagcgacgcgaccccggtcgccgagtttgaaagcctgttcggcgaacgcgccactctcatcgcggcgcgggctcacgggctggatctcttcgtgctcgatgcgccggccttctatgacaggcaaggggccctctacgtagacaggcatggccgggattatgcggacaactggaaacgcttcgccgccttctcgctggtcgcatcgcaaatcgcgcgcgggctcgttcccaactggcggccgcacatcattcacgcacatgactggcacgcggcgatgagcctcctctatctgaagtacgccggcgacgacaccattcctcgcgtcctaaccgtgcacaaccttgcgttccaggggcaattcccggcccactacttccccgagctcgggctcccggcggaagcatattcgatcgacggcgtcgaatattacggcgatatcgggttcctcaagggcggcctgcaggcagccgatgcgatcacggtcgtcagccccacctatgcgcgggaaatcatgtccccggccttcggcatggggctggaaggcgtgatgaacgaacggcatgcggatgtcgtgggcatcgtcaacggcatagacctggaagtatgggatccatcctcagatccctgcatcgagcatcactattcggcgcgcgtgccgctgcgccgcctgcccaaccggcaggtgctgctccggcatttcggcctgccggacacctgcggaccgatcttcgccagcgtcaaccggttgacatggcagaagggcatggaccttctcgctgcgaccgccggcgagattgtcaagaatggcggcaccctgatcatccatgggcaaggcgaggagaagctggaagccgcattcatggatctcatgcgacggttcccgcaaaacatcagtgtaagcatcggttatgacgagcacctcgcccacaggattcatgccggcgcggatgcaatgctcgttccgtcccggttcgagccctgcggcctcacgcagctttacgcgctacgctacggctgcgtaccggtcgtcgcccgcacgggcggcctgtcggagaccatcatcgatgccaacgatgccgcgctccatgcccatgtcgcgacgggcatacagtttgcgcccattgacgaggacggactacgccatgcactgcgccgcaccttccggctctaccggctgcgacgcgtctgggagggacttcgccgccagggcatgaaaaccgactgctcgtggcatcgcagtgcggcccgctatgcggacctttacagcgaactcctcaatcccgacatgcgcctggtcggcagcgcttga

SEQ ID NO: 4706 - protein, 486 aa, Sinorhizobium meliloti
MQILSVTAEIFPLVKTGGLADVAGSLPKALRAHGIHTRSFVPGYPGVMRALSDATPVAEFESLFGERATLIAARAHGLDLFVLDAPAFYDRQGALYVDRHGRDYADNWKRFAAFSLVASQIARGLVPNWRPHIIHAHDWHAAMSLLYLKYAGDDTIPRVLTVHNLAFQGQFPAHYFPELGLPAEAYSIDGVEYYGDIGFLKGGLQAADAITVVSPTYAREIMSPAFGMGLEGVMNERHADVVGIVNGIDLEVWDPSSDPCIEHHYSARVPLRRLPNRQVLLRHFGLPDTCGPIFASVNRLTWQKGMDLLAATAGEIVKNGGTLIIHGQGEEKLEAAFMDLMRRFPQNISVSIGYDEHLAHRIHAGADAMLVPSRFEPCGLTQLYALRYGCVPVVARTGGLSETIIDANDAALHAHVATGIQFAPIDEDGLRHALRRTFRLYRLRRVWEGLRRQGMKTDCSWHRSAARYADLYSELLNPDMRLVGSA

SEQ ID NO: 4707 - DNA, 1425 bp, Chlamydia trachomatis
  CDS (1)..(1425)
atgaaaattattcacacagctatcgaatttgctccggtaatcaaagccggaggcctgggagacgcgctatacggactagcaaaagctttagccgctaatcacacaacggaagtggtaatccctttataccctaaattatttactttgcccaaagaacaagatctttgctcgatccaaaaattatcttatttttttgctggagagcaagaagcaactgctttctcctacttttatgaaggaattaaagtaactctattcaaactcgacacacagccagagttattcgagaatgcggaaacaatctacacaagcgatgatgccttccgtttttgcgctttttctgctgctgcggcctcctacatccaaaaagaaggagccaatatcgttcatttacacgattggcatacaggattagttgctggactactcaaacaacagccctgctctcaattacaaaagattgttcttaccctacataattttggttatcgaggctatacaacacgagaaatattagaagcctcctctttgaatgaattttatatcagccagtaccaactatttcgcgatccacaaacttgtgtgttgctaaaaggagctttatactgttcagatttcgtgactacggtttctcctacatacgccaaagaaattcttgaagattattccgattacgaaattcacgatgccattactgctagacaacatcatctccgcgggattttaaatggaatcgacacgacaatttgggggcctgaaacggatcccaatttagcgaaaaactacactaaagagcttttcgagaccccttcaattttttttgaagctaaagccgagaataaaaaagccttgtacgaaagattaggcctctctttagaacactctccttgcgtgtgcattatttctagaattgctgagcagaaaggtcctcactttatgaaacaggccattctccatgcactagaaaacgcttacacgctcattattataggtacctgctacgggaatcaattgcatgaagaatttgcaaatcttcaagaatcattagcgaattcccctgatgtaaggattcttttgacttatagtgatgtgctggcacgacaaattttcgccgctgcagatatgatctgcattccttctatgtttgaaccatgtggactcacacaaatgattggaatgcgttacgggactgtaccgttagtaagagctacaggaggactagcagatactgtagcaaatggaatcaatggattttccttctttaatccgcatgacttctatgaattccgaaacatgctttcggaagcagtgacaacctaccgtaccaaccacgacaagtggcaacatattgtacgtgcttgtctagatttttcttcagacctagaaactgccgccaataaatatttagaaatttataaacaataa

SEQ ID NO: 4708 - protein, 474 aa, Chlamydia trachomatis
MKIIHTAIEFAPVIKAGGLGDALYGLAKALAANHTTEVVIPLYPKLFTLPKEQDLCSIQKLSYFFAGEQEATAFSYFYEGIKVTLFKLDTQPELFENAETIYTSDDAFRFCAFSAAAASYIQKEGANIVHLHDWHTGLVAGLLKQQPCSQLQKIVLTLHNFGYRGYTTREILEASSLNEFYISQYQLFRDPQTCVLLKGALYCSDFVTTVSPTYAKEILEDYSDYEIHDAITARQHHLRGILNGIDTTIWGPETDPNLAKNYTKELFETPSIFFEAKAENKKALYERLGLSLEHSPCVCIISRIAEQKGPHFMKQAILHALENAYTLIIIGTCYGNQLHEEFANLQESLANSPDVRILLTYSDVLARQIFAAADMICIPSMFEPCGLTQMIGMRYGTVPLVRATGGLADTVANGINGFSFFNPHDFYEFRNMLSEAVTTYRTNHDKWQHIVRACLDFSSDLETAANKYLEIYKQ

SEQ ID NO: 4709 - DNA, 1701 bp, Sulfolobus solfataricus
  CDS (1)..(1701)
atgaaaaggattgaatcattgtggttacctgaggacattaaaaaagtgtggatgataacatttgaattgcaaaagatagcaagtgttggaggattaggaaatgctgtatataacatagctaaacatctagctgaaaagggagtagatattacggttttcttgccatctcatggaaggcatctaaatgaatattataggtctctcttaagtttaagacatattgacatgatcgttgagggaagaagaaagggtatagataataactattataattataaaataggatttgaagaaggaaaaatagataatttcaaggtaattttggtaaaaggattagattataacactggtagggtattagattcatggaatatctatgataacacaatggagaaaatttcgctattaacaagaggattagaggggttcactttaggcaatctatctaaccttccagatataatccatgcacaagattggcacgccgtaattcccgcagttaggataaaacaactcttggaagagagacgaataatcgtcccatttatttacactattcacttactgaattacattggtgtaccttggcactacgcttctcaagactggtctggaattgaggattgttggcattatatttggatggtagctaagcatgaattatataaatattcatatgtatgggatgtgttgtcaggtggaaaaattgagaaatttggttgttacgaggctgatatggtgagtagtgtaagttacagttatttaagttttgacgtatttaattttgtaggaaattgggtagccaataaatcatgtgtaacgtataatggtacggattgggatgtggaagagatccaaaataaggctgttacaatgtatggaactaaggacagaagggagttaaggagaaggctactttcatctctgcactccctaagggttattccagaggattacactaccggcaatatgctatggaataatagaaatagactaggattaagagatgattggacttacgacgatttaggggaaggaccccttgttctattcactgggagattagtatatcaaaaaggtgtagatttacttttaagggctatgaaaacagttgtgaatgagataaataatgctaggctcttaatttttgggctaccgtctggggattacaacttactttgggatattatagagagggcttcagaaattaaggataatattaggttaatagtgggtagaatggatttagatttatataaattgtttcactacgtatcttcagtcttcgtcattccatctagatgggaaccatttggcataaattcaattgaggctatggctatggggttgccagtaattgcctatagcgtagggggtttaagagaaacagtcgttgacattagggaggataagaataatgccacaggtctcttaattaagcctgaaagtatagacgaattagctagagccataaggattgcattatatttgtcagaggcttctgagctaaataaaagcgatttgttatataaggcgagtgaggttaaagtagatgatacgagatactgggataaggtacgtgaaaatgcaataactagggttaagagtagatttagatgggatgcagtgataaactccttaactgagtgttatagaaagactctcgatatggctaaatatagggctttagcctctttttga

SEQ ID NO: 4710 - protein, 566 aa, Sulfolobus solfataricus
MKRIESLWLPEDIKKVWMITFELQKIASVGGLGNAVYNIAKHLAEKGVDITVFLPSHGRHLNEYYRSLLSLRHIDMIVEGRRKGIDNNYYNYKIGFEEGKIDNFKVILVKGLDYNTGRVLDSWNIYDNTMEKISLLTRGLEGFTLGNLSNLPDIIHAQDWHAVIPAVRIKQLLEERRIIVPFIYTIHLLNYIGVPWHYASQDWSGIEDCWHYIWMVAKHELYKYSYVWDVLSGGKIEKFGCYEADMVSSVSYSYLSFDVFNFVGNWVANKSCVTYNGTDWDVEEIQNKAVTMYGTKDRRELRRRLLSSLHSLRVIPEDYTTGNMLWNNRNRLGLRDDWTYDDLGEGPLVLFTGRLVYQKGVDLLLRAMKTVVNEINNARLLIFGLPSGDYNLLWDIIERASEIKDNIRLIVGRMDLDLYKLFHYVSSVFVIPSRWEPFGINSIEAMAMGLPVIAYSVGGLRETVVDIREDKNNATGLLIKPESIDELARAIRIALYLSEASELNKSDLLYKASEVKVDDTRYWDKVRENAITRVKSRFRWDAVINSLTECYRKTLDMAKYRALASF

SEQ ID NO: 4711 - DNA, 1566 bp, Methanococcus jannaschii
  CDS (1)..(1566)
atgaaaatagtcatccttgctccaacaataacccctattgtctcttatggaggattaggggatgtaatgagagacttgccaaaatttttaaaaaaaggtaatgaagtagttgttctaactctaaaccattataataggtattttactcttccctatgaagatatcaaaaaaataactgttatctataaaggagctaaaattacatttgatgttttaagaacaaagcatccaacgacaggagtagatttaattgtatttagtaatgaaagtgtcaataacttaaatgtttgggaccctattaagtatgaaatttttgctgatttggttattacatatttagatgaggttaaagatattgatgtagtgtctgggcatgattggatgtgtggtttagctatagccaaatgcaacgatattttagatttaccaacaaccttaaccatacataatgaggcatttaaaggagagatgattgagtataaaggggaagttatgacatttttggagttaggaattaagtatgcagatgccgttaatacagtaagcccttctcatgctgaggaaataaaaaactacccttatataaaaaaatacttaaataataagccattctgtgggattttaaatggaattgatattgatgaatacgaccccatgaagataatagaaaggatgtgcaacctctcaaacaacaaacttgacccaagaaattatgcttatatctctccctattcagctgaagattcccataatataaaaccaaaaataaaatattcatggttttatagaggaggagtttatgaatatgtggaagattggaataagattgataaaggaatatcagctactgatgttgaggtccatggtggggtagatggagatatagaaactccattaattggttttgttggaagggcgacacatcaaaaaggttttaacaccatgtttgaagcaattccagaacttttagaaaaacatgatataagatttgtatttttaacaaagggggatagagatattgaagagagactaaaaaatcttgcaaatgaacatgatggaagaatcttggcattgataggctattccctcccactctcatctttagtatttgctgggagtgattggataattatgccttcatactgggaaccgtgtggtttagtgcaaatggaagctatggcatactgcactccagtcatagctacagaaactggaggtttaaaagataccataattcctcttcatccaaatccttatgaacatccaaattttgataaggcaacgggtgttttatttaaagttccagataaagtggggtttatgtggggggttgagcacgcattaaattggacattctataaacttaatgaaatatgtatgtttatgcagtatataagatataaatgccctaaacatccttatgatgagaactccccattatctatgatgatgaaaaactgctactatcacgtgtttagaaacttaagctggcagaactccccatctataagaaagtataagggcttatttggaggagcaatttataatcactatctacaaccataa

SEQ ID NO: 4712 - protein, 521 aa, Methanococcus jannaschii
MKIVILAPTITPIVSYGGLGDVMRDLPKFLKKGNEVVVLTLNHYNRYFTLPYEDIKKITVIYKGAKITFDVLRTKHPTTGVDLIVFSNESVNNLNVWDPIKYEIFADLVITYLDEVKDIDVVSGHDWMCGLAIAKCNDILDLPTTLTIHNEAFKGEMIEYKGEVMTFLELGIKYADAVNTVSPSHAEEIKNYPYIKKYLNNKPFCGILNGIDIDEYDPMKIIERMCNLSNNKLDPRNYAYISPYSAEDSHNIKPKIKYSWFYRGGVYEYVEDWNKIDKGISATDVEVHGGVDGDIETPLIGFVGRATHQKGFNTMFEAIPELLEKHDIRFVFLTKGDRDIEERLKNLANEHDGRILALIGYSLPLSSLVFAGSDWIIMPSYWEPCGLVQMEAMAYCTPVIATETGGLKDTIIPLHPNPYEHPNFDKATGVLFKVPDKVGFMWGVEHALNWTFYKLNEICMFMQYIRYKCPKHPYDENSPLSMMMKNCYYHVFRNLSWQNSPSIRKYKGLFGGAIYNHYLQP

SEQ ID NO: 4713 - DNA, 1431 bp, Bacillus halodurans
  CDS (1)..(1431)
atgaatgtgttacacgtcgcttcagaatgcaacccttttttcaaaacagggggacttgccgacgttctcggttcgctcccaaaagctcttataaaacaagggatcaatgtttccgtcatcctaccaaaatatggacacctctctgacgaatggcagaaccaattaacgttaaaaaaatcgttcacggtctccgtcacatggcgaaatcaatattgtggactggagcagtttgtagatcaaggagtgacctactacttcatcgataacgaatattactttaagcgggaacgcctttacggctatctcgatgaggctgaacggttcacattttttaatcatgctgttcttagctctttaccgttccttgatgaatcacctgatttaattcattgccatgattggcagtcaggtcttattcctgcctatatgaaaacgggttccgtcgaaaatcccgtaccgacggtgttcacaatccataaccttcgctatcaaggagcctttccccctgatgtttttcgcgaattgcttcactttgcgccagagcactttgctggattagagatggacggtgcgatcaattttttgaagggagcactcgtccattctgaccgggttacaacggtaagcccaacatatgctcaggaaatacaaacccctgcctttggcgaaggcttgcacggattgcttcatcaagaacgaggaaaaacaagaggtattttaaatgggattgacctggaggatttcgatccaaaaaccgatccgcatgttacgtatccttataagcacaatcaaatggaaaaacggaaaaacaaacaggtcatccaacgtctgtttgaattgccagagcgcaaggacattcctcttattgcgatggtcagccgtctcgtagaagagaaaggggtccctcttctcacccaaattgcaggtgaacttgtgacaacggaaaatgtgcagctcgccattctcggtacaggcgatccttctttagaggaccaactgcatcatctagcttctttgcatccacatcaaatttcatttaaatgtgtgtttgcggagccgctcgcgcgtaagctttatgcaggggctgatttattcatcatgccgtcccgattcgaaccgtgcggacttagccaaatgatttcccttcgctacgaaacggttccaattgttcgtgaaacaggagggttatatgacacgattcaatcctataatgaagaaataggcgaaggaaatggattcagttttactcattataacgcccatgatttcttgtatacaatcaagcgagccctccgtttttatcgtacggaaaaagagtgggaaaaccttttgcttaacatctacagctcggaagtaggatgggacgtttccgccaaacaatatacagcgctttatgaagaaatactagggaaaaggaaggtggaggcatga

SEQ ID NO: 4714 - protein, 476 aa, Bacillus halodurans
MNVLHVASECNPFFKTGGLADVLGSLPKALIKQGINVSVILPKYGHLSDEWQNQLTLKKSFTVSVTWRNQYCGLEQFVDQGVTYYFIDNEYYFKRERLYGYLDEAERFTFFNHAVLSSLPFLDESPDLIHCHDWQSGLIPAYMKTGSVENPVPTVFTIHNLRYQGAFPPDVFRELLHFAPEHFAGLEMDGAINFLKGALVHSDRVTTVSPTYAQEIQTPAFGEGLHGLLHQERGKTRGILNGIDLEDFDPKTDPHVTYPYKHNQMEKRKNKQVIQRLFELPERKDIPLIAMVSRLVEEKGVPLLTQIAGELVTTENVQLAILGTGDPSLEDQLHHLASLHPHQISFKCVFAEPLARKLYAGADLFIMPSRFEPCGLSQMISLRYETVPIVRETGGLYDTIQSYNEEIGEGNGFSFTHYNAHDFLYTIKRALRFYRTEKEWENLLLNIYSSEVGWDVSAKQYTALYEEILGKRKVEA

SEQ ID NO: 4715 - DNA, 1455 bp, Vibrio cholerae
  CDS (1)..(1455)
atggaacaattcaacgtttggtttaccgtttcagaagtacaggggctggtaaaaagtggtggcctggccgatgtggcaaaagcgctgccacaagcgttgaaagcgttgcatcagcaggtagccattgcgctgcctgcttatcgttcagtaccgggaaaggaagacgcagagttagtactggaaacagagctgacacactggccgcacacgcagtatcgtgttttaaaacgcgatctagacggtgtgccaatctatctaattgattgccctgcttattttgaccgcccggcgctgtatgctgagaataatcaagcctatgccgataatggtgaacggtttggttttttctctgcagcgtgtttggacgtactgccgaaactcggtattcagcctgacatcattcatgcgaatgattggcacacaggcttagtgccttttttgttgaaaacccgttatcgctatgacagcttttttgagcaagtcaaaagtgtgctgacggtgcataacgcgatttttaaagggatcttttcctaccatcagttagaagtcattcctgagctcaatttatcgggtatggaatttctgcaatacggtcacgatcatgtgagcatgctgcgggcggggatcgcttttgcggataaagtgaatgcggtgagtcctaattatgcggctgagcttttaacgcctcttggggctcacgggctggtggatgattttgtgcgccgagcgcgcgatttacacggtatcgtcaacggttgtgattacagcgagtggaatccaagaaccgaccactatctgccagcaacctacagcgatgagcctgagtcgatgcgcaaggggaaagcgctgtgtaaaacggcgctgcaggaagagttacacctgccggttaccgatgtacctctgtttggtatggtttgccgtttaacgcatcagaaaggctttcattacttgttgccgattttagagcagttcctgcgcaataacgttcaagtggttattgttggtactggtgagccggaagttgctgcgcggttgaataagatcgctcattatcatcgagccaagtttgcgtttgtcgaaacctacagtgagcgtttagcgcactgggttgaagcgggatcggatttcttcttaatgccttctgaatttgaagcctgtgggctcaatcagatttacagcatggcttatggcactctgcctattgttcgtgaagtgggtggcttgaaagatacggtgaacgattacgataaattcccggagcgcgcgacaggctttggttaccaagagcccacgccagaagctctattgatcacgatgcagcgggcactcttgttttatctgcagcagccagaagagatgctgaaagtgcaacaacgtgccatgcagcaaaacttcagttgggaagagtctgcccaagaatatatgaagatgtatcgactcgcgcgatttggctaa

SEQ ID NO: 4716 - protein, 484 aa, Vibrio cholerae
MEQFNVWFTVSEVQGLVKSGGLADVAKALPQALKALHQQVAIALPAYRSVPGKEDAELVLETELTHWPHTQYRVLKRDLDGVPIYLIDCPAYFDRPALYAENNQAYADNGERFGFFSAACLDVLPKLGIQPDIIHANDWHTGLVPFLLKTRYRYDSFFEQVKSVLTVHNAIFKGIFSYHQLEVIPELNLSGMEFLQYGHDHVSMLRAGIAFADKVNAVSPNYAAELLTPLGAHGLVDDFVRRARDLHGIVNGCDYSEWNPRTDHYLPATYSDEPESMRKGKALCKTALQEELHLPVTDVPLFGMVCRLTHQKGFHYLLPILEQFLRNNVQVVIVGTGEPEVAARLNKIAHYHRAKFAFVETYSERLAHWVEAGSDFFLMPSEFEACGLNQIYSMAYGTLPIVREVGGLKDTVNDYDKFPERATGFGYQEPTPEALLITMQRALLFYLQQPEEMLKVQQRAMQQNFSWEESAQEYMKMYRLARFG

SEQ ID NO: 4717 - DNA, 1833 bp, Arabidopsis thaliana (mouse-ear cress)
  CDS (1)..(1833)
atggcaactgtgactgcttcttctaactttgtgtcaagaacttcacttttcaacaatcatggtgcttcttcatgctctgatgtcgctcagattaccttaaaaggccaatccttgactcattgtgggttaaggtcattcaacatggtggataaccttcagaggagatctcaagctaaacctgtttctgctaaatcctcaaagagatcttctaaagttaagactgctggtaagattgtgtgtgagaaaggaatgtctgtgatttttattggagctgaagttggtccatggagtaaaactggtggtcttggtgatgttctcggtggtctacctccagctcttgctgctagaggccaccgtgtgatgacaatttgtcctcggtatgaccaatataaagatgcttgggacacttgtgttgtggttcagatcaaagttggggataaagttgagaatgttcgtttcttccattgctacaaacgaggagttgatcgtgtctttgttgaccatccaatctttcttgctaaggttgtgggcaaaacaggatccaaaatctatggtcctataactggagtagactacaatgacaaccaactccggttcagtttgttgtgtcaggctgctcttgaggcaccacaggttctgaacctgaacagcagcaagtacttctctggaccatatggtgaagatgtagtctttgttgccaatgactggcacactgctctacttccatgttacctcaaatctatgtatcaatcccgcggagtctacatgaatgcaaaggtggtcttctgcattcacaacatagcctaccagggaagatttgcctttgatgactattcccttctcaacttgcccatcagctttaaaagttctttcgacttcatggacgggtatgaaaagccagtaaaaggacggaaaattaactggatgaaggctgcaattctggaagctcaccgtgtcttaacagttagtccatactacgctcaagaactcatctctggagttgatagaggcgtggaattgcataaatatcttcgaatgaaaacagtttccggaattattaatggaatggatgttcaagaatggaacccgtctactgacaagtacatcgacatcaaatacgatattaccactgttacagatgctaaaccattgatcaaagaagcacttcaggctgctgttggacttcccgtggacagggatgtcccggttatcggtttcatagggagattggaggagcagaagggttctgatattctagtggaagctatttccaagttcatggggctcaatgttcagatggttatccttgggactggaaagaagaagatggaggctcagattcttgaactagaagagaagttcccagggaaggcggttggagtggcgaaattcaacgtgccattggctcatatgatcactgctggagctgacttcatcattgtcccaagcaggtttgagccgtgtggtctcattcagctgcacgcaatgagatatggaaccgtccctattgtggcatctactggtggacttgtggacactgtgaaagatggctacacaggtttccacattggaagattcaacgtcaagtgtgaagttgtggatccagatgatgtgatagcaacagcaaaggctgtgacaagagccgttgcagtatatggaacatccgcaatgcaagaaatggtcaagaactgcatggaccaagacttctcctggaagggacctgcgaggttgtgggagaaggtactattgtcccttaatgtggcgggaagtgaagccggaaccgagggtgaagagatagctcctctggccaaggagaacgtagcgacgccgtga

SEQ ID NO: 4718 - protein, 610 aa, Arabidopsis thaliana (mouse-ear cress)
MATVTASSNFVSRTSLFNNHGASSCSDVAQITLKGQSLTHCGLRSFNMVDNLQRRSQAKPVSAKSSKRSSKVKTAGKIVCEKGMSVIFIGAEVGPWSKTGGLGDVLGGLPPALAARGHRVMTICPRYDQYKDAWDTCVVVQIKVGDKVENVRFFHCYKRGVDRVFVDHPIFLAKVVGKTGSKIYGPITGVDYNDNQLRFSLLCQAALEAPQVLNLNSSKYFSGPYGEDVVFVANDWHTALLPCYLKSMYQSRGVYMNAKVVFCIHNIAYQGRFAFDDYSLLNLPISFKSSFDFMDGYEKPVKGRKINWMKAAILEAHRVLTVSPYYAQELISGVDRGVELHKYLRMKTVSGIINGMDVQEWNPSTDKYIDIKYDITTVTDAKPLIKEALQAAVGLPVDRDVPVIGFIGRLEEQKGSDILVEAISKFMGLNVQMVILGTGKKKMEAQILELEEKFPGKAVGVAKFNVPLAHMITAGADFIIVPSRFEPCGLIQLHAMRYGTVPIVASTGGLVDTVKDGYTGFHIGRFNVKCEVVDPDDVIATAKAVTRAVAVYGTSAMQEMVKNCMDQDFSWKGPARLWEKVLLSLNVAGSEAGTEGEEIAPLAKENVATP

SEQ ID NO: 4719 - DNA, 1461 bp, Thermotoga maritima
  CDS (1)..(1461)
atgaaagtggtattcgtttcttacgaggtttttccgttcgcgaaagtaggaggattggcggacgttgctggaactcttccaaagtacttgaagaaacacggggtggatgtcacgatagttatgccgaaacacagaatcgttgaaaaaaatgcggagaaatttgggtatgagatcaagaaagtagccgaaagtctctctgtttctcatgtcaaaaccgatcaaaagttcgatatatatgaatccgttcttcccggtagcgatgtgaaaacgtatttcgttgccaacgattactatttctctgcggaagatgtctacgcggggccagatcttggtgaacaggcgattttcttctgtgcggccactctggatctggtaaaacatcttgatttgaagcccgatatcgtccatgtgaacgactggcaaaccgctttgatccccgtctatttgaaaactgtgtacagggacgatccttacttttccagaacggccacggttttgacaatacacaaccttggataccagggcgtgttcgatccaaagtacctctcttttgcaggccttcccgattatgtttacactatcgacggtcttgagttctacggacagctgaatttcctcaagggcggaatagtgttcagcgatgtgataaacacggttagccccacttacgccgaggaaattcagacggaagagtatggtgagaaactcgatggtgtactgagaatgcgctcgaaggatctctacggtatattgaacggaatagattacgagctttataacccagccacggacagatacatttacgtcaactacgacgtgaatcgtcttgaactcaagtgggaaaacaaggtgaagctccaggaagaactgggacttcccgttaacaaggaaacggctgtagccgggttgatcagcaggctcgtccctcaaaaaggtctggaccttctggttgatgtgatggattatctgacgctctttgatcttcagatcgttgttctaggaacaggagatgaacagtacgagaacgctttcagaaagttccaggaaaggtatccagacaaagtatcagcgaacataaagttcgatgtcgagctggcgcagaagatatacgccggtgcggacatattcctcatgccgagcagatacgaaccgtgcggtttgggacagatgttcagcatgagatacggaacaatccccgttgtgagatacacgggaggcctggcggatactgtgaaagaatacgatccacaatcgatggaaggtacgggttttggattcaagaagtacgattccgctcatcttttgaaggctgtttcgaaggctttgcacttttactacagggaaaaagatcattggaggagaatcatgacaaatgccatgaacacggatctgtcctgggacaggtccgccaaagagtacgttgatctttacaaaaaagcccttgcaaaggttggaaggtga

SEQ ID NO: 4720 - protein, 486 aa, Thermotoga maritima
MKVVFVSYEVFPFAKVGGLADVAGTLPKYLKKHGVDVTIVMPKHRIVEKNAEKFGYEIKKVAESLSVSHVKTDQKFDIYESVLPGSDVKTYFVANDYYFSAEDVYAGPDLGEQAIFFCAATLDLVKHLDLKPDIVHVNDWQTALIPVYLKTVYRDDPYFSRTATVLTIHNLGYQGVFDPKYLSFAGLPDYVYTIDGLEFYGQLNFLKGGIVFSDVINTVSPTYAEEIQTEEYGEKLDGVLRMRSKDLYGILNGIDYELYNPATDRYIYVNYDVNRLELKWENKVKLQEELGLPVNKETAVAGLISRLVPQKGLDLLVDVMDYLTLFDLQIVVLGTGDEQYENAFRKFQERYPDKVSANIKFDVELAQKIYAGADIFLMPSRYEPCGLGQMFSMRYGTIPVVRYTGGLADTVKEYDPQSMEGTGFGFKKYDSAHLLKAVSKALHFYYREKDHWRRIMTNAMNTDLSWDRSAKEYVDLYKKALAKVGR

SEQ ID NO: 4721 - DNA, 1542 bp, Pseudomonas aeruginosa
  CDS (1)..(1542)
atgggacattctgttgcaggcgtttgcctggaagaacccgcggtactgaccgcttttccgtcgctgctgcacccgcaggacccgccgcaacagagggatcggatactcttcgttaccgccgagctcagcgatttcgtcaaggtcggcggactcggcgacttttccgccgcgctgccgagggtcctcaagcgcgagcattcggtgcgagtcctgctgcccggctatcgccaggtgctggagcgctgccgcgacttgcggatcatcggcagcctgcccggccgggcggcgatcccgccctgcgagatcggcctggtgaccctcgacgacggcctggaagtcatgctggtgctctgcccgctgctctacgagcgcgagggtacgccgtacatggacgaccagggcaacgactggccggacaaccacctgcgcttcgcccgcctgtgcctggccgccgccgagatcgccggtggacgcggcgcccagggctggcaaccgggcctggtgcacgccaacgactggccgtcggcgctgacgccggcctacatggcctggaacggcgtgcgcacgccgagcctgtttaccatccacaacctcgcctaccagggcctctgcgacctgcaatgcagcgccgaactgggcctccccgacgaagcgctgagccacgaaagcatggagttccacgggcgcctgtcgttcctcaaggccggcatcgcccatgcccaccacatcaccacggtgagcgagacctacgcccaggaaatcactaccccggaatacggctgcggcctgcacggcatcctcaagtacaaggtcgagaagcgtcagctcagcggcatcgtcaacggtatcgacgatagctggcagccgcactgcgatccgcacctggtggcctgcttcagcgcccgccaatgggccggcaagcgcgccaacacgcgctacgtggaggagcgtttcggcctggagccgggcaaggggccgctgttcgcggtggtctcgcgcctggtgcagcagaaaggcatcgacctgaccctggagatcagcgatgccctgctccaggccggcggccgtctggtcagcatcggccgtggcgagccgaacctggagaaggccatgctcgaactcgcccggcgtcatcccggccaggtcggcgtgcacatcggtttcgacgagaccgaggcccgccgtatctacgccggcagcgacttcctgctcatgccctcgcgttatgagccctgcgggctcagtcagctctatgcgcaatgcttcggctcgctgccgatcgcgcgctgcaccggcggcctcgccgataccatcgtcgacggggtcaccggcttcctgttccgtgaggaaaccgcgcagagctacctcgatgcggtgatgcgcgcgatcaacgtctaccactgtccctcgctgctcaacgccatgcgttgcaaggcgatggccgcgccgatgttctggagcgactcggtggagccttacaaccgcctgtaccggcgcctgttgaggaataccgctccggccctgcgcggggtacgccagtga

SEQ ID NO: 4722 - protein, 513 aa, Pseudomonas aeruginosa
MGHSVAGVCLEEPAVLTAFPSLLHPQDPPQQRDRILFVTAELSDFVKVGGLGDFSAALPRVLKREHSVRVLLPGYRQVLERCRDLRIIGSLPGRAAIPPCEIGLVTLDDGLEVMLVLCPLLYEREGTPYMDDQGNDWPDNHLRFARLCLAAAEIAGGRGAQGWQPGLVHANDWPSALTPAYMAWNGVRTPSLFTIHNLAYQGLCDLQCSAELGLPDEALSHESMEFHGRLSFLKAGIAHAHHITTVSETYAQEITTPEYGCGLHGILKYKVEKRQLSGIVNGIDDSWQPHCDPHLVACFSARQWAGKRANTRYVEERFGLEPGKGPLFAVVSRLVQQKGIDLTLEISDALLQAGGRLVSIGRGEPNLEKAMLELARRHPGQVGVHIGFDETEARRIYAGSDFLLMPSRYEPCGLSQLYAQCFGSLPIARCTGGLADTIVDGVTGFLFREETAQSYLDAVMRAINVYHCPSLLNAMRCKAMAAPMFWSDSVEPYNRLYRRLLRNTAPALRGVRQ

SEQ ID NO: 4723 - DNA, 3078 bp, Arabidopsis thaliana (mouse-ear cress)
  CDS (1)..(3078)
atggctgcttcaggaccaaaaagctcaggtcccagaggttttgggcgacgaacaacagtaggaagtgctcagaaaagaactcagaagaagaatggtgaaaaagatagtaatgccacttctacagcaacaaacgaggtttcagggattagtaagttgcccgcagctaaagtggatgtacagaagcaaagctctgttgttttgaatgagagaaatgtgttagataggtcggatattgaggatggaagtgatcgtttggacaagaaaacaaccgatgatgatgatttgttagaacaaaagttaaaacttgaaagagagaatcttcgtaggaaggaaatagaaacgcttgcagcggaaaatttggcgagaggtgatagaatgtttgtgtatcccgttattgtgaaacctgatgaagacatagaagtgtttctcaacaggaatctgtcgactctgaataacgaacccgatgttttgatcatgggggcgtttaacgaatggagatggaagtctttcacaaggagattggaaaagacctggatccatgaagattggttgtcatgtctccttcatatccccaaagaagcgtataagatggacttcgtgtttttcaatgggcaaagtgtatatgacaacaatgactcaaaagatttttgtgtagagataaaaggtgggatggataaagttgactttgagaattttcttctagaagagaaactgcgagagcaagagaagttagccaaggaagaagctgagagggagaggcaaaaagaagagaagagaagaatcgaagctcaaaaggctgcaattgaagctgatagagcacaagcaaaggcggagactcagaagagacgtgaattgcttcaaccggctattaagaaagctgtagtctcggctgagaatgtttggtacattgagccgagtgatttcaaggctgaagatacagtgaagctatattacaataaaaggtcaggtcctctgactaattccaaagaactgtggttacatggagggtttaataattgggttgatggattatctatcgttgtaaagcttgttaatgctgagttaaaggatgttgatccaaagagcggaaattggtggttcgctgaagttgtagtgcctggcggtgcactagtcattgactgggtctttgctgatggaccacctaaaggagcgtttctgtatgacaataatggttaccaagacttccacgcacttgttcctcaaaaacttcctgaagaactttactggttagaggaagaaaatatgatttttagaaaacttcaggaggataggcggttaaaagaggaagttatgcgtgccaagatggaaaaaacagctcgcttgaaagctgaaactaaggaaagaacactgaaaaagtttctgctatcccagaaagacgtggtttacaccgagcctctagagattcaagcaggaaaccctgtgactgtattgtacaatcctgcaaacacggttttgaatggaaaacctgaagtttggtttagaggctcttttaatcgttggactcaccgcttgggccctttgccacctcagaaaatggaagcaacagatgatgaaagctcacatgtgaagactacggctaaggtcccattggatgcttacatgatggactttgtgttctctgagaaagaggatggcggaatatttgataacaaaaatggtctggattaccatttaccagtcgtgggaggtatttcaaaggaaccaccattgcacattgttcatattgctgttgaaatggcacccatcgcaaaggttggtggcctaggtgatgttgtcactagtctatctcgcgctgttcaagaattaaaccataatgtggatatagtttttccaaagtatgattgcataaagcacaattttgtgaaggacttgcaatttaacagaagctatcactggggaggaactgaaataaaagtttggcatggaaaagtagaaggcctttcggtttacttcttagatccacaaaatggattgtttcagcgaggatgtgtttacggttgtgcagatgatgcaggaagattcggtttcttctgtcatgcggctcttgaatttcttctccaaggaggtttccatccagacattcttcactgtcatgactggtctagtgctccggtttcatggttattcaaggatcattacacacagtacggtttaattaaaacccgtattgtcttcacaattcataatttggaatttggagcgaatgccattggtaaagcaatgacatttgcagacaaagccacaacggtttcaccaacttatgctaaggaagttgctggaaactctgtaatctctgcacatttatacaaatttcacggaattataaacgggattgacccagatatatgggatccatataacgataactttattcccgtaccttatacttcagagaacgttgtagaaggcaaaagagcagccaaggaagaattgcaaaacaggcttggactaaagagtgccgattttccagtagtaggaattattacgcgcttaacacaccagaagggaatacatttgatcaagcacgctatttggcgtaccttggaacggaatggacaggttgtcttattaggttcagctccagatcctcggatccaaaatgattttgtaaacttggcaaaccaattacattcttctcatggtgaccgggctcggcttgttctaacctacgatgaacctctttcccatttgatttatgctggggctgactttattcttgtaccgtcgatatttgagccatgtggactgacacagctcatagccatgagatacggcgctgttcctgttgttagaaaaactggaggactctttgatacggtttttgatgttgaccacgataaagaaagggcacaagctcaagttctagaacctaatggtttcagcttcgacggagctgatgctcctggtgttgattatgctctcaatagggcgatatcggcgtggtacgatggtagagagtggtttaactcgctgtgcaagacggtgatggagcaagactggtcatggaaccgtcctgcacttgagtatcttgagctctatcactctgcacgcaagtaa

SEQ ID NO: 4724 - protein, 1025 aa, Arabidopsis thaliana (mouse-ear cress)
MAASGPKSSGPRGFGRRTTVGSAQKRTQKKNGEKDSNATSTATNEVSGISKLPAAKVDVQKQSSVVLNERNVLDRSDIEDGSDRLDKKTTDDDDLLEQKLKLERENLRRKEIETLAAENLARGDRMFVYPVIVKPDEDIEVFLNRNLSTLNNEPDVLIMGAFNEWRWKSFTRRLEKTWIHEDWLSCLLHIPKEAYKMDFVFFNGQSVYDNNDSKDFCVEIKGGMDKVDFENFLLEEKLREQEKLAKEEAERERQKEEKRRIEAQKAAIEADRAQAKAETQKRRELLQPAIKKAVVSAENVWYIEPSDFKAEDTVKLYYNKRSGPLTNSKELWLHGGFNNWVDGLSIVVKLVNAELKDVDPKSGNWWFAEVVVPGGALVIDWVFADGPPKGAFLYDNNGYQDFHALVPQKLPEELYWLEEENMIFRKLQEDRRLKEEVMRAKMEKTARLKAETKERTLKKFLLSQKDVVYTEPLEIQAGNPVTVLYNPANTVLNGKPEVWFRGSFNRWTHRLGPLPPQKMEATDDESSHVKTTAKVPLDAYMMDFVFSEKEDGGIFDNKNGLDYHLPVVGGISKEPPLHIVHIAVEMAPIAKVGGLGDVVTSLSRAVQELNHNVDIVFPKYDCIKHNFVKDLQFNRSYHWGGTEIKVWHGKVEGLSVYFLDPQNGLFQRGCVYGCADDAGRFGFFCHAALEFLLQGGFHPDILHCHDWSSAPVSWLFKDHYTQYGLIKTRIVFTIHNLEFGANAIGKAMTFADKATTVSPTYAKEVAGNSVISAHLYKFHGIINGIDPDIWDPYNDNFIPVPYTSENVVEGKRAAKEELQNRLGLKSADFPVVGIITRLTHQKGIHLIKHAIWRTLERNGQVVLLGSAPDPRIQNDFVNLANQLHSSHGDRARLVLTYDEPLSHLIYAGADFILVPSIFEPCGLTQLIAMRYGAVPVVRKTGGLFDTVFDVDHDKERAQAQVLEPNGFSFDGADAPGVDYALNRAISAWYDGREWFNSLCKTVMEQDWSWNRPALEYLELYHSARK

SEQ ID NO: 4725 - DNA, 1434 bp, Streptococcus pneumoniae
  CDS (1)..(1434)
atgaaaattttatttgtagcagcagagggtgcacccttttcaaaaacaggtggtttgggagacgtcattggcgctcttccaaaatcactggtaaaagctgggcacgaagttgcagtgattttaccctactatgatatggtagaggctaaatttggaaatcagattgaagatgtgcttcattttgaggtgagcgttggttggcgcagacagtattgtggaattaagaaaacagtattaaatggtgtaaccttctactttattgacaatcaatattatttcttccgtggtcatgtttacggtgattttgatgacggagaacgctttgcctttttccaactggctgccattgaggctatggaaaggattgactttattcctgatcttctccatgttcatgactaccatacagctatgattcctttcttgttgaaggaaaaataccgttggattcaagcctatgaggacattgaaacagttttaaccattcataatttagaattccaaggacaattttcagaaggaatgttgggtgatttgtttggagttggctttgaacgttacgctgatggcacccttcgatggaacaactgtctgaactggatgaaggcaggtattctctatgcgaaccgtgtttcaaccgtttcacctagctatgctcatgaaattatgactagtcagtttggatgtaatttggatcatattcttaaaatggagtctggtaaagtatctggtatcgtgaatgggattgatgctgatctttataatcctcagacggatgctcttttagactatcatttcaatcaggaagatttgtctgggaaagccaaaaataaggcaaaattgcaagaaagagttggcttgcctgttagagcagacgttccactggtgggaattgtttctcgtttgacacgtcaaaaaggttttgatgtggtggtcgaaagtcttcaccatatcttgcaagaagatgttcagattgttcttttgggaactggcgatccagcctttgaaggagctttctcatggtttgctcagatttacccagacaagctatcaacaaatatcacttttgatgtcaaacttgctcaggaaatctacgctgcttgtgacctcttcctcatgccaagtcgttttgaaccgtgtggcttgtctcaaatgatggctatgcgttatggaaccttgccattggtccatgaagttggaggcttgcgagatacagttcgcgctttcaatccaatcgaaggaagcggtactggctttagctttgacaatctatctccttattggttaaattggactttccaaacagcattggacttgtatagaaaccatccagacatttggagaaacctacaaaaacaagctatggagagtgacttctcatgggatacagcctgcaagtcataccttgacttgtaccatagtttagttaattaa

SEQ ID NO: 4726 - protein, 477 aa, Streptococcus pneumoniae
MKILFVAAEGAPFSKTGGLGDVIGALPKSLVKAGHEVAVILPYYDMVEAKFGNQIEDVLHFEVSVGWRRQYCGIKKTVLNGVTFYFIDNQYYFFRGHVYGDFDDGERFAFFQLAAIEAMERIDFIPDLLHVHDYHTAMIPFLLKEKYRWIQAYEDIETVLTIHNLEFQGQFSEGMLGDLFGVGFERYADGTLRWNNCLNWMKAGILYANRVSTVSPSYAHEIMTSQFGCNLDHILKMESGKVSGIVNGIDADLYNPQTDALLDYHFNQEDLSGKAKNKAKLQERVGLPVRADVPLVGIVSRLTRQKGFDVVVESLHHILQEDVQIVLLGTGDPAFEGAFSWFAQIYPDKLSTNITFDVKLAQEIYAACDLFLMPSRFEPCGLSQMMAMRYGTLPLVHEVGGLRDTVRAFNPIEGSGTGFSFDNLSPYWLNWTFQTALDLYRNHPDIWRNLQKQAMESDFSWDTACKSYLDLYHSLVN

SEQ ID NO: 4727 - DNA, 2533 bp, Oryza sativa (rice)
  CDS (114)..(1994)
cgcgactcagcccactcctctctctccaccaccaccaccaccaccaccaccgcccgccaagcgcggcccgcccgacacagcagcagcaggatcggcggagaggaggggggatcatggcgacggcggcggggatggggatcggggcggcgtgcctggtggcgccgcaggtgaggccggggaggaggttgcggctccagcgggtgcggaggcggtgcgtggcggagctgagcagggacggtgggtcggcgcacggcccgctggcaccggcgccgctggtgaagcagccggtcctgccgaccttcctcgtgccgacgtcgacgccacccgcgcccacgcagtcgccggcgccggcgccgaccccgccgccgttgccggactccggcgtgggggagatcgagcccgatctagaaggtctcacagaagattccatcgacaaaacaatttttgtggctagtgagcaggagtctgagatcatggatgtgaaggagcaagctcaagctaaagtaacacgcagcgttgtctttgtaaccggtgaagcttctccttatgcaaagtcaggtggactaggagatgtttgtggttcactgccaattgctcttgctcttcgtggtcatcgtgtgatggttgtaatgccgagatacatgaacggggccttgaacaaaaattttgcaaacgcattttacactgagaagcacattaagattccatgctttggcggagaacatgaagttactttttttcacgagtatagggattctgttgattgggtgtttgttgatcatccctcatatcatagacctggaaatttgtatggagataattttggtgcttttggcgataatcagttcagatacacactcctgtgctatgcggcgtgtgaagccccattaattcttgaactgggaggatatatctatggacagaaatgcatgtttgttgtgaatgattggcatgccagtcttgtgccagtccttcttgctgcaaaatatagaccatatggtgtttacagggatgcccgcagtgttcttgtcatacataatctagcacatcagggtgtggagcctgccagtacatatcctgacctgggattgccacctgaatggtatggagcattagaatgggtgtttccagagtgggcaaggcggcatgcccttgacaagggtgaggcagtcaattttttaaaaggcgcagttgtgacagcagatcgaattgtgactgtcagccaggggtattcatgggaggtcacaactgctgaaggtgggcaaggcctcaatgagctcttaagctcccggaagagtgtattgaatggaattgtaaatggaattgacattaatgattggaacccatccacagacaagtttctcccttatcattattctgttgatgacctgtccggaaaggccaagtgtaaagctgaattgcagaaggagctgggtttacctataaggcccgatgtgcctctgattggctttattggaagattggactatcaaaaaggcattgatctaattaaacttgccattccagatctcatgcgggacaatattcaattcgtcatgcttggatctggtgacccaggttttgaaggatggatgagatccacagaatcagggtacagggataaatttcgtggatgggttggatttagtgttccagtttcccaccgaataactgcaggttgcgatatattgttgatgccatccagattcgaaccttgtggcctcaatcagctatatgctatgcaatatggtacagtgcctgttgttcatggaactggaggcctcagagatacagtggagaattttaacccgtttgctgagaaaggagagcagggtacagggtgggcattctcgccactaaccattgaaaaaaatgctgtgggcattgcggatggcaatttcgacatacagggaacacaagtcctcttgggagggtctaatgaagcgaggcatgtcaagcgactttacatgggaccatgccgcctcacagtatgaacagatcttcgaatgggccttcatggatcaaccatatgtcatgtaaatggatttgaaggaagcagcgaatttctccgaggaccctcaatcttcctgtctttcatgagcggaatgaaaactttgtacactacatggaaagggaaccagttatgcaaagttgcaaacgatcactcaaggttacccttgtaggcctgctacttggccaatatggttccagtgaccatatgcagagtcaggttcagatgaatggcacttgtgagtagtgaagaataagatgaggatgcttgaagcggtttcacatgtggctgataccacgcaagcaacctctcaatgcatcgaaatgtgagtcttggaatcaataggatttagctcccatcaattacagttgtacccttttttgcttaatactttgtcgcctgtgctgttcttatatttgtgtgaagataaattttagtccattaggtaactgtattgttgagtcttaaggtgaagactaaatagtgtttggaagctgtagctactgcgatgtcaagtgtcaa

SEQ ID NO: 4728 - protein, 626 aa, Oryza sativa (rice)
MATAAGMGIGAACLVAPQVRPGRRLRLQRVRRRCVAELSRDGGSAHGPLAPAPLVKQPVLPTFLVPTSTPPAPTQSPAPAPTPPPLPDSGVGEIEPDLEGLTEDSIDKTIFVASEQESEIMDVKEQAQAKVTRSVVFVTGEASPYAKSGGLGDVCGSLPIALALRGHRVMVVMPRYMNGALNKNFANAFYTEKHIKIPCFGGEHEVTFFHEYRDSVDWVFVDHPSYHRPGNLYGDNFGAFGDNQFRYTLLCYAACEAPLILELGGYIYGQKCMFVVNDWHASLVPVLLAAKYRPYGVYRDARSVLVIHNLAHQGVEPASTYPDLGLPPEWYGALEWVFPEWARRHALDKGEAVNFLKGAVVTADRIVTVSQGYSWEVTTAEGGQGLNELLSSRKSVLNGIVNGIDINDWNPSTDKFLPYHYSVDDLSGKAKCKAELQKELGLPIRPDVPLIGFIGRLDYQKGIDLIKLAIPDLMRDNIQFVMLGSGDPGFEGWMRSTESGYRDKFRGWVGFSVPVSHRITAGCDILLMPSRFEPCGLNQLYAMQYGTVPVVHGTGGLRDTVENFNPFAEKGEQGTGWAFSPLTIEKNAVGIADGNFDIQGTQVLLGGSNEARHVKRLYMGPCRLTV

SEQ ID NO: 4729 - DNA, 1818 bp, Zea mays (maize)
  CDS (1)..(1818)
atggcggctctggccacgtcgcagctcgtcgcaacgcgcgccggcctgggcgtcccggacgcgtccacgttccgccgcggcgccgcgcagggcctgaggggggcccgggcgtcggcggcggcggacacgctcagcatgcggaccagcgcgcgcgcggcgcccaggcaccagcagcaggcgcgccgcgggggcaggttcccgtcgctcgtcgtgtgcgccagcgccggcatgaacgtcgtcttcgtcggcgccgagatggcgccgtggagcaagaccggcggcctcggcgacgtcctcggcggcctgccgccggccatggccgcgaacgggcaccgtgtcatggtcgtctctccccgctacgaccagtacaaggacgcctgggacaccagcgtcgtgtccgagatcaagatgggagacgggtacgagacggtcaggttcttccactgctacaagcgcggagtggaccgcgtgttcgttgaccacccactgttcctggagagggtttggggaaagaccgaggagaagatctacgggcctgtcgctggaacggactacagggacaaccagctgcggttcagcctgctatgccaggcagcacttgaagctccaaggatcctgagcctcaacaacaacccatacttctccggaccatacggggaggacgtcgtgttcgtctgcaacgactggcacaccggccctctctcgtgctacctcaagagcaactaccagtcccacggcatctacagggacgcaaagaccgctttctgcatccacaacatctcctaccagggccggttcgccttctccgactacccggagctgaacctcccggagagattcaagtcgtccttcgatttcatcgacggctacgagaagcccgtggaaggccggaagatcaactggatgaaggccgggatcctcgaggccgacagggtcctcaccgtcagcccctactacgccgaggagctcatctccggcatcgccaggggctgcgagctcgacaacatcatgcgcctcaccggcatcaccggcatcgtcaacggcatggacgtcagcgagtgggaccccagcagggacaagtacatcgccgtgaagtacgacgtgtcgacggccgtggaggccaaggcgctgaacaaggaggcgctgcaggcggaggtcgggctcccggtggaccggaacatcccgctggtggcgttcatcggcaggctggaagagcagaagggccccgacgtcatggcggccgccatcccgcagctcatggagatggtggaggacgtgcagatcgttctgctgggcacgggcaagaagaagttcgagcgcatgctcatgagcgccgaggagaagttcccaggcaaggtgcgcgccgtggtcaagttcaacgcggcgctggcgcaccacatcatggccggcgccgacgtgctcgccgtcaccagccgcttcgagccctgcggcctcatccagctgcaggggatgcgatacggaacgccctgcgcctgcgcgtccaccggtggactcgtcgacaccatcatcgaaggcaagaccgggttccacatgggccgcctcagcgtcgactgtaacgtcgtggagccggcggacgtcaagaaggtggccaccacattgcagcgcgccatcaaggtggtcggcacgccggcgtacgaggagatggtgaggaactgcatgatccaggatctctcctggaagggccctgccaagaactgggagaacgtgctgctcagcctcggggtcgccggcggcgagccaggggtcgaaggcgaggagatcgcgccgctcgccaaggagaacgtggccgcgccctga

SEQ ID NO: 4730 - protein, 605 aa, Zea mays (maize)
MAALATSQLVATRAGLGVPDASTFRRGAAQGLRGARASAAADTLSMRTSARAAPRHQQQARRGGRFPSLVVCASAGMNVVFVGAEMAPWSKTGGLGDVLGGLPPAMAANGHRVMVVSPRYDQYKDAWDTSVVSEIKMGDGYETVRFFHCYKRGVDRVFVDHPLFLERVWGKTEEKIYGPVAGTDYRDNQLRFSLLCQAALEAPRILSLNNNPYFSGPYGEDVVFVCNDWHTGPLSCYLKSNYQSHGIYRDAKTAFCIHNISYQGRFAFSDYPELNLPERFKSSFDFIDGYEKPVEGRKINWMKAGILEADRVLTVSPYYAEELISGIARGCELDNIMRLTGITGIVNGMDVSEWDPSRDKYIAVKYDVSTAVEAKALNKEALQAEVGLPVDRNIPLVAFIGRLEEQKGPDVMAAAIPQLMEMVEDVQIVLLGTGKKKFERMLMSAEEKFPGKVRAVVKFNAALAHHIMAGADVLAVTSRFEPCGLIQLQGMRYGTPCACASTGGLVDTIIEGKTGFHMGRLSVDCNVVEPADVKKVATTLQRAIKVVGTPAYEEMVRNCMIQDLSWKGPAKNWENVLLSLGVAGGEPGVEGEEIAPLAKENVAAP

SEQ ID NO: 4731 - DNA, 1455 bp, Bacillus subtilis
  CDS (1)..(1455)
atgaagatattatttgctgtgtcagaatgcaccccatttgtgaaatcaggaggtcttgccgatgtagcaggtgctctgccaaaggcgcttgcgcgattaggcaatgaggtagctgtgatgctgccgaagtacagccaaatacctgaaccgtggaaaaagcgtatgaaaaaacaggctgagtgtaccgtagctgtcggctggcggcagcaatattgcggaattgaacatatggcagagaatgatgtgaattattacttcatcgacaatgagtactatttcaacagggattcgttgtacgggcattatgatgacggtgagcggtttgcctttttttcaagagctgtgctggaggctgccaaagttgtgaatgttcaagccgatattgttcatactcacgattggcatacagcgatggtcaattatttgctgaaagaggagtacagaaaacatcctttttatgaacggatgaaaagcgtgctcacgatccacaacctgcagtttcaaggcatattccctcctgatgtcacacatgacttgctgggtcttgagatggatcattttcattatgaaaggttagaatgcaacggatttgttaattttatgaaagcgggcatcattgcggctgatcatgtgacaactgtgagccccacttacagaaatgaaatcatgacgccgtattatggtgagcagttggaacaggttttgcaatatagggaagatgatgtaaccggcatattaaatggcattgatgatacgttctatcagccgaaaagcgacccttatatagaggcgcaatacgattcaggggatcttgcatgcaagctggaaaacaaaacgaagcttcagcagcggatggggcttccagagaaaaacgatattccgctgatcagtatggtgacaaggctcactaaacaaaaggggcttgatcttgtccgcagaattatgcacgaacttcttgaggagcaagacatacagctggttgtgctaggcacaggagaacgtgaatttgaagattatttccggtatgcagaatttgcttttcatgagaagtgccgggcttatatcgggtttgatgagccgctagcccatcaaatttatgcgggctctgatatgtttttgatgccgtcgaaatttgagccgtgcggtttggggcagctcattgctcttcaatatggcgccattccgattgtcagggaaacgggcggtctttacgacactgtccgtgcctatcaggaggaagagggaacgggcaatggctttacgttttccgcctttaatgcgcatgatctgaaatttacgatagaaagggcgctgtcgttttattgccaacaggatgtatggaagagcatcgtgaagaccgctatgaatgcagattacagctgggggaagtcggctaaagagtatcagcgtattttcgagcaggtgacaaggagtggacgggatgttctcgagtaa

SEQ ID NO: 4732 - protein, 484 aa, Bacillus subtilis
MKILFAVSECTPFVKSGGLADVAGALPKALARLGNEVAVMLPKYSQIPEPWKKRMKKQAECTVAVGWRQQYCGIEHMAENDVNYYFIDNEYYFNRDSLYGHYDDGERFAFFSRAVLEAAKVVNVQADIVHTHDWHTAMVNYLLKEEYRKHPFYERMKSVLTIHNLQFQGIFPPDVTHDLLGLEMDHFHYERLECNGFVNFMKAGIIAADHVTTVSPTYRNEIMTPYYGEQLEQVLQYREDDVTGILNGIDDTFYQPKSDPYIEAQYDSGDLACKLENKTKLQQRMGLPEKNDIPLISMVTRLTKQKGLDLVRRIMHELLEEQDIQLVVLGTGEREFEDYFRYAEFAFHEKCRAYIGFDEPLAHQIYAGSDMFLMPSKFEPCGLGQLIALQYGAIPIVRETGGLYDTVRAYQEEEGTGNGFTFSAFNAHDLKFTIERALSFYCQQDVWKSIVKTAMNADYSWGKSAKEYQRIFEQVTRSGRDVLE

SEQ ID NO: 4733 - DNA, 2168 bp, Manihot esculenta (cassava)
  CDS (75)..(1901)
atcaaatctccactccaccacaaccaccagcggaacctattttgcgcctaagcttctacaccggagagagcaccatggcaactgtaatagctgcacatttcgtttccaggagctcacacttgagcatccatgcattagagactaaggctaataatttgtctcacactggaccctggacccaaactatcactcccaatggtttaaggtccctcaacactatggataaactccaaatgaagacacaatcaaaagctgtgaaaaaggtctctgccaccggcaatggtaggcctgctgccaaaattatttgtggtcatggaatgaatttaatctttgttggagctgaagttggtccctggagcaaaactggtggacttggtgatgttcttggaggactcccccctgccatggccgcaagagggcaccgcgtcatgacagtgtctccccgctatgaccagtacaaggatgcttgggatacctctgtatcggtggagattaaaattggagatagaattgaaactgtccgcttcttccactcctacaaaagaggagttgatcgggtcttcgtggatcatccaatgttccttgagaaggtatggggcaaaactggatctaaaatatatggcccaagagcaggtttggattaccaggacaaccaactgcgatttagcttgttatgccttgctgctctggaggcaccgagagttctgaacttgaacagcagcaaaaatttctcaggaccctacggagaagaagttgccttcattgccaacgactggcacactgctctgcttccatgttatctaaaagccatttaccaacctatggggatttacaaacacgccaaggttgccttttgcatccacaacattgcatatcagggaagatttgccttctcagacttcccacgacttaatctgccagataaattcaaaagctcttttgactttatcgatgggtatgagaagcccgtgaagggaaggaaaatcaattggatgaaggccgggatattggaatcagacagggttttgactgtgagcccatactatgcccaagaagtcatctctggagttgaaagaggcgtcgagctggataacttcattcgtaaaactggcattgctggtattataaatggcatggacgtccaggagtggaatcctgttacagataaatacattgacatccactacgatgccacaactgttatggacgcaaaacctttgttgaaggaagcccttcaagcagaagtcggattgcctgttgataggaatgttcctttgataggcttcattggtagattagaagagcagaagggttcagatatttttgttgcagctatttcccaattggttgaacacaatgtgcagatagtaatccttggaactggcaaaaagaaatttgagaagcagattgagcatctggaggttttgtaccctgacaaggcaagaggagttgcaaaattcaatgtgccgttggcgcacatgatcacagctggtgctgactttatgctggttccaagtagatttgagccctgtggtctcattcagttgcatgctatgcgatatggaacagttcccattgttgcttctactggtggtcttgttgatactgttaaagaaggttacacaggattccaaatgggggccttgcatgttgaatgtgacaaaattgattcagcagatgtagctgcgatagttaaaactgtggcaagagctcttggcacttatgctaccgctgcattaagagaaatgatcctgaattgcatggcccaagacttgtcatggaagggaccagccagaatgtgggagaaaatgctcctggacctggaagttactggcagcgaacctggcactgaaggggaggagatcgctcctcttgctaaggagaacgttcccacgccttgagcagcaaggataatattaatcttgacggtgtagaaatattgacatttatggatatacgttaacgcgcagataaatatccattccagtaggctagtctgctgggatcaaaggcaccctttgtttttctattccaacggccatgatttctttgtgaagggtgaatggtgtctgaatcagtgttaaagagaatttacaactaacgtattacagcctttgcctggcgttatgtgcgtaaataaaggttcatcttctgacaaaaaaaaaaaa

SEQ ID NO: 4734 - protein, 608 aa, Manihot esculenta (cassava)
MATVIAAHFVSRSSHLSIHALETKANNLSHTGPWTQTITPNGLRSLNTMDKLQMKTQSKAVKKVSATGNGRPAAKIICGHGMNLIFVGAEVGPWSKTGGLGDVLGGLPPAMAARGHRVMTVSPRYDQYKDAWDTSVSVEIKIGDRIETVRFFHSYKRGVDRVFVDHPMFLEKVWGKTGSKIYGPRAGLDYQDNQLRFSLLCLAALEAPRVLNLNSSKNFSGPYGEEVAFIANDWHTALLPCYLKAIYQPMGIYKHAKVAFCIHNIAYQGRFAFSDFPRLNLPDKFKSSFDFIDGYEKPVKGRKINWMKAGILESDRVLTVSPYYAQEVISGVERGVELDNFIRKTGIAGIINGMDVQEWNPVTDKYIDIHYDATTVMDAKPLLKEALQAEVGLPVDRNVPLIGFIGRLEEQKGSDIFVAAISQLVEHNVQIVILGTGKKKFEKQIEHLEVLYPDKARGVAKFNVPLAHMITAGADFMLVPSRFEPCGLIQLHAMRYGTVPIVASTGGLVDTVKEGYTGFQMGALHVECDKIDSADVAAIVKTVARALGTYATAALREMILNCMAQDLSWKGPARMWEKMLLDLEVTGSEPGTEGEEIAPLAKENVPTP

SEQ ID NO: 4735 - DNA, 2035 bp, Pisum sativum (garden pea)
  CDS (82)..(1893)
gaattcccactcaccagcaaccaccttccttttgccgtcgatcactcttctctcaccgccgaaacagattttgacacaaaaatggcaacaataacgggatcttcaatgccgacgagaaccgcgtgcttcaattaccaaggaagatcagcagagtctaaactgaatttgcctcagatacacttcaataacaaccaagcgtttccagtattaggtttgagatctctcaacaagctgcacgtgcgtaccgcacgtgctacttccggttcttcagataccagtgaaaagtcattggggaaaatagtgtgtggaatgagcttggtgtttgttggagctgaagttggaccttggagtaaaactggtggactcggtgatgttcttggtggtcttccacctgttttagcaggaaatggacatcgagttatgactgtgtcaccgcgttatgatcaatacaaggatgcatgggatacgaatgtgctggttgaggttaaagttggagataaaattgaaactgtgcgtttctttcactgttacaagagaggagttgatcgtgtttttgtggatcatccacttttccttgaaagggtgtggggaaagactgggtcaaaactttatggtcctaaaactggaattgattatagagataatcaacttagattcagcttgttgtgtcaggctgcacttgaggcaccaagggttttgaacttaaacagcagcaaatatttctcaggaccatatggcgaagatgtaatctttgttgccaatgattggcactctgctcttattccatgctacttgaaatcgatgtacaagtctagagggctttacaaaaacgcaaaggtggccttttgtattcataacatagcttaccagggtagaaacgccttttcagacttctctcttctcaatttacctgatgaattccgaagctctttcgactttattgatgggtataataagccctgtgaagggaagaaaatcaattggatgaaggctggaatattagaatccgaccaagtgttcactgtaagtccacattatgccaaggaacttatttccggagaagacagaggtgtggaattggacaatatcattcgttcaacgggcatcattggtatcgttaatggcatggataatcgagagtggagtccacaaactgatagatacatagatgtacattacaatgaaacaactgtcaccgaagcaaaacctctcttgaaaggaactcttcaagccgagattgggttgccagttgacagcagtatccctttgatagggttcattggcaggctagaagagcagaaaggttcagatattctcgttgaagctattgccaagttcgctgacgaaaatgttcagatagtagttcttggaactggcaaaaagatcatggaaaagcaaatcgaggtactggaggaaaaatatcccggcaaagcaattgggataacaaaattcaacagccccttggctcacaaaattattgctggagctgactttatagtgatcccaagtagatttgagccctgtggtctagttcagttgcatgccatgccatatggaacggtgcctatagtttcctcaactggtggacttgttgacactgtgaaagaaggctatacaggattccacgctgggccgttcgatgtagagtgtgaagatgttgatccagatgatgtagataagttagcagcaactgtaaagagagcccttaaaacctatggtactcaagccatgaaacagataatcctgaactgcatggcccaaaacttctcgtggaagaaaccagccaaactgtgggagaaggcgctgttgaacctagaagtcacaggcaacgtagctggaatagatggggacgagattgctcctcttgcaaaggaaaatgtggctactccttgagaggagtgtcctcgtaaattcgcagttgatgaacaagttctacatgatcgaaaacatgaaccaatatgctaaaagtaatgtaaggtttctttggagtaaggtctttgtaagcaatctatgtagtttcaagaacatgagttgt

SEQ ID NO: 4736 - protein, 603 aa, Pisum sativum (garden pea)
MATITGSSMPTRTACFNYQGRSAESKLNLPQIHFNNNQAFPVLGLRSLNKLHVRTARATSGSSDTSEKSLGKIVCGMSLVFVGAEVGPWSKTGGLGDVLGGLPPVLAGNGHRVMTVSPRYDQYKDAWDTNVLVEVKVGDKIETVRFFHCYKRGVDRVFVDHPLFLERVWGKTGSKLYGPKTGIDYRDNQLRFSLLCQAALEAPRVLNLNSSKYFSGPYGEDVIFVANDWHSALIPCYLKSMYKSRGLYKNAKVAFCIHNIAYQGRNAFSDFSLLNLPDEFRSSFDFIDGYNKPCEGKKINWMKAGILESDQVFTVSPHYAKELISGEDRGVELDNIIRSTGIIGIVNGMDNREWSPQTDRYIDVHYNETTVTEAKPLLKGTLQAEIGLPVDSSIPLIGFIGRLEEQKGSDILVEAIAKFADENVQIVVLGTGKKIMEKQIEVLEEKYPGKAIGITKFNSPLAHKIIAGADFIVIPSRFEPCGLVQLHAMPYGTVPIVSSTGGLVDTVKEGYTGFHAGPFDVECEDVDPDDVDKLAATVKRALKTYGTQAMKQIILNCMAQNFSWKKPAKLWEKALLNLEVTGNVAGIDGDEIAPLAKENVATP

SEQ ID NO: 4737 - DNA, 1476 bp, Synechocystis sp
  CDS (1)..(1476)
atgtacatcgttcaaattgcctcagaatgcgcccccgtcattaaggctgggggattgggggatgttatttacggcctaagccgtgaattggaactgcggggccattgcgtcgagctaatcctacccatgtacgattgcatgcgctatgaccacatctggggtttacacgatgcttaccgcaacctagaggtgccctggtatggaagctcaatcttctgtgatgttttttgtggctgggttcacggtaggctctgcttcttcattcagcccaaatcttctgataactttttcaatcggggtcattattatggcgctctagacgaccatatgcgctttgcctttttctccaaggcggccatggagtttttgctacgcagtaacaaacgcccagacattatccactgccacgattggcaaacgggactggtgccggtgttgttgtatgaaatttaccgtttccatggcatggaccatcaacgggtttgttacaccatccacaatttcaaacaccagggtattgctggagccaatattctccacgccactgggctcaataatgacagttattatttcagctacgatcgcctgcaggataatttcaatcccaatgcgattaacttcatgaaggggggcattgtctactccaactatgtcaacaccgtttccccccaccatgcttgggaagcccgtttttccgatatttcctgtggcttgggccataccctggaaatccatcagcaaaaattcggcggtattttgaacggtttggattacgaagtgtggaacccagaaattgatcctttactggcgagtaacttcagtgtcaaaacctttggcgataaggcaaaaaataagcaagcgttacgggaaagattactgttagaaacggatgataaaaaacccatgctctgctttattggccgcttggatggacaaaaaggtgtgcacttggtgcatcactccatctactacgccctcagccagggagcgcaatttgtcctgctcggctccgccaccgaacccaatctgagcaaatggttctggcatgaaaaacaacatctcaacgataaccccaatgtccatctagagttgggctttgacgaggagctggcccacttaatttacggagcggcggacattattgtggtgcccagtaactacgaaccctgtggtttgacccaaatgattggtctgcgttatggggccgttccggtggtgcggggagtaggcggtttggtaaatactgttttcgaccgggattatgaccagaaccatcccccggagaaacgtaatggttttgttttctatcaaccggatgagtatgccctggaaacggccctcagtcgggcgatcgccttgtataaggatgatcccgtggcttttaaaaccttggccttgcagggcatggcctacgactactcttggaataaaccagggctccaatatgtggaagcctacgaatacatccgggcttaa

SEQ ID NO: 4738 - protein, 491 aa, Synechocystis sp
MYIVQIASECAPVIKAGGLGDVIYGLSRELELRGHCVELILPMYDCMRYDHIWGLHDAYRNLEVPWYGSSIFCDVFCGWVHGRLCFFIQPKSSDNFFNRGHYYGALDDHMRFAFFSKAAMEFLLRSNKRPDIIHCHDWQTGLVPVLLYEIYRFHGMDHQRVCYTIHNFKHQGIAGANILHATGLNNDSYYFSYDRLQDNFNPNAINFMKGGIVYSNYVNTVSPHHAWEARFSDISCGLGHTLEIHQQKFGGILNGLDYEVWNPEIDPLLASNFSVKTFGDKAKNKQALRERLLLETDDKKPMLCFIGRLDGQKGVHLVHHSIYYALSQGAQFVLLGSATEPNLSKWFWHEKQHLNDNPNVHLELGFDEELAHLIYGAADIIVVPSNYEPCGLTQMIGLRYGAVPVVRGVGGLVNTVFDRDYDQNHPPEKRNGFVFYQPDEYALETALSRAIALYKDDPVAFKTLALQGMAYDYSWNKPGLQYVEAYEYIRA

SEQ ID NO: 4739 - DNA, 1434 bp, Synechocystis sp
  CDS (1)..(1434)
atgaagattttatttgtggcggcggaagtatcccccctagcaaaggtaggtggcatgggggatgtggtgggttccctgcctaaagttctgcatcagttgggccatgatgtccgtgtcttcatgccctactacggtttcatcggcgacaagattgatgtgcccaaggagccggtctggaaaggggaagccatgttccagcagtttgctgtttaccagtcctatctaccggacaccaaaattcctctctacttgttcggccatccagctttcgactcccgaaggatctatggcggagatgacgaggcgtggcggttcacttttttttctaacggggcagctgaatttgcctggaaccattggaagccggaaattatccattgccatgattggcacactggcatgatccctgtttggatgcatcagtccccagacatcgccaccgttttcaccatccataatcttgcttaccaagggccctggcggggcttgcttgaaactatgacttggtgtccttggtacatgcagggagacaatgtgatggcggcggcgattcaatttgccaatcgggtgactaccgtttctcccacctatgcccaacagatccaaaccccggcctatggggaaaagctggaagggttattgtcctacctgagtggtaatttagtcggtattctcaacggtattgatacggagatttacaacccggcggaagaccgctttatcagcaatgttttcgatgcggacagtttggacaagcgggtgaaaaataaaattgccatccaggaggaaacggggttagaaattaatcgtaatgccatggtggtgggtatagtggctcgcttggtggaacaaaaggggattgatttggtgattcagatccttgaccgcttcatgtcctacaccgattcccagttaattatcctcggcactggcgatcgccattacgaaacccaactttggcagatggcttcccgatttcctgggcggatggcggtgcaattactccacaacgatgccctttcccgtcgagtctatgccggggcggatgtgtttttaatgccttctcgctttgagccctgtgggctgagtcaattgatggccatgcgttatggctgtatccccattgtgcggcggacagggggtttggtggatacggtatccttctacgatcctatcaatgaagccggcaccggctattgctttgaccgttatgaacccctggattgctttacggccatggtgcgggcctgggagggtttccgtttcaaggcagattggcaaaaattacagcaacgggccatgcgggcagactttagttggtaccgttccgccggggaatatatcaaagtttataagggcgtggtggggaaaccggaggaattaagccccatggaagaggaaaaaatcgctgagttaactgcttcctatcgctaa

SEQ ID NO: 4740 - protein, 477 aa, Synechocystis sp
MKILFVAAEVSPLAKVGGMGDVVGSLPKVLHQLGHDVRVFMPYYGFIGDKIDVPKEPVWKGEAMFQQFAVYQSYLPDTKIPLYLFGHPAFDSRRIYGGDDEAWRFTFFSNGAAEFAWNHWKPEIIHCHDWHTGMIPVWMHQSPDIATVFTIHNLAYQGPWRGLLETMTWCPWYMQGDNVMAAAIQFANRVTTVSPTYAQQIQTPAYGEKLEGLLSYLSGNLVGILNGIDTEIYNPAEDRFISNVFDADSLDKRVKNKIAIQEETGLEINRNAMVVGIVARLVEQKGIDLVIQILDRFMSYTDSQLIILGTGDRHYETQLWQMASRFPGRMAVQLLHNDALSRRVYAGADVFLMPSRFEPCGLSQLMAMRYGCIPIVRRTGGLVDTVSFYDPINEAGTGYCFDRYEPLDCFTAMVRAWEGFRFKADWQKLQQRAMRADFSWYRSAGEYIKVYKGVVGKPEELSPMEEEKIAELTASYR

SEQ ID NO: 4741 - DNA, 2868 bp, Zea mays (maize)
  CDS (670)..(2868)
gcggccgcttttttttaaaatctgtggagaaggctttattattagctcataatacttttgatgcatcaataggcctctcccacctcacattagtctcaacattgacttcatattatacaaccctaagaaggttgatcggctgcaacaattgaaatctaaagactacgtcaagcgcttccctcttgtgatatcatcagtttgctggaaccttgtagcttccgcactggaagccatgctcaaatggcctcttacactgctcagcaacatacacaaccttctccatgcacacaaccttctcagtttctttggtgaccttggagcacaagcaagaaacgtttgccttcttgatgacaccacagcaagcatccgaaggagggacctttggattagctgggaacatcacgtatgtcttgcagtcacttatcaggctttggaggtcattctcacagtctccatcagcatgagagcctatggcaaacatagctgctacaaaggagagggctaagaacaggctcaacagttttgccatgtttactagttcttgggggacgcctattgaaagctgtccgctgcccaccgcgtgcgctgcgctcccgtgcggcactgccggcggcgcgaccccgcgcccattggacgagcttccgccccgccccgatcgatcccgccgccatgtcgtcggcggccgtgtcgtcctcttcctccaccttcttcctcgcgctcgcctccgcctcccccgggggccgcaggcgggctagggtcggctcctcgccgttccacaccggcgccagcctgagtttcgcgttctgggcgccaccgtcgccgccgcgcgcgccccgggacgcagcgctggtgcgcgctgaggctgaggccgggggcaaggacgcgccgccggagaggagcggcgacgccgccaggttgccccgcgctcggcgcaatgcggtctccaaacggagggatcctcttcagccggtcggccggtacggctccgcgacgggaaacacggccaggaccggcgccgcgtcctgccagaacgccgcattggcggacgttgagatcaagtccatcgtcgccgcgccgccgacgagcatagtgaagttcccagcgccgggctacaggatgatccttccctctggggacatagcgccggagactgtcctcccagccccgaagccactgcatgaatcgcctgcggttgacggagattcaaatggaattgcacctcctacagttgagccattagtacaggaggccacttgggatttcaagaaatacatcggttttgacgagcctgacgaagcgaaggatgattccagggttggtgcagatgatgctggttcttttgaacattatggggacaatgattctgggcctttggccggggagaatgttatgaacgtgatcgtggtggctgctgaatgttctccatggtgcaaaacaggtggtcttggagatgttgtgggagctttacccaaggctttagcgagaagaggacatcgtgttatggttgtggtaccaaggtatggggactatgtggaagcctttgatatgggaatccggaaatactacaaagctgcaggacaggacctagaagtgaactatttccatgcatttattgatggagtcgactttgtgttcattgatgcccctcttttccggcaccgtcaagatgacatatatgggggaagtaggcaggaaatcatgaagcgcatgattttgttttgcaaggttgctgttgaggttccttggcacgttccatgcggtggtgtgtgctacggagatggaaatttggtgttcattgccaatgattggcacactgcactcctgcctgtttatctgaaggcatattacagagaccatgggttaatgcagtacactcgctccgtcctcgtcatacataacatcgcccaccagggccgtggtcctgtagatgaattcccgtacatggacttgcctgaacactaccttcaacatttcgagctgtacgatcccgtcggtggcgagcacgccaacatctttgccgcgggtctgaagatggcagaccgggtggtgactgtcagccgcggctacctgtgggagctgaagacagtggaaggcggctggggcctccacgacatcatccgttctaacgactggaagatcaatggcatcgtgaacggcatcgaccaccaggagtggaaccccaaggtggacgtgcacctgcggtcggacggctacaccaactactccctcgagacactcgacgctggaaagcggcagtgcaaggcggccctgcagcgggagctgggcctggaagtgcgcgacgacgtgccgctgctcggcttcatcgggcgtctggatggacagaagggcgtggacatcatcggggacgcgatgccgtggatcgcggggcaggacgtgcagctggtgatgctgggcaccgggcgcgccgacctggaacgaatgctgcagcacttggagcgggagcatcccaacaaggtgcgcgggtgggtcgggttctcggtgcctatggcgcatcgcatcacggcgggcgccgacgtgctggtgatgccttcccgcttcgagccctgcgggctgaaccagctctacgcgatggcgtacggcaccgtccctgtggtgcacgccgtgggcgggctcagggacaccgtggcgccgttcgacccgttcggcgacgccgggctcgggtggacttttgaccgcgccgaggccaacaagctgatcgaggcgctcaggcactgcctcgacacgtaccggaagtacggggagagctggaagagtctccaggcgcgcggcatgtcgcaggacctcagctgggaccacgcggctgagctctacgaggacgtccttgtcaaggccaagtaccagtggtag

SEQ ID NO: 4742 - protein, 732 aa, Zea mays (maize)
MSSAAVSSSSSTFFLALASASPGGRRRARVGSSPFHTGASLSFAFWAPPSPPRAPRDAALVRAEAEAGGKDAPPERSGDAARLPRARRNAVSKRRDPLQPVGRYGSATGNTARTGAASCQNAALADVEIKSIVAAPPTSIVKFPAPGYRMILPSGDIAPETVLPAPKPLHESPAVDGDSNGIAPPTVEPLVQEATWDFKKYIGFDEPDEAKDDSRVGADDAGSFEHYGDNDSGPLAGENVMNVIVVAAECSPWCKTGGLGDVVGALPKALARRGHRVMVVVPRYGDYVEAFDMGIRKYYKAAGQDLEVNYFHAFIDGVDFVFIDAPLFRHRQDDIYGGSRQEIMKRMILFCKVAVEVPWHVPCGGVCYGDGNLVFIANDWHTALLPVYLKAYYRDHGLMQYTRSVLVIHNIAHQGRGPVDEFPYMDLPEHYLQHFELYDPVGGEHANIFAAGLKMADRVVTVSRGYLWELKTVEGGWGLHDIIRSNDWKINGIVNGIDHQEWNPKVDVHLRSDGYTNYSLETLDAGKRQCKAALQRELGLEVRDDVPLLGFIGRLDGQKGVDIIGDAMPWIAGQDVQLVMLGTGRADLERMLQHLEREHPNKVRGWVGFSVPMAHRITAGADVLVMPSRFEPCGLNQLYAMAYGTVPVVHAVGGLRDTVAPFDPFGDAGLGWTFDRAEANKLIEALRHCLDTYRKYGESWKSLQARGMSQDLSWDHAAELYEDVLVKAKYQW

SEQ ID NO: 4743 - DNA, 2480 bp, Zea mays (maize)
  CDS (58)..(2154)
gcggccgcctggtaggcgctggtacaagcggaagcagcagtagcgtgaggcatccccatgccgggggcaatctcttcctcgtcgtcggcttttctcctccccgtcgcgtcctcctcgccgcggcgcaggcggggcagtgtgggtgctgctctgcgctcgtacggctacagcggcgcggagctgcggttgcattgggcgcggcggggcccgcctcaggatggagcggcgtcggtacgcgccgcagcggcaccggccgggggcgaaagcgaggaggcagcgaagagctcctcctcgtcccaggcgggcgctgttcagggcagcacggccaaggctgtggattctgcttcacctcccaatcctttgacatctgctccgaagcaaagtcagagcgctgcaatgcaaaacggaacgagtgggggcagcagcgcgagcaccgccgcgccggtgtccggacccaaagctgatcatccatcagctcctgtcaccaagagagaaatcgatgccagtgcggtgaagccagagcccgcaggtgatgatgctagaccggtggaaagcataggcatcgctgaaccggtggatgctaaggctgatgcagctccggctacagatgcggcggcgagtgctccttatgacagggaggataatgaacctggccctttggctgggcctaatgtgatgaacgtcgtcgtggtggcttctgaatgtgctcctttctgcaagacaggtggccttggagatgtcgtgggtgctttgcctaaggctctggcgaggagaggacaccgtgttatggtcgtgataccaagatatggagagtatgccgaagcccgggatttaggtgtaaggagacgttacaaggtagctggacaggattcagaagttacttattttcactcttacattgatggagttgattttgtattcgtagaagcccctcccttccggcaccggcacaataatatttatgggggagaaagattggatattttgaagcgcatgattttgttctgcaaggccgctgttgaggttccatggtatgctccatgtggcggtactgtctatggtgatggcaacttagttttcattgctaatgattggcataccgcacttctgcctgtctatctaaaggcctattaccgggacaatggtttgatgcagtatgctcgctctgtgcttgtgatacacaacattgctcatcagggtcgtggccctgtagacgacttcgtcaattttgacttgcctgaacactacatcgaccacttcaaactgtatgacaacattggtggggatcacagcaacgtttttgctgcggggctgaagacggcagaccgggtggtgaccgttagcaatggctacatgtgggagctgaagacttcggaaggcgggtggggcctccacgacatcataaaccagaacgactggaagctgcagggcatcgtgaacggcatcgacatgagcgagtggaaccccgctgtggacgtgcacctccactccgacgactacaccaactacacgttcgagacgctggacaccggcaagcggcagtgcaaggccgccctgcagcggcagctgggcctgcaggtccgcgacgacgtgccactgatcgggttcatcgggcggctggaccaccagaagggcgtggacatcatcgccgacgcgatccactggatcgcggggcaggacgtgcagctcgtgatgctgggcaccgggcgggccgacctggaggacatgctgcggcggttcgagtcggagcacagcgacaaggtgcgcgcgtgggtggggttctcggtgcccctggcgcaccgcatcacggcgggcgcggacatcctgctgatgccgtcgcggttcgagccgtgcgggctgaaccagctctacgccatggcgtacgggaccgtgcccgtggtgcacgccgtgggggggctccgggacacggtggcgccgttcgacccgttcaacgacaccgggctcgggtggacgttcgaccgcgcggaggcgaaccggatgatcgacgcgctctcgcactgcctcaccacgtaccggaactacaaggagagctggcgcgcctgcagggcgcgcggcatggccgaggacctcagctgggaccacgccgccgtgctgtatgaggacgtgctcgtcaaggcgaagtaccagtggtgagcgaattaattggcgacgcgacgccgctcctgtcgcaggacctggacgttatttagaaggctcttctccctggcggctttgatgcgtgcgtcgcatttgcgccgggcggacgggcgacggtggttggcctaccgcctacgtcggctgcgtgccctgggaatttgggcgggcacgatgatgccactgggcaccgggcgcggggtagtatgatatgaaaccgacggcgatggagatgaggcgcatggcattttcccactgataaatggggagttgtatgctactttaatatcgccactcctgttagtatttatattgatggcggccgc

SEQ ID NO: 4744 - protein, 698 aa, Zea mays (maize)
MPGAISSSSSAFLLPVASSSPRRRRGSVGAALRSYGYSGAELRLHWARRGPPQDGAASVRAAAAPAGGESEEAAKSSSSSQAGAVQGSTAKAVDSASPPNPLTSAPKQSQSAAMQNGTSGGSSASTAAPVSGPKADHPSAPVTKREIDASAVKPEPAGDDARPVESIGIAEPVDAKADAAPATDAAASAPYDREDNEPGPLAGPNVMNVVVVASECAPFCKTGGLGDVVGALPKALARRGHRVMVVIPRYGEYAEARDLGVRRRYKVAGQDSEVTYFHSYIDGVDFVFVEAPPFRHRHNNIYGGERLDILKRMILFCKAAVEVPWYAPCGGTVYGDGNLVFIANDWHTALLPVYLKAYYRDNGLMQYARSVLVIHNIAHQGRGPVDDFVNFDLPEHYIDHFKLYDNIGGDHSNVFAAGLKTADRVVTVSNGYMWELKTSEGGWGLHDIINQNDWKLQGIVNGIDMSEWNPAVDVHLHSDDYTNYTFETLDTGKRQCKAALQRQLGLQVRDDVPLIGFIGRLDHQKGVDIIADAIHWIAGQDVQLVMLGTGRADLEDMLRRFESEHSDKVRAWVGFSVPLAHRITAGADILLMPSRFEPCGLNQLYAMAYGTVPVVHAVGGLRDTVAPFDPFNDTGLGWTFDRAEANRMIDALSHCLTTYRNYKESWRACRARGMAEDLSWDHAAVLYEDVLVKAKYQW

SEQ ID NO: 4745 - DNA, 6027 bp, Zea mays (maize)
  CDS (120)..(5144)
gaattccctagttcagagaaagaaagaagttgagaatgagaagcaagtgaggcgcgtttgctgggaagtggttcttgtgaggtttaggagttcacccttcttttcttccccttctagaaatggagatggtcctacggtcgcagagccctctctgccttcggagtgggccggtgctcatttttcgaccaaccgtcgcgggcggaggagggggcactcagtctttgttgaggactaccagatttgcgagaagaagggtcattcgatgcgttgtagcaagtccaggttgtcctaataggaaatctaggacagcgtctcccaacgtaaaagtagctgcttatagcaactatgcgccaagactcctcgttgagtcaagctccaagaagagcgaacaccatgatagcagcagacaccgtgaagaaactattgatacatacaatgggctgtcaggttctgatgcagcagaattgacaagtaatagagatgtagaaattgaagtggatttgcagcacatttctgaggaggaattgccaggaaaagtatcgattaatgcatcattaggagaaatggaaacagtggatgaagctgaggtcgaggaggataagtttgaggtagatacctcaggaattgtattgcgcaatgttgcagttcgggaagtggatccaaaggatgaacataatgctaaagatgtatttgtggtagattcgtcaggaactgcaccagataatgctgcagtggaggaagtggtagatgaagctgaggttgaagaggatatggttgatgtggatatcttgggacttgacttgaataatgcaacgatcgaggaaattgatttgatggaagaggctttactggagaacttcgacgtggattcaccaggcaatgcttctagtggtcgaacctatgggggtgtggatgagttgggtgagctgccttcaacatccgtggattgcatcgccattaacggaaaacgtagaagtttgaagcctaagcccttgccaattgtcaggttccaggaacaagaacagatagttttaagcattgttgacgaagaagggttgattgctagttcatgtgaagaaggccaaccggtggtagattacgataagcaagaggaaaactctaccgctttcgatgaacagaagcaattaactgatgatttccctgaagaaggcatatctatagttcacttccctgagccaaacaatgatattgttggatcctcaaaattcttggagcaaaaacaagaattggatggttcttataaacaagatcgatcaaccactggattgcatgaacaagatcagtctgttgttagttcacacggacaagataaatcaattgttggtgtgcctcagcaaatccagtacaatgatcaatctattgctggttctcatagacaagatcaatcaattgccggtgcacctgagcaaatccaatccgttgctggctatataaaaccaaatcaatctattgttggttcttgtaaacaacatgaattgattattcctgagcctaagaaaatcgaatccatcatcagttacaatgaaatagatcaatctattgttggttctcacaaacaagacaaatctgttgttagtgtgcctgagcaaatccaatccattgttagtcacagcaaaccaaatcaatctactgttgattcttatagacaagctgaatcaattattggtgtgcctgagaaagtccaatccatcaccagttacgataaactagaccagtccattgttggttctcttaaacaagatgagcctattattagcgtgcctgagaaaatccaatccattgtccattacactaaaccaaatcagtctattgttggcttgcccaaacaacaacaatcaattgttcatatcgttgaaccaaaacagtccatagatggtttccctaaacaagatctatcaatcgttggtatctccaatgagtttcaaacaaagcaactggctactgttgggactcatgatggattgcttatgaagggtgtggaagctaaggagacatctcaaaagactgaaggggatacacttcaggcaacgttcaatgtcgacaacttgtcacagaaacaggaaggcttaactaaagaagcagacgagataacaattattgagaaaatcaatgatgaagaccttgtgatgattgaagaacagaaaagcatagccatgaatgaagaacagacgattgttaccgaagaagacattccaatggctaaggttgagataggaattgacaaggccaaatttttacatctgctttctgaagaagagagttcatgggatgaaaatgaagtgggaataattgaggctgatgaacagtatgaagtcgatgagacatctatgtccactgaacaagatatccaggaatcacctaatgatgatttggatccacaagcactatggagtatgcttcaagagcttgctgaaaaaaattattcgctgggaaacaagttgtttacttatccagatgtattgaaagctgattcaacaattgatctctatttcaatcgtgatctatcagctgtggccaatgagcctgatgtacttatcaaaggagcattcaatgggtggaagtggagatttttcactgaaaaattgcacaagagcgagctggcaggggactggtggtgctgcaaactatacattcctaagcaggcatacagaatggactttgtgttttttaacggacacacggtatatgaaaataataacaataatgatttcgtgatacaaatagaaagcaccatggatgaaaatttatttgaggatttcttggctgaagaaaagcaacgagaacttgagaaccttgcaaatgaggaagctgaaaggaggagacaaactgatgagcagcggcgaatggaggaagaaagggccgcagataaagctgacagggtacaagccaaggttgaggtagagacgaagaagaataaattgtgcaatgtattgggtttagccagagctcctgttgataatttatggtacattgagcccatcacgactggacaagaggctactgtcagattgtattataacataaactcaagacctctagttcacagtactgagatatggatgcatggtggctataacaattggattgatggactctcttttgctgaaaggcttgttcatcatcatgacaaagattgtgattggtggtttgcagatgttgtcgtgcctgaaagaacatatgtattggactgggtttttgctgacggcccaccagggagtgcaaggaattatgacaacaatggaggacatgattttcatgctacccttccaaataacatgactgaggaagagtattggatggaagaagaacaaaggatctatacaaggcttcaacaagagaggagggaaagggaggaggctattaaaaggaaggctgagagaaatgcaaaaatgaaagctgagatgaaggaaaagactatgagaatgttcctggtttctcagaaacacattgtttacaccgaaccacttgaaatacatgctggaactactattgatgtgctttataatccttctaatacagttctaactggaaagccagaggtttggtttcgatgttcctttaatcgttggatgtatccaggtggggtgttgccacctcagaagatggtacaagcagaaaatggttcacacctaaaagcaacagtttacgttccacgagatgcctatatgatggacttcgttttctcggagtcagaagaaggtggaatttatgataacagaaatgggttagactatcatattcctgtttttgggtcaattgcaaaggaaccacctatgcacattgtccacattgctgttgagatggcaccaatcgcaaaggttggaggtcttggtgatgttgtcactagtctttcacgtgctgtgcaagatttaggacacaatgtggaggttattcttccaaagtacggttgcttgaatctaagcaatgtcaagaatctacaaatccatcagagtttttcttggggtggttctgaaataaatgtgtggcgtggactagtcgaaggcctttgtgtttacttcctggaacctcaaaatgggatgtttggagtcggatatgtatatggcagggacgatgaccgccgatttggcttcttctgtcgttctgctctagagtttctcctccaaagtggatcttctccgaacataatacattgccatgattggtcaagtgctcctgttgcctggctacacaaggaaaactacgcgaagtctagcttggcaaacgcacgggtggtattcaccatccacaatcttgaatttggagcgcatcatattggcaaagcaatgagatattgtgataaagcaacaactgtctctaatacatattcaaaggaagtgtcaggtcatggtgccatagttcctcatcttgggaaattctatggcattctcaatggaattgatccggatatatgggatccgtacaatgacaactttatcccggtccactacacttgtgagaatgtggttgaaggcaagagggctgctaagagggcactgcagcagaagtttgggttacagcaaatcgatgtccccgtcgtaggaatcgtcactcgcctgacagcccaaaaggggatccacctgatcaagcatgcgattcaccgtacactcgaacggaacggacaggtggttttgcttggttcagcgccggactctcgaatccaagctgattttgtcaacctggcgaatacgctccacggcgtaaaccatgggcaagtgaggctttccttgacctacgacgagcctctctcgcatctgatatacgctggctctgacttcattctggtcccatctatatttgagccttgcggcctaactcagctcgtcgccatgcggtatggaaccatcccgattgtccgcaagactggagggctcttcgacactgtcttcgatgtggacaatgacaaggaacgagcccgagatcgaggccttgagcccaacgggtttagctttgacggagctgatagcaacggtgttgactacgcgctgaacagggcgatctcagcttggttcgatgcccggagctggttccactccctttgcaagagagtcatggagcaggactggtcgtggaaccgacctgccctcgactacatcgagctctaccgttcagcgtccaaattgtaataatccaaacaacggccaatgtagtgtgttgtctgcaggtctcagatgcagccattcagcttttgcaggttcctgggcattgctgtacagcctccttgtctttagttagctccattccccgaggagcacagtgcaattttttatcctcagttattatgcatagattgtctcagtagaatgctttcttcgggcatgtatgtttgtttcctctgttgttgaattctggtgttaagtcgcgtataggaatctacaggaaatgaaaaagtccatttcctgcgtcaaccttttagggctaccatgcacatgagacctttcaagtgcaaagaatattaggactagactactagtatgtgaactctatttttccaagagatttcaatttttccaatgaaaaataaactaatttttcttggaaaaatggaaatcccttggaaaaatggggttcccaaactagcccgtagagtatagatcatagaattggtctagtggttcctcgagagagaaaaaaacatagacttttcttgtcatatgcttatttaagtttattttgtacaaactttgagaaccttcaaaaacaccccaatggctggttaagtgaccagggaaataaagaggatctatagggaggaatcccccgcctctctctcacagatgttgcctagcaccggccagcctcatccgtccagtggaattaaggttggttgcgacgacagcccatcaatggaaaccaacctcgtgccccgtgccgggatctaccttccttcctcaccaccacgccgatctcaccttccataggagcttcctatgcactgttacctattataggtacatgacattgtacatctttgtatgaacttacatcaatgccaaaaatccggaattc

SEQ ID NO: 4746 - protein, 1674 aa, Zea mays (maize)
MEMVLRSQSPLCLRSGPVLIFRPTVAGGGGGTQSLLRTTRFARRRVIRCVVASPGCPNRKSRTASPNVKVAAYSNYAPRLLVESSSKKSEHHDSSRHREETIDTYNGLSGSDAAELTSNRDVEIEVDLQHISEEELPGKVSINASLGEMETVDEAEVEEDKFEVDTSGIVLRNVAVREVDPKDEHNAKDVFVVDSSGTAPDNAAVEEVVDEAEVEEDMVDVDILGLDLNNATIEEIDLMEEALLENFDVDSPGNASSGRTYGGVDELGELPSTSVDCIAINGKRRSLKPKPLPIVRFQEQEQIVLSIVDEEGLIASSCEEGQPVVDYDKQEENSTAFDEQKQLTDDFPEEGISIVHFPEPNNDIVGSSKFLEQKQELDGSYKQDRSTTGLHEQDQSVVSSHGQDKSIVGVPQQIQYNDQSIAGSHRQDQSIAGAPEQIQSVAGYIKPNQSIVGSCKQHELIIPEPKKIESIISYNEIDQSIVGSHKQDKSVVSVPEQIQSIVSHSKPNQSTVDSYRQAESIIGVPEKVQSITSYDKLDQSIVGSLKQDEPIISVPEKIQSIVHYTKPNQSIVGLPKQQQSIVHIVEPKQSIDGFPKQDLSIVGISNEFQTKQLATVGTHDGLLMKGVEAKETSQKTEGDTLQATFNVDNLSQKQEGLTKEADEITIIEKINDEDLVMIEEQKSIAMNEEQTIVTEEDIPMAKVEIGIDKAKFLHLLSEEESSWDENEVGIIEADEQYEVDETSMSTEQDIQESPNDDLDPQALWSMLQELAEKNYSLGNKLFTYPDVLKADSTIDLYFNRDLSAVANEPDVLIKGAFNGWKWRFFTEKLHKSELAGDWWCCKLYIPKQAYRMDFVFFNGHTVYENNNNNDFVIQIESTMDENLFEDFLAEEKQRELENLANEEAERRRQTDEQRRMEEERAADKADRVQAKVEVETKKNKLCNVLGLARAPVDNLWYIEPITTGQEATVRLYYNINSRPLVHSTEIWMHGGYNNWIDGLSFAERLVHHHDKDCDWWFADVVVPERTYVLDWVFADGPPGSARNYDNNGGHDFHATLPNNMTEEEYWMEEEQRIYTRLQQERREREEAIKRKAERNAKMKAEMKEKTMRMFLVSQKHIVYTEPLEIHAGTTIDVLYNPSNTVLTGKPEVWFRCSFNRWMYPGGVLPPQKMVQAENGSHLKATVYVPRDAYMMDFVFSESEEGGIYDNRNGLDYHIPVFGSIAKEPPMHIVHIAVEMAPIAKVGGLGDVVTSLSRAVQDLGHNVEVILPKYGCLNLSNVKNLQIHQSFSWGGSEINVWRGLVEGLCVYFLEPQNGMFGVGYVYGRDDDRRFGFFCRSALEFLLQSGSSPNIIHCHDWSSAPVAWLHKENYAKSSLANARVVFTIHNLEFGAHHIGKAMRYCDKATTVSNTYSKEVSGHGAIVPHLGKFYGILNGIDPDIWDPYNDNFIPVHYTCENVVEGKRAAKRALQQKFGLQQIDVPVVGIVTRLTAQKGIHLIKHAIHRTLERNGQVVLLGSAPDSRIQADFVNLANTLHGVNHGQVRLSLTYDEPLSHLIYAGSDFILVPSIFEPCGLTQLVAMRYGTIPIVRKTGGLFDTVFDVDNDKERARDRGLEPNGFSFDGADSNGVDYALNRAISAWFDARSWFHSLCKRVMEQDWSWNRPALDYIELYRSASKL

SEQ ID NO: 4747 - DNA, 2991 bp, Zea mays (maize)
  misc_feature (2709)..(2709): n is a, c, g, or t
  CDS (602)..(2470)
gaattcgcggccgccttatttctggttggccacatacatcatccaaaaaactttattattgaattacaactaataagcaatctaaaagagggcaccaccaatgatgtgttgttggtaggaggccgctgggtctgtcaaagcaagttggacaaagggcaacaattgttgtagttgtaagagggttgcggggttagccgcaaactgctggtagaaaggcagcaactgttgctgtgtcaagaaggaagcacggtttgctgcagctgttgtgccctgatggtttgtaccaatgactgcaccaaagatagggctggcgattgttgaaacaacaagggcgataaaggtatgttgcttgctgcgattgcttgttgaagcctatatggttgaagagctgggttttcacatattgaagctataattgatggaaggtatgggggaagaagggaagctataggagcttgtgagcattgagggaaaattgtcgcgttagcaacacatgtagaaagagcaaggagcataaggagggaaaatatcttggtcgccattgttgcgcgcgatccacggcccccgccccccgcgctcctgtctgctctccctctccgcaatggcgacgccctcggccgtgggcgccgcgtgcctcctcctcgcgcgggccgcctggccggccgccgtcggcgaccgggcgcgcccgcggcggctccagcgcgtgctgcgccgccggtgcgtcgcggagctgagcagggaggggcccgcgccgcgcccgctgccacccgcgctgctggcgcccccgctcgtgcccggcttcctcgcgccgccggccgagcccacgggtgagccggcatcgacgccgccgcccgtgcccgacgccggcctgggggacctcggtctcgaacctgaagggattgctgaaggttccatcgataacacagtagttgtggcaagtgagcaagattctgagattgtggttggaaaggagcaagctcgagctaaagtaacacaaagcattgtctttgtaaccggcgaagcttctccttatgcaaagtctgggggtctaggagatgtttgtggttcattgccagttgctcttgctgctcgtggtcaccgtgtgatggttgtaatgcccagatatttaaatggtacctccgataagaattatgcaaatgcattttacacagaaaaacacattcggattccatgctttggcggtgaacatgaagttaccttcttccatgagtatagagattcagttgactgggtgtttgttgatcatccctcatatcacagacctggaaatttatatggagataagtttggtgcttttggtgataatcagttcagatacacactcctttgctatgctgcatgtgaggctcctttgatccttgaattgggaggatatatttatggacagaattgcatgtttgttgtcaatgattggcatgccagtctagtgccagtccttcttgctgcaaaatatagaccatatggtgtttataaagactcccgcagcattcttgtaatacataatttagcacatcagggtgtagagcctgcaagcacatatcctgaccttgggttgccacctgaatggtatggagctctggagtgggtattccctgaatgggcgaggaggcatgcccttgacaagggtgaggcagttaattttttgaaaggtgcagttgtgacagcagatcgaatcgtgactgtcagtaagggttattcgtgggaggtcacaactgctgaaggtggacagggcctcaatgagctcttaagctccagaaagagtgtattaaacggaattgtaaatggaattgacattaatgattggaaccctgccacagacaaatgtatcccctgtcattattctgttgatgacctctctggaaaggccaaatgtaaaggtgcattgcagaaggagctgggtttacctataaggcctgatgttcctctgattggctttattggaaggttggattatcagaaaggcattgatctcattcaacttatcataccagatctcatgcgggaagatgttcaatttgtcatgcttggatctggtgacccagagcttgaagattggatgagatctacagagtcgatcttcaaggataaatttcgtggatgggttggatttagtgttccagtttcccaccgaataactgccggctgcgatatattgttaatgccatccagattcgaaccttgtggtctcaatcagctatatgctatgcagtatggcacagttcctgttgtccatgcaactgggggccttagagataccgtggagaacttcaaccctttcggtgagaatggagagcagggtacagggtgggcattcgcacccctaaccacagaaaacatgtttgtggacattgcgaactgcaatatctacatacagggaacacaagtcctcctgggaagggctaatgaagcgaggcatgtcaaaagacttcacgtgggaccatgccgctgaacaatacgaacaaatcttccagtgggccttcatcggatcgacccgatgttcaatggaaaaaagggaccaaagttggttggttccttgaagattatcagttcatcatcctatagtaagctgaatgatgaaagaaaacccctgtacattacatggaaggcagaccggctattggctccattgctccaatgtctgctttggctgccttgcctcgatggaccggatgcagtgaggaatccagncgaacgacagttttgaaggataggaaggggagctggaagcagtcacgcaggcaggcaagccttcgccgttaattcatatggaacaagctggagtcagtttctgctgtgccactcactgtttaccttaagattattacctgtgttgttctcctttgctcgttagggctgataacataatgactcattaagaatataattcactctgcctcgtttttaatcttaagtgaagtcgagatctacttcgtcattccttccccgtttaaaaaaaaaaaaaaaaaaaaa

SEQ ID NO: 4748 - protein, 622 aa, Zea mays (maize)
MATPSAVGAACLLLARAAWPAAVGDRARPRRLQRVLRRRCVAELSREGPAPRPLPPALLAPPLVPGFLAPPAEPTGEPASTPPPVPDAGLGDLGLEPEGIAEGSIDNTVVVASEQDSEIVVGKEQARAKVTQSIVFVTGEASPYAKSGGLGDVCGSLPVALAARGHRVMVVMPRYLNGTSDKNYANAFYTEKHIRIPCFGGEHEVTFFHEYRDSVDWVFVDHPSYHRPGNLYGDKFGAFGDNQFRYTLLCYAACEAPLILELGGYIYGQNCMFVVNDWHASLVPVLLAAKYRPYGVYKDSRSILVIHNLAHQGVEPASTYPDLGLPPEWYGALEWVFPEWARRHALDKGEAVNFLKGAVVTADRIVTVSKGYSWEVTTAEGGQGLNELLSSRKSVLNGIVNGIDINDWNPATDKCIPCHYSVDDLSGKAKCKGALQKELGLPIRPDVPLIGFIGRLDYQKGIDLIQLIIPDLMREDVQFVMLGSGDPELEDWMRSTESIFKDKFRGWVGFSVPVSHRITAGCDILLMPSRFEPCGLNQLYAMQYGTVPVVHATGGLRDTVENFNPFGENGEQGTGWAFAPLTTENMFVDIANCNIYIQGTQVLLGRANEARHVKRLHVGPCR

SEQ ID NO: 4749 - DNA, 2360 bp, Solanum tuberosum (potato)
  CDS (68)..(1993)
agattttctatattgaaagattttgtctttacatgattcttgattttacagcaggtgtcaataccaaatggggtctctgcaaacacccacaaatcttagcaataagtcatgtttatgtgtgtcagggagagttgtgaagggtttgagggtagaaagacaagtggggttggggttttcttggttgttgaagggacgaagaaacagaaaagttcaatctttgtgtgttacaagtagtgtttcagatggttcatcaattgctgaaaataagaatgtgtcagaagggcttcttttgggtgctgagagagatggttctggctctgttgttggttttcaattgattccacattctgttgcaggagatgcaacaatggtagaatctcatgatattgtagccaatgatagagatgacttgagtgaggatactgaggagatggaggaaaccccaatcaaattaactttcaatatcatttttgttactgctgaagcagctccatattctaagactggtggattaggagatgtttgtggttctttgccaatggcactagctgctcggggtcatcgtgtaatggtcgtttcacctaggtatttgaatggaggtccttcagatgaaaagtacgccaatgctgttgaccttgatgtgcgggccactgtccattgctttggtgatgcacaggaagtagccttctaccatgaatacagggcaggtgttgattgggtatttgtggaccactcttcttactgcagacctggaacgccatatggtgatatttatggtgcatttggtgataatcagtttcgcttcactttgctttctcacgcagcatgtgaagcgccattggttcttccactgggagggttcacttatggagagaagtgcttgtttctcgctaatgattggcatgctgccctggttcctttacttttagcggccaagtatcgtccttatggtgtttacaaggatgctcgtagtattgtcgcaatacacaacattgcacatcagggagtggagcctgcagtaacctacaataatttgggtttgcctccacaatggtatggagcagttgaatggatatttcccacatgggcaagggcgcatgcgcttgacactggtgaaacagtgaacgttttgaaaggggcaatagcagttgctgatcggatactgacagttagccagggatactcatgggaaataacaactcctgaagggggatatgggctacatgagctgttgagcagtagacagtctgttcttaatggaattactaatggaatagatgttaatgattggaacccgtcgacagatgagcatattgcttcgcattactccatcaatgacctctccggaaaggttcagtgcaagactgatctgcaaaaggaactgggccttccaattcgacctgattgtcctctgattggatttattggaaggctggactaccagaaaggtgttgacataatcctgtcagcaattccagaacttatgcagaatgatgtccaagttgtaatgcttggatctggtgagaaacaatatgaagactggatgagacatacagaaaatctttttaaagacaaatttcgtgcttgggttggatttaatgttccagtttctcataggataacagcaggatgcgacatactattgatgccctcaagattcgaaccgtgtggcttaaaccaattgtatgcaatgagatatggcaccatacctattgttcatagcacggggggcctaagagacacagtgaaggattttaatccatatgctcaagaaggaataggtgaaggtaccgggtggacattttctcctctaacgagtgaaaagttgcttgatacactgaagctggcaatcgggacttatacagaacataagtcatcttgggagggattgatgaggagaggtatgggaagggactattcctgggaaaatgcagccattcaatatgaacaagttttcacctgggcctttatagatcctccatatgtcagatgatttatcaagaaagattgcaaacgggatacatcattaaactatacgcggagcttttggtgctattagctactgtcattgggcgcggaatgtttgtggttctttctgattcagagagatcaagttagttccaaagacatacgtagcctgtccctgtctgtgagggagtaaaactacaaaaggcaattagaaaccaccaagaactggctcctttgggagaagagtggaaatatgtaaaaaagaattttgagtttaatgtcaattgattaattgttctcatttttaaaaaaaacatctcatctcatacaatatataaaattgatcatgattgatgaaaaaaaaaaaaaaaaaaaaaaaaaaaaaaaaaaaa

SEQ ID NO: 4750 - protein, 641 aa, Solanum tuberosum (potato)
MGSLQTPTNLSNKSCLCVSGRVVKGLRVERQVGLGFSWLLKGRRNRKVQSLCVTSSVSDGSSIAENKNVSEGLLLGAERDGSGSVVGFQLIPHSVAGDATMVESHDIVANDRDDLSEDTEEMEETPIKLTFNIIFVTAEAAPYSKTGGLGDVCGSLPMALAARGHRVMVVSPRYLNGGPSDEKYANAVDLDVRATVHCFGDAQEVAFYHEYRAGVDWVFVDHSSYCRPGTPYGDIYGAFGDNQFRFTLLSHAACEAPLVLPLGGFTYGEKCLFLANDWHAALVPLLLAAKYRPYGVYKDARSIVAIHNIAHQGVEPAVTYNNLGLPPQWYGAVEWIFPTWARAHALDTGETVNVLKGAIAVADRILTVSQGYSWEITTPEGGYGLHELLSSRQSVLNGITNGIDVNDWNPSTDEHIASHYSINDLSGKVQCKTDLQKELGLPIRPDCPLIGFIGRLDYQKGVDIILSAIPELMQNDVQVVMLGSGEKQYEDWMRHTENLFKDKFRAWVGFNVPVSHRITAGCDILLMPSRFEPCGLNQLYAMRYGTIPIVHSTGGLRDTVKDFNPYAQEGIGEGTGWTFSPLTSEKLLDTLKLAIGTYTEHKSSWEGLMRRGMGRDYSWENAAIQYEQVFTWAFIDPPYVR

SEQ ID NO: 4751 - DNA, 2124 bp, Ipomoea batatas (sweet potato)
  CDS (23)..(1849)
cggtggtgtgagactgtgagtgatggcgactataactgcctcacactttgtttctcatgtctgtgggggtgccacttctggagaatcaaaagtggggttgggtcaattagccctgaggagccaagctgtgactcacaatgggttgagacctgtgaacaagattgacatgttacaattgagaacaagtgcaagaaacctagcaaaaatggaaggaaaaatgagggtggaatggcaagcaggaactattgtgtgtaaacaacaagggatgaacttggtctttgtggggtgtgaggagggtccctggtgcaaaactggtggacttggagatgttcttggaggattgcctccagccttggcagctcgcgggcatagagttatgacagtgtgtccccgttatgatcagtacaaagatgcttgggaaacctgtgtggttgttgagccacaagttggagacagaattgaacctgttcgtttcttccattcatacaaacgcggagttgatcgcgtttttgtggatcatcctatgttcctggagaaggtttggggaaaaactggatctatgctctatggccccaaggctgggaaagattacaaggacaaccagttgcggttcagtttgttgtgccaagcagcacttgaggcaccgagagttttgaatcttaactccagcaaatacttcagtggaccttatggtgaggatgttgttttcgttgccaatgattggcacactgctctccttccatgctatctgaaaaccatgtaccagtcgagaggaatctacatgaacgccaaggttgctttctgcattcacaacattgcctaccaaggcagattcgccttttcagacttttctcttctgaatctgcctgacgagtacaagggttcttttgattttattgatgggtatgacaagccagtgaaggggagaaagataaactggatgaaagctggaatccgtgaagcagacagggtttttactgtgagcccaaactacgccaaggagcttgtttcttgcgtttcgaagggtgtggaattggacaaccacatccgagactgtggcatcacgggtatttgtaatggaatggatacccaagagtggaaccctgcaactgacaagtaccttgctgttaaatatgatatcacaactgttatgcaagcgaagcccttgttgaaggaagctcttcaagctgcagttggtttgccggttgacaggaatattccgttgattggttttatcggcagacttgaagagcagaaaggctcagacattctttatgctgcgatttctaagttcatttcaatggatgttcagatattgattcttggaactggaaagaagaaatttgagcagcagattgagcagcttgaagtgatgtatccagataaagctagaggagtggcgaagttcaacgttcctttggctcacatgattactgctggcgctgattttatgttgatcccgagcagatttgaaccgtgtggtctcattcagttgcatgctatgcgatatggaacaccgtgcatctgtgcctcaactggcggactcgttgacactgtgaaagaaggttatacagggttccacatgggggctttcaatgtcgactgtgaaactgttgacccagaggacgtgctgaaggtgataaccactgttggtagagcacttgcaatttacggaacccttgcattcactgaaatgatcaagaactgcatgtcacaagagctctcgtggaagggacctgccaagaattgggaaacagtgttgttgagcttaggagttgctgggagcgagcccggggttgaaggagaggaaattgcaccgcttgcaaaggaaaacgtcgctactccatgaaaactatggtctcaaaacctacaataagctggcatatgaaactaaagttttatatatgttgaaagagcggaggcgttttggtgctcttgagcattatgaggtgatgaaagagtcaatgggggactctttctttattgttttttggtttgcccaggtggtagtaaatagagagttcaaactaactagtttggtgttttaagacattgggaacttgcacttcagcaggctaaatgtataatataaataaacaatagcctcttgtggttttgtgatta

SEQ ID NO: 4752 - protein, 608 aa, Ipomoea batatas (sweet potato)
MATITASHFVSHVCGGATSGESKVGLGQLALRSQAVTHNGLRPVNKIDMLQLRTSARNLAKMEGKMRVEWQAGTIVCKQQGMNLVFVGCEEGPWCKTGGLGDVLGGLPPALAARGHRVMTVCPRYDQYKDAWETCVVVEPQVGDRIEPVRFFHSYKRGVDRVFVDHPMFLEKVWGKTGSMLYGPKAGKDYKDNQLRFSLLCQAALEAPRVLNLNSSKYFSGPYGEDVVFVANDWHTALLPCYLKTMYQSRGIYMNAKVAFCIHNIAYQGRFAFSDFSLLNLPDEYKGSFDFIDGYDKPVKGRKINWMKAGIREADRVFTVSPNYAKELVSCVSKGVELDNHIRDCGITGICNGMDTQEWNPATDKYLAVKYDITTVMQAKPLLKEALQAAVGLPVDRNIPLIGFIGRLEEQKGSDILYAAISKFISMDVQILILGTGKKKFEQQIEQLEVMYPDKARGVAKFNVPLAHMITAGADFMLIPSRFEPCGLIQLHAMRYGTPCICASTGGLVDTVKEGYTGFHMGAFNVDCETVDPEDVLKVITTVGRALAIYGTLAFTEMIKNCMSQELSWKGPAKNWETVLLSLGVAGSEPGVEGEEIAPLAKENVATP

SEQ ID NO: 4753 - DNA, 2287 bp, Sorghum bicolor (sorghum)
  CDS (207)..(2033)
caagaaataaaccactgccagccagtgacacggatcggagtccgacggacggacgcgcgcaccacgccggccggccgctcgatcgcatcgccgggatcgatactgctttgaacgggcgcctcacagtgctgctagctcctccatcgatcagctactgcacggccgcgccccgccggctgctctcatctcatccatcaggcatcagcatgtcgactctagccacgtcgcagctcgtcgccacgcacgccggcctaggcgtcccggacgcgtccatgttccgccgcggcggcgtgcagggcctgagggcggcggcccgggcatcggcggcagcaggggacgcgctcagcatgcggaccagcgcgtgtccggctccgaggcagcagccggcggcgcgccgcgggggccgcggaggaaggttcccgtcgctcgtcgtgtgcgccaccgccggcatgaacgtcgtcttcgttggcgccgagatggcgccctggagcaagaccggcggcctcggcgacgtcctcggcggcctgccgccggccatggccgcgaatgggcaccgtgtcatggtcgtctctccccgctacgaccagtacaaggacgcctgggacaccagcgtcgtgtccgagatcaagatgggagacgggtacgagacggtgaggtttttccactgctacaagcgcggagtcgaccgtgtgttcattgaccacccgctgttccttgagagggtttggggaaagacggaggagaagatctacgggcctgacgctggaacggactacaaggacaaccagctgcgtttcagcctgctatgccaggcggcacttgaagctcctaggatcctaagcctcaacaacaacccatacttctctggaccatatggggaggatgtcgtgttcgtctgcaatgactggcataccggccctctgtcatgctacctcaagagcaactaccagtccaatggcatctacaaggacgcaaagacggctttctgcatccacaacatctcctaccagggcaggttcgccttctcggacttcccagagttgaacctccctgagagattcaagtcatccttcgatttcatcgacggctacgagaagcccgtggaaggccggaagatcaactggatgaaggccgggatccttgaagccgacagggtcctcaccgtgagcccctactacgcggaggagctcatctccggcatcgccaggggctgcgagctcgacaacatcatgcgcctcaccggcatcaccgggatcgtcaacggcatggacgtcagcgagtgggatcccagcaaggacaagtacatcgccgtcaaatacgacgtgtcaacggctgtcgaggcaaaggcactgaacaaggaggcgctgcaggccgaggtcgggctcccggtggaccggaagatcccgctggtggcgttcatcggcaggctggaggagcagaagggccccgacgtcatggcggccgccatcccgctgctcatggaggaggacatacagatcgttctgctgggcactggcaagaagaagttcgagcgcatgctgatgagcgccgaggagaagtaccccgacaaggtgcgcgccgtggtcaagttcaacgcggcgctggcacaccacatcatggccggcgccgacctgctggccgtcaccagccgcttcgagccctgcggcctcatccagctccaggggatgcgatacggaacgccctgcgcctgcgcgtccaccggcggactcgtcgacaccatcatcgaaggcaagacaggattccacatgggccgcctcagcgtcgactgcaacgtcgtggagccggccgatgtgaagaaggtggcgaccaccttgaagcgtgccatcaaggtggtcggcacgccggcgtacgaggagatggtcaagaactgcatgatccaggatctgtcctggaagggccctgccaagaactgggagaacgtgctgctcagcctgggtgtcgccggcggcgagccggggatcgaaggcgaggagatcgcgccgctcgccaaggagaacgtggccgcaccctgaaggaggcgaggacccctgatatcgcgtgtagaacaaagatgatgaatcaagtgaacatgcatcttcgtatatatatgtgtcgtctatgagtatatatgaagaactatatagctgcttgtggtagtgtaatgtagtggtggccagtggcacaacctaataataagtacatgaactagttgcttgtgtgtgtaattaagtaccgatcggcaataatatattgctagtgaataaatggacttatatttgcgaagtca

SEQ ID NO: 4754 - protein, 608 aa, Sorghum bicolor (sorghum)
MSTLATSQLVATHAGLGVPDASMFRRGGVQGLRAAARASAAAGDALSMRTSACPAPRQQPAARRGGRGGRFPSLVVCATAGMNVVFVGAEMAPWSKTGGLGDVLGGLPPAMAANGHRVMVVSPRYDQYKDAWDTSVVSEIKMGDGYETVRFFHCYKRGVDRVFIDHPLFLERVWGKTEEKIYGPDAGTDYKDNQLRFSLLCQAALEAPRILSLNNNPYFSGPYGEDVVFVCNDWHTGPLSCYLKSNYQSNGIYKDAKTAFCIHNISYQGRFAFSDFPELNLPERFKSSFDFIDGYEKPVEGRKINWMKAGILEADRVLTVSPYYAEELISGIARGCELDNIMRLTGITGIVNGMDVSEWDPSKDKYIAVKYDVSTAVEAKALNKEALQAEVGLPVDRKIPLVAFIGRLEEQKGPDVMAAAIPLLMEEDIQIVLLGTGKKKFERMLMSAEEKYPDKVRAVVKFNAALAHHIMAGADLLAVTSRFEPCGLIQLQGMRYGTPCACASTGGLVDTIIEGKTGFHMGRLSVDCNVVEPADVKKVATTLKRAIKVVGTPAYEEMVKNCMIQDLSWKGPAKNWENVLLSLGVAGGEPGIEGEEIAPLAKENVAAP

SEQ ID NO: 4755 - DNA, 4110 bp, Schizosaccharomyces pombe
  CDS (1)..(4110)
atgaatataaagaaaaagagctttctctttcaatttttgttcggatggattgtactgtcttcggctcaatggctatcggttttggatgaggcagagaatttgaactcttctttttcattagaaagtgttgattcttttgctccagtaagaccaaggtttataatcgatgaagactttgctgaagattacaaccttactgttgatatcttgcatcgtccacttcaggaaaatttcgattctttctttccaaacgttgaagcgtatgttgaaagtggaaattctaatggtgatttgatgagcgacaatggtaaactagatgatttaaattctcgagcggcctattctgcccttaaagcccttcaaaactcttatggatcatcccatctttatcgctttacaccctatgaattgtttgggcaatctatttggattgaagaagcacctgaagtgaatcatgtcggttggtctattatgttcgataaccttggccgttactttttactagagttgcgcggtctacgcgaggttacttttgctttgtttattactttttcaatcgttcctattattacaggaatccttactgtttacatttacaagaagaaatactgtgtcataaaattcaataagtccggtcgttctaagaagaaggatagctggttgaaaaggtctaaggatgaattacttcgtacggatagcgcaaatcttctgactttgaatgataatgatgagcctgtaatgattagacattcatgtaaaaggacgtgcattcttttcgcaacactcgaatataacattccggaatggaatataaaaattaaaattggaggtttaggagtgatggctgaattaatgagtaagacattaaagcagtatgatttggtttgggtcgttccttgtgtgggagatatcacatatccagtggctgaaactgctccatctttggtagttaaagtggttaaccaagactatgaagtgaaagttttctatcattataaagacaacatcaaatatgttcttctcgactctcccatattcagaaagcggacatcacacgatccttatcctcctcgtatggatgatatatcttcagccattttttacagtgtttggaatcagtccattgctgctataatacgtcgtgaaaaggttgatatctatcatattaatgattatcatggtgcacttgctccaatttataatcttccagaggtcatcccttgtgcaatttcactccataatgccgaattccaaggtttgtggcctttacagtccagtattgatgaaagagaggtttgtggtttattcaatgtttccaaaaccatttgcagagaatacattcaattcggtaatgctttcaacctgatgcattgcggtgtttcttatgttcgtcgtcatcagtccggttacggagtagttggtgtttctaacaaatatggccaacgctcatgggttcgatatccagttttttggagtctcaaaaaaattggacaattgcctaaccctgatcctaccgacatcggtttgagtgttaatcctgtgaatcaacaacttcctgactttgcagaatatgcttcggtaaggaaggaaaacaagagaaaggcacaagaatgggccggtttgacaatcgatgatgaagcggatcttctggtatttgtaggtagatggtcagtgcaaaaaggtattgatattttagctgatctcgcgccaaccctcttagaaaagttcaacattcaattaattgttgttgggcctctaattgatttatatggtaaatttgcggcagaaaagttcatgtacataatggaacgttatccagggcgcgttttctcaaaacccgagttcgttcatctaccacccttcatttttgaaggagctgactttgccctaattccttctcgtgatgaaccttttggtttagtcgcggtagaatttggcaggagaggtgctatttgtatcggctcaagagtcggaggtttaggagaaatgccaggatggtggtattctgttgaatctagctcaaccgcctatttactgaaacaacttgagaagtcttgtactctggctctaaaatcaactcctgaaatgcgccataaactgagaatcgccgcccttcagcaacgctttcctgtagatgagtgggtggcattgtatgacagacttatacgaaactgtattaaggctcataacaaacagcagcaaagaagaagcataaaatcatttttcagttgcattacaccgaacaagcctactaaagatgttaacgatattttatccgaaaaaagtgcattttctcctgcagattatgagcactctatagatattagagaacatacatcatatgatgccaattcaatggataatgattctgatgaagataattatgaacaagcagaatcaattatttcatcactaagtagttcagcactttccgaattatcttacatatctgagagttccatgaatataggttctaggcttgatgaacgctttatcgatgcaaatggcgttgcaataagggatttttctgctgagttaacttatttgactcctgaaaactcaaaaggaaaattatctatcgatcatttcttgaacaaagtccaatcacgttggcatgacgaagaacatcactattacaagacaggatttaggaagcgtgtttacaaatatttaaagatcaaagacaaaaagtctaaagatgtggaccctgatgatgacttggtaaaccaacttcctttaaatgcttacacgaaaccccgatataagagtgcggctagtactcgactaaacatttatcaaagaattctatatcttaaagttttcacttggccgctttacacaatcttcctctcgttaggccaaattttatctatttcatcgtttcaactttctcttttatcaggatttgaagataataatcaaatatctttgtacgtaatcacaggcgtttttattctttcaacgattgtttggtggggtttgtatcggaaccttccaagtgttcattccttatcgcttccttttgcagtgtatgctttggctttcctgtttactggcatttcatctatgtcactaccttaccatattcgtggatggctaagttacgctgcgacatgggtttatgcaatagctgctgcgagtgggccattgtatttcactctgaattttgaagatgaacattgttcggggttgggatcttcgatcacacgtgcttgtgttttacaaggagttcaacaactttggttatcgtttctttggctctggggaaccttatccagtcgtttggactataactataaagtgctactacaacccattaatagtgtttatgttgtagcaggagtttggccggtatcattcgttcttctatcagtatgtattcttttatataaggggttgccacctttctatcgacaaaaacccggatcgatccctgcattttctaaatctttattacaccgaaaggtggtaatatgtttcctgatttcagtcatcaatcaaaatttttggatgtctacattaattagccaagcttggagatttttctggggttccaaacttaccaaattatggaagattgttgtaatgactgtatcctttttagttggtgcgtggttaataattttttatgtgcttcgaaaactttcgaataagcacacttggatggttcctgtactaggattagggtttggtgctattaaatggatgcatgtcttctggggaacttcaaacgttggaattttcttaccgtgggcgggcattgcaggaccatatcttagtcgtgccttgtggctttggttgggaatactcgattccattcaaggcattggcaatggcctaattttacttcaaaccttgtcaagaagacacgtaactaacacattaatgataagccaacttgccggttctgccacctcaatacttgcacgctttgtgtcgccaacaaagactggaccagctaatgtttttccagatttgactggatacactccagtagaccgtgcaaagccagtggctaatgctccgttttggatttgcctgatcttgaatgtagctctatgtatcatgtatcttcggtgctatcatagagaaaacattagcagaccgtga

SEQ ID NO: 4756 - protein, 1369 aa, Schizosaccharomyces pombe
MNIKKKSFLFQFLFGWIVLSSAQWLSVLDEAENLNSSFSLESVDSFAPVRPRFIIDEDFAEDYNLTVDILHRPLQENFDSFFPNVEAYVESGNSNGDLMSDNGKLDDLNSRAAYSALKALQNSYGSSHLYRFTPYELFGQSIWIEEAPEVNHVGWSIMFDNLGRYFLLELRGLREVTFALFITFSIVPIITGILTVYIYKKKYCVIKFNKSGRSKKKDSWLKRSKDELLRTDSANLLTLNDNDEPVMIRHSCKRTCILFATLEYNIPEWNIKIKIGGLGVMAELMSKTLKQYDLVWVVPCVGDITYPVAETAPSLVVKVVNQDYEVKVFYHYKDNIKYVLLDSPIFRKRTSHDPYPPRMDDISSAIFYSVWNQSIAAIIRREKVDIYHINDYHGALAPIYNLPEVIPCAISLHNAEFQGLWPLQSSIDEREVCGLFNVSKTICREYIQFGNAFNLMHCGVSYVRRHQSGYGVVGVSNKYGQRSWVRYPVFWSLKKIGQLPNPDPTDIGLSVNPVNQQLPDFAEYASVRKENKRKAQEWAGLTIDDEADLLVFVGRWSVQKGIDILADLAPTLLEKFNIQLIVVGPLIDLYGKFAAEKFMYIMERYPGRVFSKPEFVHLPPFIFEGADFALIPSRDEPFGLVAVEFGRRGAICIGSRVGGLGEMPGWWYSVESSSTAYLLKQLEKSCTLALKSTPEMRHKLRIAALQQRFPVDEWVALYDRLIRNCIKAHNKQQQRRSIKSFFSCITPNKPTKDVNDILSEKSAFSPADYEHSIDIREHTSYDANSMDNDSDEDNYEQAESIISSLSSSALSELSYISESSMNIGSRLDERFIDANGVAIRDFSAELTYLTPENSKGKLSIDHFLNKVQSRWHDEEHHYYKTGFRKRVYKYLKIKDKKSKDVDPDDDLVNQLPLNAYTKPRYKSAASTRLNIYQRILYLKVFTWPLYTIFLSLGQILSISSFQLSLLSGFEDNNQISLYVITGVFILSTIVWWGLYRNLPSVHSLSLPFAVYALAFLFTGISSMSLPYHIRGWLSYAATWVYAIAAASGPLYFTLNFEDEHCSGLGSSITRACVLQGVQQLWLSFLWLWGTLSSRLDYNYKVLLQPINSVYVVAGVWPVSFVLLSVCILLYKGLPPFYRQKPGSIPAFSKSLLHRKVVICFLISVINQNFWMSTLISQAWRFFWGSKLTKLWKIVVMTVSFLVGAWLIIFYVLRKLSNKHTWMVPVLGLGFGAIKWMHVFWGTSNVGIFLPWAGIAGPYLSRALWLWLGILDSIQGIGNGLILLQTLSRRHVTNTLMISQLAGSATSILARFVSPTKTGPANVFPDLTGYTPVDRAKPVANAPFWICLILNVALCIMYLRCYHRENISRP

SEQ ID NO: 4757 - DNA, 1812 bp, Hordeum vulgare (barley)
  CDS (1)..(1812)
atggcggctctggccacgtcccagctcgccacctccggcaccgtcctcggcgtcaccgacagattccggcgtccaggttttcagggactcaggccccggaacccggcggatgcggcgcttggtatgaggactatcggagcaagcgccgccccgaagcaaagccggaaagcgcaccgcgggagccggcggtgcctctccgtggtggtgagcgccacgggcagcggcatgaacctcgtgttcgtcggcgccgagatggcgccctggagcaagaccggcggccttggcgatgtcctcggcggcctccccccggccatggccgccaacggtcaccgggtgatggtcgtctccccgcgctacgatcagtacaaggacgcctgggacaccagcgtcatctccgagatcaaggtcgctgacgagtacgagagggtgaggttcttccactgctacaagcgcggagtggaccgcgtgttcatcgaccacccgtggttcctggagaaggtccggggcaagaccaaggagaagatctacgggcccgacgccggcacagactatgaggacaaccagcagcgcttcagccttctctgccaggcagcactcgaggcacccaggatcctcaacctcaacaacaacccctacttttctggtccctacggggaagacgtggtgttcgtgtgcaacgactggcacacgggccttctggcctgctacctcaagagcaactaccagtccaatggcatctacaggacggccaaggtggccttctgcatccacaacatctcgtaccagggccgcttctccttcgacgactttgcgcagctcaacctgcccgacaggttcaagtcgtccttcgacttcattgacggctacgacaagcccgtggaggggcgcaagatcaactggatgaaggccgggatcctgcaggccgacaaggtgctgacggtgagcccctactacgctgaggagctcatctctggcgaagccaggggctgcgagctcgacaacatcatgcgcctcacggggatcaccggaatcgtcaacggcatggacgtcagtgagtgggaccccaccaaggacaagttcctcgccgtcaactacgacatcaccaccgcgttggaggccaaggcgctgaacaaggaggcgctgcaggccgaggtggggctgccggtggacaggaaggtgccgctggtggccttcatcggcaggctggaggagcagaagggccccgacgtgatgatcgccgccatcccggagatcctgaaggaggaggacgtccagatcattctccttggcaccgggaagaagaagtttgagaagctgctcaagagcatggaggagaagttcccgggcaaggtgagggccgtggtcaggttcaacgcgccgctagctcaccagatgatggccggcgccgacttgctcgctgtcaccagccgcttcgagccctgcggcctcatccagctccagggaatgcgctatggaacgccgtgcgtgtgcgcgtccaccggcgggctcgtcgacacgatcgtggagggcaagaccgggttccacatgggccgcctcagcgtcgactgcaacgtggtggagccggcggacgtgaagaaggtggcgaccaccctgaagcgggccgtcaaggtcgtcggcacgccggcgtaccaggagatggtcaagaactgcatgatccaggatctctcctggaagggacctgccaagaactgggaggacgtgcttctggaactgggggtggaggggagcgagccggggatcgtcggcgaggagatcgcgccgctcgccatggagaacgtcgccgctccctga

SEQ ID NO: 4758 - protein, 603 aa, Hordeum vulgare (barley)
MAALATSQLATSGTVLGVTDRFRRPGFQGLRPRNPADAALGMRTIGASAAPKQSRKAHRGSRRCLSVVVSATGSGMNLVFVGAEMAPWSKTGGLGDVLGGLPPAMAANGHRVMVVSPRYDQYKDAWDTSVISEIKVADEYERVRFFHCYKRGVDRVFIDHPWFLEKVRGKTKEKIYGPDAGTDYEDNQQRFSLLCQAALEAPRILNLNNNPYFSGPYGEDVVFVCNDWHTGLLACYLKSNYQSNGIYRTAKVAFCIHNISYQGRFSFDDFAQLNLPDRFKSSFDFIDGYDKPVEGRKINWMKAGILQADKVLTVSPYYAEELISGEARGCELDNIMRLTGITGIVNGMDVSEWDPTKDKFLAVNYDITTALEAKALNKEALQAEVGLPVDRKVPLVAFIGRLEEQKGPDVMIAAIPEILKEEDVQIILLGTGKKKFEKLLKSMEEKFPGKVRAVVRFNAPLAHQMMAGADLLAVTSRFEPCGLIQLQGMRYGTPCVCASTGGLVDTIVEGKTGFHMGRLSVDCNVVEPADVKKVATTLKRAVKVVGTPAYQEMVKNCMIQDLSWKGPAKNWEDVLLELGVEGSEPGIVGEEIAPLAMENVAAP

SEQ ID NO: 4759 - DNA, 2161 bp, Solanum tuberosum (potato)
  CDS (37)..(1860)
cttggtagattcccctttttgtagaccacacatcacatggcaagcatcacagcttcacaccactttgtgtcaagaagccaaacttcactagacaccaaatcaaccttgtcacagataggactcaggaaccatactctgactcacaatggtttaagggctgttaacaagcttgatgggctccaatcaagaactaatactaaggtaacacccaagatggcatccagaactgagaccaagagacctggatgctcagctaccattgtttgtggaaagggaatgaacttgatctttgtgggtactgaggttggtccttggagcaaaactggtggactaggtgatgttcttggtggactaccaccagcccttgcagcccgcggacatcgggtaatgacaatatccccccgttatgaccaatacaaagatgcttgggatactagcgttgcggttgaggtcaaagttggagacagcattgaaattgttcgtttctttcactgctataaacgtggggttgatcgtgtttttgttgaccacccaatgttcttggagaaagtttggggcaaaactggttcaaaaatctatggccccaaagctggactagattatctggacaatgaacttaggttcagcttgttgtgtcaagcagccctagaggcacctaaagttttgaatttgaacagtagcaactacttctcaggaccatatggagaggatgttctcttcattgccaatgattggcacacagctctcattccttgctacttgaagtcaatgtaccagtccagaggaatctatttgaatgccaaggtcgctttctgcatccataacattgcctaccaaggccgattttctttctctgacttccctcttctcaatcttcctgatgaattcaggggttcttttgatttcattgatggatatgagaagcctgttaagggtaggaaaatcaactggatgaaggctgggatattagaatcacatagggtggttacagtgagcccatactatgcccaagaacttgtctctgctgttgacaagggtgttgaattggacagtgtccttcgtaagacttgcataactgggattgtgaatggcatggatacacaagagtggaacccagcgactgacaaatacacagatgtcaaatacgatataaccactgtcatggacgcaaaacctttactaaaggaggctcttcaagcagcagttggcttgcctgttgacaagaagatccctttgattggcttcatcggcagacttgaggagcagaaaggttcagatattcttgttgctgcaattcacaagttcatcggattggatgttcaaattgtagtccttggaactggcaaaaaggagtttgagcaggagattgaacagctcgaagtgttgtaccctaacaaagctaaaggagtggcaaaattcaatgtccctttggctcacatgatcactgctggtgctgattttatgttggttccaagcagatttgaaccttgtggtctcattcagttacatgctatgcgatatggaacagtgccaatctgtgcatcgactggtggacttgttgacactgtgaaagaaggctatactggattccatatgggagccttcaatgttgaatgcgatgttgttgacccagctgatgtgcttaagatagtaacaacagttgctagagctcttgcagtctatggcaccctcgcatttgctgagatgataaaaaattgcatgtcagaggaactctcctggaaggaacctgccaagaaatgggagacattgctattgggcttaggagcttctggcagtgaacccggtgttgaaggggaagaaatcgctccacttgccaaggaaaatgtagccactccctaaatgagctttggttatccttgtttcaacaataagatcattaagcaaacgtatttactagcgaactatgtagaaccctattatggggtctcaatcatctacaaaatgattggtttttgctggggagcagcagcatattaggctgtaaaatcctggttaatgattttgtaggtaagggctatttaaggttgtgtggatcaaagtcaatagaaaatagttattactaacgtttgcaactaaatacttagtaatgtagcataaataatactagtagctaatatatatgcgtgaatttgttgtacct

SEQ ID NO: 4760 - protein, 607 aa, Solanum tuberosum (potato)
MASITASHHFVSRSQTSLDTKSTLSQIGLRNHTLTHNGLRAVNKLDGLQSRTNTKVTPKMASRTETKRPGCSATIVCGKGMNLIFVGTEVGPWSKTGGLGDVLGGLPPALAARGHRVMTISPRYDQYKDAWDTSVAVEVKVGDSIEIVRFFHCYKRGVDRVFVDHPMFLEKVWGKTGSKIYGPKAGLDYLDNELRFSLLCQAALEAPKVLNLNSSNYFSGPYGEDVLFIANDWHTALIPCYLKSMYQSRGIYLNAKVAFCIHNIAYQGRFSFSDFPLLNLPDEFRGSFDFIDGYEKPVKGRKINWMKAGILESHRVVTVSPYYAQELVSAVDKGVELDSVLRKTCITGIVNGMDTQEWNPATDKYTDVKYDITTVMDAKPLLKEALQAAVGLPVDKKIPLIGFIGRLEEQKGSDILVAAIHKFIGLDVQIVVLGTGKKEFEQEIEQLEVLYPNKAKGVAKFNVPLAHMITAGADFMLVPSRFEPCGLIQLHAMRYGTVPICASTGGLVDTVKEGYTGFHMGAFNVECDVVDPADVLKIVTTVARALAVYGTLAFAEMIKNCMSEELSWKEPAKKWETLLLGLGASGSEPGVEGEEIAPLAKENVATP

SEQ ID NO: 4761 - DNA, 2825 bp, Triticum aestivum
  CDS (162)..(2561)
cttcggcctgaccccgttcgtttacccccacacagagcacactccagtccagtccagcccactgccaccgcgctactctccactcccactgccaccacctccgcctgcgccgcgctctgggcggaccaacccgcgaaccgtaccatctcccgccccgatccatgtcgtcggcggtcgcgtccgccgcatccttcctcgcgctcgcgtcagcctcccccgggagatcacgcaggcgggcgagggtgagcgcgcagccaccccacgccggggccggcaggttgcactggccgccgtggccgccgcagcgcacggctcgcgacggagctgtggcggcgctcgccgccgggaagaaggacgcggggatcgacgacgccgccgcgtccgtgaggcagccccgcgcactccgcggtggcgccgccaccaaggtcgcggagcgaagggatcccgtcaagacgctcgaccgcgacgccgcggaaggcggcgggccgtccccgccggcagcgaggcaggacgccgcccgtccgccgagtatgaacggcatgccggtgaacggcgagaacaaatctaccggcggcggcggcgcgactaaagacagcgggctgcccacgcccgcacgcgcgccccatccgtcgacccagaacagagcaccggtgaacggtgaaaacaaagctaacgtcgcctcgccgccgacgagcatagccgaggccgcggcttcggattccgcagctaccatttccatcagcgacaaggcgccggagtccgttgtcccagctgagaagacgccgccgtcgtccggctcaaatttcgagtcctcggcctctgctcccgggtctgacactgtcagcgacgtggaacaagaactgaagaagggtgcggtcgttgtcgaagaagctccaaagccaaaggctctttcgccgcctgcagcccccgctgtacaagaagacctttgggatttcaagaaatacattggtttcgaggagcccgtggaggccaaggatgatggccgggctgtcgcagatgatgcgggctcctttgaacaccaccagaatcacgactccggacctttggcaggggagaatgtcatgaacgtggtcgtcgtggctgctgagtgttctccctggtgcaaaacaggtggtctgggagatgttgcgggtgctctgcccaaggctttggcaaagagaggacatcgtgttatggttgtggtaccaaggtatggggactatgaagaagcctacgatgtcggagtccgaaaatactacaaggctgctggacaggatatggaagtgaattatttccatgcttatatcgatggagttgattttgtgttcattgacgctcctctcttccgacaccgtcaggaagacatttatgggggcagcagacaggaaattatgaagcgcatgattttgttctgcaaggccgctgttgaggttccatggcacgttccatgcggcggtgtcccttatggggatggaaatctggtgtttattgcaaatgattggcacacggcactcctgcctgtctatctgaaagcatattacagggaccatggtttgatgcagtacactcggtccattatggtgatacataacatcgctcaccagggccgtggccctgtagatgaattcccgttcaccgagttgcctgagcactacctggaacacttcagactgtacgaccccgtgggtggtgaacacgccaactacttcgccgccggcctgaagatggcggaccaggttgtcgtggtgagccccgggtacctgtgggagctgaagacggtggagggcggctgggggcttcacgacatcatacggcagaacgactggaagacccgcggcatcgtcaacggcatcgacaacatggagtggaaccccgaggtggacgcccacctcaagtcggacggctacaccaacttctccctgaggacgctggactccggcaagcggcagtgcaaggaggccctgcagcgcgagctgggcctgcaggtccgcgccgacgtgccgctgctcggcttcatcggccgcctggacgggcagaagggcgtggagatcatcgcggacgccatgccctggatcgtgagccaggacgtgcagctggtgatgctgggcaccgggcgccacgacctggagagcatgctgcagcacttcgagcgggagcaccacgacaaggtgcgcgggtgggtggggttctccgtgcgcctggcgcaccggatcacggcgggggcggacgcgctcctcatgccctcccggttcgagccgtgcgggctgaaccagctctacgccatggcctacggcaccgtccccgtcgtgcacgccgtcggcggcctcagggacaccgtgccgccgttcgaccccttcaaccactccgggctcgggtggacgttcgaccgcgccgaggcgcacaagctgatcgaggcgctcgggcactgcctccgcacctaccgagacttcaaggagagctggagggccctccaggagcgcggcatgtcgcaggacttcagctgggagcacgccgccaagctctacgaggacgtcctcgtcaaggccaagtaccagtggtgaacgctagctgctagccgctccagccccgcatgcgtgcatgacaggatggaactgcattgcgcacgcaggaaagtgccatggagcgccggcatccgcgaagtacagtgacatgaggtgtgtgtggttgagacgctgattccaatccggcccgtagcagagtagagcggaggtatatgggaatcttaacttggtattgtaatttgttatgttgtgtgcattattacaatgttgttacttattcttgttaaaaaaaaaaaaaaaaaa

SEQ ID NO: 4762 - protein, 799 aa, Triticum aestivum
MSSAVASAASFLALASASPGRSRRRARVSAQPPHAGAGRLHWPPWPPQRTARDGAVAALAAGKKDAGIDDAAASVRQPRALRGGAATKVAERRDPVKTLDRDAAEGGGPSPPAARQDAARPPSMNGMPVNGENKSTGGGGATKDSGLPTPARAPHPSTQNRAPVNGENKANVASPPTSIAEAAASDSAATISISDKAPESVVPAEKTPPSSGSNFESSASAPGSDTVSDVEQELKKGAVVVEEAPKPKALSPPAAPAVQEDLWDFKKYIGFEEPVEAKDDGRAVADDAGSFEHHQNHDSGPLAGENVMNVVVVAAECSPWCKTGGLGDVAGALPKALAKRGHRVMVVVPRYGDYEEAYDVGVRKYYKAAGQDMEVNYFHAYIDGVDFVFIDAPLFRHRQEDIYGGSRQEIMKRMILFCKAAVEVPWHVPCGGVPYGDGNLVFIANDWHTALLPVYLKAYYRDHGLMQYTRSIMVIHNIAHQGRGPVDEFPFTELPEHYLEHFRLYDPVGGEHANYFAAGLKMADQVVVVSPGYLWELKTVEGGWGLHDIIRQNDWKTRGIVNGIDNMEWNPEVDAHLKSDGYTNFSLRTLDSGKRQCKEALQRELGLQVRADVPLLGFIGRLDGQKGVEIIADAMPWIVSQDVQLVMLGTGRHDLESMLQHFEREHHDKVRGWVGFSVRLAHRITAGADALLMPSRFEPCGLNQLYAMAYGTVPVVHAVGGLRDTVPPFDPFNHSGLGWTFDRAEAHKLIEALGHCLRTYRDFKESWRALQERGMSQDFSWEHAAKLYEDVLVKAKYQW

SEQ ID NO: 4763 - DNA, 2771 bp, Triticum aestivum
  CDS (280)..(2550)
cgccactccactcgccttgccccactcccactcttctctccccgcgcacaccgagtcggcaccggctcatcacccatcacctcggcctcggccaccggcaaaccccccgatccgcttttgcaggcagcgcactaaaaccccggggagcgcgccccgcggcagcagcagcaccgcagtgggagagagaggcttcgccccggcccgcaccgagcggggcgatccaccgtccgtgcgtccgcacctcctccgcctcctcccctgtcccgcgcgcccacacccatggcggcgacgggcgtcggcgccgggtgcctcgcccccagcgtccgcctgcgcgccgatccggcgacggcggcccgggcgtccgcctgcgtcgtccgcgcgcggctccggcgcttggcgcggggccgctacgtcgccgagctcagcagggagggccccgcggcgcgccccgcgcagcagcagcaactggccccgccgctcgtgccaggcttcctcgcgccgccgccgcccgcgcccgcccagtcgccggccccgacgcagccgcccctgccggacgccggcgtgggggaactcgcgcccgacctcctgctcgaagggattgctgaggattccatcgacagcataattgtggctgcaagtgagcaggattctgagatcatggatgcgaatgagcaacctcaagctaaagttacacgtagcatcgtgtttgtgactggtgaagctgctccttatgcaaagtcaggggggttgggagatgtttgtggttcgttaccaattgctcttgctgctcgtggtcaccgagtgatggttgtaatgccaagatacttaaatgggtcctctgataaaaactatgcaaaggcattatacactgcgaagcacattaagattccatgctttgggggatcacatgaagtgaccttttttcatgagtatagagacaacgtcgattgggtgtttgtcgatcatccgtcatatcacagaccaggaagtttatatggagataattttggtgcttttggtgataatcagttcagatacacactcctttgctatgctgcatgcgaggccccactaatccttgaattgggaggatatatttatggacagaattgcatgtttgttgtgaacgattggcatgccagccttgtgccagtccttcttgctgcaaaatatagaccatacggtgtttacagagattcccgcagcacccttgttatacataatttagcacatcagggtgtggagcctgcaagtacatatcccgatctgggattgcctcctgaatggtatggagctttagaatgggtatttccagaatgggcaaggaggcatgcccttgacaagggtgaggcagttaactttttgaaaggagcagttgtgacagcagatcggattgtgaccgtcagtcagggttattcatgggaggtcacaactgctgaaggtggacagggcctcaatgagctcttaagctcccgaaaaagtgtattgaatggaattgtaaatggaattgacattaatgattggaaccccaccacagacaagtgtctccctcatcattattctgtcgatgacctctctggaaaggccaaatgtaaagctgaattgcagaaggagttgggtttacctgtaagggaggatgttcctctgattggctttattggaagactggattaccagaaaggcattgatctcattaaaatggccattccagagctcatgagggaggacgtgcaatttgtcatgcttggatctggggatccaatttttgaaggctggatgagatctaccgagtcgagttacaaggataaattccgtggatgggttggatttagtgttccagtttcccacagaataactgcaggttgcgatatattgttaatgccatcgagatttgaaccttgcggtcttaatcagctatatgctatgcaatatggtacagttcctgtagttcatggaactgggggcctccgagacacagtcgagaccttcaacccttttggtgcaaaaggagaggagggtacagggtgggcgttctcaccgctaaccgtggacaagatgttgtgggcattgcgaaccgcgatgtcgacattcagggagcacaagccgtcctgggaggggctcatgaagcgaggcatgacgaaagaccatacgtgggaccatgccccgagcagtacgagcagatcttcgagtgggccttcgtggaccaaccctacgtcatgtagacggggactggggaggtccaagtgcgagtctccttcagctctgaagacatcctcttcatccttccgcggcccggaaggatacccctgtacattgcgttgtcctgctacagtagagtcgcaatgcgcctgcttgctttggttcgccggttcgagaacatatgacggctgtgctgctgcggcggtgacagcttcgggtggacgacagttacagttttggggaataaggaagggatgtgctgcaggatggttaacagcaaagcaccactcagatggcagcctctctgtccgtgttacagctgaaatcagaaaccaactggtgactctttagccttagtgattgtgaagtttgttgccttctgtgtatgttgtcttgtccttagccgacaaatatttgacctgttggagaattttatctttgctgctgtttttttttaatcaaaagagggggtttcctccgatttcattaaaaaaaaaaaaaaaaaaaaaaaaaaaaaaaaaaaaaaaaaaaaaaaaaaaaaaaaaaaaaaaaaaaaaaaaaaaaaaaaaaaa

SEQ ID NO: 4764 - protein, 756 aa, Triticum aestivum
MAATGVGAGCLAPSVRLRADPATAARASACVVRARLRRLARGRYVAELSREGPAARPAQQQQLAPPLVPGFLAPPPPAPAQSPAPTQPPLPDAGVGELAPDLLLEGIAEDSIDSIIVAASEQDSEIMDANEQPQAKVTRSIVFVTGEAAPYAKSGGLGDVCGSLPIALAARGHRVMVVMPRYLNGSSDKNYAKALYTAKHIKIPCFGGSHEVTFFHEYRDNVDWVFVDHPSYHRPGSLYGDNFGAFGDNQFRYTLLCYAACEAPLILELGGYIYGQNCMFVVNDWHASLVPVLLAAKYRPYGVYRDSRSTLVIHNLAHQGVEPASTYPDLGLPPEWYGALEWVFPEWARRHALDKGEAVNFLKGAVVTADRIVTVSQGYSWEVTTAEGGQGLNELLSSRKSVLNGIVNGIDINDWNPTTDKCLPHHYSVDDLSGKAKCKAELQKELGLPVREDVPLIGFIGRLDYQKGIDLIKMAIPELMREDVQFVMLGSGDPIFEGWMRSTESSYKDKFRGWVGFSVPVSHRITAGCDILLMPSRFEPCGLNQLYAMQYGTVPVVHGTGGLRDTVETFNPFGAKGEEGTGWAFSPLTVDKMLWALRTAMSTFREHKPSWEGLMKRGMTKDHTWDHAPSSTSRSSSGPSWTNPTSCRRGLGRSKCESPSALKTSSSSFRGPEGYPCTLRCPATVESQCACLLWFAGSRTYDGCAAAAVTASGGRQLQFWGIRKGCAAGWLTAKHHSDGSLSVRVTAEIRNQLVTL

SEQ ID NO: 4765 - DNA, 4121 bp, Zea mays
  CDS (442)..(3954)
gaattcggcacgagccgctttggatccacctctctgcgcgcggggccgcgcctgcacttcgcacagtggcaggcggcagcccccaacgccatccacacatcccccggcaaaatccttacccaccgaaaaaagggaaaaatggaggcaggcaggcggcactgcggcagtcacacatgcgcacgggcacggtaaaagtacgagccaccttttccctctcgatcgagcggccgaggaggaggagagcctctctgtctctggcgaggggcgactgggcgagcgcttcgtctagacagcccagctgcgcatttggatgcaaattacgtgtggaggatggagtaaaatactgagcaagggagagggaagaggagacggtcttttcttttcttgagccgaggagggggatcaggtggagtgagcgagggggaggttttgccgccggcaatggagatgaatctccgggcggagagcccactctgctcccggggccgccccgccctcgtcgtgcgcccggccgctgcagccactggcctcgcgctgtctgtcgtaaggtgcagcagatttacgagaggcgggctcgttcgatgcatggtatcaagttcagattatcccaagaggaatccgaggagggcatcgacttctaagagcaagggcgttgcctctggagggtatgcttcgagacctactgctgaatccagtacgaagaagatagaacagagcaggaacaatgaaggtgatttcagcagagccaatgggtcactctatggcgaggcagcagagcaggcaagtactgctgaagaatcgtctcaggtttacatgacaggagacattttaagtggcgcagaaagggacggagctggtaccgaagaagaggctgaccaaaatcaatcttcagcgttgccttccgcgtccatggatgatgactcaatcgaccggcaacttgatgagtaccgtggtaaaataagtgctctagtaagttccaaacctgaaccttcgtcacttgcaagtgttgctggacaaaacgaatcagttggcggttttcacggccagcacgaaccaataactggttctgaggaacatggcagttcaattgttgatgcaccaataaaaggcaggctatttgctgaggccgttgtgggtcataaggattttactgaatcagcagcaggaaaggcaagcagcgagaatgaggaagggcaagctgtctcgttagaagatgatgtcgggataagtacagacgcagatgaagagcttccggtatctgaagatgatccagaagtgctactgaggaggcttcaagagcttgctgatgagaattattcgactgggaacaactgttttgttttccctgaagtagtgaaggctgattcgatgattgatctttacttaaaccgcagcatgtcggccttagctagtgagtccgacgtttttgtaaaaggagcattcaatggttggagatggaaccgtttcactgaaacaatgcatagaagcgaattaagaggggattggtggtgctgcaagctctacattcccaagcaggcatacagactagactttgtattctttaacggtgacactgtctatgaaaataacaatcacaacgattttttcctggaaatagaaagtgacatagatgaacactcatttgaggacttcttggttgaagaaaagcgaaaggaactcgagaggcttgctgcagaagaagctgaaaggaaaagacaagctgaggagcggcacaggagagaggaagaaagggccgcgatggaagctgacagggcacaagcaaggtctgaggtcgagatgaagaaagagaaattgcgccagatgttgagttcggctagcagatatgctgagaacttatggtacatagaacctaacacctacagaggaggagacagagttagattgtactataatagaagctcgagatcactaatgcataacactgagatttggatgcatggaggttataacaactggattgatggactctcaatagctgaaagacttgtcaaatctcatgaaaaggaaggcgattggtggtatgtagaagttacattacctgaaagggcattggtgttggattgggtttttgctgatggaccacctgggaatgcaaggaattatgataacaatggaaggcaggattttcatgccatcgttcctaataacatatcggatgatatcttttgggtggaagaagaacataggatctttacaaggcttcaacaagagagaagagaaagggagagtgccgaaagaataaaggctgagagatctgcaaaaatgaaggctgagatgaaggaaaagactatgagagcgtttctgctctcacaaaaacatattgtgtatactgagccactcgaagtacgtgcaggaaccactgtggacgttctttataatccttctaacacagtgctgaatggaaagtcagaggtttggttcagaggttcctttaaccgttggactcatccaagtggtcccttaccaccacagaagatggtaaaggctgagaatagttcacacttacgaacaacagtcagtgttcccctggatgcatatatgatggactttgttttctctgagtcggaagaaggtggaagatatgacaataggaacgggatggattatcatattcctgtgtctgattcggttgcaagggaacctccaatgcatattgtacacattgcagtggaaatggctcctatcgcaaaggttggaggccttggtgatgttgttacaagcctttcacgagctgttcaggatttaggccataaagttgaggttattctgccgaagtatgattgtttaatcctaagcagtgtgaaggatttacactaccaacaaagttttgcttcgggtggcacagaggtaaaagtatggtttggaaaggttgaagatctgccagtttacttcttggaaccacaaaatggcatgttttgggttggatgtgtgtatgggaagaatgatgagagtagatttggcttcttctgtcattctgctctggagtttctgctccaaaaaggatcttctcctgatatcatacattgtcatgactggtcaagtgctcccgttgcttggctatacaaggaacagtatgctcttaatgggctgggaaatggtcggattgtatttaccatccacaatcttgagtttggagcgcatcacattggcaaggcaatggcacattgtgacaaggctacaactgtctctgatacatattcaaaggaagtggctggacatggagctattgcacctcactactataaattccatggaattcgaaatggaattgatcctgacatttgggatccatatactgacagatttattccggttcattatacatcagagaatgttcttgagggcaagggtgctgcaaaaaaggcattgcagcagatgcttggattacagcaaactgatagccctgttgttggaatcatcactcgtctaacagtgcagaagggaatccaccttatcaaacatgcaatgcatcgagctcttgaacgcaatgggcaggtggttttactgggttctgcaccagatcatcgcatacaaggtgactttacaaatttagccagtaagctgcatggtgaataccatggccgggtgaagctatgtttaacctatgacgagccactgtcacatttgcttattgctatgcgctacggatccatcccgattgttcggaaaactggaggcctgtacgacaccgtctttgacgtcgacgatgataaggatcgggctcaagcacaaggcctcgagccaaatggattcagtttcgaaggagctgatagcagtggtgtagattatgctctcgacagagctataaccgcgttttatgatgcccgcgactggttcaactcccttagcaagagggtaatggagcaagattggtcatggaatagacctgcactagactacatggagttgtaccattctgctcgcaaaaactgatacattttaccacaagggaaaacaggcccagtttgcccagtttatgagcatctcagatgcaacacagagtgtatagttagagaatgccacccgttgtacgttactgccgttacatgcatgtgtatacacatctaaaaaaaaaaaaaaaaaaacggcacgagctcgtg

SEQ ID NO: 4766 - protein, 1170 aa, Zea mays
MEMNLRAESPLCSRGRPALVVRPAAAATGLALSVVRCSRFTRGGLVRCMVSSSDYPKRNPRRASTSKSKGVASGGYASRPTAESSTKKIEQSRNNEGDFSRANGSLYGEAAEQASTAEESSQVYMTGDILSGAERDGAGTEEEADQNQSSALPSASMDDDSIDRQLDEYRGKISALVSSKPEPSSLASVAGQNESVGGFHGQHEPITGSEEHGSSIVDAPIKGRLFAEAVVGHKDFTESAAGKASSENEEGQAVSLEDDVGISTDADEELPVSEDDPEVLLRRLQELADENYSTGNNCFVFPEVVKADSMIDLYLNRSMSALASESDVFVKGAFNGWRWNRFTETMHRSELRGDWWCCKLYIPKQAYRLDFVFFNGDTVYENNNHNDFFLEIESDIDEHSFEDFLVEEKRKELERLAAEEAERKRQAEERHRREEERAAMEADRAQARSEVEMKKEKLRQMLSSASRYAENLWYIEPNTYRGGDRVRLYYNRSSRSLMHNTEIWMHGGYNNWIDGLSIAERLVKSHEKEGDWWYVEVTLPERALVLDWVFADGPPGNARNYDNNGRQDFHAIVPNNISDDIFWVEEEHRIFTRLQQERRERESAERIKAERSAKMKAEMKEKTMRAFLLSQKHIVYTEPLEVRAGTTVDVLYNPSNTVLNGKSEVWFRGSFNRWTHPSGPLPPQKMVKAENSSHLRTTVSVPLDAYMMDFVFSESEEGGRYDNRNGMDYHIPVSDSVAREPPMHIVHIAVEMAPIAKVGGLGDVVTSLSRAVQDLGHKVEVILPKYDCLILSSVKDLHYQQSFASGGTEVKVWFGKVEDLPVYFLEPQNGMFWVGCVYGKNDESRFGFFCHSALEFLLQKGSSPDIIHCHDWSSAPVAWLYKEQYALNGLGNGRIVFTIHNLEFGAHHIGKAMAHCDKATTVSDTYSKEVAGHGAIAPHYYKFHGIRNGIDPDIWDPYTDRFIPVHYTSENVLEGKGAAKKALQQMLGLQQTDSPVVGIITRLTVQKGIHLIKHAMHRALERNGQVVLLGSAPDHRIQGDFTNLASKLHGEYHGRVKLCLTYDEPLSHLLIAMRYGSIPIVRKTGGLYDTVFDVDDDKDRAQAQGLEPNGFSFEGADSSGVDYALDRAITAFYDARDWFNSLSKRVMEQDWSWNRPALDYMELYHSARKN

SEQ ID NO: 4767 - DNA, 3240 bp, Chlamydomonas reinhardtii
  CDS (138)..(2264)
acgaggtccactcttagcacgcgactcaaagtagtcgcttaagacgtcgcaaaccccagcggtcgtcgccgaaacctacgacgatgcagactcttgccggccagcgcgtggccgcgcccgtccgccaggcggagcgtatggctgttgcctctaccagccgccccagcagcgcgcgtcctatcgtcatcaatgccgcgtcgttcggtgtcaagaagaccgcgaaccagctgctgcgtgagcttgctcgtggctccgcacgcaagtccacctcgcgctcggctgttactggtgccactggtgccacttgcgcgctggacatcgtgatggttgctgctgaggtcgccccttggtccaagacgggcggcctgggcgatgtgactggtggcctgcctattgagctggtcaagcgcggccaccgcgtcatgaccattgcccctcgctacgaccagtacgctgacgcctgggacacctcggtggtcgtggacatcatgggcgagaaggtccgctacttccactccatcaagaagggcgtgcaccgcgtgtggattgaccacccctggttcctggccaaggtctggggcaagaccggctccaagctgtacggcccccgctccggcgctgactacctggacaaccacaagcgcttcgccctgttctgcaaggccgctattgaggctgcccgcgtgctgcccttcggccccggcgaggactgcgtcttcgtggccaacgactggcactccgccctggtgcccgtcctgctgaaggacgagtaccagcccaagggccagttcaccaaggccaagtcggtgctggctatccacaacatcgccttccagggccgcatgtgggaggaggctttcaaggacacgaagctgccccaggccgcctttgacaagctggccttctcggacggctatgccaaggtttacactgaggccacccccatggaggaggacgagaagcccccgctgacgggaaagacctacaagaagatcaactggctgaagggtggcattatcgccgccgacaagctggtgactgtgtcgcccaactacgcgaccgagatcgctgccgatgccgccggcggtgtggagctggacaccgtcatccgcgccaagggcattgagggcattgtgaacggcatggacattgaggagtggaaccccaagaccgacaagttcctgtctgtgccctacgaccagaacagcgtctacgccggcaaggccgccgccaaggaggccctgcaggccgagctgggcctgcctgtggaccccaccgcccccctgttcgccttcatcggccgcctggaggagcagaagggtgtggacatcatcctggccgccctgcccaagatcctggccacccccaaggtgcagatcgccatcctgggtaccggcaaggccgcctacgagaagctggtgaacgccatcggcaccaagtacaagggccgcgccaagggcgtggtcaagttctcggcgcccctggcgcacatgctcaccgccggcgccgacttcatgctggtgccctcgcgcttcgagccctgcggcctgatccagctgcacgccatgcactacggtaccgtgcccgtggtagcctccaccggcggcctggtcgacaccgtcaaggagggcgtcaccggcttccacatgggcgccctgaaccccgacaagctggacgaggctgacgccgacgccctggccgccaccgtgcgccgtgccagcgaggtgtttgcgggcggccgctaccccgagatggtggccaactgcatcagccaggacctgtcctggtccaagcccgcccagaagtgggagggcctgctggaggaggtggtgtacggcaagggcggcgtggccaccgccaagaaggaggagatcaaggtgcccgttgccgagaagatccccggcgacctgcccgccgtgtcctacgcccccaacaccctgaagcccgtgtccgcctccgtggagggcaacggcgccgccgcgcccaaggtcggcaccaccgcccccgccatgggcgcgtggcgcgcgaccaccccctcgggcccctcgcccgccgccgccacccccaaggtgaccacctacaagcccgccctgcccgccaccgccaagcccaagaccgctggcctcaagctggccggtgaggcctccaccacctcgacctcggagaacggcgctgcctccaacggcaacggcaacggtgcctcggcctccaagacctcggctgccaagcccctggtctccgccgccacccgcaagtccgcctaaagcggcagtagccgcagaggcggcgacagcatgagcggctcgaccaaagctgtggcaggaacggctgtagcagcggcaggcggccgccaccggcgaggagcaggcttgcggcagcgagggcgatgagcttagcggccgtgagcatggcaggcggaaacgtgtgtactgaaatgtggtgcatgagagtgtcgtgctgtaatgaagtcggttttgcgagaccggagaaacgccggtttggttttgtagtgcagggcctgtggtttcggttttgcccaagtccaaaagaagagtaacgaaactgtagcagtagcagagcacttgcgcggcgcggcgaccacgccggcccgtgcgcagcctgtcctgccctcagccttgtgattcggcggcaagagggcgggtctgtacactccatccattccaggatttttgcaggctgcctgagagtttgccattttgtgggacgtgagcggcgggacggccgcgccgggctctcctaccgcctccggcaacggagaagtgggaggcgctgtagcccggtgaccccccaatgtagaggatgggatacataagagcgtgtggaatggtggtaaaagaggaggggcctgggtcgcccctcgatggttttgttgaggtgcagacggcaccgtcggcgtcaaaggccctcgcaaggcccgggtgccttgggctcatttttggtgcccgtcgatgatgagagattggccagcggttttttgaggctggctcgaagcgagggtttgtggaagtggagcgaggagggttggagaaagaggcggacatgcttgactggaggtacacaaagtggagcgtgcgacggcacggaggcattggcggactattgacccagtagtgtggaaagtagttggacctgaattctttgagagtaccgcgcattaatccgtgagagagtaacaaagatggcacctgaaaaaaaaaaaaaaaaaaaaaaaaaaaaaaa

SEQ ID NO: 4768 - protein, 708 aa, Chlamydomonas reinhardtii
MAVASTSRPSSARPIVINAASFGVKKTANQLLRELARGSARKSTSRSAVTGATGATCALDIVMVAAEVAPWSKTGGLGDVTGGLPIELVKRGHRVMTIAPRYDQYADAWDTSVVVDIMGEKVRYFHSIKKGVHRVWIDHPWFLAKVWGKTGSKLYGPRSGADYLDNHKRFALFCKAAIEAARVLPFGPGEDCVFVANDWHSALVPVLLKDEYQPKGQFTKAKSVLAIHNIAFQGRMWEEAFKDTKLPQAAFDKLAFSDGYAKVYTEATPMEEDEKPPLTGKTYKKINWLKGGIIAADKLVTVSPNYATEIAADAAGGVELDTVIRAKGIEGIVNGMDIEEWNPKTDKFLSVPYDQNSVYAGKAAAKEALQAELGLPVDPTAPLFAFIGRLEEQKGVDIILAALPKILATPKVQIAILGTGKAAYEKLVNAIGTKYKGRAKGVVKFSAPLAHMLTAGADFMLVPSRFEPCGLIQLHAMHYGTVPVVASTGGLVDTVKEGVTGFHMGALNPDKLDEADADALAATVRRASEVFAGGRYPEMVANCISQDLSWSKPAQKWEGLLEEVVYGKGGVATAKKEEIKVPVAEKIPGDLPAVSYAPNTLKPVSASVEGNGAAAPKVGTTAPAMGAWRATTPSGPSPAAATPKVTTYKPALPATAKPKTAGLKLAGEASTTSTSENGAASNGNGNGASASKTSAAKPLVSAATRKSA

SEQ ID NO: 4769 - DNA, 3049 bp, Chlamydomonas reinhardtii
  CDS (190)..(1920)
cgttggggagtgcatggccgaaaaaatgtggataaggcgtaaacgcgccagcggttgccggttccgttgacctgaccgactcgtggcgtcgcttacgcatgggccgatgtgggtcagcacctgcgtatgctttctgagtccagtggttgccccggctgtacgataggtggagctgccgcttaagagcatatgcttatccgcatcggagccccgccgcggggcccgcggcgaccctgcatacccgcagcgcaccagctccgcttagctagcagtgtcatcattgcattcgtcctccgtgggtgcccccgtgtgcagctgtccctgccgctggagtcggagatgtacattgaaccggctgcgccggtggcggaggcgcccgaggcggaggaggaggagccaccggccgtggagaagccgccgccgctggccggacctaacgttatgaacgtggtcatggtgggagccgagtgcgcgccctggtccaagactggcggcctgggtgacgtgatggcggcgctgcccaaggcgctggtccgccgcggccaccgcgtgatggtggtggtgccccggtatgagaactacgacaacgcctgggagacaggcatccgcaaaatctactcggtcttcaactccaaccaagaggtgggctacttccacgcatttgtggacggcgtggactacgtgtttgtggaccaccccacgttccacggccgggggaagaacatctacggcggcgagcgccaggagattctgtttcgctgcgcgctgctgtgcaaggcggcgctggaggctgtctggcacgtgccgtgcggcggcatcacctatggcgatgacaacctgtgcttcatcgccaacgactggcacacggcgttgctgcccgtgtacctgcaggcgcactaccgtgactacggcgagatgacgtacgcgcgctgcgccttcgtcatccacaacatggcgcaccagggccgcggcccctttgtggagagcgagcacctggagctgaacgaggagtaccgcgagcgcttccgcctgtacgaccccattggcggcgagcacatgaacgtgatgaaggctggcctggagtgcgcccaccgcctggtggctgtgtccaaatgctacgcctgggagtgccagaccgtggagggcggctgggggctgcacgaggtgatcaaggtgaacaactggaagctgcgcggcattgtgaacggcatcgactacaaggagtggaaccccatctgtgacgagttcctcacgacggacggctacgcgcactacgacgtggacacgctggctgagggcaaggccaagtgcaaggcggcgctgcagaaggagctgggcctgccggtggacccggacgccccgatgctgggcttcatcgggcggctggactaccagaagggcgtggacctcatccgcgacaactacgactacatcatgggcgagaagtgccagctggtgatgctgggcagcgggcggcaggacctggaggacgcgctgcgggacatggagaacaggaacaagaaccagtgccgcggctgggtgggcttttccaacaagatggcgcaccgcatcaccgccgccgccgacatcctgctcatgccctcgcgctttgagccgtgcggcttgaaccagctgtacgccatggcttacggcaccgtgcccatcgtgcactctgtgggcggcctgcgcgacaccgtcaagcagtacagcccctttgagaacgtgggcaccggctgggtgtttgagcgcgccgaggcgaacaagctgcgcgagagcattaacaacgctctgtacacctaccgccagttccgtgactcgttccgcggtatccagcgccgcggcatggagcaggacctgacctgggacaacgccgcctccatctatgaggaggtgctggtggccgccaagtaccagtggtagatgcgatatgcaggcgggacgcactgtgacatacgcttgtgatgtgttgtgcatgtgtgtgcatgagaccgcgctgtttgtgggtgttgggaggtcctgcagccttgccttgcaagcctggtgccgagctgcggctgtaagagcccgcgaggggagtggttagggcgtgtgggcttgaaggtggtgcgcccaagggtgcgcctgctagactctagagaagaatgtgtagctgttgacagatacggtagatcatgggtgtggttacatttggtgggacagtgcttgccgggcaacatggcggtgcctgcggatgttaaaatgcgtcgtggagtgggtgccgccccggctgctgtgtcattttagggctccacatctaggccggcttcagtgcccggcaagagcgtgtgtgcacgtttgtgtatgatgtgtttgggaaggccacttttgtggaggggctcagccccttttcccgtgaccggggaacacttgtcccgtggttatgcgcggcgcggataccttccgcagagagaatgcgagtctgggcatgcactgcagcggctcacccacgcagcgttgagagccgagcgcatttgcttgttgcgctgagagaaaataatgctgtcagctgtgatgaagggctgccagggtagcaaggctacctcaggtagaatgggctgagtgatttgttttcaggtaccgataattatattcagccgcacgggtgacggaatgctgcacgtcggcacctatacgtcatgtgatggttttttttggccaacccgtgttttttgatggcgtggataggcttgagttgtgatgcagctgatttccctgacacctgggacggtcctttgttagactacccttgttggtaaacttgcaattatttgaagggccttgcataatcagcccttttcctgccataaggcagccacctccttgttgaagggccttgcgtaattttgttcttttgcacagtgcggggacgtggaacgcatgtcacgcgctgcaggcagcaagtcgtacatttgccggcgcggcttacccgtggccaaatgcaccctctgtgctgtaactctctgatgagaaaaaaaaaaaaaaaaaaaaaaaaaaaaaaaaaaaaaaaaaa

SEQ ID NO: 4770 - protein, 576 aa, Chlamydomonas reinhardtii
MLIRIGAPPRGPRRPCIPAAHQLRLASSVIIAFVLRGCPRVQLSLPLESEMYIEPAAPVAEAPEAEEEEPPAVEKPPPLAGPNVMNVVMVGAECAPWSKTGGLGDVMAALPKALVRRGHRVMVVVPRYENYDNAWETGIRKIYSVFNSNQEVGYFHAFVDGVDYVFVDHPTFHGRGKNIYGGERQEILFRCALLCKAALEAVWHVPCGGITYGDDNLCFIANDWHTALLPVYLQAHYRDYGEMTYARCAFVIHNMAHQGRGPFVESEHLELNEEYRERFRLYDPIGGEHMNVMKAGLECAHRLVAVSKCYAWECQTVEGGWGLHEVIKVNNWKLRGIVNGIDYKEWNPICDEFLTTDGYAHYDVDTLAEGKAKCKAALQKELGLPVDPDAPMLGFIGRLDYQKGVDLIRDNYDYIMGEKCQLVMLGSGRQDLEDALRDMENRNKNQCRGWVGFSNKMAHRITAAADILLMPSRFEPCGLNQLYAMAYGTVPIVHSVGGLRDTVKQYSPFENVGTGWVFERAEANKLRESINNALYTYRQFRDSFRGIQRRGMEQDLTWDNAASIYEEVLVAAKYQW

SEQ ID NO: 4771 - DNA, 2716 bp, Chlamydomonas reinhardtii
  CDS (93)..(2048)
tggcgctggttgattcgcgctaggggtttgcaattttgctcgcacacagcctgtcacccggccagcccgctattgggctttttgtactagaaatgaagagcttcatgcggagggatgcgctcggcgcggggctccgcggtgcagccagcacaaagcccgtctcaagggtcgccagcgtgaggcctgcgcctaccgcctaccgcactgcctgccaagttgcgaaggtggatgaaatggtgtcggtggatgaggagcttactcgtctccgcaaggagaacgagctcctgcgcgcccaactggcgctgtaccagcagaaccagcagccgtccgtgggtgccgctgccgttgccccgcctgctgccgccacgaaggtgctggagaagccggcgccggccaagcaggcttccgtggatggtggcatcatctggcccaagccgggtgaggcgttctgggagcgcagcccccgcgcatcgcccatgccgctgcaaggcggtgcggcggaggcgccccccgttgagcgtgacggtaaccccatgcacatcattcacatcaccgccgagatggcaccaattgccaaggtgggcggcctaggcgacgtggtgactgggctggccaaggcggcgctggcgcgcggccacttcgtgacggtcatgctgccgttctacgagtgcctgcccaaggaccagattgagggcctcaagcacgaatgcgacatcgaggtgcccaagggctaccgctgggacggcgagatccgcgtgggcccgctcaagacgtcagtgttctggggccgtgtccagggctgccccgtgtacctgatcaagcccgctgacgacaccaactgcaacatcttccgcggcggccgcatttacggcggctcctacaacgagatggaggcctacctgtacttctgcagggcctgcctggagtacctgaacgtgtcgcagcagaacccgcacgtgttgcagctgcacgactggcacgccgccgccgcgtccatgctgtactgggacgtgtacaaccccaacggcttcagtcgcacgcgcctgatgctcaccatccacaacctggacaacaccggcgagacccgccaggacgagttcttcttcacaggtgtgccgggtgagaacttcgccaccattgataaggcgctggacgagcgcaccatcggccacaaccctgagcgcctcaacctcatgaagggcggcatcgtgtactgcaacgcggtgaccaccgtgtcgcctacctatgccaacgaggtcctcaacggcggcgcggctggctggctgcggagcaccttcgcgcgccccgagctgcgctccaagttccacggcatcctgaacggcattgactgtgaggagtggaacccggccactgacgcgctgctgccagccaacttcgacgccgaccgccccgccgggaaggcgctgtgcaaggagtttctgcagaagggtctgggcctggaggtggacccccgcaagccgctggtggcggtggtgagccggctggtgccgcagaagggcatccacctcatcaaggccgcgctgtttcgcaccgtggagaagggcggccagttcgtgctgctgggctcgggccactcggacccggccttcaggcagctggctgacgggcagttcaaggaccaccccaactgcaggctgaagatcatgtacagcgagcgcctggcgcacatgatttacgccgctgctgacgtggtggtggtgccgtccatgtttgagccgtgcggcctcacgcagatgattgcgctgcgctacggcgcggtgccgctggtgcgccgcacgggcggcctggcagacacggtgtttgatgtggacggcccggccggcgggcccgcgcagccccgcaacggcttcgtgttcgacggctccgacgacggcgcgctgcatggcgccctggaccgcgccctgaccctgtacaccacgcagcctgagcgctgggcggcgctgcagcaggacaacatgcgcctggacgtcagctggggcaagtcggcgaagagctacgtggacgtgtaccgctccatcagcgcctgagcaggaagattgagatgactcaacagagattggagaaaaggacgagggcgcagcacgtcctgcatagtgcaagagtgctgcgggcgcagtggcagcgaaggagcaggcacggcgtaacgtcacacatgcacgctaatgggtgtgccccgctgcggggacggcattggttctggggaccgctcgtgagttcacctattgtttactgctggcctggtcttcagacggggctgcagtgcttgtattatcagcaagggacttatttttgccggtggcatagtaacggtaccatttgagagagaggtatcacagagaggcatggcaccgtacatccgatgatttgggtggggcgctggcggttttgcgggagcgcacgacacgcgttgcgcacaagtagcccgcgagttttgtacctcgcctcgaaccacgtttttggggtgcgtttgagggcgaaaccattttgcagggagatgagagaggacgaggttggcagaacgcggtggtgccatacatggaacgattgcgccacccgtaggccagtggtaccgtatccgccggggaattccgagcgagccttgtacgtcacgcttgtacgtaactcggttactgcggacacagaacttgctatttttatatttaaggaattcggccactaaaaaaaaaaaaaaaaa

SEQ ID NO: 4772 - protein, 651 aa, Chlamydomonas reinhardtii
MKSFMRRDALGAGLRGAASTKPVSRVASVRPAPTAYRTACQVAKVDEMVSVDEELTRLRKENELLRAQLALYQQNQQPSVGAAAVAPPAAATKVLEKPAPAKQASVDGGIIWPKPGEAFWERSPRASPMPLQGGAAEAPPVERDGNPMHIIHITAEMAPIAKVGGLGDVVTGLAKAALARGHFVTVMLPFYECLPKDQIEGLKHECDIEVPKGYRWDGEIRVGPLKTSVFWGRVQGCPVYLIKPADDTNCNIFRGGRIYGGSYNEMEAYLYFCRACLEYLNVSQQNPHVLQLHDWHAAAASMLYWDVYNPNGFSRTRLMLTIHNLDNTGETRQDEFFFTGVPGENFATIDKALDERTIGHNPERLNLMKGGIVYCNAVTTVSPTYANEVLNGGAAGWLRSTFARPELRSKFHGILNGIDCEEWNPATDALLPANFDADRPAGKALCKEFLQKGLGLEVDPRKPLVAVVSRLVPQKGIHLIKAALFRTVEKGGQFVLLGSGHSDPAFRQLADGQFKDHPNCRLKIMYSERLAHMIYAAADVVVVPSMFEPCGLTQMIALRYGAVPLVRRTGGLADTVFDVDGPAGGPAQPRNGFVFDGSDDGALHGALDRALTLYTTQPERWAALQQDNMRLDVSWGKSAKSYVDVYRSISA

SEQ ID NO: 4773 - DNA, 2325 bp, Ipomoea batatas
  CDS (155)..(2047)
ccatggtacccggatcctcggaattcgaggatccgggtaccatgggggagtactatctacttcaagtgaacaagcaactcttgacttggaagaatatccacaattagctgtaagcgaacattttgttgaaacttctcaaacaggtaaaaaggacatgcctcgtaagggggcaaccttgaacaaagattcagacaaaaaaactacaaaaagaaatccaaagactgtgggatctactgaaaggccagctgtgaaatcaaaagtgtctttgagtccaagtcaagtgacttcttcaacagtaaattctcaggagccagcaaaagctacctatgaaactgtgaagtccagtcaagtgatgccactggacgtggattcacaaaagaatgtgacatccttttctagggagattcttttgtctgaggttccttcctcctcttcaatggcatctgcatctactttagaggatgagaaaagagatcatagagagtcaagttcaaaggagatagatgttgggactgaagatcctgtaaatgaagacttgaagccacctccattggcgggaaccaatgtcatgaatgttatattagtttgtgcagagtgtgctccatggtcaaaaacaggtgggcttggtgatgttgctggagcactacccaaggctttggctcggcgtggacacagagttatggttgtggttcctctttatggaaactatgctgaacctcaacatactggagttcgaaaaatgtttaagattgatggtcaggatatggaggtgaattactttcatgcctacatcgataatgtggattttgtcttcattgatagtcctatattccagcatagaggaaacaatatatatggaggaaatcgtgtggacattttgaagcgcatggacttattttgcaaagcagctattgtggttccgtggcatgttccgtgcggtggtatttgctatggagatggaaacttagtgttcattgcaaatgattggcatactgcattactgccagtctatctgaaagcatatttccgtgacaatggagtaatgaaattcactcgatccgtgcttgtcattcataacatagctcaccagggtcgcgggcctatggatgatttttccattgtggacctaccagctcaatatgcagacctttttaagctgtatgatccagtaggaggtgatcatttcaacatatttgcagctggtctaaagacagctgaccgtgtagtcacagtgagtcatggatatgcctgggagcttaaaacttctgaaggtggatggggtttgaatgggatcaggaatgagaatgagtggaaactgcaggggattgtcaatgggattgatattgaagagtggaatccccaattggatgtttacttgaaatctgatggctatgccaactattccctggacaccttgcagactggtaaacctcagtgcaaggcagcattgcaaaaggaaatgaatttgcctgttcgcgatgatgtcccactaattggtttcattgggaggcttgaccaccaaaaaggtgttgatttgatagccgaggcaatcccttggatgatgggccaagatgtgcagctggttatgctgggcacaggcaggcctgaccttgaacagatgctcaagcagattgaaggtcaatacggtgacaaagtaagaggatgggttggtttctcagtaaagactgcacaccggataactgcgggtgcagacattctgctgatgccatcaagatttgagccttgtggactgaaccagctgtatgctatgagctatgggacagtcccagttgtccatgctgtgggtggacttagagatacggtgcagccttttgatcctttcaatgaatcagggtatggatggacattcggtagggctgaggcaaatcagctgattgatgcactagggaattgcttattaacataccggcagtacaagcagagttgggaggggctccagaggcgtggaatgatgcaagacttaagctgggatcacgctgccgagaagtacgaggaagttcttgttgctgcaaagtatcagtggtgaggtttactacaatcactgctgacaacaggatcagaaatcatgcattccgaacatgccccatcgcccattgccagccattcactactatctattttcatatctttgccaagagaaaaggatgggacagattaccaacttattgtataggcagtaggctccctcaaatgtttgaagtgagatcaaattttatagttggttttagtttatttaataaccttaatctatatatagtccgtcctatcccagcctgcctggcctgggtacttctaaaaaaaaaa

SEQ ID NO: 4774 - protein, 630 aa, Ipomoea batatas
MPRKGATLNKDSDKKTTKRNPKTVGSTERPAVKSKVSLSPSQVTSSTVNSQEPAKATYETVKSSQVMPLDVDSQKNVTSFSREILLSEVPSSSSMASASTLEDEKRDHRESSSKEIDVGTEDPVNEDLKPPPLAGTNVMNVILVCAECAPWSKTGGLGDVAGALPKALARRGHRVMVVVPLYGNYAEPQHTGVRKMFKIDGQDMEVNYFHAYIDNVDFVFIDSPIFQHRGNNIYGGNRVDILKRMDLFCKAAIVVPWHVPCGGICYGDGNLVFIANDWHTALLPVYLKAYFRDNGVMKFTRSVLVIHNIAHQGRGPMDDFSIVDLPAQYADLFKLYDPVGGDHFNIFAAGLKTADRVVTVSHGYAWELKTSEGGWGLNGIRNENEWKLQGIVNGIDIEEWNPQLDVYLKSDGYANYSLDTLQTGKPQCKAALQKEMNLPVRDDVPLIGFIGRLDHQKGVDLIAEAIPWMMGQDVQLVMLGTGRPDLEQMLKQIEGQYGDKVRGWVGFSVKTAHRITAGADILLMPSRFEPCGLNQLYAMSYGTVPVVHAVGGLRDTVQPFDPFNESGYGWTFGRAEANQLIDALGNCLLTYRQYKQSWEGLQRRGMMQDLSWDHAAEKYEEVLVAAKYQW

SEQ ID NO: 4775 - DNA, 1440 bp, Erwinia carotovora subsp
  CDS (1)..(1440)
atgcgggtcttacatgtttgttcagagctatttccactattgaaaaccggcggactggcggatgtggctggtgcgttgcccggcgcgcagattgcggcggggatggatgttcgcgtcatcttgcctgccttccccgatctgaaaaaaggcattgctaacctacaggttgtgcgtgagctggataccttcgccggacacgtgaccttgctgttcggccattttaacggcgtcggtatttatttgattgatgtgcccgagctatatgaacgcgcgggcagcccttatcacgacccggcgctttacgcttatgccgataactacctgcggttcgcgctgctggggtggatgggatgcgaaatggcgtgcgggctggaccactattggcggcccgatattgtgcatgcccatgactggcacgcggggctgacctgtgcttatctggcggctcgcaaccgcccagcgaaatcggtctttaccgttcacaatctcgcctatcagggactgttcgctgccggacatatggcgaatcttcacttgccgagcgacttctttcaggtctacgggctagagttctacggtcagatttcctacctcaaggcagggttgttctacgcggatcatattacgaccgtgagcccgacctacgcgcatgagatcacgctgccagcctatggctatggtatggaaggcttgctgaagacgcgtgaagaagaagggcgcctgtccggtatcctcaatggcgtagacgagacgatttggaatccgacgcacgatcctttactgactaaccattacagccgcgaggcgctggcgaacaaagccgaaaacaagcgacatctgcaaacggcgatgggcctgaaagtggacgataaggcgccggttttcgctatcgtcagccgcctgaccagccagaaaggactcgatatcgcgttaagcgcgatacccgatctgttggagcagggcggccaactggtagtgttgggcgcaggggatgccgatttgcaggaaggttttctggctgccgctgcggaatatcacggtcaggttggcgtacagattggctatcacgaagccttctcgcaccgcatcattggcggcgcggatgtcatcatggttcccagccgatttgagccttgcgggttaacgcagctctacggcttgaagtatggcacgttgccgctggtgcgccgaactggggggctggcggatacggtatccgactgttcgctggagaatttggcggatggtctggcaagcgggtttgtctttaacgattgcagcgtgggatcgctatcccgcgcgattcgtcgtgtgttcgtgttgtggtcccgacctacgctatggcgctatgtgcagcgtcaggcgatggcaatggactttggttggcaggtttctgctcaggcttatggtgcgctatatcaacgcttgcatacccactag

SEQ ID NO: 4776 - protein, 479 aa, Erwinia carotovora subsp
MRVLHVCSELFPLLKTGGLADVAGALPGAQIAAGMDVRVILPAFPDLKKGIANLQVVRELDTFAGHVTLLFGHFNGVGIYLIDVPELYERAGSPYHDPALYAYADNYLRFALLGWMGCEMACGLDHYWRPDIVHAHDWHAGLTCAYLAARNRPAKSVFTVHNLAYQGLFAAGHMANLHLPSDFFQVYGLEFYGQISYLKAGLFYADHITTVSPTYAHEITLPAYGYGMEGLLKTREEEGRLSGILNGVDETIWNPTHDPLLTNHYSREALANKAENKRHLQTAMGLKVDDKAPVFAIVSRLTSQKGLDIALSAIPDLLEQGGQLVVLGAGDADLQEGFLAAAAEYHGQVGVQIGYHEAFSHRIIGGADVIMVPSRFEPCGLTQLYGLKYGTLPLVRRTGGLADTVSDCSLENLADGLASGFVFNDCSVGSLSRAIRRVFVLWSRPTLWRYVQRQAMAMDFGWQVSAQAYGALYQRLHTH

SEQ ID NO: 4777 - DNA, 1497 bp, Bacillus thuringiensis serovar konkukian str
  CDS (1)..(1497)
atgaaaactcgaagggaggaagctgcaagggaagtagtagaagcttttcgtgcagtgggacaacaagtgaatattttatttgcagtatcagaatgtgtgccatttgtgaaatctggaggattagctgatgtagcaggtgcgctcccaaaagagctaaaaaaattaggtgtggaagttcgcattatacttccgaattatagtcttattccgcaaaaattaagggatggatgtacgctacataaagtaattaacgtcccgcttggctggagaaatcaatattgtggaattttaaaaggtgagcaagacgggattacgtattacttaatagataatgaatattattttaagagggattctctgtatggtcattatgatgatggagagcgtttttcttatttctcgaaagcagtattagagtgtattccgcatcttgatttcgaagtggatgttcttcatagccacgattggcatacagccatggtgaattttttactgcgtgaaaagtatcaagataacccgtcatatgagcatattaaaacggtatatacgattcataacttgcagttccaaggtgtattttctcctgaagtgatgtacgacttgttagaacttggtgatgaatattttcatagtgagcagttagagttttatggaaatgtgaactttatgaagggtggcattatcgcctctgatcaaattacagcggttagcccgacgtataaagaagaaattcaatatgaatttttcggtgagaagttagatggattactgcgaaaatataatgataagcttagcggcattgtaaatggaattgatacgagcgtgtacaatccagaaacggattcgtatattactgcgcagtacgatgcggattcattatatgaaaagaatgaaaataaacgcgcgttgcagcgttattttggtttgccagaaaaagaagatacaccaattatttcaatggtaacgagattaacgaagcaaaaaggtcttgatttagtacgtactgtattccgagaaataatggaagaagatgtacaatgtattattttagggtcaggtgattctgaatatgaacaattctttgagtggatggcatatgagtatcctgagaaggtaaaagtgtatatcggctttaatgaggagttagcgcaccaagtgtatgcgggaagtgatttattcttaatgccatcactgtttgagccgtgtggccttggacaacttatcgcattagcgtatggtacgattccaattgtaagggaaacaggcggattaaatgatacggtacaatcttatgacgaagaaactggagaaggaaatggtttcagtttcacgaactttaatgcacatgatatgttgcacacggttcttcgtgcaattgaattttatcatgataaaccggtatgggatcagcttgtaaaacaagcgatgactgaagattatagctgggagaaatcagctcttgcttataagaaattgtataaaagtctcatggaataa

SEQ ID NO: 4778 - protein, 498 aa, Bacillus thuringiensis serovar konkukian str
MKTRREEAAREVVEAFRAVGQQVNILFAVSECVPFVKSGGLADVAGALPKELKKLGVEVRIILPNYSLIPQKLRDGCTLHKVINVPLGWRNQYCGILKGEQDGITYYLIDNEYYFKRDSLYGHYDDGERFSYFSKAVLECIPHLDFEVDVLHSHDWHTAMVNFLLREKYQDNPSYEHIKTVYTIHNLQFQGVFSPEVMYDLLELGDEYFHSEQLEFYGNVNFMKGGIIASDQITAVSPTYKEEIQYEFFGEKLDGLLRKYNDKLSGIVNGIDTSVYNPETDSYITAQYDADSLYEKNENKRALQRYFGLPEKEDTPIISMVTRLTKQKGLDLVRTVFREIMEEDVQCIILGSGDSEYEQFFEWMAYEYPEKVKVYIGFNEELAHQVYAGSDLFLMPSLFEPCGLGQLIALAYGTIPIVRETGGLNDTVQSYDEETGEGNGFSFTNFNAHDMLHTVLRAIEFYHDKPVWDQLVKQAMTEDYSWEKSALAYKKLYKSLME

SEQ ID NO: 4779 - DNA, 1431 bp, Mycoplasma mobile
  CDS (1)..(1431): transl-table=4
atgaaaattttatatataagtgttgaatgctttccattcataaaaactggaggactaggagatgtagcttattctttccctaagactttaaaaaaattaggaaatgatataaaagtttttttaatctatagtgactcaattagtgaaaaatataaagaaaagatgcgtagcgcttactttttttctttggatttaaatggaaaatcttttcctgttgaaattttttctttagttatggatgatattgaatatttattttttaatgacccaagttttaaaaacattgaaagaactgcttatcttgatttacatgaaaactctactttttacttaatttttaataaagcaatttcaaaatttttagaattaagtgcttttaaaccagaaattattcatgcaaatgattgacatacaggaatacttcctttgtttttgtctggtgaaaaaaatgaaaattccaaattaaaagttgttttcacaattcacaatttacaatatcaaggagtttttggagcttcaaatgttttaaaatatttaaatgaaaaagaaagatcgaattctcttttaagtgaaatcataagtaatgatatttttaattttatgaaagctggaattatttctagtgatattgtcacaactgtttctgaaacttataaagaagaaataaaacaaccaatgcaaggtatgggtcttgagtcagttttaaataaatataacagtaaattaagaggaattataaatgggttagattatgatatttttaatccaagtattgataaatacatcgaggcaaaatatgatgtgtcaaattataaagaggcaaaattaatcaataaaattgcattgcaaaaggaattaaatcttgaacaaaataaaaaaatctttttaattggaatgatttcaagattagcgaatcaaaaaggaattgatttagttttaaattccttatgaaatattgtaaaagataatgatattcaatttgttgttttaggaacaggtgatgtaaattatgaatctaatttaaaatcttttggaaataaatatccaagaaattttaagtttattaataaatttagtgatgaattaagtcataaattatatgcaggacttgatgcttttttaatcccgtctttatttgagccatgtggattaactcaattaatttcacttaaatatggttgtataccaatagctagagcaacaggcggattaattgatactattacttcttataatgacaaacaagaaaatgcaaatggatttttatttaaagaatatactccagaagctttatataaatctgtgaaattagcaaaaaatttattttataataacaaaccggagtgaaataaacttatttattttggaatggatcaaagatttggatgagaagaaattgcaaagaaatatttagaaagtatttacaaataa

SEQ ID NO: 4780 - protein, 476 aa, Mycoplasma mobile
MKILYISVECFPFIKTGGLGDVAYSFPKTLKKLGNDIKVFLIYSDSISEKYKEKMRSAYFFSLDLNGKSFPVEIFSLVMDDIEYLFFNDPSFKNIERTAYLDLHENSTFYLIFNKAISKFLELSAFKPEIIHANDWHTGILPLFLSGEKNENSKLKVVFTIHNLQYQGVFGASNVLKYLNEKERSNSLLSEIISNDIFNFMKAGIISSDIVTTVSETYKEEIKQPMQGMGLESVLNKYNSKLRGIINGLDYDIFNPSIDKYIEAKYDVSNYKEAKLINKIALQKELNLEQNKKIFLIGMISRLANQKGIDLVLNSLWNIVKDNDIQFVVLGTGDVNYESNLKSFGNKYPRNFKFINKFSDELSHKLYAGLDAFLIPSLFEPCGLTQLISLKYGCIPIARATGGLIDTITSYNDKQENANGFLFKEYTPEALYKSVKLAKNLFYNNKPEWNKLIYFGMDQRFGWEEIAKKYLESIYK

SEQ ID NO: 4781 - DNA, 1815 bp, Hordeum bulbosum
  CDS (1)..(1815)
atggcggctctggtcacgtcccagctcgccacctccggcaccgtcctcggcatcaccgacaggttccggcgtccaggttttcagggcctcaggccccggaacccggcggatgcggcgctcggcatgaggaccatcggagcaagcgccgccccgaagcaaagccggaaagtgcaccgcgggagcaggcggtgcctctccgtggtggtgcgcgccacgggcagcagcggcatgaacctcgtgttcgtcggcgccgagatggcgccctggagcaagaccggcggccttggcgacgtcctcggcggccttcccccggccatggccgccaacggtcaccgtgtgatggtcgtctccccgcgctacgatcagtacaaggacgcctgggacaccagcgtcgtctccgagatcaaggtggctgacgggtacgagagggtgaggttcttccactgctacaagcgcggagtggaccgcgtgttcatcgaccacccgtggttcctggagaaggtccggggcaagaccaaggagaagatctatgggcccgacgccggcacggactacgaggacaaccagcagcgcttcagccttctctgccaggcagcactcgaggcacccaggatcctcaacctcaacaacaacccctacttttctgggccctacggggaagacgtggtgttcgtgtgcaacgactggcacacgggccttctggcctgttacctgaagagcaactaccagtccaatggcatctacaggaccgccaaggtggccttctgcatccacaacatctcgtaccagggccgcttctccttcgacgacttcgcgcagctcaacctgccggacaggtttaagtcgtccttcgatttcattgacggctacgacaagcccgtggaggggcgcaagatcaactggatgaaggccgggatcctgcaggctgacaaggtgctgacggtgagcccctactacgctgaggagctcatctctggcgaagctaggggctgcgagctcgacaacatcatgcgcctcacggggatcaccggcatcgtcaacggcatggacgtcagtgagtgggaccccaccaaggacaagttcctcacagtcaactacgacatcaccaccgcgttggaggccaaggcgctgaacaaggaggcgctgcaggccgaggtagggctgccggtggacaggaaggtgccgctggtggccttcataggcaggctggaggagcagaagggccctgacctgatgatcgccgccatcccggagatcgtgaaggaggaggacgtccagatcattctccttggcaccgggaagaagaagtttgagaagctgctcaagagcatggaggagaagttcccgggcaaggtgagggccgtggtcaggttcaacgcgccgctagctcaccagatgatggccggcgccgacttgctcgctgtcaccagccgctttgagccctgcggcctcatccagctccagggaatgcgctatggaacgccgtgcgtgtgcgcgtccaccggcgggctcgtcgacacgatcgtggagggcaagaccgggttccatatgggccgcctcagcgtcgactgcaacgtggtggagccggccgacgtgaagaaggtggcgaccaccctgaagcgcgccgtcaaggtagttcgcacgccggcgtaccaggagatggtcaagaactgcatgatccaggacctctcctggaagggacctgccaagaactgggaggacgtgcttctggaactgggggtggaggggagcgagccggggatcgtcggcgaggagatcgcgccgctcgccatggagaacgtcgccgctccctga

SEQ ID NO: 4782 - protein, 604 aa, Hordeum bulbosum
MAALVTSQLATSGTVLGITDRFRRPGFQGLRPRNPADAALGMRTIGASAAPKQSRKVHRGSRRCLSVVVRATGSSGMNLVFVGAEMAPWSKTGGLGDVLGGLPPAMAANGHRVMVVSPRYDQYKDAWDTSVVSEIKVADGYERVRFFHCYKRGVDRVFIDHPWFLEKVRGKTKEKIYGPDAGTDYEDNQQRFSLLCQAALEAPRILNLNNNPYFSGPYGEDVVFVCNDWHTGLLACYLKSNYQSNGIYRTAKVAFCIHNISYQGRFSFDDFAQLNLPDRFKSSFDFIDGYDKPVEGRKINWMKAGILQADKVLTVSPYYAEELISGEARGCELDNIMRLTGITGIVNGMDVSEWDPTKDKFLTVNYDITTALEAKALNKEALQAEVGLPVDRKVPLVAFIGRLEEQKGPDLMIAAIPEIVKEEDVQIILLGTGKKKFEKLLKSMEEKFPGKVRAVVRFNAPLAHQMMAGADLLAVTSRFEPCGLIQLQGMRYGTPCVCASTGGLVDTIVEGKTGFHMGRLSVDCNVVEPADVKKVATTLKRAVKVVRTPAYQEMVKNCMIQDLSWKGPAKNWEDVLLELGVEGSEPGIVGEEIAPLAMENVAAP

SEQ ID NO: 4783 - DNA, 1527 bp, Photobacterium profundum
  CDS (1)..(1527)
atggctactaagaaaacgtcgttaacaaagcatccattgaaaattttatttgtttcatctgaagtagaagggtttgcaaaaacaggagggttagccgatgttgctaagtctctgcctgcggccttgaagaagatggggcacgatgttcgaattgtaatgcctttctatcagacaattaacggtaaagataacgctgttgctattttgtctaccgagctgcttgttgagtcacagccatttgctgtgagttatcaagtgatgcaactcgatgaaggtaatgtgcctgtctatgcgttagatgcaccacaatattatgatcgaccagaattgtatgcggaaaacaatcaagcatatgcagataatggtgagcgttttacatttttaagcgccgcatcgttagatttgtgtgaaaaactgggttttcaacccgatgtgattcactgtaacgattggcataccgggttaattccattcttattaaaaacgcgttacgcagagagtgatttctttgctaaatcgaaaagtgtgataacgattcataatgccgtttttaagggggtatttaactacgatcaatacagcctaatacctgaattgattcaacgtcgctatatcaatgctgaaatggatccatcgcatatcagcatgcttaaagcgggtgttgcgtatgcagataaagtgaacgcggttagccctaattatgcatcagagcttttaacacatttaggttcgcatggtatggaagctgatttccaaaatcgtgctaaagatttgtatggcatcattaatgggtgcgactacgatgattggaatcctgaaactgatgtgtacataaagcaaaagtttaaagccaataaagtgagcttagctcgcgggaaaaaagcgtgtcgacgtgatttgcaaaaacaagttaacttacctgaagtagatgtacctgtttatggaatggtttgtcgcttgaccgagcaaaaagggcttcactatttaattcctgtgcttgaagattttttattgaatgacgtacaagtggtgattgtcggaacgggtgatccaacgttagccagtgctctgcgtgacattagcgaacagcatagtgataaatttgcttttgttgaaacatacagcaacccactagcacactgtgtagaagcgggtgttgatttctttatgatgccttctgaatttgaaccatgtggtttgaatcagatgtacagtttagcgtatggcacattacctatcgttcgcagcgtcggtggtctaaaagatactgttatcgattacgatcaaacaccgcaggtcgccactggctttatttatgatacgccaactccagaggcgttattaataaagttacaacgaagcttgctactttattgtcagcgtcctcaagaatttaaacgattacagcaaaatgcgatggcgtgtaaatttaattgggatgaatcagcagagcaatatctagatatgtatctaggtggtgagcaaagtttggtcaatgaaatctgcaatgacaaggtagacgcttag

SEQ ID NO: 4784 - protein, 508 aa, Photobacterium profundum
MATKKTSLTKHPLKILFVSSEVEGFAKTGGLADVAKSLPAALKKMGHDVRIVMPFYQTINGKDNAVAILSTELLVESQPFAVSYQVMQLDEGNVPVYALDAPQYYDRPELYAENNQAYADNGERFTFLSAASLDLCEKLGFQPDVIHCNDWHTGLIPFLLKTRYAESDFFAKSKSVITIHNAVFKGVFNYDQYSLIPELIQRRYINAEMDPSHISMLKAGVAYADKVNAVSPNYASELLTHLGSHGMEADFQNRAKDLYGIINGCDYDDWNPETDVYIKQKFKANKVSLARGKKACRRDLQKQVNLPEVDVPVYGMVCRLTEQKGLHYLIPVLEDFLLNDVQVVIVGTGDPTLASALRDISEQHSDKFAFVETYSNPLAHCVEAGVDFFMMPSEFEPCGLNQMYSLAYGTLPIVRSVGGLKDTVIDYDQTPQVATGFIYDTPTPEALLIKLQRSLLLYCQRPQEFKRLQQNAMACKFNWDESAEQYLDMYLGGEQSLVNEICNDKVDA

SEQ ID NO: 4785 - DNA, 1569 bp, Methanococcus maripaludis
  CDS (1)..(1569)
atgaaaatagttacattaacaccgacaatagcgcctttaacgtcgatagggggactaggggatattttagaagatttaccaaaatttttaaagaatttaggaaatgaagtatatgtaataacatatgatcatcaaaacaaaatttcaaaaagacctcatgaaattataaaaaaaatagaagtaaaatatcaaggctcaaaactcttttttgacgtgataaaagcagttcatccaagttctaattttgagatttttgcattcagtaatcctgaaataaatcagcttgatagctgggatcctataaaatacgaaatttttgcagatttagttgtatctttcctttcagatattgaaaacattgaatgtgtgtcaggacacgactggccttgcggacttgcaattgcaaaatgtcacgaaaaattaaatcttccaacgacacttacaatacataacgaagcatttaaaggcccaataattgaatataaggggcacatattctcatttttagaacacgggatatactttagtgatgcagtcaatactgtaagtcctaaccatgcagaagaaatacgaaatttagactttttaaaaaaattatgtaaagaaaaaccttttcacgggataattaatggaatagatacagatgtttattctccagaatcgattattgaaagaatgaaaaatttaagcaacggaaaactaaacccacaagattactgctatattgaaaactacgatatttcaaatgcagcggtagtaaaaccaaaaataaaagaatcgtggttttgtaaatgcgaaaatttaaaaaaatatattaatgattggaacgagatggataaaagtaatatttcgggcagcgatattgaaatacacggtaatatcaaaggaaaattgaaaactccaatgatcggatttgtaggccgtgctacctatcaaaaaggttttgatttgatatttgaaacaatgcccgaagtattggaagaaaataacgctaatttcgtacttgtatcaaaaggggaaaaatccattgaggaaaaaataaaagattttgcagaaagttatcctgacaaaatcatggctctcgttggacattgccctccaataattcccattatttatgcaggatgcgactggactgttgtgccgtctctttgggaaccttgcggattaacacagatggaatcaatgtcgtatggaactccagtaattgcaagaaatactggaggtttaagtgatactgtaatttcacttcaccctgatccgcataaaaatccaaattttgatatagcaacaggtgttttgtttaatgattatgataaatacggatttaaatggggtattgaacacgggctctactggtcgttttacaatttagaagaagcctgtctttttataaattataaacacgtgcactgcccagaaagtccgtatgaggaaaatagtccattatacatgttaattaaaaactgctaccaccacgtacaaaaaaacctgagctggcaaaataacgacagttctgaacgatacagggcactttttggcggtgcaatgtacaaacactacttttaa

SEQ ID NO: 4786 - protein, 522 aa, Methanococcus maripaludis
MKIVTLTPTIAPLTSIGGLGDILEDLPKFLKNLGNEVYVITYDHQNKISKRPHEIIKKIEVKYQGSKLFFDVIKAVHPSSNFEIFAFSNPEINQLDSWDPIKYEIFADLVVSFLSDIENIECVSGHDWPCGLAIAKCHEKLNLPTTLTIHNEAFKGPIIEYKGHIFSFLEHGIYFSDAVNTVSPNHAEEIRNLDFLKKLCKEKPFHGIINGIDTDVYSPESIIERMKNLSNGKLNPQDYCYIENYDISNAAVVKPKIKESWFCKCENLKKYINDWNEMDKSNISGSDIEIHGNIKGKLKTPMIGFVGRATYQKGFDLIFETMPEVLEENNANFVLVSKGEKSIEEKIKDFAESYPDKIMALVGHCPPIIPIIYAGCDWTVVPSLWEPCGLTQMESMSYGTPVIARNTGGLSDTVISLHPDPHKNPNFDIATGVLFNDYDKYGFKWGIEHGLYWSFYNLEEACLFINYKHVHCPESPYEENSPLYMLIKNCYHHVQKNLSWQNNDSSERYRALFGGAMYKHYF

SEQ ID NO: 4787 - DNA, 1503 bp, Parachlamydia sp
  CDS (1)..(1503)
atgcacatcattcatatagcctcagaacttgcccctttagccaaagttggaggattagcagacgttgttctaggtctttgccgtgagttatcttggaaagggcatgatgttgacatcattattcctaagtatgattgcatggatagcgagcaaatccgagacctgacagtggattattttgaactcccctcattttataatggagaatggtttttcaatacagtttggatgggatgggtggaaaatttaaaagtttattttattgaaccccatcaccctcgcttcttttttaatcgcggctgcttttatggttgtgaagatgatctcgaacgtttcttatacttttctcgtacagctctagagtttttgtataaaaagtctatcttgccggatattattcatctccatgattggcaaacagctgttattgctcctctgtacaaagacatgtatcaaaagcttgggtacacaaaaccaaaaatattgtttacaattcacaacatggaatatcagggaaaatgtgcagcacatgatttgaattacattggcctcgatggcaatcgatatcaacaacatagttttatgcaagacaatctctaccctcatttaattaatttgctcaagggcggcatcgtttattcagatttcgtaaccactgtatctcctaattatgcaaaagaggttttaacaccgaaggaaggaagaggacttgaagccaccttagtagaatatcagcataaattcaaagggattttaaatggaattgactactcttattggaatccagaaattgatcgatttttgcccgctcattattctttaagagaaatgcctaaaaataaaaaagatcgaaatactgttgataaaaaaggttttatcaaaaaaattttaagagaaaaactttatttggccgaggaacatagacctattattggatgcataactagacttgtcccacaaaaaggaatcgatttgattaaacatacgattagacatatcgttgaaaaaaaaggacagtttatcttactaggctcaagtcctatccctagtattaatgatgaatttcatcgtttaaagcatcaatacaccgaccatccacatattcacttaattttgcatcatagcgaagaacttgctcatctcatttatgcgggctctgacatgtttattgttccctcactttttgaaccttgcggccttacacaaatcattgctcttaaatatggcactgttcccattgttcgtcgcacaggaggattagctgacacaattatcgacgtcgatcatacagatcaacaacctgataaaaaaaatggatatgtttttgacgatccagatgctaatggaatagattctgccatcgaccgcgccattcattgttggtttgaagaacctgaaaaatggcgtcagttgatgcttaatggaatgaaaatggattttagctggaatcaatcttcagattgttatctgaaaatttatcaagctatctcagcaaaaaattaa

SEQ ID NO: 4788 - protein, 500 aa, Parachlamydia sp
MHIIHIASELAPLAKVGGLADVVLGLCRELSWKGHDVDIIIPKYDCMDSEQIRDLTVDYFELPSFYNGEWFFNTVWMGWVENLKVYFIEPHHPRFFFNRGCFYGCEDDLERFLYFSRTALEFLYKKSILPDIIHLHDWQTAVIAPLYKDMYQKLGYTKPKILFTIHNMEYQGKCAAHDLNYIGLDGNRYQQHSFMQDNLYPHLINLLKGGIVYSDFVTTVSPNYAKEVLTPKEGRGLEATLVEYQHKFKGILNGIDYSYWNPEIDRFLPAHYSLREMPKNKKDRNTVDKKGFIKKILREKLYLAEEHRPIIGCITRLVPQKGIDLIKHTIRHIVEKKGQFILLGSSPIPSINDEFHRLKHQYTDHPHIHLILHHSEELAHLIYAGSDMFIVPSLFEPCGLTQIIALKYGTVPIVRRTGGLADTIIDVDHTDQQPDKKNGYVFDDPDANGIDSAIDRAIHCWFEEPEKWRQLMLNGMKMDFSWNQSSDCYLKIYQAISAKN

SEQ ID NO: 4789 - DNA, 1452 bp, Rhodopseudomonas palustris
  CDS (1)..(1452)
atgacgacactggcggttctatctgttgcgtcggaactgtttccgctgatcaagaccgggggcctcgccgatgtggccggcgcattgccggccgccctgcgtgccaacgacgtcgccgtcacctcgctgctgccgggctacccggcggtgctcggcgggatcgaggatccgcagcaggtccacagcttcaacgagctgttcggcggcacggcgcggctgctggcggcgcgctgcggcgatctcgatctatttgtgctcgacgcgccgcatctctatgtccggcccggcaatccctatgtcggcccggacggcaaggattggccagacaacggcctgcgttttgcggcgttggcgcaggtcggcgccgcgctcggccagggcctgctgccgcactacaagccggatgtgctgcacgcccacgactggcagaccgggctgttgccggcctatctgaaatacagcggccggcctgggccgaagactgtcttcaccatccacaatctggcgttccaggggaggtttccctacgagctgctcggcaggctgggcctgccggagcgcgccttcggtctcgacggtatcgagtactacggcggtatcggttatctcaaggccggcctgcaactcgccgaccgcatcaccaccgtgtcgccgacctacgcggccgagatccagggttcggaagccggcatgggcctcgacggcctgctgcggctgcgcgccgatcggctgtccggcatcctcaacggcatcgacaccgacgtctggaatccggccagcgatgcgttgatctccgccacctacgatgtcgaaagcatcgcagcccgcgcccgcaacaagaaggtgctgcaggcgcggttcggtctgaagcccgagccgggcgcactgctgtacggcgtgatcagccggctgtcgtggcagaaggggctcgacctcttgctcgaagccctgccgcaattgatcggcggtggcgcccagctcgccctgctcggctccggcgatgccgaactcgaacagggctacgcggccgcggctcgcaagtatcccggccaggtcggcgcagtgatcggctacgacgaagcgctcgcgcatcagatccaggccggcgccgacgcgctgcttgtgccgtcgcgattcgaaccctgcggcctgacgcagctctgcgccttgcgctatggcgcggtgccggtggtggcgcgggtgggcggtctggccgatacggtggtcgacgccaacgagatggcgaccgccacaggcgtcgcgaccggcgtccagttcgcaccggtgacgactgacgcgctgatcaaggcgttcggcaaaacccgcgcgctgtttgcagacgtcgtcgcctggcgcaatctgcaaatcaacggcatgaccaccgatgtgtcgtggaagaacccggcgcagcactacgcgaagctgtatcgcgatctggtggcggagcgctga

SEQ ID NO: 4790 - protein, 483 aa, Rhodopseudomonas palustris
MTTLAVLSVASELFPLIKTGGLADVAGALPAALRANDVAVTSLLPGYPAVLGGIEDPQQVHSFNELFGGTARLLAARCGDLDLFVLDAPHLYVRPGNPYVGPDGKDWPDNGLRFAALAQVGAALGQGLLPHYKPDVLHAHDWQTGLLPAYLKYSGRPGPKTVFTIHNLAFQGRFPYELLGRLGLPERAFGLDGIEYYGGIGYLKAGLQLADRITTVSPTYAAEIQGSEAGMGLDGLLRLRADRLSGILNGIDTDVWNPASDALISATYDVESIAARARNKKVLQARFGLKPEPGALLYGVISRLSWQKGLDLLLEALPQLIGGGAQLALLGSGDAELEQGYAAAARKYPGQVGAVIGYDEALAHQIQAGADALLVPSRFEPCGLTQLCALRYGAVPVVARVGGLADTVVDANEMATATGVATGVQFAPVTTDALIKAFGKTRALFADVVAWRNLQINGMTTDVSWKNPAQHYAKLYRDLVAER

SEQ ID NO: 4791 - DNA, 1173 bp, Corynebacterium diphtheriae
  CDS (1)..(1173)
atgagagttgcgatgatgaccaaagaatacccacctgagatctacggcggtgcaggagttcacgtcgccgagctcacccgccacatgcgcgacattgtcgatgtcgacgtccattgcatgggcgctccacgaaacgaagacaacgtctacacctatggctttgaccctgaactcacctcggccaacgccgccttacaaaccatgtccacaggactacgcatggcacacgccgcagcctacgctgatgtagtccactcccacacgtggtacacgggactaggagggcatctagcggggcttcttcacgaagtaccccacattgtcacagcccactcccttgaacccgaccgcccatggaagcgggaacaacttggtggtggctacgatgtctcctcctggtcagaacaaaatgccatggaatacgccgacgttgtgatcgcagtgtcagccggaatgaaagacgctattctgcgcgcttacccgcgcatcgacgccgataaaatccgcgtcgtactcaacggcatcgacacacagctttggcaaccacgccccacttttgacgacgccgaacactcagtactccgcgacctcgggatcaaaccagaccagcccatagtcgcctttgttggccgaatcacacgccaaaaaggcgtggaacacttagtcaaagccgctcgctacttcagcccaggagtccagctcgttttgtgcgccggagcccccgacaccccagaaattgcggcacgcacccaacacctcgtagaagaactacaagcagaacgcgaaggcgttgtttgggtacaagaaatgctgagcaaggacaagattcaagagatcctcaccgccgctgacgctttcgtctgcccctccatctacgaaccactcggaatcgtcaatctcgaggccatggcatgcgccaccgccgttgtcgcctcagatgtgggcggaatccccgaggtagtcgtcgacggcactaccggaagcctcgtccactacgaccccaacgacaccgataccttcgaacacgacctcgccgaagccgtcaacgccatggtcaccgatcgaaaacgcgccgcagctttcggtgtagcaggacgcaaccgcgcagtatccgagttctcatggggcttcatcgcacaacaaaccgtcgatgtgtactcctccctcctatag

SEQ ID NO: 4792 - protein, 390 aa, Corynebacterium diphtheriae
MRVAMMTKEYPPEIYGGAGVHVAELTRHMRDIVDVDVHCMGAPRNEDNVYTYGFDPELTSANAALQTMSTGLRMAHAAAYADVVHSHTWYTGLGGHLAGLLHEVPHIVTAHSLEPDRPWKREQLGGGYDVSSWSEQNAMEYADVVIAVSAGMKDAILRAYPRIDADKIRVVLNGIDTQLWQPRPTFDDAEHSVLRDLGIKPDQPIVAFVGRITRQKGVEHLVKAARYFSPGVQLVLCAGAPDTPEIAARTQHLVEELQAEREGVVWVQEMLSKDKIQEILTAADAFVCPSIYEPLGIVNLEAMACATAVVASDVGGIPEVVVDGTTGSLVHYDPNDTDTFEHDLAEAVNAMVTDRKRAAAFGVAGRNRAVSEFSWGFIAQQTVDVYSSLL

SEQ ID NO: 4793 - DNA, 1578 bp, Ostreococcus tauri
  CDS (1)..(1578)
atgaacatcgtgttcgtctcgagcgaagtcgcgccgtggtcgaagactgggggattgggcgacgtgtgcggagcgctgccgcaagcgctcgtcgcgcgcggacatcgcgtcatggtgatctcgccaaagtatcaaaacggatccaaggcggacgccctgtacaacggcgcgttagatacgtgcacgcgagcaaagattgggtgtttcggcgccgagcatgaggtgggattctttcatcaaattaaaaacggagtggattacgtcttcgtcgatcacgcatccttccatcgcaaggggagcttgtacggagattctttcggggtatacggagacaaccaattcagatttacgcttttagcgcacgcagcgtgcgaagcacccctgcagttggcgtttgaaggttgcggcgatcgatacggcaaggatatcgtcttcgtcgccaacgactggcacgccggtttagtccccactttggtcgcatcaaagtaccgtcctcacggtgtttacagggacgcgcgcacaatttgcgcaattcacaatatttttcaccaaggcgtcgagccatcgacgacgttcccgtgcctcggcgtaccgaccgagtggtacggcgcgctcgagtatcagtacccgcatcacatgcgagcgcacgaactcgacgagggtagagtggtgaacatcttaaagggggcgattgcgacctcggatcgcgtgctcaccgtctcccaaggctacgcttacgagatcacgaccccagagggaggcaagggcatggaagggttgctcctcagcagggcgaacaaactcgacggcatcgcgaacgggatagacatggacgagtggaacccggaggccgatccggactgcgccgctccttattccgtgatagatctcgccgggaagctcgagtgcaagcgcgcacttcaaaaggaacttgggctgcccgagcgagacgacgtcccactcatgggcttcatcgggcgtttggattggcaaaaggggccggatctgctccagcaagcgctccacgacatgatgcgcgaggacatccaggtggtgatgcttggaagcggcttgcccgagctcgaggatttcatgcgatgggccgagggtgagtacaaggacaagttccgcggatgggtcggcttttccgtcccgatggcgcaccgcatcacggcgggttgtgacctcttgctcatgccgtcgcgattcgagccttgcggtctgaaccaactgtacgcgatgcgttatggcactttgcccatcgcgcacgccaccggaggactgaaggatacgatcactccgcacaacgcgttcggagacgccgacaaggttctcgccggcacggcggacgtcaatcagggcgaaggcgtcggcaccggttggctgtttaacgacatgaacgccgacgcgctgatgtgggcgatccgatcggcgtgcgacgtttatcgatccgacaagaagttctggcgcgcaatgcagacgcaggcgatgacgcaagacttgtcttggaacaacgcggcgcgaaagtgggagcaggtcttcgagtgggccaagatggatcctccgcactgcggctaa

SEQ ID NO: 4794 - protein, 525 aa, Ostreococcus tauri
MNIVFVSSEVAPWSKTGGLGDVCGALPQALVARGHRVMVISPKYQNGSKADALYNGALDTCTRAKIGCFGAEHEVGFFHQIKNGVDYVFVDHASFHRKGSLYGDSFGVYGDNQFRFTLLAHAACEAPLQLAFEGCGDRYGKDIVFVANDWHAGLVPTLVASKYRPHGVYRDARTICAIHNIFHQGVEPSTTFPCLGVPTEWYGALEYQYPHHMRAHELDEGRVVNILKGAIATSDRVLTVSQGYAYEITTPEGGKGMEGLLLSRANKLDGIANGIDMDEWNPEADPDCAAPYSVIDLAGKLECKRALQKELGLPERDDVPLMGFIGRLDWQKGPDLLQQALHDMMREDIQVVMLGSGLPELEDFMRWAEGEYKDKFRGWVGFSVPMAHRITAGCDLLLMPSRFEPCGLNQLYAMRYGTLPIAHATGGLKDTITPHNAFGDADKVLAGTADVNQGEGVGTGWLFNDMNADALMWAIRSACDVYRSDKKFWRAMQTQAMTQDLSWNNAARKWEQVFEWAKMDPPHCG

SEQ ID NO: 4795 - DNA, 1725 bp, Ostreococcus tauri
  CDS (1)..(1725)
atgagtcgaacggcgttcgaggcgaagacgaatgcgcgtcgggcgggacgcgcgggcgttcgcgcgcgggcgaaggaatcgacgacgacgatcgcggagatcgcgaagagtacgcgaccgatgaagattgtttttgtttccgcggagtgctcgccgtggagtaagaccggggggctcggggacgtcgtcgggtcgcttccggtggagctcgcgaagcgcgggcacaaggtgatgaccgtctctccgcgttacgatcagtacgctggcgcgtgggacacctccgtgcacgtcgaagcgctcggcaagtctgtcgggttcttccacgagaagaagcagggcgtcgatcgcatcttcgtcgatcaccccgacttcttggccaaggtttggggcaagacgggttccaagctgtacggcgaaaagtctggccacgacttcgccgacaaccaagagcgcttcgcgatgttctgccacgccgctctcaaggcgccgatggcgctcaccgatcttggttacggcgaggacgtcatcttcgtcgctaacgactggcattctgcgctcgttccggtcatcttgaacaaggtgctcaagccggcgggcatgtttgccaaggccaagtgcgcgatgaccatccacaacatcgccttccaaggtcgcttcttcccgcagccgatgtccaagtacggcttgccggaagacgcggctgacgacttcttcttcgaagacggttactccaaggtgtacgacgaaaacacgccggccaaggagcaaggtaaggaggacttcgacggcaagatttaccgcaaggtcaactggctcaaggctggtttcatgaactccgacaggaacttgaccgtgtccgagaactacgccaaggaaatcgcttccagcaaagccaagggcgtcgaactggaccacgtcatccgcgagttcggtatggaaggcatcgtcaacggcatggacccggcggagtggaacccggcgaaggacaagttcatcgacgtgccgtacgacaagaccaccgtcgtcgaaggcaaggctgcggccaagcaagcgcttcaagccgaagttggacttccgctcgacccgaccgcgccggtcttcggttacatcggtcgtctcgaagagcaaaagggctgcgacatcatgttcgaagccgtcccgaagcttctcaaggctgtcccgaacgcgcaagtcgtcatcttgggcacgggtaagaaggttatggaaacggcgctcgaaaagctcgatgccgccgaaccgaactgcgccggcgtcgtcaagttctccgctccgttggcgcacttcatcaacgctggtgccgacttcttgatggttccgtctcgcttcgagccgtgcggcttgatccaacttcacgccatgcaatacggcaccgtcccgatcgtctcttccaccggcggtctcgtcgataccgtcaaggagggtgtcacgggttaccacatgggcgccatggatgccgatgacctcctcccggcggacgtcgacgccatggttgagacgtgcgcttctgccgcggcggacttctcgactccgctgtacaagaagatgtctgccacgtgcatttcccaagacttgacttgggcggagccggcgaagaagtgggaaggcgtgctcgaagaaatgtacttcggcactccggagacgaccaagaaggctgaggttgtcgttcccatcgccaaggcagacgcgctcgccgctcagacgtga

SEQ ID NO: 4796 - protein, 574 aa, Ostreococcus tauri
MSRTAFEAKTNARRAGRAGVRARAKESTTTIAEIAKSTRPMKIVFVSAECSPWSKTGGLGDVVGSLPVELAKRGHKVMTVSPRYDQYAGAWDTSVHVEALGKSVGFFHEKKQGVDRIFVDHPDFLAKVWGKTGSKLYGEKSGHDFADNQERFAMFCHAALKAPMALTDLGYGEDVIFVANDWHSALVPVILNKVLKPAGMFAKAKCAMTIHNIAFQGRFFPQPMSKYGLPEDAADDFFFEDGYSKVYDENTPAKEQGKEDFDGKIYRKVNWLKAGFMNSDRNLTVSENYAKEIASSKAKGVELDHVIREFGMEGIVNGMDPAEWNPAKDKFIDVPYDKTTVVEGKAAAKQALQAEVGLPLDPTAPVFGYIGRLEEQKGCDIMFEAVPKLLKAVPNAQVVILGTGKKVMETALEKLDAAEPNCAGVVKFSAPLAHFINAGADFLMVPSRFEPCGLIQLHAMQYGTVPIVSSTGGLVDTVKEGVTGYHMGAMDADDLLPADVDAMVETCASAAADFSTPLYKKMSATCISQDLTWAEPAKKWEGVLEEMYFGTPETTKKAEVVVPIAKADALAAQT

SEQ ID NO: 4797 - DNA, 2022 bp, Ostreococcus tauri
  CDS (1)..(2022)
atgctaaggaaccaaaagttgaatccccgtgttcgcgatcaaggtgactgggtagtgggtgagttcgacgtccacgaaggagcaagttcgatagatttcgttttcagcgatgcgaatgatgtttacgacaacaattcaaggaaagactatcagtgtgcggtggagcaagaccaacaacgatcacacgaagatctgatcgtggagcaaattgagactgatttagcgagcaaacgtgattttatcgaaaagtgcgctcagagagcgggagaaagagcggagagtcatgaacgtcgccgctcccgatcgctccttgctaagaccagagatggctcgctgaatcgtgtgcatacgattccgcaccagccggaggccggggagaatgtcacgatttattatagagtcgaaggtagcgctctggcgaactcgcaaaaggttcactgtcaaggctcctggaaccgttggaaccatgaaaactcttttggtccgtcaatcatgcagtttagcgattcgttgggttgcatgcagctaactgtgaaggccccacaagacgcacacgtgcttgacttgaagtttatggactcagatgtcccatccgaggtgtctcaagtggatgacaacaacggcatggactatcacaccgtcattgtcaacggctcgggaccagcgcccatcctgaaagtcgtccacgtcgcagttgaaatggccccgatcgcaaaggttggtggtatgggtgacgtcgtaacagcactggcccgggcaacccaagaagacgggcaccaggtcgaagtttttgtccctcattacgacatcgcacagtttgaaaatgttgacggatatcaccgcgcaggagagttcaaacatgaaaaaactgtcgtccaggtgtacaagggatgggttgaagacgtcccagtgactcttctgcgacctgaaaatggttttttcgatgtcgggtgcatctatgggcgtggagacgatcacgtacgttttgatttcttcaccgacgcgacgcttacttggttgcgaagcaagcaacaggaagtggacgtgatccacacgcacgactggcaaaccgcggcggcgacttgggctggttacccgaacgctgcgaccgcactcacggttcataatttgcagtttggtgtcgatcgtatacgtcgaggaatggagtcctgtgacattgccacgaccgtgagtccgacgtacgcagacgaagtacgctttcatcacgccatcgctccctcaaaagacaagtttatcgggattcggaacggaatcgacacggatatttggaatcctgccaacgacaagtttctgcccgtcggctacaacagatccaacgctatcgacggtaaacgcgccgccgctgccgaactctgcaaccgtctcggtctggagcatccggaaggatcccctattgttggcgttgtctcacgccttaccgctcaaaaaggtatccatctcatcaaacacgcgtgttaccgcgttttggagcggggagctaccttcgtcttgctcggaaatgcgcccgatccagcgcaccagcacgatttcaactcgctcgccaaggagatgaaggaaaagtatcctggtcgaagcggcttcatgttcaaatacgacgagccgctctcgcacttgatttacgccggttgcgatttcctcctcgtcccgtcaatgtttgagccgtgcggtctgacacagatgatcgccatgcgctacgggaccgttccggtagttcgtcgaactggaggcttggctgacaccgtcttcgacgtcgaaaacgacagcacgcgctgcgccacggcgggcatcccgccgaatggcttcgtcttcgacggcacggagactcgagacatcgattccgccgtcattcgcgctctcgacgccttctacgatcgcgaacgctgggagtccctcgccctcgtcgaccgcgcgatgtcctgtgactggggctggttcgagccgagcaagcgatacgaggatctctactggtccgctttgagcaagaagagaaacacacggtag

SEQ ID NO: 4798 - protein, 673 aa, Ostreococcus tauri
MLRNQKLNPRVRDQGDWVVGEFDVHEGASSIDFVFSDANDVYDNNSRKDYQCAVEQDQQRSHEDLIVEQIETDLASKRDFIEKCAQRAGERAESHERRRSRSLLAKTRDGSLNRVHTIPHQPEAGENVTIYYRVEGSALANSQKVHCQGSWNRWNHENSFGPSIMQFSDSLGCMQLTVKAPQDAHVLDLKFMDSDVPSEVSQVDDNNGMDYHTVIVNGSGPAPILKVVHVAVEMAPIAKVGGMGDVVTALARATQEDGHQVEVFVPHYDIAQFENVDGYHRAGEFKHEKTVVQVYKGWVEDVPVTLLRPENGFFDVGCIYGRGDDHVRFDFFTDATLTWLRSKQQEVDVIHTHDWQTAAATWAGYPNAATALTVHNLQFGVDRIRRGMESCDIATTVSPTYADEVRFHHAIAPSKDKFIGIRNGIDTDIWNPANDKFLPVGYNRSNAIDGKRAAAAELCNRLGLEHPEGSPIVGVVSRLTAQKGIHLIKHACYRVLERGATFVLLGNAPDPAHQHDFNSLAKEMKEKYPGRSGFMFKYDEPLSHLIYAGCDFLLVPSMFEPCGLTQMIAMRYGTVPVVRRTGGLADTVFDVENDSTRCATAGIPPNGFVFDGTETRDIDSAVIRALDAFYDRERWESLALVDRAMSCDWGWFEPSKRYEDLYWSALSKKRNTR

SEQ ID NO: 4799 - DNA, 2939 bp, Colocasia esculenta
  CDS (220)..(2634)
ggtgcgtgtgtgcttatagtgtcctccatttcccccctcctcctccctctagcaggccaggcagccagggcttaccatcggcgaggttttttgcattccccctcctttaaagggattcctttccgccgggcagtcgggggagcagtacatgacacctttttaatcagttttcgcgggaggcccagctaaaggtgaggaggaaaagaggaagacagaaagatggcatctttgggacgagctgggacggctgctttcttcctggagccgtcaaggagctgcgggcagccgcgggctgctgggttctgtgtgcctgtccggtgcaggttgaattgtcttgatctccattcgcgcgctggggaattcaggtttctgcgggcgggcaatggcgaaaggcacatgggttttacatggagagacagggggacgggtagggttctgccggcagtgggaagaaaaggtgctgcagatggagctgaggatggcggcgaggacgatatgggcgacgtggatgtggatggcgacgaggtgcttaaggcgactatcgagaagaccaagagggcgctgtccgtgcagaagagcctgctcgaacagattgttgaaaggagaaaacttgtttcttccatgaaagagagtgtcatcaagacaggaaaggaaacagtccctcccaataaaagtgatgcctctttctccagtttgagctcagataccacgagtggtatggctcgtaacaaatataaaaagttttcttactccacttcggaggcagcagaaacactgtctgctaataccaatggggctgctataaaaaagaaatttcagaatgaagaagtggaagtctctggtgatgctaaggagatttctatgcttagttcaaaaatagaaagctcagatgatgaaaagaaggaaaatgaagatggcttacttgcagaaagctcgatagcagaatctcttggactgctaagagaacccagttcaaaagtttctcagtctaaggcagtgccctctttgcttccaaaagtgtctgaagctttcacggccaaggatgaacaacgtgaggaatcggaagagaaaagccaagatgatccagatgataaaacagatgtagctcccaaggaagaagatgtaaaatcccctccattggctggattaaatgttatgaatgttatcttggtagctgcagaatgtgctccttggtccaaaactggtgggcttggagatgttgctggagctttaccaaaggccttggccagacgtgggcatagagttatggttgtggttccccgatatggcaactattctggacctcaagaaataggtctacgcaagcgttacaaggtggatggacaggatatggaggtaacatattatcttacctacattgatggtgtggatttcgttttcatcgatagtcctatttttcgccatcgtgaaagcaacatatatggtggggaacgtgcggatattttaaaacgaatggtccttttatgcaaggcagctgttgaggttccatggcatgttccttgtggtggagtctgctatggtgatggaaaccttgttttcattgcaaatgattggcacacagcactgctacctgtttatctaaaagcatattatcgtgacaatggctcgatgaaatacacccggtctgtcttggttatacacaatatagctcaccagggtcgtgggcctgtagatgagttccgcattgtggatttacctggtcattatgtcgatctatttaggttgtatgacctagttggtggtgagcacttaaacatctttgctgcgggcttgaaaactgctgaccgtgtagtcacagtgagccatggttattcatgggagcttaaaacattggaaggtggttggggactgcacgagattatcaatgagaatgattggaaacttcgaggtattgtgaatggaatcgacacagaagattggaacccggaagttgatgtgcacttaaaatctgatgggtataccaactactcattggagactcttaatatgggtaagcctcaatgcaaggctgcacttcagaaagaacttggccttcctgttcgaccagaagttcctgttgttgcctttattgggaggctagatcatcaaaagggagtggatatcattgcagaggccattccctggatggtcagtcaggatatgcagttagtcatgctgggtactggaaggtcagatctggaggacatgcttcggagttttcagggcaatcactgtggcaaggtcaggagttgggttggtttttctgttaaaatggcacataggataactgcaggtgcagacgtcctgttaatgccatccaggttcgagccgtgcggcctgaaccagctgtatgccatgatgtacggaaccattcctcttgttcatgcagttggtggactgagagacactgtagtgcccttcaatccatatgaggagagtggatttgggtggacatttgacagagccaaggcagggaagctgattgacgcgctgcgcaactgtttcaacactttctggaattacaaggagagctgggaggggttgcagagacgtggtatgttgcaggaccttagctgggatcatgccgctcagctatatgaggaagtccttgttgctgccaagtaccagtggtgaatcctttgagcataaacggttcacttggggccgaacaaatttggatgggacttcagtgatccttattggtaggtcttttgctagggcgtagctgctggagagagcctcccccacctcctgatgtatattgcttattcctttttgctactttcgtgatctcctccattttactaggtccaccgacgatcatgaatactgcgagtattgcagccgtgtagtatggctcatttctctcctttgtagcccttctgaatcattagttttgctggtttttcccccaaaaaaaaaaaaaaaaaaaacaaaaa

SEQ ID NO: 4800 - protein, 804 aa, Colocasia esculenta
MASLGRAGTAAFFLEPSRSCGQPRAAGFCVPVRCRLNCLDLHSRAGEFRFLRAGNGERHMGFTWRDRGTGRVLPAVGRKGAADGAEDGGEDDMGDVDVDGDEVLKATIEKTKRALSVQKSLLEQIVERRKLVSSMKESVIKTGKETVPPNKSDASFSSLSSDTTSGMARNKYKKFSYSTSEAAETLSANTNGAAIKKKFQNEEVEVSGDAKEISMLSSKIESSDDEKKENEDGLLAESSIAESLGLLREPSSKVSQSKAVPSLLPKVSEAFTAKDEQREESEEKSQDDPDDKTDVAPKEEDVKSPPLAGLNVMNVILVAAECAPWSKTGGLGDVAGALPKALARRGHRVMVVVPRYGNYSGPQEIGLRKRYKVDGQDMEVTYYLTYIDGVDFVFIDSPIFRHRESNIYGGERADILKRMVLLCKAAVEVPWHVPCGGVCYGDGNLVFIANDWHTALLPVYLKAYYRDNGSMKYTRSVLVIHNIAHQGRGPVDEFRIVDLPGHYVDLFRLYDLVGGEHLNIFAAGLKTADRVVTVSHGYSWELKTLEGGWGLHEIINENDWKLRGIVNGIDTEDWNPEVDVHLKSDGYTNYSLETLNMGKPQCKAALQKELGLPVRPEVPVVAFIGRLDHQKGVDIIAEAIPWMVSQDMQLVMLGTGRSDLEDMLRSFQGNHCGKVRSWVGFSVKMAHRITAGADVLLMPSRFEPCGLNQLYAMMYGTIPLVHAVGGLRDTVVPFNPYEESGFGWTFDRAKAGKLIDALRNCFNTFWNYKESWEGLQRRGMLQDLSWDHAAQLYEEVLVAAKYQW

SEQ ID NO: 4801 - DNA, 1554 bp, Thermoproteus tenax
  CDS (1)..(1554)
atgatgcacgcgccggaggcaatccgcaaggtctatatcctcacgttcgagtacggcggattgatcaaggtgggcggcttgggtgaggcagtgagacagtatgcagccgctctggccaggcggggctactcagtcactgtgctcatgccctcgcacgggagacatctggatcctaacagagggttcccgctgaggcctctcgacttcgccgcgtgtggagagaggagaggtctcgacggacggatctatccctattgcatcggcgctgaggagacggaggccgacggcgcaaggattgtgatgttcaaggggctcgatactcccacagggctcgtcttcgacaaatggtacccctacgataacgtggaggagaaagcggcgctgttcgcgagagcggtcgtggcatacgccgagaggtacggcctgccggacttagtccacgcaaacgactggcattcaggcctcgcgggggtggcgctcaaggattacgcagagaggagtggggtggcgcttcccctagtctacaccgtacatctatcctcgggctacgccttcccgtggcactacgcttcatctgactgggccagtatatcggacagacctcacctcgtatggcgcgtctgttgtcacaagtgggagcgctacagcgatgtgtggaactctgtgggcggcacagcagaggcgttcgcggccgttgaagccgatgccctctcgagcgtcagctggggctatctgaacgagttcctctccaaatatggcgagtggatgaggggcaagtcctgcgtcctctacaacgcgaccgactggaggctcgaggaggccgaggctcatttcgcgaggctcgcccccgatggctctccgtggaggctcgtcgaggccgtgccccatatggaggggcggcttgatagagatggctccctcttcgtggccgtaggaagggcaacgagccaaaagggcctcgatgtggccgtaaaggcgttggactacgcgccgtccgcgaggctcttggtattggctgtgtccgtcggcgacagagggtatgaggactacctcaaggagttggtcagagcgaggcccggcagagctgccatcaccttcgcgagagttcccaaggatctctatatggctctgatctatgcgtccacggctttggtgatgccctcccgttgggagcccttcggcatctccgccatcgaggccatggccgtcggcacgccggtgatagctacggccgttggcgggctccccgaggtggtgcgggactttagagccggggagggcacgggcctggtggtgccccccgaggatgcctactccgttggattggccatggagtacctagcccgctggctctggcgcggcaatcccaacgaggttccagacccggctatgagagctgcagcacgacgttggcccagatatataccggacctaaaacggtatatatcagcatacgtggacgagagattcagagaaaaaaacttgtacgagcagctcaaagattgttacgagagagcgaggctaatggcctattatcgcgctataacattgtag

SEQ ID NO: 4802 - protein, 517 aa, Thermoproteus tenax
MMHAPEAIRKVYILTFEYGGLIKVGGLGEAVRQYAAALARRGYSVTVLMPSHGRHLDPNRGFPLRPLDFAACGERRGLDGRIYPYCIGAEETEADGARIVMFKGLDTPTGLVFDKWYPYDNVEEKAALFARAVVAYAERYGLPDLVHANDWHSGLAGVALKDYAERSGVALPLVYTVHLSSGYAFPWHYASSDWASISDRPHLVWRVCCHKWERYSDVWNSVGGTAEAFAAVEADALSSVSWGYLNEFLSKYGEWMRGKSCVLYNATDWRLEEAEAHFARLAPDGSPWRLVEAVPHMEGRLDRDGSLFVAVGRATSQKGLDVAVKALDYAPSARLLVLAVSVGDRGYEDYLKELVRARPGRAAITFARVPKDLYMALIYASTALVMPSRWEPFGISAIEAMAVGTPVIATAVGGLPEVVRDFRAGEGTGLVVPPEDAYSVGLAMEYLARWLWRGNPNEVPDPAMRAAARRWPRYIPDLKRYISAYVDERFREKNLYEQLKDCYERARLMAYYRAITL

SEQ ID NO: 4803 - DNA, 1470 bp, Desulfovibrio vulgaris
  CDS (1)..(1470)
atgcaacggcaggtcgtgttcgccacatcggagatgtaccccttctccaaaagcggggggctgggcgatgtgcttggtgcgctgccccttgccctgcaccgcatgggcgtgcccacggcggtggtgacacccttctatggcagattgcgaacggcggactatcccatccggctgacggtctccgactgccatgtgggctacccgtgggcccccatcacctgcgacgtcttcgaggccgactatcatggcatgccggtctacttcatccaccggggcgagtatttcgacaggcgttactactacaacgaccacaagggcgactacttcgacaactgcgaacgcttcgtcttcttctgccgcgcgctgctggcgctgatgcgccgtctggggcagcccccggcagtgctgcacgcccacgactggcagacggcacttgtgcccgcctttctctacttcctgcggcagaccgacccgttctggcaggatacgcgcagtgtgctcaccatacacaacctcgccttccaggggcgtttcgcctcgcgtcttttcgagacttcgggcctgcccccgcaggcatggagcgtggacggcgcggaattctggggcgacttcaacctgctcaaggcgggcatcgcctatgccgacaaggtgaccacggtcagccccagctatgcgcgtgagattctcggccccgcctatggcagcggtctcgacggtatcctgcggaagcgtgcccacgccctgcacggcatcctcaacggtgcggactacgacatctggtcgcccggcaacgaccgcttcctcccctgccgctatacgcccacggaccttgcaggaaaggcgcagtgcaagcgcgccctcatcgaagaactcggcctcgacccgcaccttgccaggcgtcccatcctcggcttcatcggcagactgcgcgggcagaaggggatagacctgctgctcgacatcctgccccgcctcatggagagcgacgtcggggtcatcatcctcggcgagggcaatctgacccatgaggcgcgggcccttgagctgatggaggcctaccggggccgggtgtgcaccatcgtcagctacaccgaagacctcgcccaccgcatccaggcgggcagcgacatctttctcatgccgtcgcggtacgaaccgtgcggcctcacccagatgtacgccctgcgctacggcacaccgcccgtggccacggccgtgggcgggctgcgcgacaccatcgtcccgtggccctcgccggagagcacgggcttcaccttcggccggtgcgagtccgcggcctttctgcgggccatcctcgatgcggtgcacctgtggaccacggcccccggcgactggcagggcatggtgcgacgcgccatggcacaggccttcacctgggaacgcgccggacgcgcctacctcgacctttacgcccaactgggggtctcccccggtgaggagggcgcgtga

SEQ ID NO: 4804 - protein, 489 aa, Desulfovibrio vulgaris
MQRQVVFATSEMYPFSKSGGLGDVLGALPLALHRMGVPTAVVTPFYGRLRTADYPIRLTVSDCHVGYPWAPITCDVFEADYHGMPVYFIHRGEYFDRRYYYNDHKGDYFDNCERFVFFCRALLALMRRLGQPPAVLHAHDWQTALVPAFLYFLRQTDPFWQDTRSVLTIHNLAFQGRFASRLFETSGLPPQAWSVDGAEFWGDFNLLKAGIAYADKVTTVSPSYAREILGPAYGSGLDGILRKRAHALHGILNGADYDIWSPGNDRFLPCRYTPTDLAGKAQCKRALIEELGLDPHLARRPILGFIGRLRGQKGIDLLLDILPRLMESDVGVIILGEGNLTHEARALELMEAYRGRVCTIVSYTEDLAHRIQAGSDIFLMPSRYEPCGLTQMYALRYGTPPVATAVGGLRDTIVPWPSPESTGFTFGRCESAAFLRAILDAVHLWTTAPGDWQGMVRRAMAQAFTWERAGRAYLDLYAQLGVSPGEEGA

SEQ ID NO: 4805 - DNA, 1323 bp, Thermus thermophilus
  CDS (1)..(1323)
atgggcgttatgcgcgtgctccacgtggcccccgaggcctaccccctggccaaggtgggagggcttgccgacgtggtgggggccctccccaaggccctggggcctttgggggtggaggcccatgtcctcctcccctggcacggggggctagaggccaggcgggtgggggaggtggcctttgccttcttcgggcgggaggagagggcccccttgggggagcgggtggagggtggggtgcggtttctcctcctcggggtggaggggtttgggcgggagcgggtctacggctaccccgacgacgccgagcgctacctccgcttcgccctggcggccaaggaggtggcgagagggtacgacctggtccacgcccacgactggacggcggccctcctcgccctctacgcccccacggtctacaccatccacaacctggcccaccagggtctcgtggacccggggctcttcttttcctggaccgggcttccctggagcctcttccacatggaggccctggagttctacggccgggtgaacctgatgaagggggggatcgtcttcgcccgccgggtcaccacggtgagcccctcctacgccgaggagatccagacccccgagttcggcatgggcctggacggggtcttgaggaggcacgccgggaagcttaggggcatcttgaacggcctggacacggaggtctttgaccccggcaaagacccctacctccccgccccctacacccgggaggacccctcggggaaggcccgggccaaggaggccttccgggagaggacggggcttaggccccccgtcctcgcctacgtgggccgcctggattaccagaagggcctggacctcgtcttaaaggccctcccccgcctcctggagatgggctttcgcctctacgtccagggcgtgggggacggggggcttcaggaggcgttcctccgggcggaggaggaaaaccccgaaggggtacgcttcctccccgcctacgacgaggccatggcccgcctggcctacgccggggcggaggcggtcttggtcccgagccgctttgagccctgcggcctggtgcagatgatcgcgagccgctacggcacccctcccgtggcccgggcggtgggggggctcaaggacaccgtggaggacgggagggccggggtcctttttgagacctaccaccccgaggggcttctttacggcgtgctccgcctcttccgcctgggggcggaggagatgggccttagggccatggagaaggacttctcctgggaggggccggcgcgggcctaccgggaggtgtaccgggaggccttgggctag

SEQ ID NO: 4806 - protein, 440 aa, Thermus thermophilus
MGVMRVLHVAPEAYPLAKVGGLADVVGALPKALGPLGVEAHVLLPWHGGLEARRVGEVAFAFFGREERAPLGERVEGGVRFLLLGVEGFGRERVYGYPDDAERYLRFALAAKEVARGYDLVHAHDWTAALLALYAPTVYTIHNLAHQGLVDPGLFFSWTGLPWSLFHMEALEFYGRVNLMKGGIVFARRVTTVSPSYAEEIQTPEFGMGLDGVLRRHAGKLRGILNGLDTEVFDPGKDPYLPAPYTREDPSGKARAKEAFRERTGLRPPVLAYVGRLDYQKGLDLVLKALPRLLEMGFRLYVQGVGDGGLQEAFLRAEEENPEGVRFLPAYDEAMARLAYAGAEAVLVPSRFEPCGLVQMIASRYGTPPVARAVGGLKDTVEDGRAGVLFETYHPEGLLYGVLRLFRLGAEEMGLRAMEKDFSWEGPARAYREVYREALG

SEQ ID NO: 4807 - DNA, 1431 bp, Bacillus cereus
  CDS (1)..(1431)
atgaatattttatttgcagtatcagaatgtgtaccatttgttaaatcgggaggattagctgatgtagcaggtgcgctcccaaaagagctaaaaaaattaggtgtggaagttcgcattatactcccgaattatagtcttattccgcaaaaattaagggatggatgtacgctacataaagtaattaacgtcccgcttggctggagaaatcaatattgcggaattttaaaaggtgagcaagacgggattacgtattacttaatagataatgaatattattttaagagggattctctgtatggtcattatgatgacggagagcgtttttcttatttttcgaaagcagttttagagtgtattcctcatcttgatttcgaagtggatgttcttcatagccatgattggcatacagctatggtaaatttcttactacgtgaaaagtatcaagataacccattatatgagcatattaaaacggtatatacgattcataacttgcagttccaaggtgtatttcctcctgaagtgatgtacgacttgctagaacttggtgatgaatattttcatagtgagcagttagaattttatgggaatgtgaactttatgaagggtggcattatcgcttctgatcaaattacagcggttagcccgacatacaaagaggaaatccaatatgagtttttcggtgagaagttagatggattactgcgaaaatataatggtaagcttagcggcattgtaaatggaattgatacgagcgtgtacaatccagaaacggattcgtatattactgctcagtacgatgcagattcattatatgaaaagagtaaaaataaacgcgcgttgcagcgttattttggtttgccagaaaaagaagatacaccaattatttctatggtaacgagattaacgaagcaaaaaggtcttgatttagtacgtactgtattccgagaaataatggaagaagatgtacaatgtattattttaggatcaggtgattcggaatatgagaaattctttgagtggatggcatatgagtatcctgagaaggtaaaagtgtatattggctttaatgaagaattagcccaccaagtatatgcgggaagtgatttattcttaatgccatcactatttgaaccatgtggacttggacaacttatcgcattagcgtacggtacgattccaattgtaagggaaacaggcggattaaatgatacggtacaatcttatgacgaagagactggagaaggaaatggtttcagtttcacgaactttaatgcacatgacatgttgcacacggttcgtcgtgcaattgaattttatcatgataaaccggtgtgggagcagcttgtaaaacaagcaatgactgaagattatagctggggaaaatcagctctggcttataagaaattgtataaaagtctcatggaataa

SEQ ID NO: 4808 - protein, 476 aa, Bacillus cereus
MNILFAVSECVPFVKSGGLADVAGALPKELKKLGVEVRIILPNYSLIPQKLRDGCTLHKVINVPLGWRNQYCGILKGEQDGITYYLIDNEYYFKRDSLYGHYDDGERFSYFSKAVLECIPHLDFEVDVLHSHDWHTAMVNFLLREKYQDNPLYEHIKTVYTIHNLQFQGVFPPEVMYDLLELGDEYFHSEQLEFYGNVNFMKGGIIASDQITAVSPTYKEEIQYEFFGEKLDGLLRKYNGKLSGIVNGIDTSVYNPETDSYITAQYDADSLYEKSKNKRALQRYFGLPEKEDTPIISMVTRLTKQKGLDLVRTVFREIMEEDVQCIILGSGDSEYEKFFEWMAYEYPEKVKVYIGFNEELAHQVYAGSDLFLMPSLFEPCGLGQLIALAYGTIPIVRETGGLNDTVQSYDEETGEGNGFSFTNFNAHDMLHTVRRAIEFYHDKPVWEQLVKQAMTEDYSWGKSALAYKKLYKSLME

SEQ ID NO: 4809 - DNA, 1476 bp, Treponema denticola
  CDS (1)..(1476)
atgaaaataatgatggttacaagcgagcttgttccttttgcaaaagtaggaggtttggctgatgccgttacagctttatcaatagctcttgcagaaaaaagacatgatgtaagggttgtaatgcctcgttattataaaatcgatcgaaaaaacttaaagcaaattccgggggctatggccgttcatcttgggccttatgaacactgggtaggagtttatgagtcaaatctgccttcttcaaaggtaaaggtttattttatagaccatgaacaagcctttggcagagatggcgtttacggttcagcttttgaacctgatttttccgataatacgaaaagattttcacttttagcccatgcagcttttcaagtttgcagaaaacaggcatggattcccgacgttgtacatgcccatgattgggctgcgggcttggtacccgtacttttacgctttacagaaaaaaatacggaatttaaaaatacggcaagtgtttttaccattcataatatgggttaccaaggtgtttattcaaagcatacctttcccgacacaggccttgattggaacgacttttatactacaggctttgaagactgggatagaataaactttttaaaagcggcccttgtttcttccgatatgcttacaaccgtttctccttcttatgcggaagaaattaaacgccccgaattcggctttaggatggatggtattttgcggtacagggaaaaagaactgacaggaattttaaatggggtagacacctcaatttggaatccttcaaaagacgagtatattccttaccgatacaattctaaaacccttgaggaaaaggaaaaaaataaatccgttttacaggaaaggttcggtctcgaaatagatatttccgttccggtattcggtatgataagccgattggttgatcaaaagggtatttcagagcttttcggacccatgtacggttcagcctttaagatatgttccgatataaaacttcaaatggttgttttgggctcaggtgaatcttggtgcgaaaaagagctcaattttctttcacaaaggctgcctaattttagatgttatataggctataatgaagaattaagtcatttaatcgaagccggaagcgactttttcttgatgccttcaagatatgaaccatgcggcttaaaccaaatgtattccctcctttacggaaccttgcccatagtccgaaagactggagggctcgcagatacggtagaaaactataatgaagaaacaggcgagggtacgggttttgtgcttgactacttaagccctcaaagtatttacgatacggtcggctgggcagcttatgcatggtataataaaaaagatcacataaaaaagatgagaaccaaggccatgagtaaaaagttcggatggaatatagccgcggaaaaatatttaaaagtatatgccgatgctattgaaaaaaaagcttccatgttatag

SEQ ID NO: 4810 - protein, 491 aa, Treponema denticola
MKIMMVTSELVPFAKVGGLADAVTALSIALAEKRHDVRVVMPRYYKIDRKNLKQIPGAMAVHLGPYEHWVGVYESNLPSSKVKVYFIDHEQAFGRDGVYGSAFEPDFSDNTKRFSLLAHAAFQVCRKQAWIPDVVHAHDWAAGLVPVLLRFTEKNTEFKNTASVFTIHNMGYQGVYSKHTFPDTGLDWNDFYTTGFEDWDRINFLKAALVSSDMLTTVSPSYAEEIKRPEFGFRMDGILRYREKELTGILNGVDTSIWNPSKDEYIPYRYNSKTLEEKEKNKSVLQERFGLEIDISVPVFGMISRLVDQKGISELFGPMYGSAFKICSDIKLQMVVLGSGESWCEKELNFLSQRLPNFRCYIGYNEELSHLIEAGSDFFLMPSRYEPCGLNQMYSLLYGTLPIVRKTGGLADTVENYNEETGEGTGFVLDYLSPQSIYDTVGWAAYAWYNKKDHIKKMRTKAMSKKFGWNIAAEKYLKVYADAIEKKASML

SEQ ID NO: 4811 - DNA, 1173 bp, Mycobacterium paratuberculosis
  CDS (1)..(1173)
atgcgggtggcgatgatgacgcgggaatacccaccggaggtctacggaggggcgggggtacacgtcaccgaactcgtcacccagctgcgccggctgtgcgcggtggacgtgcactgcatgggtgctctacgcccgggcgcggccggggtgcaggtgcatcagcccgacccgcggctgcagggcgccaacccggccatgtcgaccctgtccgccgacctgatgatggccaacgccgccgcgcaggccagcgtcgtgcactcacacacctggtacaccggcatggccgggcatctggccgcgctgctgcacgacatcccgcacgtgctgaccgcgcattcgctcgagccgctgcgcccctggaaggccgagcagctgggcgggggctaccggatctcgacctgggtcgagcacaccgcggtgctggccgcccacgccgtgatcgcggtcagctccgcgatgcgcgaggacatcctgcgggtctacccggcactggatcccagtgcggtgcacgtcatccgcaacggcgtcgacaccgacgtctggtatcccgccggcccggtgcagaccggatcgatgctggccgaactgggcgtcgacccggcccggcccctggtggtgttcgtgggccggatcacccggcagaaggggctcgcgcatctggtggcggccgcgcaccggttcagccccgaggcgcaggtgctgttgtgcgccggtgcgccggacaccccggaaatcgccgacgagatccgcgacgcggtggccgccctggcccgcggccgcaccggcgtgttctggatccgggaaatgcttcccatcggggaactacgcgaaatactgtcggccgcatcggttttcgtgtgcccctcggtgtacgagccgttgggcatcgtgaacctggaggcgatggcctgcgcggcgccggtggtggcctccgacgtcggcggcatcccggaggtggtcgccgacggggtcaccggctcgctggtgcattacgacccgcgcgacccggcgggctatcaggccggattggccgaggcggtcaacgagctcatcgccgaccgggaaaaggcgcagcgctacggcagggcaggacgccagcgctgcgtcgaggagttctcctgggcccacgtcgccgagcagaccctggagatctatcggaaagtgtgtgcatag

SEQ ID NO: 4812 - protein, 390 aa, Mycobacterium paratuberculosis
MRVAMMTREYPPEVYGGAGVHVTELVTQLRRLCAVDVHCMGALRPGAAGVQVHQPDPRLQGANPAMSTLSADLMMANAAAQASVVHSHTWYTGMAGHLAALLHDIPHVLTAHSLEPLRPWKAEQLGGGYRISTWVEHTAVLAAHAVIAVSSAMREDILRVYPALDPSAVHVIRNGVDTDVWYPAGPVQTGSMLAELGVDPARPLVVFVGRITRQKGLAHLVAAAHRFSPEAQVLLCAGAPDTPEIADEIRDAVAALARGRTGVFWIREMLPIGELREILSAASVFVCPSVYEPLGIVNLEAMACAAPVVASDVGGIPEVVADGVTGSLVHYDPRDPAGYQAGLAEAVNELIADREKAQRYGRAGRQRCVEEFSWAHVAEQTLEIYRKVCA

SEQ ID NO: 4813 - DNA, 2486 bp, Phaseolus vulgaris
  CDS (39)..(2255)
caccctttctcgtggaggccaatgctgactccactttgatgatggggatgtttcaccacaggaatctcaagctttcttctcctaagtttggccctttgagtggttcatcgtttggacattcgggggcaagagggtgggggcgtggaagagtgaaccatgggtgtagcaggggtttgttgtgtttggtggagaagaataggaggataaaagctttggggaagggttcttggatgagtgaggagtcagaggaaatacttcagggcacaattgagaagagtaagaaggttattgctttgcaaagggagctgcttcaaaagatttctgaaagaaggaaactgcttcatgcaatagatagtcaaataaacagtatttcagatgagcacagcaatgaatccctattaagtactattgagaaccaaaatggtggcactgtttcaagcagttacgtccaatctagtgagaaggaaatatcgaatgtctcgagtttagccactgatcgtggttttgataagggtgaagaggaagatgataaattgtctcttgctgaaaaggcttcagctacacagtattttgatgaacttttgaatagcaatagatatgagacaattgcccctgataccctgccaatggaaatcccaagtggcaccaaaaccaccagtcagattattgaaatactggaaggtatcgatgaatcaagttttgatgaggttgctgataaagctgacaatgttgagagtgaaggtgaaaaacccccaccgttggctggggagaatgctatgaatgttatattggcggcagtagaatgtgctccctggtcaaaaacaggtgggcttggagatgttgctggatcattacctaaggctttggctaagcgtggacacagggttatggttgtagcacctcgatatagtaattatgctgaagcagtagagattggagtacggaaacagtacaaagtggatggtcaggacatggaagtaacatatttccatgcttttatagatggtgttgactttgtttttcttgacagtccaaactttcgcaatttacagaataacgtatatggtggaaaccgaatggatattctaaaacgcatggtgctgttttgcaaggcagctgcagaggttccatggcatgttccatgtggtggtatttgctatggagatggaaatttggccttcattgcaaatgattggcatactgcattgttgcctgtgtacctcaaggcatatttccgtgataatggtttaatgaagtacacaagatctattcttgtgattcataacatagcacaccagggtcgggggccacttgatgaattccgttacacggatttaccgcagcattacatagaccttttccaattatatgatcctgttggaggtgagcacttgaatatcttagcagccggtttaaaggcagcagaccggattgtcactgtcagtcatggatatgcatgggagatcaaaacttctgaaggtggttggggtttgcatgggatcataaatgagaatgactggaaactgaggggaattgtcaatggaattgataccaaagattggaaccccaagtttgatgttcacttgaaatcagatggatacactaactactcggttgagaccctgcaaagtggcaagcgtcaatgcaaagctgccctgcaaaaggaactcggttttccggttcgtgaggatgttccgttgatcggattcattggaaggctggatcatcagaaaggcatcgatatcattgccgaagcaattccatggatggtgggccaggatatgcaacttgccttgctgggaaccggaaggcctgacttagaagatatgcttaagcaaattgtgtcccaacacaatgacaaaatcaaaggattgattggtttttctgtgaagatggctcacaggataacagcaggtgcagacatattgctcatgccatcaagatttgagccatgtggattgaatcaactctatgccatgaactatggaacaatcccagttgtgcatgctgtgggtggactgagggataccgtgacaccttttaatccatttgaagagtctggccttggatggacatttgacagtgcagaacctaataagctagtaaacgcattagggaactgcttgatgacctttaagcagtttaagcagagttgggaagggatccaacggcgtgggatgatgcaggatctcagttgggacaatgctgctcagcagtacgaggaggttcttgttgctgccaagtaccaatggtaaaatcttagcttctactctaccaaccacactcatcaatatgactgcattcaggctgctgagttatatcatggtctgtgcaagggaaaggaccaggtcattttggccaagttgttacaactttcttgttgcaggtcctggaggaagattttgcccctaatctaaggtttatgtaataatcacttgttatatatgtggcacatgtagctggaaagttaatcaaacaactttata

SEQ ID NO: 4814 - protein, 738 aa, Phaseolus vulgaris
MMGMFHHRNLKLSSPKFGPLSGSSFGHSGARGWGRGRVNHGCSRGLLCLVEKNRRIKALGKGSWMSEESEEILQGTIEKSKKVIALQRELLQKISERRKLLHAIDSQINSISDEHSNESLLSTIENQNGGTVSSSYVQSSEKEISNVSSLATDRGFDKGEEEDDKLSLAEKASATQYFDELLNSNRYETIAPDTLPMEIPSGTKTTSQIIEILEGIDESSFDEVADKADNVESEGEKPPPLAGENAMNVILAAVECAPWSKTGGLGDVAGSLPKALAKRGHRVMVVAPRYSNYAEAVEIGVRKQYKVDGQDMEVTYFHAFIDGVDFVFLDSPNFRNLQNNVYGGNRMDILKRMVLFCKAAAEVPWHVPCGGICYGDGNLAFIANDWHTALLPVYLKAYFRDNGLMKYTRSILVIHNIAHQGRGPLDEFRYTDLPQHYIDLFQLYDPVGGEHLNILAAGLKAADRIVTVSHGYAWEIKTSEGGWGLHGIINENDWKLRGIVNGIDTKDWNPKFDVHLKSDGYTNYSVETLQSGKRQCKAALQKELGFPVREDVPLIGFIGRLDHQKGIDIIAEAIPWMVGQDMQLALLGTGRPDLEDMLKQIVSQHNDKIKGLIGFSVKMAHRITAGADILLMPSRFEPCGLNQLYAMNYGTIPVVHAVGGLRDTVTPFNPFEESGLGWTFDSAEPNKLVNALGNCLMTFKQFKQSWEGIQRRGMMQDLSWDNAAQQYEEVLVAAKYQW

SEQ ID NO: 4815 - DNA, 2570 bp, Phaseolus vulgaris
  CDS (135)..(2309)
acagatgtactcattcagttcaagttccatagtttatctctttctacaccttgttatccttcatctgccaaattccttatcatctctgctaagtttgtgaaagcaattaaccctgttgttattcttagtttctcatggcatcatcaataagtgcccaagctttggttctgcttcacagcagaggaaacccttgtctcagatttcgacagaaaaatgttgtcgtgtttgagcattcgtgcataagggcaacaggtggtaacagtttaggaacaggtgaggataaagatgatgctgaaggtgtgtttttggccatcaatgaaaagaaaaataaggtgctagctttgcaaaaggatctacttcaacaggttgtggaaataaagaaactggtttcttccgaaaagagtgagaacactcttgaatcagaagtgaacagtacatcttatgaactcggtaaaaaatctttcacaaataaatcaagtccacagaatgcttccaccagtggtaacaatgcagtaaaaaatcaaaatggaattattgcttcaccaaactatgtccaatctagtgaagggtctgtggaatccccacctataagcactaatggaggctttaaggaagctagggaggaagatgttaaacccccacttggaatggcttcatctggcatatatttaaatgaaaagttgaaagacaaagcacttgagactaataggcctgatactctctcagcctttgcaaatgatactgaacatttgagtttagaggttgagaatcaggttggtatgagtgaaggtgaaactgaaataccccaacccttggctgggaccaatgttatgaatgtcatattagtggcagcagaatgtgctccctggtcaaaaacaggtgggcttggagatgtagttggttccttgccaaaggctttggctagacgtggacatagagttatggctgtgacacctcgatatggtaattatgcagaagcccaagatacaggagtgcgaaaatggtacaaagtagatggtcatgatgcggaagtaaaatatttccaagcctacattgatggtgtagatttcgttttcattgacaatccactttttcatcatctagaacgtaacatatatgggggaagccgattggatattctaaaacgtatggtgctgttttgcaaggcagcagttgaggttccatggcacattccatgtggaggtgtttgctatggagatggaaatttggccttcatagcaaatgattggcatactgcattgctgccagtgtatctgaaggcatattatcgtgagcagggtttgatgaagtatacaagatcagttcttgtgattcataacatagctcaccagggtagggggcctgttgatgattttttctttgtggatttacctgaacaccacatggaccttttcaaattatctgaccccattggaggtgaccatttcaacatctttgcagctggtttaaagacagcagaccgtgttgtcacggttagtcatgggcatgcatgggagctcaaaacttctgaaggtggttggggcttgcatgggatcataaaggacaatgattggaaattgaggggcattgtgaatggagttgacaacaaagaatggaaccctcggtttgatgttcacttgaaatcagatggctacactaactactcccttgagacactttctagtggcaagcgtcaatgtaaaacagcattgcaaagggagcttggtttgcctatccgtgaggaagtcccactaattggcttcattggaaggttggatccacagaaaggagttgatctcatagctgaagctattccttggttgatgagtcaggatgtgcaattagtcatgttaggctctggaaggcctgatctagaaaacatgcttaggcaatttgaaagccaacaccgtgacaagataaggggatgggttggcttttcagtgaagatggctcacaggataactgcaggctctgacatattgctcatgccatcaaggtttgagccgtgtggattgaaccaactttatgccatgaactatggaacagttcctgttgtacatgctgttggtggactgaaagacacagtgcagccttttgatcctttcagtgagtcaggccttggatggacgtttgaaagtgcagattcaggtaagtcatcacatgcattagggaactgcctattgacctatagggagtataagaagagctgggaaggccttcaaaagagaggaatgacactagatcttagttgggacagtgctgctcagcagtatgaggaggtgcttcttgctgccaaataccaatggtgaactttttgcatttatttccttcaaagcaaacttttcagcatggagctaattcatgttataaccgtgccagcagttaaaattctacaggttatagttagaggcttcatgatggggattggaaagcaaagttttggcgctgaaaggattatgtaattgcaatgctgtggattgcatttgttcagctgctcaattgtacttatgatagtatgcaaatctgattttctataataaggttttacctttatttgtcaaaaaaaaaaa

SEQ ID NO: 4816 - protein, 724 aa, Phaseolus vulgaris
MASSISAQALVLLHSRGNPCLRFRQKNVVVFEHSCIRATGGNSLGTGEDKDDAEGVFLAINEKKNKVLALQKDLLQQVVEIKKLVSSEKSENTLESEVNSTSYELGKKSFTNKSSPQNASTSGNNAVKNQNGIIASPNYVQSSEGSVESPPISTNGGFKEAREEDVKPPLGMASSGIYLNEKLKDKALETNRPDTLSAFANDTEHLSLEVENQVGMSEGETEIPQPLAGTNVMNVILVAAECAPWSKTGGLGDVVGSLPKALARRGHRVMAVTPRYGNYAEAQDTGVRKWYKVDGHDAEVKYFQAYIDGVDFVFIDNPLFHHLERNIYGGSRLDILKRMVLFCKAAVEVPWHIPCGGVCYGDGNLAFIANDWHTALLPVYLKAYYREQGLMKYTRSVLVIHNIAHQGRGPVDDFFFVDLPEHHMDLFKLSDPIGGDHFNIFAAGLKTADRVVTVSHGHAWELKTSEGGWGLHGIIKDNDWKLRGIVNGVDNKEWNPRFDVHLKSDGYTNYSLETLSSGKRQCKTALQRELGLPIREEVPLIGFIGRLDPQKGVDLIAEAIPWLMSQDVQLVMLGSGRPDLENMLRQFESQHRDKIRGWVGFSVKMAHRITAGSDILLMPSRFEPCGLNQLYAMNYGTVPVVHAVGGLKDTVQPFDPFSESGLGWTFESADSGKSSHALGNCLLTYREYKKSWEGLQKRGMTLDLSWDSAAQQYEEVLLAAKYQW

SEQ ID NO: 4817 - DNA, 2444 bp, Phaseolus vulgaris
  CDS (78)..(2015)
cctctttttgttcttttcgcagccacttttcttcttggttcacgatcccttccctcctgcatcagacttctcttctcatggactctctacaactccatgctcttctacatccgcatctatgcgcatcatcatcatcaccatcactaaggcagctgcgtttccctcttccgttaatacgaaattcaagaaatcgcaacttccgattgttttctgctcacaatggcggcgctgcttcgcaagacggtcccttcgcttttgaagaaaaagttgtctcttcccccaaagatgatagaggtctcgtgctggccagagaaaccgacgattttggttatctcgttggctttcgcttgattccggagtcaggtcttgaagagttgatgagtgtgcaacatgcaatagctgaggaagactctagtagcgacttggctaaaaaacctgggattaaggatacaggtgaagaggaagccgagactagagtgtcccacaacattatttttgtgactgctgaagctgcgccatattccaagactggtggtcttgctgatgtttgtggctctttgccaattgctctggcggctcgcgggcaccgtgtgatggttgtcacgcccagatacattcatggtacttctgaggatgctaagtttgctggggcagttgatctggagcaacgcaccaaagtgtcgtgctttggaggtgctcaagaagttggctttttccatgagtatagggaaggggttgattgggtatttgtggaccacccctcgttccatagaccagggaatccgtatggggacaagtttgggacttttggggataatcagtttcggttcactttactttcccatgcagcgtgtgaagcgccattggtgcttccattggggggtttcacttacggagaaaaatgtttattccttgctaatgattggcatgccagcctagttccagtacttttggcagcgaagtatcgtccacatggggtatatagggatgctcgcagtatattagtgatacataatatagcacatcagggagtggaacctgcaattacatacagtagtttggggctgcctacagaatggtatggagcactggaatgggtgttccctacgtgggcaaggacgcatgctcttgacacaggtgaagctgtcaactttctaaaaggtgctgttgttacagctgaccggattgtgacagtaagcaagggctattcctgggagataactacaagtgaaggtggaaatggtctacatgaattattaaatggtcgaaaaagtattctcagtgggatcacaaatggaattgacgtcactgaatgggacccatcatgtgataaacatattgctttcaactactctgctgatgacctttccgggaaggccaaatgcaagtatgctttgcagaaggaattgggtcttccagtgaggtctgattgtccattgattgggttcattggaagactggactaccagaaaggtattgacttgatccgcttggcaatgccagagctcatggaagcggatgttcagtttgtaatgcttgggtcaggaaaccctatttatgaagactggatgagagcaacagagtccgtttatagagataaatttcggggttgggtgggatttaatgttccaatatctcataaaataactgcaggctgtgatatattgttgatgccatctgcgtttgagccctgtggactgaatcagttgtatgcaatgagatatggaactatacccgtagttcatgaaactgggggcctaagagatactgttcataattttagtccatatactgaagacagcaaagctgaaagcactgggtggacgttttctccactaacaaaagagagcatgttaacggctctaagatatgccattcagacatacaatgaacacaagtcttcgtgggagggattgatgctaagaggcatgacaaaagattacacatgggtaaatgcagctactcaatacgagcaaatcattgagtgggcattcatcggcccaccctattgctgaaatgaagattgcataaatgatccacgcaaggatttctccaataccaagctacttagaggattatcatgctcataattaagtcataatagtttccttcaaggaggcagatgtctcacttgtctaagccgtactcctttgatgatatgatattgggtacataaactcagctaggcactctcgaggaattttttacactgattggaactccaatttggaaccacgccaatgtatagtgctgttagaagttttttaccttttttgtttctttaaagggttttagaatgggtcatgtgacacatggaatttgtaccatgtgagagtgtgcgtgtattggcactgttattgcgagtgaccgacatgatttgtaagatgcgtcaatctctgtcttgtgcatgcatctatttggtatcaataaaaaaaaaaaaaaaa

SEQ ID NO: 4818 - protein, 645 aa, Phaseolus vulgaris
MDSLQLHALLHPHLCASSSSPSLRQLRFPLPLIRNSRNRNFRLFSAHNGGAASQDGPFAFEEKVVSSPKDDRGLVLARETDDFGYLVGFRLIPESGLEELMSVQHAIAEEDSSSDLAKKPGIKDTGEEEAETRVSHNIIFVTAEAAPYSKTGGLADVCGSLPIALAARGHRVMVVTPRYIHGTSEDAKFAGAVDLEQRTKVSCFGGAQEVGFFHEYREGVDWVFVDHPSFHRPGNPYGDKFGTFGDNQFRFTLLSHAACEAPLVLPLGGFTYGEKCLFLANDWHASLVPVLLAAKYRPHGVYRDARSILVIHNIAHQGVEPAITYSSLGLPTEWYGALEWVFPTWARTHALDTGEAVNFLKGAVVTADRIVTVSKGYSWEITTSEGGNGLHELLNGRKSILSGITNGIDVTEWDPSCDKHIAFNYSADDLSGKAKCKYALQKELGLPVRSDCPLIGFIGRLDYQKGIDLIRLAMPELMEADVQFVMLGSGNPIYEDWMRATESVYRDKFRGWVGFNVPISHKITAGCDILLMPSAFEPCGLNQLYAMRYGTIPVVHETGGLRDTVHNFSPYTEDSKAESTGWTFSPLTKESMLTALRYAIQTYNEHKSSWEGLMLRGMTKDYTWVNAATQYEQIIEWAFIGPPYC

SEQ ID NO: 4819 - DNA, 1827 bp, Hordeum spontaneum
  CDS (1)..(1827)
atggcggctctggccacgtcccagctcgccacctccggcaccgtcctcggcgtcaccgacaggtcggcgccgtccatgttccggcatgctggttttcagggcctgaggccccggaagcccgcagatgggacgtttggtatgaggactgtcggagcaagcgccgccccgaagcaaagccggaaagcgcaccgcgggaaccggcggtgcctctccgtggtggtgcgtgccacgggcagcggcatgaacctcgtgttcgtcggcgccgagatggcgccctggagcaagaccggcggccttggcgacgtcctcggcggccttccaccagccatggccgccaacggtcaccgggtgatggtcgtctccccgcgctacgatcagtacaaggacgcctgggacaccagcgtcatctccgagatcaaggtcgctgacgagtacgagagggtgaggttcttccactgctacaagcgcggagtggaccgcgtgttcatcgaccacccgtggttcctggagaaggtccggggcaagaccaaggagaagatctacgggcccgacgccggcacggactacgaggacaaccagcagcgcttcagccttctctgccaggcagcgctcgaggcacccaggatcctcaacctcaacaacaacccctacttttctggtccctacggggaagacgtggtgttcgtgtgcaacgactggcacacgggccttctggcctgctacctcaagagcaactaccagtccaatggcatctacaggacggccaaggtggccttctgcatccacaacatctcgtaccagggccgcttctccttcgacgactttgcgcagctcaacctgcccgacaggttcaagtcgtccttcgacttcattgacggctacgacaagcccgtggaggggcgcaagatcaactggatgaaggccgggatcctgcaggccgacaaggtgctgacggtgagcccctactacgctgaggagctcatctctggcgaagccaggggctgcgagctcgacaacatcatgcgcctcacggggatcaccggaatcgtcaacggcatggacgtcagtgagtgggaccccaccaaggacaagttcctcgccgtcaactacgacatcaccaccgcgttggaggccaaggcgctgaacaaggaggcactgcaggccgaggtggggctgccggtggacaggaaggtgccgctggtggccttcatcggcaggctggaggagcagaagggccccgacgtgatgatcgccgccatcccggagatcctgaaggaggaggacgtccagatcattctccttggcaccgggaagaagaagtttgagaagctgctcaagagcatggaggagaagttcccgggcaaggtgagggccgtggtcaggttcaacgcgccgctagctcaccagatgatggccggcgccgacttgctcgctgtcaccagccgcttcgagccctgcggcctcatccagctccagggaatgcgctatggaacgccgtgcgtgtgcgcgtccaccggcgggctcgtcgacacgatcgtggagggcaagaccgggttccacatgggccgcctcagcgtcgactgcaacgtggtggagccggcggacgtgaagaaggtggcgaccaccctgaagcgggccgtcaaggtcgtcggcacgccggcgtaccaggagatggtcaagaactgcatgatccaggatctctcctggaagggacctgccaagaactgggaggacgtgcttctggaactgggggtggaggggagcgagccggggatcgtcggcgaggagatcgcgccgctcgccatggagaacgtcgccgctccctga

SEQ ID NO: 4820 - protein, 608 aa, Hordeum spontaneum
MAALATSQLATSGTVLGVTDRSAPSMFRHAGFQGLRPRKPADGTFGMRTVGASAAPKQSRKAHRGNRRCLSVVVRATGSGMNLVFVGAEMAPWSKTGGLGDVLGGLPPAMAANGHRVMVVSPRYDQYKDAWDTSVISEIKVADEYERVRFFHCYKRGVDRVFIDHPWFLEKVRGKTKEKIYGPDAGTDYEDNQQRFSLLCQAALEAPRILNLNNNPYFSGPYGEDVVFVCNDWHTGLLACYLKSNYQSNGIYRTAKVAFCIHNISYQGRFSFDDFAQLNLPDRFKSSFDFIDGYDKPVEGRKINWMKAGILQADKVLTVSPYYAEELISGEARGCELDNIMRLTGITGIVNGMDVSEWDPTKDKFLAVNYDITTALEAKALNKEALQAEVGLPVDRKVPLVAFIGRLEEQKGPDVMIAAIPEILKEEDVQIILLGTGKKKFEKLLKSMEEKFPGKVRAVVRFNAPLAHQMMAGADLLAVTSRFEPCGLIQLQGMRYGTPCVCASTGGLVDTIVEGKTGFHMGRLSVDCNVVEPADVKKVATTLKRAVKVVGTPAYQEMVKNCMIQDLSWKGPAKNWEDVLLELGVEGSEPGIVGEEIAPLAMENVAAP

SEQ ID NO: 4821 - DNA, 1248 bp, Gloeobacter violaceus
  CDS (1)..(1248)
atgtacggacggattgcactgatctctgtgaatggcgacccctcggcggtcatcggcgcagaggaagcaggtggacaaaatgtctatgttcgagaggtcggcaagcatctggcaagtctcggccaccaggtagacatgttcactcgccgtatagatccgtcacaagaagaggtcgtcgaagaagctcccaactgccgcacgatccgcctcgccgccgggcctttggagtttgtgaagcgcgacgacttacacagctatattccccattttgtggaaagcttgacggcctacgcccggcgccactcctacgacgcggtacacacccactattggcattcggggatggtggggctggcactgcgcgagaaattgggtatacccgtggtacacacttaccactccctgggtgccgtcaaatacatgaacgtcgcagagattcccgcctcggcacagctgcgcctgaacggtgagcgccggattctggagcaggcggaccgggtcgtggccaccagccctcaagaggcggagcatatgcgctcttacgtctcgcgcaaaggctcggtggatgtcattccttgcggtgtagacatcggccacttcgtggagaccgatcgggccgaggcgcggcgggtactcggctgggctgagcaggagaaagtggtgctctacgtgggccgcttcgacaagcgcaaggggatcgagaccctggtgcgcgcggtggcccagattgaggaaccggtgcgtctggtcatcggcggcggctatacgcccgatcgcggcgacggcgtcgagttcgagcgcatccgcagtgtagtcgaggaggtgggtctaaccggtcggaccgagtttacgggccgcatcgaccaggcggatctgcccaactattacacggcagcggacgtgtgcgtggtgccaagccactacgaaccgtttggtttggtggccatcgaagcgatggcctgcggcacaccggtgatcgccagcgcggtaggtgggctatgctacagcgtcgtcaacaacgagacgggtctgctggtaccgccgcgcgatgccgagcgcttcgccggggccattcgccgggtgattaccgatgccgggttgcgcgagcggttgtcgctcgccggtgttcgccgcatccatgaccacttcacctgggccggggtgagccgccaactcgggcgcctttatgcgaacctggcggcccgtcgggtttctaatcgcccgcaaaagcagcagtctgtggcctga

SEQ ID NO: 4822 - protein, 415 aa, Gloeobacter violaceus
MYGRIALISVNGDPSAVIGAEEAGGQNVYVREVGKHLASLGHQVDMFTRRIDPSQEEVVEEAPNCRTIRLAAGPLEFVKRDDLHSYIPHFVESLTAYARRHSYDAVHTHYWHSGMVGLALREKLGIPVVHTYHSLGAVKYMNVAEIPASAQLRLNGERRILEQADRVVATSPQEAEHMRSYVSRKGSVDVIPCGVDIGHFVETDRAEARRVLGWAEQEKVVLYVGRFDKRKGIETLVRAVAQIEEPVRLVIGGGYTPDRGDGVEFERIRSVVEEVGLTGRTEFTGRIDQADLPNYYTAADVCVVPSHYEPFGLVAIEAMACGTPVIASAVGGLCYSVVNNETGLLVPPRDAERFAGAIRRVITDAGLRERLSLAGVRRIHDHFTWAGVSRQLGRLYANLAARRVSNRPQKQQSVA

SEQ ID NO: 4823 - DNA, 3219 bp, Oryza sativa
  CDS (1)..(3219)
atggcggcggcggccgtctcctccctcctcgccccttcgggatcctgctactcccccggatgccacagctgctggggtcccgggcccggaggcgggcggcgcctaccttccccgcgccggcgcccgattaccgccgcggctcgccctacttgggcagtgccgaggaggagcaggttggagtgggggcgtgtggaggctcagaattcgggcgctcgcaccagctgccgagcagcactgcaatggctatcatccacggcaaggtcccatgtgaatgttggttatgggtcgccgctggtgttcccagggaatcaagttggtgacgatagtgatgatggaatcaaggttaccaatgagaagcttcgtgctgttatccgcaagagcaaagaggtgttggagatccatcggaatctacttgagaaggtacataaattgaaaatacaagattactatgaacttcccaaaatatcggcatcagaaaggaagaagatcacttcaattatagaggacagttccatttataatgagcaagatccatttggtcaaagagatagttctttttatcatcttgatgaagttccagacgatgatgaatttagctatgacctacagatgtaccttgatagacgtccagatcaatctgaagttgttgcaactcaggattatgaggcacaactaagtcaaataagtgaaatgggacagtcagttgctgagggcactagtgatgatccatctgcttcagctgctgtagatcttatcaatatcatattggtagcggcggagtgtgctccttggtccaaaacaggcaagatcataatagccacataccttctaattttttcagtttccatgaaaggacattgcgggtttaacctagtacctgtgctggtagaagcgtgtgctgcccgcatgaggttgagagcgtccggtcacgcgccgtgttcagggggttttgggttttccgtgggccgtcttaacccaccagttgagtttttattgtttttagtgacctttttagggcatgagctggaccaacgtgggcttggagatgttgctggagctttgccaaaggctttggctaggagaggtcaccgtgtcatggtagtagtgccaatgtataaaaactacgcagaacctcaacagctaggagagccaaggagataccaggttgcagggcaggatatggaggtaatttattatcatgcatacatagatggtgtggattttgttttcattgacaatcctatcttccaccacgttgagaatgacatttatggcggagaccgaacagacatcttaaaacggatggttttgttgtgcaaagcggctatagaggttccatggtatgttccttgtggtggctactgctacggtgatggaaatcttgtgttccttgcaaatgattggcatactgcactactgcctgtttatttgaaggcatactatcatgacaatggtttcatgatatatgcccgttctgttcttgtcatacacaatatagcacatcagggtcgtggcccattagatgacttcagttatctggatttgccagttgattacatggatcttttcaaactttatgacccatttgggggtgatcacctaaacatatttgcagctggtattaaagctgctgaccgtttgcttactgtaagccatggttatgcatgggagctcaaaacagctgaaggtggttggggtcttcatgggatcatcaatgaaagcgattggaaatttcagggcattgtaaatggcattgatacaactgattggaatcctaggtgtgatatccacctaaaatctgatgggtacaccaattattctctagaaacagttcaggcaggtaaacagcaatgtaaggcagcattgcagaaggaacttggtctcccagttcgtggcgatgttcctgtcattgctttcattggacggctagaccatcaaaaaggtgtagaccttatagcagaagcaatgccatggattgctggccaagatgtacagttaataatgttgggcactggacggcaagacctcgaagatacattgaggaggcttgagagccaacattacgatagagttagggggtgggttggtttttccatcaggttggctcatcgaatgacagcaggggctgatatactattgatgccatcaaggtttgagccatgtggattgaatcagctctatgccatgatgtatgggactgtcccagtagtccatgcggtcggtggtcttcgagacaccgttgagcactacaatccctacgaggagtccggacttggttggacttttgaaaaggcagaggcaaacagactgattgatgctctagggcactgcttgaacacgtacaggaactacaggactagttgggagggactccaaaagagagggatgatgcaagatctaagttgggataatgctgctaagctgtatgaggaagtcctcctagctgccaagtatcaatgtttttttgtcagatctgacatcattttcaagaaggcacatgatgaacctacttcccaggtgaatacagcagcggacgatgcctttgttggaaggtggcaaaacacatggaagattcagccgtctgccagcatgcacctctgtcctaaggagaggctccaagccccattgtgcgctctggagaggctccaaaccaccattgttcgcccctggattcctcgactggtccattggcacatgaaagaaaaggagattgcaagtatgcaacgaccgtgtgggtatcagcgtgtgcaatgctcgcaagctcgcatgaggtggccgcaagcctgcgacgccggatgcttagccccaaggagagacggtgacatacaagggtacaagaaggagcacatcaaggtgcagctggtccgcagccggcggcggctggtcgtgagcggcgagtgccccgtcgccggcgagaccaaccggtggagccgcttccggctgcagttcccggtgcccgacggctgcgacctcaaggccatccaggcgaggctccacgacggcgtcatccgcgtcaccctgcccggcgtcaagccgcagcagcagccgccgcccgccaagacggccgccgccgccgcggtagtaggaggggatcagcggggcggcggcgaacgatgccaattcctccgggagcggggaaagctcgcgaccaccctgctcggcgtggtgctcgtcttgtttagcttcgtcatctacatcaggtacagcgtgaagccatga

SEQ ID NO: 4824 - protein, 1072 aa, Oryza sativa
MAAAAVSSLLAPSGSCYSPGCHSCWGPGPGGGRRLPSPRRRPITAAARPTWAVPRRSRLEWGRVEAQNSGARTSCRAALQWLSSTARSHVNVGYGSPLVFPGNQVGDDSDDGIKVTNEKLRAVIRKSKEVLEIHRNLLEKVHKLKIQDYYELPKISASERKKITSIIEDSSIYNEQDPFGQRDSSFYHLDEVPDDDEFSYDLQMYLDRRPDQSEVVATQDYEAQLSQISEMGQSVAEGTSDDPSASAAVDLINIILVAAECAPWSKTGKIIIATYLLIFSVSMKGHCGFNLVPVLVEACAARMRLRASGHAPCSGGFGFSVGRLNPPVEFLLFLVTFLGHELDQRGLGDVAGALPKALARRGHRVMVVVPMYKNYAEPQQLGEPRRYQVAGQDMEVIYYHAYIDGVDFVFIDNPIFHHVENDIYGGDRTDILKRMVLLCKAAIEVPWYVPCGGYCYGDGNLVFLANDWHTALLPVYLKAYYHDNGFMIYARSVLVIHNIAHQGRGPLDDFSYLDLPVDYMDLFKLYDPFGGDHLNIFAAGIKAADRLLTVSHGYAWELKTAEGGWGLHGIINESDWKFQGIVNGIDTTDWNPRCDIHLKSDGYTNYSLETVQAGKQQCKAALQKELGLPVRGDVPVIAFIGRLDHQKGVDLIAEAMPWIAGQDVQLIMLGTGRQDLEDTLRRLESQHYDRVRGWVGFSIRLAHRMTAGADILLMPSRFEPCGLNQLYAMMYGTVPVVHAVGGLRDTVEHYNPYEESGLGWTFEKAEANRLIDALGHCLNTYRNYRTSWEGLQKRGMMQDLSWDNAAKLYEEVLLAAKYQCFFVRSDIIFKKAHDEPTSQVNTAADDAFVGRWQNTWKIQPSASMHLCPKERLQAPLCALERLQTTIVRPWIPRLVHWHMKEKEIASMQRPCGYQRVQCSQARMRWPQACDAGCLAPRRDGDIQGYKKEHIKVQLVRSRRRLVVSGECPVAGETNRWSRFRLQFPVPDGCDLKAIQARLHDGVIRVTLPGVKPQQQPPPAKTAAAAAVVGGDQRGGGERCQFLRERGKLATTLLGVVLVLFSFVIYIRYSVKP

SEQ ID NO: 4825 - DNA, 2547 bp, Oryza sativa
  CDS (97)..(2022)
tctctccaccaccaccaccaccaccaccaccaccgcccgccaagcgcggcccgcccgacacagcagcagcaggatcggcggagaggaggggggatcatggcgacggcggcggggatggggatcggggcggcgtgcctggtggcgccgcaggtgaggccggggaggaggttgcggctccagcgggtgcggaggcggtgcgtggcggagctgagcagggacggtgggtcggcgcagcgcccgctggcaccggcgccgctggtgaagcagccggtcctgccgaccttcctcgtgccgacgtcgacgccacccgcgcccacgcagtcgccggcgccggcgccgaccccgccgccgttgccggactccggcgtgggggagatcgagcccgatctagaaggtctcacagaagattccatcgacaaaacaatttttgtggctagtgagcaggagtctgagatcatggatgtgaaggagcaagctcaagctaaagtaacacgcagcgttgtctttgtaaccggtgaagcttctccttatgcaaagtcaggtggactaggagatgtttgtggttcactgccaattgctcttgctcttcgtggtcatcgtgtgatggttgtaatgccgagatacatgaacggggccttgaacaaaaattttgcaaacgcattttacactgagaagcacattaagattccatgctttggcggagaacatgaagttactttttttcacgagtatagggattctgttgattgggtgtttgttgatcatccctcatatcatagacctggaaatttgtatggagataattttggtgcttttggcgataatcagttcagatacacactcctgtgctatgcggcgtgtgaagccccattaattcttgaactgggaggatatatctatggacagaaatgcatgtttgttgtgaatgattggcatgccagtcttgtgccagtccttcttgctgcaaaatatagaccatatggtgtttacagggatgcccgcagtgttcttgtcatacataatctagcacatcagggtgtggagcctgccagtacatatcctgacctgggattgccacctgaatggtatggagcattagaatgggtgtttccagagtgggcaaggcggcatgcccttgacaagggtgaggcagtcaattttttaaaaggcgcagttgtgacagcagatcgaattgtgactgtcagccaggggtattcatgggaggtcacaactgctgaaggtgggcaaggcctcaatgagctcttaagctcccggaagagtgtattgaatggaattgtaaatggaattgacattaatgattggaacccatccacagacaagtttctcccttatcattattctgttgatgacctgtccggaaaggccaagtgtaaagctgaattgcaggaggagctgggtttacctataaggcccgatgtgcctctgattggctttattggaagattggactatcaaaaaggcattgatctaattaaacttgccattccagatctcatgcgggacaatattcaattcgtcatgcttggatctggtgacccaggttttgaaggatggatgagatccacagaatcagggtacagggataaatttcgtggatgggttggatttagtgttccagtttcccaccgaataactgcaggttgcgatatattgttgatgccatccagattcgaaccttgtggcctcaatcagctatatgctatgcaatatggtacagtgcctgttgttcatggaactggaggcctcagagatacagtggagaattttaacccgtttgctgagaaaggagagcagggtacagggtgggcattctcgccactaaccattgaaaaaatgctgtgggcattgcggatggcaatttcgacatacagggaacacaagtcctcttgggagggtctaatgaagcgaggcatgtcaagcgactttacatgggaccatgccgcctcacagtatgaacagatcttcgaatgggccttcatggatcaaccatatgtcatgtaaatggatttgaaggaagcagcgaatttctccgaggaccctcaatcttcctgtctttcatgagcggaatgaaaactttgtacactacatggaaagggaaccagttatgcaaagttgcaaacgatcactcaaggttacccttgtaggcctgctacttggccaatatggttccagtgaccatatgcagagtcaggttcagatgaatggcacttgtgagtagtgaagaataagatgaggatgcttgaagcggtttcacatgtggctgataccacgcaagcaacctctcaatgcatcgaaatgtgagtcttggaatcaataggatttagctcccatcaattacagttgtacccttttttgcttaatactttgtcgcctgtgctgttcttatatttgtgtgaagataaattttagtccattaggtaactgtattgttgagtcttaaggtgaagactaaatagtgtttggaagctgtagctactgcgatgtcaagtgtcaaaagagatcttggaaatcaaaaaaaaaaaaaaa

SEQ ID NO: 4826 - protein, 641 aa, Oryza sativa
MATAAGMGIGAACLVAPQVRPGRRLRLQRVRRRCVAELSRDGGSAQRPLAPAPLVKQPVLPTFLVPTSTPPAPTQSPAPAPTPPPLPDSGVGEIEPDLEGLTEDSIDKTIFVASEQESEIMDVKEQAQAKVTRSVVFVTGEASPYAKSGGLGDVCGSLPIALALRGHRVMVVMPRYMNGALNKNFANAFYTEKHIKIPCFGGEHEVTFFHEYRDSVDWVFVDHPSYHRPGNLYGDNFGAFGDNQFRYTLLCYAACEAPLILELGGYIYGQKCMFVVNDWHASLVPVLLAAKYRPYGVYRDARSVLVIHNLAHQGVEPASTYPDLGLPPEWYGALEWVFPEWARRHALDKGEAVNFLKGAVVTADRIVTVSQGYSWEVTTAEGGQGLNELLSSRKSVLNGIVNGIDINDWNPSTDKFLPYHYSVDDLSGKAKCKAELQEELGLPIRPDVPLIGFIGRLDYQKGIDLIKLAIPDLMRDNIQFVMLGSGDPGFEGWMRSTESGYRDKFRGWVGFSVPVSHRITAGCDILLMPSRFEPCGLNQLYAMQYGTVPVVHGTGGLRDTVENFNPFAEKGEQGTGWAFSPLTIEKMLWALRMAISTYREHKSSWEGLMKRGMSSDFTWDHAASQYEQIFEWAFMDQPYVM

SEQ ID NO: 4827 - DNA, 1242 bp, Streptomyces avermitilis
  CDS (1)..(1242)
atgtaccagccagcaaccgccccttcgccgcgcgtcctccacgtcacccagccggtggacggcggcgtcgcccgcgtggtcaccgagctggtgcgtgcgcagcgtgcggccggtttcgacgtcacggtcgcgtgtcccggccacggcctcgcccaggcagtacgggaactcggcgcaggcgtacggcactggtccgccacgcgggcgccgggaccgtcgctccccggtgaggtgcgccggctcgctcgcctcgtcgaggaggtccggcccgacgtgctgcacgcccacagcgccaaggccggtctcgccgcccggctggcggtacgggggcggatcccgacggtgttccagccgcacgcctggtcgttcgaggcggtcggcggggtcacggcggcggtcgccacggcgtgggagcggtggggggcgcggtgggccgcccgcgtggtgtgcgtcagcgaggcggagcgcgcgcgaggcgtacgcgccggggtacgcgcccactggcgggtgatccccaacggcatcgacccggggcgcttccaccccgccgccgtcaccaccgtacgagccgccctcgcaccgctcgccggcctcgatccggccgctccgctggtggtctgcgtgggacggctgtgccggcagaaggggcaggacgtgctgctcgaggcgtggtcctcggtgcggcggcgggtgcccggggcccggctggcgctcgtcggggacgggccacaggagcggccactgcgtcacctcgcgcccgagggcgtgctgttcgccggggccgtcgccgatgccgtcccctggtaccaggccgccgacctggtggtgctgccgtcccgctgggagggcatggcgctggccccgctggaggcgatggcgtgcaggcgtcccgtggtggtcacggacgtggccggggcgcgcgagagtctgccgcccggccaccgggagcactgtctggtgcccgccggccggccgggcccgctggccgacgcgctcaccagggcgctgctcgatccgctgctgcgcgaatcgctcggccaccaggggcgccgccacgtactgaccgcgcacgacgtgcggcactcggccgaggcggtcgcggccctctaccgcgaactcctcggcaccgggcgcacttcggccgaccccgcggaacacgccgagtgcgccgaccccgcggaacacacccagtgcgccgacctcgcggaacacaccgagtgcagggagtccatccgctcgtga

SEQ ID NO: 4828 - protein, 413 aa, Streptomyces avermitilis
MYQPATAPSPRVLHVTQPVDGGVARVVTELVRAQRAAGFDVTVACPGHGLAQAVRELGAGVRHWSATRAPGPSLPGEVRRLARLVEEVRPDVLHAHSAKAGLAARLAVRGRIPTVFQPHAWSFEAVGGVTAAVATAWERWGARWAARVVCVSEAERARGVRAGVRAHWRVIPNGIDPGRFHPAAVTTVRAALAPLAGLDPAAPLVVCVGRLCRQKGQDVLLEAWSSVRRRVPGARLALVGDGPQERPLRHLAPEGVLFAGAVADAVPWYQAADLVVLPSRWEGMALAPLEAMACRRPVVVTDVAGARESLPPGHREHCLVPAGRPGPLADALTRALLDPLLRESLGHQGRRHVLTAHDVRHSAEAVAALYRELLGTGRTSADPAEHAECADPAEHTQCADLAEHTECRESIRS

SEQ ID NO: 4829 - DNA, 2208 bp, Phaseolus vulgaris
  CDS (144)..(1991)
aagcaattcaagaatttaatgataatttttcattccaatgctttatacttctgattaaccttgcaacttggtctttcaaatctcacaaacttcaatcagttctctctcccaaactgtgtgtgcttcattgcctggtaccaaaaatggcaactttgactgcttcaagtaacttggtctctggaagttctcatgtccaccatggaccaactgcatcatatgagtctaaagcagtgacaatggggcttaaatctctaaagcagaccaatactcataatggactgagaattttgaacccggtggatgagctaagaaacaggaccccagttaaaatcaactcaaaagctacgaggaagggacttcaaggcaagaatgtcaagcctaaaggtgaaatcatatgtggcatgaaattgatttttgttggaatggaggtgggtccatggagcaaaactggtgggttaggagatgttcttgggggtcttccaccagcattagcagcttatggacatcgagttatgactatcgcgccacgttacgaccaatacaaagatgcctgggatacaagtgttgtagttgagctgaaagtaggggacagaactgaaaaggttcgctacttccattgctacaagaggggagttgatcgtgtctttgtggatcaccctttgtttctttcaaaggtctgggggaaaaccggaaccaaactttatggactaactacaggagatgattatgaagacaaccaactacgttttagtctattttgccaggcagctttggaagcaccaagggttctgaatctcaattccagtaaatatttctctggaccatatggtgaagatgtaattttcatcgccaacgattggcacaccgcccttctcccctgctacttgaaaactatgtaccagtcagtaggcatctttaagaatgctcgagttgttttatgtatccacaacattgcttaccaaggaagatttgcattcacagactatgcacttctaaatctccctgaccaatttaaaagctcctttgactttattgatgggcatgttaaaccagtgattggaaggaaaatcaattggatgaaagctggaattttagaatcatggtttgtgataactgttagtccaaactatgctaaagaactattgtcaggtccagataaaggagtggaactggacaacatccttcgcaaaaatgaagatcgtttaattggaattgtgaatggcatggatgttcaggagtggaatccatccactgacaagtatatagccgtcaaatacgatgcttcaacagttttggaagcaaaggctcttttgaaagaagccctccaagcagaagttggattgccagtggacagaaatattcctctcattggtttcattggtaggcttgaagagcaaaaaggttctgatattcttgcagaagccattccacaatttatcgaggagaatgttcagttggtagccctaggaacaggaaaaaaacaaatggaaaaacagcttcaggaacttgaaatatcataccctgacaaggccagaggagtggcaaaattcaatgttcccctagcccacatgataattgctggtgctgattttatattggttcctagcagatttgagccttgtggtctcattcagttgcaagctatgcgctatggatcagtacctattgtttcctcaaccggtggattagttgatactgtcgaagaaggcttcactggatttcagatgggttccttcaatgttgaatgtgaagctgtggatgctgctgatgttgatgctatagcaaagactatcaaaagggcccttgcactctacggaactccagctttcacagaaatgatcaagaattgcatggctcaagatctttcatggaagggacctgctaagaagtgggaggacgtgctgctaagcttggaagtacctggcagtgaacctggaattgatggagaagaaattgctccacaggcaaaggaaaatgtggcaactccataataagagcatatatgtgaaggaagcctcttttagtagtctcatgaagttcccttagctccttacttcttattgtgcttctatcctacttccattttttgttttcttcaaaatatatcatagaaattaatgtacatggacacggtgattacactgttagaatcagtgttttcaaccctatttataagagtatgtcttcaagattgaaaaaaaaaaaaaa

SEQ ID NO: 4830 - protein, 615 aa, Phaseolus vulgaris
MATLTASSNLVSGSSHVHHGPTASYESKAVTMGLKSLKQTNTHNGLRILNPVDELRNRTPVKINSKATRKGLQGKNVKPKGEIICGMKLIFVGMEVGPWSKTGGLGDVLGGLPPALAAYGHRVMTIAPRYDQYKDAWDTSVVVELKVGDRTEKVRYFHCYKRGVDRVFVDHPLFLSKVWGKTGTKLYGLTTGDDYEDNQLRFSLFCQAALEAPRVLNLNSSKYFSGPYGEDVIFIANDWHTALLPCYLKTMYQSVGIFKNARVVLCIHNIAYQGRFAFTDYALLNLPDQFKSSFDFIDGHVKPVIGRKINWMKAGILESWFVITVSPNYAKELLSGPDKGVELDNILRKNEDRLIGIVNGMDVQEWNPSTDKYIAVKYDASTVLEAKALLKEALQAEVGLPVDRNIPLIGFIGRLEEQKGSDILAEAIPQFIEENVQLVALGTGKKQMEKQLQELEISYPDKARGVAKFNVPLAHMIIAGADFILVPSRFEPCGLIQLQAMRYGSVPIVSSTGGLVDTVEEGFTGFQMGSFNVECEAVDAADVDAIAKTIKRALALYGTPAFTEMIKNCMAQDLSWKGPAKKWEDVLLSLEVPGSEPGIDGEEIAPQAKENVATP

SEQ ID NO: 4831 - DNA, 2748 bp, Oryza sativa
  CDS (1)..(2748)
atggcgtgcttggcggcgggcgccgaggcggcccctctcctcttccggcggcggctagcgccgtccccagtcgccgcgcgccgccgccttctcgtgtcgtgccgagctcgccgccgcggtctcaggactgctgcagaacttcctcggaagagtacaagtaatgataaacaccataatagggtgaatatgcagagagatgaagcatctgtttccagtgataaagaacggcaagagaaatatggagatgaaaatggtatatcaaaccttcaattggaagatttgatacaaatgatacaaaacactgagaagaatataatgcttctgaatcaagctcgtcttcaagcattggaacatgttgaaacagttcttaaagaaaaagaagacttacagaggaagttgaaaattttggagacgagattgtcagaaacagatgcacggcttaagctttcagctgaagggcagttcggtactgagattaatgactctctaccagtactggaattagatgatataaaggaagagaatatgctactgaaggatgacatacaatttctgaaaacaatgcttattgaggttgctgagacagagaacagtatattcacattagagaaggagcgtgctcttttagatgcttcgcttagggagctggagtctagatttatagatgcccaagcagatatgttgaagtctgatcctaggcagtatgatgcatggtgggagaaagtagaaaatttgggggacttgcttgagactgcaacaaacaaagtagagaatgctgctatggttctgggacgcaatcatgatttggaagataaggtcgacaaactagaggcatcgttggctgaagcaaatatatcaaagttctcttgttattttgttgatcttttgcaggaaaagataaaatcagtagaagagcgcttccaagtatgtaatcatgaaatgcattctcaaattgaactctatgagaattcaatagcggaatttcacgatattcttagcaagctagtggaggaaactgagaaacgatcactagagcattcagcaagtagcatgccttcagaattgtggagtaggatatctcttctgattgatggttggttgctcgagaagagaatatcctacaatgatgcaaatacattacgggaaatggtcaggaaaagggatagttgtcttcgggaagcatacttgtcatgcagaggtatgaaagatagggaaattgtggacaattttctaaagatcacattgccagggactagttctggcttgcacatcatccacatagcagcagagatggctcctgttgcaaaggttggtggtttggcggatgtgatatctggtcttggcaaggcacttcagaaaaagggccacctagtagagattattcttccaaaatatgactgcatgcagaatgaccaagttaataaccttaaggttttagatgttgttgtacaatcctactttgaaggaaatttgttcaacaacaaaatatggactgggactgttgaaggccttccagtctattttatcgagccacaacatccagcaaaattcttttggagggcacaatactatggagaacacgatgactttaaacgttttgcatacttcagccgtgcagcactggaattactttaccaatcgcagaagaaaattgacatcatccattgccatgactggcagactgcatttgtggcacctctttattgggaagcatatgcaaatctgggcttcaactcagctagaatttgcttcacctgccataattttgaatatcaaggagctgctcctgctcaagatttagcatgctgtggccttgatgttcagcaacttgatagggaagacaggatgcgggacaattcacatggcagaataaatgttgtcaagggtgcaattgtgtattccaacattgtgacaactgtatcaccaacatatgcactagaggtgcgatcagagggtggacgtggactacaagattcactcaaattacattccaggaaatttgttgggatacttaatggaatcgacacagacacatggaatccttcaacagatagacatctcaaggttcaatataatgctaatgatctccagggtaaggcagcaaacaaagcagctctcagaaagcagctaaacttatcttctacaaatgcttctcaaccactggttgggtgtattacaaggctagttcctcaaaagggtgtacatctcatcaggcatgcaatatacaaaacagctgagctaggaggacagtttgttcttctgggctcaagtccagtaccacacattcaaagagagtttgagggtattgcagaccattttcagaacaataacaatatccgactgcttttgaagtatgatgattctttatcccattggatttatgcagcatctgacatgttcattgttccatccatgtttgagccatgtggcctcacacagatgattgccatgagatatggttctgtgccgattgttcggaaaaccggtggattgaatgacagtgtcttcgatttcgacgacgaaacgatacctaaggagctgcggaatggctttacgtttgtgcatcctgatgaaaaggctctaagtggtgcaatggagagagcgttcaactactacaatagaaagcctgaggtctggaaacagctggtgcagaaggacatgaggatagatttcagctgggcctcttcagcttcccagtacgaagatatctatcaaagagcagtggctcgagcgagggcagcagcatga

SEQ ID NO: 4832 - protein, 915 aa, Oryza sativa
MACLAAGAEAAPLLFRRRLAPSPVAARRRLLVSCRARRRGLRTAAELPRKSTSNDKHHNRVNMQRDEASVSSDKERQEKYGDENGISNLQLEDLIQMIQNTEKNIMLLNQARLQALEHVETVLKEKEDLQRKLKILETRLSETDARLKLSAEGQFGTEINDSLPVLELDDIKEENMLLKDDIQFLKTMLIEVAETENSIFTLEKERALLDASLRELESRFIDAQADMLKSDPRQYDAWWEKVENLGDLLETATNKVENAAMVLGRNHDLEDKVDKLEASLAEANISKFSCYFVDLLQEKIKSVEERFQVCNHEMHSQIELYENSIAEFHDILSKLVEETEKRSLEHSASSMPSELWSRISLLIDGWLLEKRISYNDANTLREMVRKRDSCLREAYLSCRGMKDREIVDNFLKITLPGTSSGLHIIHIAAEMAPVAKVGGLADVISGLGKALQKKGHLVEIILPKYDCMQNDQVNNLKVLDVVVQSYFEGNLFNNKIWTGTVEGLPVYFIEPQHPAKFFWRAQYYGEHDDFKRFAYFSRAALELLYQSQKKIDIIHCHDWQTAFVAPLYWEAYANLGFNSARICFTCHNFEYQGAAPAQDLACCGLDVQQLDREDRMRDNSHGRINVVKGAIVYSNIVTTVSPTYALEVRSEGGRGLQDSLKLHSRKFVGILNGIDTDTWNPSTDRHLKVQYNANDLQGKAANKAALRKQLNLSSTNASQPLVGCITRLVPQKGVHLIRHAIYKTAELGGQFVLLGSSPVPHIQREFEGIADHFQNNNNIRLLLKYDDSLSHWIYAASDMFIVPSMFEPCGLTQMIAMRYGSVPIVRKTGGLNDSVFDFDDETIPKELRNGFTFVHPDEKALSGAMERAFNYYNRKPEVWKQLVQKDMRIDFSWASSASQYEDIYQRAVARARAAA

SEQ ID NO: 4833 - DNA, 1605 bp, Shewanella oneidensis
  CDS (1)..(1605)
atgaaacgcatattaatggttgcagccgaaaatggggcactcaaaggggcaaaagtgggggggatggcggatgtgatccgcgatttaccccaagctctcgcgggcgttgggatccaagccgatgtcattatgccaagctacggctttttaaccgcccaaggtgctaagcaaattggtgagtttgatgtgagctttgccgggcgacatgagcttataaagctatattggctggcgcatcctctggtaccaggcgccaatatttacttgctcgagcatgggctttggcaatcgatccccgggcaaatttacagccaaggcactaaggatcgcccctttgccgatgatgcgactaagtttgccttcctgtgtgtaagcgttgccaaagctttagtgactgggcttgtgcccatgccgcagctgctgcatctgcatgactggcatacgggatgtttagccatgctgcgggcattagcgcctgaatatcaggcattgcaagccattgaatgtgtgttttcaattcacaatctggcgttacaggggattaggccgctcggccatgatgcatcctctttcgcggcttggtttcctagcctgtttgcccacttggatgtgactcaactcgcggacattattgatccccgttatccccattgtattaacccgatgcggatgggtattcgactcgccgatagggtgcatttagtctcacccacttatgccaaggaagtgctattaccctcgcaacccgagcgaggttttttcggtggcgaagggcttgaggccgatttgcaacataaagctgaccaaggtcgggtgttggggattttaaatggttgtgattatccccaagcgttgacgaaaaagtctttcaagcgaatgggattagctgagtttacggccttactgagtgatattgagtcggctttagtacagtggcaggcgactcaaagtcaggttcgtggcgtcgatatgatcgcttttactcggctgcaagcgctttggcgtcaagcatcattggaggcgtttccagcctttttgctgacctccgttgggcgtcttactgaccaaaaggtgttgatcttacgccatattctaccttcagggttatctgtgttggagacgctgctgttacagttacagcaaacgcagcctaacgcgctgtttgtgctgcttggcagtggtgacccagagataggacaattttttcaaacccttgcggctaagtatgctcattttgtatttttacagggctaccacgaagcactctcgcaatgtctttaccaatatggggacttattgcttatgccgagttcctttgagccctgcggtatcagccaaatgctcgccatgcgtagcggtcaaccctgcctagtgcatggcgttggcggattacaggatacggtcgaggatggtgtcgatggctttgtcttttatggcgaagatatcaaaagtcagggcgaggctttgctggcgaagctggccgaagcactagagaaatttgacagtagtgattggacgcaactaaagcgtaaggcaaaagcacggcgttttgattggcgtagcatcgcccttgattacaagaaacaactttataacattttgtga

SEQ ID NO: 4834 - protein, 534 aa, Shewanella oneidensis
MKRILMVAAENGALKGAKVGGMADVIRDLPQALAGVGIQADVIMPSYGFLTAQGAKQIGEFDVSFAGRHELIKLYWLAHPLVPGANIYLLEHGLWQSIPGQIYSQGTKDRPFADDATKFAFLCVSVAKALVTGLVPMPQLLHLHDWHTGCLAMLRALAPEYQALQAIECVFSIHNLALQGIRPLGHDASSFAAWFPSLFAHLDVTQLADIIDPRYPHCINPMRMGIRLADRVHLVSPTYAKEVLLPSQPERGFFGGEGLEADLQHKADQGRVLGILNGCDYPQALTKKSFKRMGLAEFTALLSDIESALVQWQATQSQVRGVDMIAFTRLQALWRQASLEAFPAFLLTSVGRLTDQKVLILRHILPSGLSVLETLLLQLQQTQPNALFVLLGSGDPEIGQFFQTLAAKYAHFVFLQGYHEALSQCLYQYGDLLLMPSSFEPCGISQMLAMRSGQPCLVHGVGGLQDTVEDGVDGFVFYGEDIKSQGEALLAKLAEALEKFDSSDWTQLKRKAKARRFDWRSIALDYKKQLYNIL

SEQ ID NO: 4835 - DNA, 1173 bp, Corynebacterium efficiens
  CDS (1)..(1173)
atgaaagttggaatgatgaccagagaatatccgccggaggtctacggcggagcaggtgtccacgtaaccgagctgacccggttcatgcgggagatcgcggaggtggatgtccattgcatgggcgccccacgtgacgccgagggggtctacgtccacggcgtggacccggccctggacaatgccaacccggccatcaagaccctgtccaccggtctgcgcatggcagaggccgccaacaatgtggatgtggttcactcccacacctggtacgcgggtctgggtggtcatctcgccgcacgtctgcacggcatcccccatgtggccaccgcccactcactggaaccggaccgcccgtggaagcgtgagcagctcggtggtggatacgatgtgtcctcctggtcagagaagaacaccatggagtacgccgatgccgtcatcgcggtgtccgcacgcatgaaggattccatcctcgccgcctacccccgcatcgaacctgacaatgtccgcatcgtgctcaacggcatcgacaccgaactgtggcagccccgccccaccttcgatgacgcggaggaatccgtgttgcgcaagctcggtgtggatccccagcgacccatcgtggcgttcgtcggtcgcatcacccgccagaagggtgtggagcatttggtcaaggccgccgcccacttcgatgagggtgtacagctggtgctgtgtgcaggcgcaccggacaccccggagatcgcggaacgcaccagggctctcgtggaggcgctgcagtcccagcgcgacgggatcttctgggtccaggagatgctggacaagaagggcatccaggagatcctcaccgcagccgacacctttgtctgcccctcaatctacgagccgctgggcatcgtcaacctcgaggccatggcctgcaacaccgccgtggtcgcctccgacgtgggcggtatcccggaggtcgtggtcgatggtgagaccggcaccctggtccactacgacgagaatgacaccgaaaccttcgagcgtgacatcgccgaggccgtgaacaagatggtcgcggaccgtgaggtggcgaagaagttcggtatcgccgggcgtgagcgtgccatcaacgagttctcctgggccaccatcgcccagcagaccgtcgatgtctacaaatcactgatgtag

SEQ ID NO: 4836 - protein, 390 aa, Corynebacterium efficiens
MKVGMMTREYPPEVYGGAGVHVTELTRFMREIAEVDVHCMGAPRDAEGVYVHGVDPALDNANPAIKTLSTGLRMAEAANNVDVVHSHTWYAGLGGHLAARLHGIPHVATAHSLEPDRPWKREQLGGGYDVSSWSEKNTMEYADAVIAVSARMKDSILAAYPRIEPDNVRIVLNGIDTELWQPRPTFDDAEESVLRKLGVDPQRPIVAFVGRITRQKGVEHLVKAAAHFDEGVQLVLCAGAPDTPEIAERTRALVEALQSQRDGIFWVQEMLDKKGIQEILTAADTFVCPSIYEPLGIVNLEAMACNTAVVASDVGGIPEVVVDGETGTLVHYDENDTETFERDIAEAVNKMVADREVAKKFGIAGRERAINEFSWATIAQQTVDVYKSLM

SEQ ID NO: 4837 - DNA, 2340 bp, Colocasia esculenta
  CDS (155)..(2086)
gatcgcaaaggcagacatcacacctccacacgcgcacgttggtcggttccagaaggcggaagcaactgctctccgctcctgcctcccttttatccccgctcctctggatctccccatcttccatctctctctctctctctctctctctccgatcatggaggttctacgggtagcacgccccgcattggccgccagcagcgcccccggatcgcggccactgcgtggggctccacgccgcccgccgcctggagcttggcgggccgccggctccgccccgcgtctgcgccggcggctcggggatctccctctgacgttctgcgctgcggagaagagggaggaggtgttgcctccggctttcgaggagaaggatgtgtcagaggtgttgctccccgcggaggcgcctgggagtggtccttgctttgatgaggcgccggaggtcctcggggcggaaggaagtaaagggagaatgagatccagtactattgcagctactgttagtggagagaagcatgagaatgttggtgaggagaagcaatctcgacctgtgataagaaataacattatttttgtcactgcagaagctgctccttactccaagactggaggtctgggagatgtatgtggttctttgcctattgcccttgctgcccgtggtcatcgtgtcatggtcgtctcaccaaggtatttagatggtgtatcagatgagaaatttgcaaatgcagttgatactgggcgccgcatcaagatttcatgctttggaggacagcaagaagttgctttttttcaagagtatagggctggtgtagattgggtgtttgttgatcatctctcgtatcacagaccagggaacccttatggtgatgtatatggtgcgtatggtgataatcagtttcggttcacactgctctgccatgcagcatgtgaggctccactggtgcttccactgggaggatttacctacggagataagtgcttgttccttgccaatgattggcatgcagccctggtgccagtccttctgagtgcaaaataccgcccaaatggtgtttacaaagatggtcgctgcattcttgtcattcataaccttgcacatcagggcgtggagccagagacgacttatccgttcctaggattgccatccgagtggtatgggtctgttgagtgggtctttcctacttgggcaaggacacatgctcttgatccaggcaagtctgtcaatcttctgaaaggagcagtagtcacagtagatcgcatagtcacagttagtcagggttactcttgggagataacaacccctgagggaggatatggtctccatgaactcttaaatagcagaaagagtgtactcaatggaattactaatggcattgatgttggtgactgggatccagcctcggaccagcacatacaatttcattattctgtcaatgacctatctgggaaggtcaaatgcaaaatggctttgcaggaggaatttggccttgatgttcgtcctgattgcccattgattggtttcattggaaggctagatatgcagaaagggactgatttgatcatgatggcaatgccggagcttatgaaagaagatattcaatttgttatgcttggttctggagatgcaggtacagaacaatggatgagaactgcagaatctatttatagagacaagttccgtggatgggttgggtttaatgttgctatttctcatcggataactgctgggtgtgacatactgttaatgccatcaaggtttgaaccttgtggtcttaatcaattgtatgctatgagatatggaactgttccagttgtccatgccactggtggccttaaggatacggttgagaatttcaatccatatgctaatgaaaggagtggtaagggaacagggtgggctttttctcctttatcaaaggatagcatgctgaaggcattgaacttggcaattcggacatacagggatttcaagccctcatgggaaggactcatgaaacgagggatgtcaaaagatttcacatgggacaacgccgctgctcaatatgagcaagtgttcgggtgggccttcatagatcctccttatgtcagatgatgcccagacaaacccctgtcggccagattctttccctgatttcttccccacgttccagttttgcagtagctaacacatacttttcgtcttctcactgttcaaatgtcaagggtggtccaaagggcagcaggaactttggtgaaatgtctctgtcaccttccttccggacattggaaaccaataaagcccctgcataagcaatgacgttgtacagtggacatttcaatatttagttctattctttgtgtaatgcc

SEQ ID NO: 4838 - protein, 643 aa, Colocasia esculenta
MEVLRVARPALAASSAPGSRPLRGAPRRPPPGAWRAAGSAPRLRRRLGDLPLTFCAAEKREEVLPPAFEEKDVSEVLLPAEAPGSGPCFDEAPEVLGAEGSKGRMRSSTIAATVSGEKHENVGEEKQSRPVIRNNIIFVTAEAAPYSKTGGLGDVCGSLPIALAARGHRVMVVSPRYLDGVSDEKFANAVDTGRRIKISCFGGQQEVAFFQEYRAGVDWVFVDHLSYHRPGNPYGDVYGAYGDNQFRFTLLCHAACEAPLVLPLGGFTYGDKCLFLANDWHAALVPVLLSAKYRPNGVYKDGRCILVIHNLAHQGVEPETTYPFLGLPSEWYGSVEWVFPTWARTHALDPGKSVNLLKGAVVTVDRIVTVSQGYSWEITTPEGGYGLHELLNSRKSVLNGITNGIDVGDWDPASDQHIQFHYSVNDLSGKVKCKMALQEEFGLDVRPDCPLIGFIGRLDMQKGTDLIMMAMPELMKEDIQFVMLGSGDAGTEQWMRTAESIYRDKFRGWVGFNVAISHRITAGCDILLMPSRFEPCGLNQLYAMRYGTVPVVHATGGLKDTVENFNPYANERSGKGTGWAFSPLSKDSMLKALNLAIRTYRDFKPSWEGLMKRGMSKDFTWDNAAAQYEQVFGWAFIDPPYVR

SEQ ID NO: 4839 - DNA, 2409 bp, Hordeum vulgare
  CDS (1)..(2409)
atgtcgtcggcggtcgcgtcccccgcgtccttcctcgcgctcgcgtccgcctcgcccgggagatcatcacggaggagggcgagggtgggcgcgtcgccaacccgcgctggggccggcaggctgcaatggcggccgtcgccgctgcagcgcacggctcgcgacggagcggtggccgcgcgcgccgccgggatcgacgacgccgcgcccggtaggcagccccgcgctcgccgctatggcgccgccaccaaggtcgcggatcccgtcaagacgctcgatcgcgacgccgcggaaggtggtgggccgtccccgccggcaccgaggcaggacgccgcccgtctgccgagtaagaacggcacgctgatcaacggtgagaacaaacctaccggcggcggtggcgcgactaaagacagcgggctgcccacacccgcacgcgcgccccatctgtcaatccagaacagagtaccggtgaacggtgaaaacaaacataaggtcgcctcgccgccgaccagcatagtggatgtcgcgtctccgggttccgcagctaacatttccatcagtaacaaggtgccgccgtccgttgtcccagccaagaagacgccgccgtcgtccgttttcccggccaagaagacgctgccgtcgtccggctcaaattttgtgtcctcggcctctgctcccaggctggacactgtcagcgatgtggaacttgcacagaagaaggatgcgctgattgtcaaagaagctccaaaaccaaaggctctttcggcccctgcagcccccgctgtacaagaagacctttgggatttcaagaaatacattggtttcgaggagcccgtggaggccaaggatgatggctcggctgttgcagatgatgcgggttcctttgaacatcaccagaatcatgattccggacctttggcaggggagaacgtcatgaacgtggtcgtcgttgctgctgaatgttctccctggtgcaaaacaggtggtcttggagatgttgcgggtgctttgcccaaggctttggctaagagaggacatcgtgttatggttgtggtactaaggtatggggactatgaggaagcctacgatgtcggagtccgaaaatactacaaggctgctggacaggatatggaagtgaattatttccatgcttatatcgatggagtggattttgtgttcattgacgctcctctcttccgacaccgtcagcaagacatttatgggggcagcagacaggaaattatgaagcgcatgattttgttctgcaaggccgctgtcgaggttccttggcacgttccatgcggcggtgtcccttacggggatggaaatctggtcttcattgcaaatgattggcacacggcactcctgcctgtctatctgaaagcatattacagggaccatggtttgatgcaatacagtcgctccgttatggtgatacataacatcgctcaccagggccgtggccctgtagatgaattcccgttcaccgagttgcctgagcactacctggaacacttcagactgtacgaccccgtcggcggtgagcacgccaactacttcgccgccggcctgaagatggcggaccaggttgtcgtcgtgagccccgggtacctgtgggagctgaagacggtggagggcggctgggggcttcacgacatcatacggcagaacgactggaagacccgcggcatcgtgaacggcatcgacaacatggagtggaaccctgaggtggacgtccacctgaagtcggacggctacaccaacttctccctgaagacgctggactccggcaagcggcagtgcaaggaggccctgcagcgcgagctggggctgcaggtccgcggcgacgtgccgctgctcgggttcatcgggcggctggacgggcagaagggcgtggagatcatcgcggacgcgatgccctggatcgtgagccaggacgtgcagctggtgatgctgggcacggggcgccacgacctggagagcatgctgcagcacttcgagcgggagcaccacgacaaggtgcgcgggtgggtggggttctccgtgcgcctggcgcaccggatcacggcgggcgccgacgcgctcctcatgccctcccggttcgagccgtgcgggctgaaccagctctacgcgatggcctacggcaccatccctgtcgtgcacgccgtcggcggcctgagggataccgtgccgccgttcgaccccttcaaccactccgggctcgggtggacgttcgaccgcgccgaggcgcacaagctgatcgaggcgctcgggcactgcctccgcacctaccgggaccacaaggagagctggaggggcctccaggagcgcggcatgtcgcaggacttcagctgggaacatgccgccaagctctacgaggacgtcctcgtccaggccaagtaccagtggtga

SEQ ID NO: 4840 - protein, 802 aa, Hordeum vulgare
MSSAVASPASFLALASASPGRSSRRRARVGASPTRAGAGRLQWRPSPLQRTARDGAVAARAAGIDDAAPGRQPRARRYGAATKVADPVKTLDRDAAEGGGPSPPAPRQDAARLPSKNGTLINGENKPTGGGGATKDSGLPTPARAPHLSIQNRVPVNGENKHKVASPPTSIVDVASPGSAANISISNKVPPSVVPAKKTPPSSVFPAKKTLPSSGSNFVSSASAPRLDTVSDVELAQKKDALIVKEAPKPKALSAPAAPAVQEDLWDFKKYIGFEEPVEAKDDGSAVADDAGSFEHHQNHDSGPLAGENVMNVVVVAAECSPWCKTGGLGDVAGALPKALAKRGHRVMVVVLRYGDYEEAYDVGVRKYYKAAGQDMEVNYFHAYIDGVDFVFIDAPLFRHRQQDIYGGSRQEIMKRMILFCKAAVEVPWHVPCGGVPYGDGNLVFIANDWHTALLPVYLKAYYRDHGLMQYSRSVMVIHNIAHQGRGPVDEFPFTELPEHYLEHFRLYDPVGGEHANYFAAGLKMADQVVVVSPGYLWELKTVEGGWGLHDIIRQNDWKTRGIVNGIDNMEWNPEVDVHLKSDGYTNFSLKTLDSGKRQCKEALQRELGLQVRGDVPLLGFIGRLDGQKGVEIIADAMPWIVSQDVQLVMLGTGRHDLESMLQHFEREHHDKVRGWVGFSVRLAHRITAGADALLMPSRFEPCGLNQLYAMAYGTIPVVHAVGGLRDTVPPFDPFNHSGLGWTFDRAEAHKLIEALGHCLRTYRDHKESWRGLQERGMSQDFSWEHAAKLYEDVLVQAKYQW

SEQ ID NO: 4841 - DNA, 2115 bp, Setaria italica
  CDS (142)..(1959)
ctccacaccaccaccaagggtttgaagaagaggaagaactaaaccactgcaagccagtgacggatcgacgacgacacgcccaccccgggctccctgctcatccatccgtcagctagctagccctccacgctggtcaccggcatggcggctctggccacttcccagctcgtcaccacccgcgccggcttcggcctcggcgacgcctcctcctccatgttccgccccggcgtccagggcctcaggggctcccgggcctcctccccggcggccacgctcagcgtgcggaccagcgcgcgcgccgcgcccaggcagcagcaccgccgggcgcagcgcggcgccaggttcccctccctcgtcgtctgcgccaccgcgggcatgaacgtcgtcttcgtcggcgccgagatggcgccttggagcaagaccggcggactcggcgacgtcctcggcggcctcccgccggccatggccgcgaatgggcaccgggtcatggtcatctccccccgctacgaccagtacaaggacgcctgggacaccagcgtcgtctccgagatcaaggtgggagacaggtacgagagggtgaggttcttccactgctacaagcgcggagtcgaccgcgtgttcatcgaccacccgtccttcctggagagggtttggggaaagactggtgagaagatctacgggccagacgctggagtggattacaaggacaaccagctgcgtttcagccttctttgccaggcagcacttgaagctcctaggattctgagcctcaacaacaacccttacttctcaggaccgtacggggaggacgtcgtgttcgtctgcaacgactggcacaccggccctctgtcgagctacctcaagagcaactaccagtccaacggcatctacagaaacgccaagaccgctttctgcatccacaacatctcctaccagggccggttcgcattctcggactacccggagctgaacctccctgagagattcagatcatccttcgatttcatcgacggctacgagaagcctgtggagggcaggaagatcaactggatgaaggccgggatcattgaagccgacagggtcctgaccgtgagcccctactacgccgaggagctcatctccggcatcgccaggggctgcgagctcgacaacatcatgcgcctcaccggcatcaccggtatcgtcaacggcatggacgtcagcgagtgggaccccagcaaggacaagtacatcgccaccaagtacgacgtgtcaacggccattgcggccaaggcgctcaacaaggaggcgctgcaggccgcggccgggctcccggtggaccggaagatcccgctggtggcgttcgtcggcaggctggaggagcagaagggccccgacgtcatggctgccgccatcccgcagctcatggaggaggatgtccagatcgtccttctgggcactgggaagaagaagttcgagcgcatgctgatgagcgcggaggagaagtaccccgacaaggtgcgcgccgtggtgaagttcaacgcggcggtggcgcaccacatcatggccggcgccgacctgctcgccgtcaccagccgcttcgagccctgcggcctcatccagctgcaggggatgcgatacggcacgccctgcgtgtgcgcgtccaccggcgggctcgtcgacaccgtcatcgaaggcaagaccggattccacatgggccgcctcagcgtcgactgtaaggtcgtggagccggccgacgtgcagaaggtggcgagcaccctgaagcgcgccatcaaggtcgtcggcacgccggcgtacgaggagatggtcaggaactgcatgatccaggacctctcctggaagggccctgccaagaactgggagaacgttctgctgagcctgggcgtcgccggcagccagccggggatcgaaggcgaggagatcgcgccgctcgccaaggagaacgtggccgctccctgaaggcggccaagatgatccagtgaacacctacatagtatatagttgcttgtggtagtgtattgtagtggccagcggatatatgacctaataagcatgaactatatatatacactatatattgcgagtgaaaaaaaaaaaaaaaaaaaaaaaaaaaaa

SEQ ID NO: 4842 - protein, 605 aa, Setaria italica
MAALATSQLVTTRAGFGLGDASSSMFRPGVQGLRGSRASSPAATLSVRTSARAAPRQQHRRAQRGARFPSLVVCATAGMNVVFVGAEMAPWSKTGGLGDVLGGLPPAMAANGHRVMVISPRYDQYKDAWDTSVVSEIKVGDRYERVRFFHCYKRGVDRVFIDHPSFLERVWGKTGEKIYGPDAGVDYKDNQLRFSLLCQAALEAPRILSLNNNPYFSGPYGEDVVFVCNDWHTGPLSSYLKSNYQSNGIYRNAKTAFCIHNISYQGRFAFSDYPELNLPERFRSSFDFIDGYEKPVEGRKINWMKAGIIEADRVLTVSPYYAEELISGIARGCELDNIMRLTGITGIVNGMDVSEWDPSKDKYIATKYDVSTAIAAKALNKEALQAAAGLPVDRKIPLVAFVGRLEEQKGPDVMAAAIPQLMEEDVQIVLLGTGKKKFERMLMSAEEKYPDKVRAVVKFNAAVAHHIMAGADLLAVTSRFEPCGLIQLQGMRYGTPCVCASTGGLVDTVIEGKTGFHMGRLSVDCKVVEPADVQKVASTLKRAIKVVGTPAYEEMVRNCMIQDLSWKGPAKNWENVLLSLGVAGSQPGIEGEEIAPLAKENVAAP

SEQ ID NO: 4843 - DNA, 2081 bp, Triticum aestivum
  CDS (1)..(1800)
atggcggctctggtcacgtcccagctcgccacctccggcaccgtcttcagcgtcaccgacagattccggcgtccaggttttcagggtgtgaggccccggagcccggcagatgcgccgctcggcatgaggactaccggagcgagcgccgccccgaagcaacaaagccggaaagcgcaccgcgggacccggcggtgcctctccatggtggtgcgcgccacgggcagcgccggcatgaacctcgtgttcgtcggcgccgagatggcgccctggagcaagaccggcggcctcggcgacgtcctcgggggcctccccccagccatggccgccaacggtcaccgggtcatggtcatctccccgcgctacgaccagtacaaggacgcctgggacaccagcgtcgtctccgagatcaaggtcgcggacgagtacgagagggtgaggtacttccactgctacaagcgcggggtggaccgcgtgttcgtcgaccacccgtgcttcctggagaaggcccggggcaagaccaaggagaagatctacgggcccgatgccggcacggactacgaggacaaccagctacgcttcagcctgctctgccaggcagcgcttgaggcacccaggatcctcgacctcaacaacaacccatacttctccggaccctacggggaagacgtggtgttcgtgtgcaacgactggcacacgggccttctggcctgctacctcaagagcaactaccagtccagtggcatctataggacggccttggtagcgttctgcatccacaacatctcgtatcagggccgcttctccttcgacgacttcgcgcagctcaacctgcccgacaggttcaagtcgtccttcgacttcatcgacggctacgacaagccggtggaggggcgcaagatcaactggatgaaggccgggatcctgactgtgagcccctactatgctgaggagctaatctctggcgaagccaggggctgcgagctcgacaacatcatgcgcctcactgggatcaccggcatcgtcaacggcatggacgtcagcgagtgggaccccatcaaggacaagttcctcaccgtcaactacgacgtcaccaccgcgttggaggggaaggcgctgaacaaggaggcgctgcaggccgaggtggggctgccggtggaccggaaggtgcccctggtggcgttcatcggcaggctggaggagcagaagggccccgacgtgatgatcgccgccatcccggagatcttgaaggaggaggacgtccagatcgttctcctgggcaccgggaagaagaagtttgagcggctgctcaagagcgtggaggagaagttcccgagcaaggtgagggccgtggtcaggttcaacgcgccgctggctcaccagatgatggccggcgccgacgtcctcgccgtcaccagccgcttcgagccctgcggcctcatccagctccaggggatgcgctacggaacgccgtgcgcgtgcgcgtccaccggcgggcttgtcgacacgatcatggagggcaagaccgggttccacatgggccacctcagcgttgactgcaacgtggtggagccggccgacgtgaagaaggtggtcaccaccctgaagcgcgccgtcaaggtcgtcggcacgccggcgtaccatgagatggtcaagaactgcatgatacaggatctctcctggaaggggcctgccaagaactgggaggacgtgcttctggaactgggggtcgaggggagcgagccgggggtcatcggcgaggagattgcgccgctcgccatggagaacgtcgccgctccctgaagagaggaaagaggtttttggtgcatggagcattcatccatcttcagggttcccgtgtgaggagatagccgcttgttgtagcgaagggccgatatatacatatttatatatagactaataagtacttatgctttgttgtgccgcttgcctctttattacaaacaaaaaaaaggtaagaagttaggggttgtgcttgtgagaggtgtgtacttaatcgtgcttgcattttggtgtggtatattgcaaataaacaaaggatttgttaaaaaaaaaaaaaaaaa

SEQ ID NO: 4844 - protein, 599 aa, Triticum aestivum
MAALVTSQLATSGTVFSVTDRFRRPGFQGVRPRSPADAPLGMRTTGASAAPKQQSRKAHRGTRRCLSMVVRATGSAGMNLVFVGAEMAPWSKTGGLGDVLGGLPPAMAANGHRVMVISPRYDQYKDAWDTSVVSEIKVADEYERVRYFHCYKRGVDRVFVDHPCFLEKARGKTKEKIYGPDAGTDYEDNQLRFSLLCQAALEAPRILDLNNNPYFSGPYGEDVVFVCNDWHTGLLACYLKSNYQSSGIYRTALVAFCIHNISYQGRFSFDDFAQLNLPDRFKSSFDFIDGYDKPVEGRKINWMKAGILTVSPYYAEELISGEARGCELDNIMRLTGITGIVNGMDVSEWDPIKDKFLTVNYDVTTALEGKALNKEALQAEVGLPVDRKVPLVAFIGRLEEQKGPDVMIAAIPEILKEEDVQIVLLGTGKKKFERLLKSVEEKFPSKVRAVVRFNAPLAHQMMAGADVLAVTSRFEPCGLIQLQGMRYGTPCACASTGGLVDTIMEGKTGFHMGHLSVDCNVVEPADVKKVVTTLKRAVKVVGTPAYHEMVKNCMIQDLSWKGPAKNWEDVLLELGVEGSEPGVIGEEIAPLAMENVAAP

SEQ ID NO: 4845 - DNA, 1230 bp, Corynebacterium glutamicum
  CDS (1)..(1230)
atgcccccatttcggtatcgctgcgcaactgtttttagatggctaatctttgaaattatgagagtcggaatgatgacaagagagtatccaccagaggtttacggcggcgctggcgtgcacgtcaccgaattgacccgattcatgcgtgagatcgctgaagttgatgttcactgcatgggtgcacctcgcgatatggagggagttttcgtccacggcgtcgatcctgccttggaaagcgcgaaccctgcgattaagacactgtccaccggtttacgcatggcagaagctgcaaacaacgtggatgtcgtgcactcacacacttggtatgcaggtcttggcggccaccttgcagctcgtctccacggcattcctcacgtggctaccgcgcactctttggagccagatcgcccatggaagcgtgagcagcttggcggtggatacgacgtgtcctcctggtctgaaaaaaatgccatggaatacgctgacgcggtcatcgctgtgtcggctcgcatgaaagattccatcctcgctgcgtaccctcgcatcgagccggacaacgtgcgtgttgtcctcaacggcatcgacactgagttgtggcagcctcgcccgactttcgatgacgcggaagattccgtactccgctccctaggcgttgacccacagcggcccatcgtcgcatttgtcggccgcatcacccgccaaaaaggcgtcgagcacctcatcaaggcagcagcgcttttcgacgagtccgtgcagcttgtgctctgtgccggcgcgccagacacccccgaaatcgcagctcgcaccaccgccctggtggaagaactccaggcaaagcgcgaaggcattttctgggttcaggacatgctgggcaaggacaaaatccaagagattctcaccgctgctgacaccttcgtgtgcccatccatttacgagccactgggcatcgtgaacttggaagcaatggcctgcaacaccgcagttgtcgcatccgacgttggaggcatccctgaggttgttgtcgacggcaccaccggcgccctcgttcactacgacgaaaatgatgtcgaaaccttcgagcgcgatatcgccgaagcggtgaataaaatggtcgctgatcgagagaccgcagccaaatttggtctcgcagggcgcgaacgtgctatcaatgatttctcctgggcaacgattgctcagcagaccattgatgtgtacaaatccttgatgtag

SEQ ID NO: 4846 - protein, 409 aa, Corynebacterium glutamicum
MPPFRYRCATVFRWLIFEIMRVGMMTREYPPEVYGGAGVHVTELTRFMREIAEVDVHCMGAPRDMEGVFVHGVDPALESANPAIKTLSTGLRMAEAANNVDVVHSHTWYAGLGGHLAARLHGIPHVATAHSLEPDRPWKREQLGGGYDVSSWSEKNAMEYADAVIAVSARMKDSILAAYPRIEPDNVRVVLNGIDTELWQPRPTFDDAEDSVLRSLGVDPQRPIVAFVGRITRQKGVEHLIKAAALFDESVQLVLCAGAPDTPEIAARTTALVEELQAKREGIFWVQDMLGKDKIQEILTAADTFVCPSIYEPLGIVNLEAMACNTAVVASDVGGIPEVVVDGTTGALVHYDENDVETFERDIAEAVNKMVADRETAAKFGLAGRERAINDFSWATIAQQTIDVYKSLM

SEQ ID NO: 4847 - DNA, 1356 bp, Pyrococcus furiosus
  CDS (1)..(1356)
atgaaggtacttttgcttggctttgaatacttacccataaaggtcggaggactagcagaggcattaacgtatattgcaaaggcacttgcctccctgggaaatgagaccatcgtatttactcccgcccatgggcaatttcacggagaatcgattggaaaggttagggcttttggagaagaagttgaaattagagttcacttagagaaagagggaaacttaagggtttatagaatagggggaggactgcttgactcaacggatgtgtatggccctggttgggatggattgctgaagaagagtgttctctttggaaaagcaagcgttctcctcttaaataaattgctcgagaaagaagagctcccagatgtagttcactttcacgattggcacaccgtttttgctggtgcactaataaagaagtacttcaagatcccagccgtctttacaatacacaggttgaataaggcgaaagttccagcttattacttccatgaggcaaacctttcggagctagccccctacccagatttagacccagagcatactggaggatatgtagccgacatggtaacgacggtaagcagagggtatctcctggatgaatgggggttcttcaggaactttgaaggtaaagttacctatgtattcaacggcatagactgcagcttctggagtgaagacttcctcgatggggatagagagacaagaaaagagaggcttctaaagaagttcgggcttgaaaaagggacgactttcatgtttattggaaggttcgatagagggcagaagggagtagatgttcttttaagggcaattgaaattctatcccagatttacaaagactttagctctcttaggtttataatagttggaaaaggggatccagaattggaaaattgggctagaagcttggctacttcatacaaaaacgttgtagttataacacagatgctgtctagagagtttgtgagggaactatatggttcagtagattttgtggttattccttcgtactttgagccctttggtttagttcaattagaagcaatgtgccttggagcaatacccatagcctcttcagtcggtgggttaagggataccataataagcctcgataaaagtccccacaatgcaactggcttgttagtacccccaggagatccttggacacttgcaaatgctatgataaagatggccgagctaaataagaccaacaaagagctaatagaggagctaagagaaaactgcaagaagagggcaagagaattttcatggaaaaaggcagctgaaagatacattaaagtttacaggggaaatgtggaaaggttctttgacttcatcagcaccggagtttag

SEQ ID NO: 4848 - protein, 451 aa, Pyrococcus furiosus
MKVLLLGFEYLPIKVGGLAEALTYIAKALASLGNETIVFTPAHGQFHGESIGKVRAFGEEVEIRVHLEKEGNLRVYRIGGGLLDSTDVYGPGWDGLLKKSVLFGKASVLLLNKLLEKEELPDVVHFHDWHTVFAGALIKKYFKIPAVFTIHRLNKAKVPAYYFHEANLSELAPYPDLDPEHTGGYVADMVTTVSRGYLLDEWGFFRNFEGKVTYVFNGIDCSFWSEDFLDGDRETRKERLLKKFGLEKGTTFMFIGRFDRGQKGVDVLLRAIEILSQIYKDFSSLRFIIVGKGDPELENWARSLATSYKNVVVITQMLSREFVRELYGSVDFVVIPSYFEPFGLVQLEAMCLGAIPIASSVGGLRDTIISLDKSPHNATGLLVPPGDPWTLANAMIKMAELNKTNKELIEELRENCKKRAREFSWKKAAERYIKVYRGNVERFFDFISTGV

SEQ ID NO: 4849 - DNA, 2112 bp, Oryza sativa
  CDS (61)..(1887)
agaattatttctagagcagaacttctaaccaccatttggcatttttgtaggtgtcactgaatggctagaacaatgggttcaacacctacctactgctcttaccaaacaaatggtgttggcgctttaaagcaatcacctcatatgcaattccaacaatcgtacaactatggagttaggttcctaaagagggataccctttctgtgcggattaacaaacatatggccaaaagaatagcaacaagcactggaatttgcactaagcctaggaggtctcacatgcctatagtatgctctgctggaatgacaataatttttattgcaactgaatgtcacccatggtgcaaaactggaggcctcggtgatgttctagggggactgccccctgctcttgctgcaatgggacatcgtgtcatgacaatagttcctcgttatgatcaatacaaagatgcatgggatacaaatgtccttgtcgaggtcaatattggtgacaggacagaaacagtgcgcttcttccactgctataaaaggggagttgaccgtgtttttgttgatcatcctatgtttcttgagaaggtatggggcaagactggaccaaaattatacggtcctaccactggagatgactaccgggacaaccagttgcggttctgccttttatgcctcgctgctttggaggctccaagggttctcaatctcaacaattctgaatatttctcgggaccatatggtgaaaatgttgtcttcgttgcaaatgactggcacactggagtcctgccatgctatctcaagagcatctatcaggcaaaaggaatgtatgtgaatgctaaggttgctttctgcattcacaatattgcctaccagggtagatttgccagagaagactttgaacttcttaatctaccggacagtttcctgccttcatttgattttattgatgggcattttaaacctgtagtaggtagaaagattaactggatgaaggcagggatcactgaatgtgatctggttatgacggttagtccacattatgtcaaagaactcgcttctggcccagataaaggtgttgaattggatggcatccttcgcacaaagccccttgaaactggaattgtcaatggcatggatgtttatgaatggaatccagcaacagatcagtacatcagcgtgaaatacgatgcaacaacggtaactgaagcaagggcactcaataaggaaatgctacaagctgaagttgggttgcctgtggactcgagcattcctttaatagtttttgttggtcgtcttgaagagcagaaagggtcagacatactaattgcagccattccagagttcgtggaggggaatgtccagataattgttcttggtacagggaagaagaaaatggaggaggaactgatactgctcgaagttaaatatccaaacaccgctagagggttagcaaaatttaatgtccctttagcgcatatgatgtttgctggggctgattttataattgttcctagtaggtttgagccatgtggtctcatccaattgcaagggatgagatatggagtggttcccatctgctcatctactggaggacttgtcgacacggttaaggagggcgtgaccggattccacatgggtttgttcaatgtcgagtgcgaaactgttgatccagtggacgtcacagcggttgcttcaactgtcaaacgggctctgaagcagtacaacacaccggcattccaagaaatggttcagaactgcatggctcaagacctatcttggaagggacctgcaaagaagtgggaggaggttcttcttgggttgggcgttgaggggagccagccaggcatcgagggtgaggaggtggcgccacttgccaaggaaaacgtggccactccctgaaattctccatgacggtgcctagcttgctggcttgtttaggtgacaggcagcctgataggatcccatggacttctgagctcgccaccggcaaagccactatttgtatccctgcaggcttctgccatttctctcgtctacttcacgtgtaatataatcgcagatgttacttagagatgtgggccagatggcatgcatttgcctgttaaaaaaaaaaaaaaaaaaaaa

SEQ ID NO: 4850 - protein, 608 aa, Oryza sativa
MARTMGSTPTYCSYQTNGVGALKQSPHMQFQQSYNYGVRFLKRDTLSVRINKHMAKRIATSTGICTKPRRSHMPIVCSAGMTIIFIATECHPWCKTGGLGDVLGGLPPALAAMGHRVMTIVPRYDQYKDAWDTNVLVEVNIGDRTETVRFFHCYKRGVDRVFVDHPMFLEKVWGKTGPKLYGPTTGDDYRDNQLRFCLLCLAALEAPRVLNLNNSEYFSGPYGENVVFVANDWHTGVLPCYLKSIYQAKGMYVNAKVAFCIHNIAYQGRFAREDFELLNLPDSFLPSFDFIDGHFKPVVGRKINWMKAGITECDLVMTVSPHYVKELASGPDKGVELDGILRTKPLETGIVNGMDVYEWNPATDQYISVKYDATTVTEARALNKEMLQAEVGLPVDSSIPLIVFVGRLEEQKGSDILIAAIPEFVEGNVQIIVLGTGKKKMEEELILLEVKYPNTARGLAKFNVPLAHMMFAGADFIIVPSRFEPCGLIQLQGMRYGVVPICSSTGGLVDTVKEGVTGFHMGLFNVECETVDPVDVTAVASTVKRALKQYNTPAFQEMVQNCMAQDLSWKGPAKKWEEVLLGLGVEGSQPGIEGEEVAPLAKENVATP

SEQ ID NO: 4851 - DNA, 2496 bp, Oryza sativa
  CDS (1)..(2496)
atgatacaaaacatggaaaagaatattctgctcctaaatcaagctcgtcttcaagcaattgaagatgttgacaaaattcttactgaaaaggaagctttgcagaaaaaggttgacactctagagatgaatttgtcaaaagcacttgcaaccaaagggaacataaatacagatatccctggtgatcatttagagaaatttacaaaagaaattttgatagaaagtgctctaagtggaggcaatccagcacatttgtgtgagtctccacttttcatggagctgactgttctaaaagaagagaatatgctacttaaggctgacgcacaatttcttaaagcaaagattgttgagtttgctgaaacagaggaattcctattcaaattggagaaagaaaggtcactgttagacgctacagttagggagctggaagctaggtttctagttgctcaaactgatatctggaaagttgtccctctgcaatatgatgtttggatggagaaagtagaaaatctgcaacacatgcttggatgtttgaaaaatcatgtagagaagtatgctgcattgttggatcagcatgatgatctgcatgacaagattgatgagctagaagcatcactaaaagaagggaaaacatctgagttttctccttatgttgttgaacttctgcaacagaagttgaaagcagcaaaaagccatcaccaagcaggccatcaagaaacaaacactcacattcaagtatatcagcagttaactgaggaatttcaagataacctaggtaaactaatagaagaaagtggcagactggagcattctgcaaatagtatgccatcagaattctggagtcacatcctgctcatgattgatggttggttccttgagcggaaaataccaaatactgatgcacgtatgctgagagaaatggcatggaagagagatgaccgtatctgtgaagcctactttgcttgcaagggtgcaaaagaaagtgatgttatggaaactttcctaaagctatcgttatcaggaaacagtttgcttaacaaaatggttcttcaggttggcggtctggcagatgtagttgctggtcttggcaaggcacttcagactaagggacatttagtagagattgttcttcccaaatacgactgtatgcaacttgaccagattactaatcttaaggttttagatgttgtcatacaatcctattttgatggaaatctattcagcaacaacgtgtggacaggaactgttgaaggtcttccagtctattttattgagccacagcatccttcaaaattcttctggagggcccaatactatggagagcatgacgattttaaacgttattcatactttagccgtgcagcactggaattactttaccaatctgggaagaaaattgatataatccactgccatgactggcaaactgcatttgttgcacctctatattgggatatatatgcaactcgaggcttcagctcagctagaatttgtttcacttgccacaacttcgaataccaaggtacagcacctgctcctgatttatcatattgcggccttgatgttgagcagttggatagaccagacaggatgcaagacaatgcacatggaagaataaatgttgccaagggtggaattgtttattccaatattgtgacaactgtatcaccaacatatgctttagaagtgcgctcagagggtggtcgtggtctccaagatacacttaaaatgcattccaggaaatttgtggggatacttaatggaatcgacacaggaacatggaacccttccacagacagatttcttgctgtgcaatatagtgctactgatcttcaggggaaagcagcaaacaaagcatttctcaggaagcagctagggctgtattctgaggatgcctctcaaccactggtagcctgcattacgaggctagttcctcaaaagggtctacatcttatcaggcatgcaatatacaaaacagctgagttaggaggacagtttgtactcctgggttcaagtccagttccacatattcagagggaatttgagggtgttgcagaccaattccagaagaataacaatattaggttaattctgaaatatgatgaagctttgtctcattgtatttatgcggcatctgacatgtttatcattccatcaatgtttgagccttgtggccttactcagatgatagctatgagatatggttctgtgccaattgttcgacaaactggtggattgtgtgatagtgtttttgattttgatgatgaaactatacctgtggagctgcggaatggctttacatttgctaggactgatgagcaggatctaagcagttgcttggaaagggcattcagctactacagcagaaaacctatggtttggaaacagttagtgcagaaggatatgcagattgatttcagctgggattctccagcttcacagtacgaaaacctttatcagagtgctgttgctcaggcaaggggagcggctcaaacataa

SEQ ID NO: 4852 - protein, 831 aa, Oryza sativa
MIQNMEKNILLLNQARLQAIEDVDKILTEKEALQKKVDTLEMNLSKALATKGNINTDIPGDHLEKFTKEILIESALSGGNPAHLCESPLFMELTVLKEENMLLKADAQFLKAKIVEFAETEEFLFKLEKERSLLDATVRELEARFLVAQTDIWKVVPLQYDVWMEKVENLQHMLGCLKNHVEKYAALLDQHDDLHDKIDELEASLKEGKTSEFSPYVVELLQQKLKAAKSHHQAGHQETNTHIQVYQQLTEEFQDNLGKLIEESGRLEHSANSMPSEFWSHILLMIDGWFLERKIPNTDARMLREMAWKRDDRICEAYFACKGAKESDVMETFLKLSLSGNSLLNKMVLQVGGLADVVAGLGKALQTKGHLVEIVLPKYDCMQLDQITNLKVLDVVIQSYFDGNLFSNNVWTGTVEGLPVYFIEPQHPSKFFWRAQYYGEHDDFKRYSYFSRAALELLYQSGKKIDIIHCHDWQTAFVAPLYWDIYATRGFSSARICFTCHNFEYQGTAPAPDLSYCGLDVEQLDRPDRMQDNAHGRINVAKGGIVYSNIVTTVSPTYALEVRSEGGRGLQDTLKMHSRKFVGILNGIDTGTWNPSTDRFLAVQYSATDLQGKAANKAFLRKQLGLYSEDASQPLVACITRLVPQKGLHLIRHAIYKTAELGGQFVLLGSSPVPHIQREFEGVADQFQKNNNIRLILKYDEALSHCIYAASDMFIIPSMFEPCGLTQMIAMRYGSVPIVRQTGGLCDSVFDFDDETIPVELRNGFTFARTDEQDLSSCLERAFSYYSRKPMVWKQLVQKDMQIDFSWDSPASQYENLYQSAVAQARGAAQT

SEQ ID NO: 4853 - DNA, 1443 bp, Rhizobium loti
  CDS (1)..(1443)
atgcaggttctgtcggtcacgcccgagatttttccgctgatcaagaccggtgggctggccgacgtgaccggcgctctgcccatcgcgctcgctgccaagggcgtaaccatgcgcacgctcattccaggctttcccgtggtgatggctgctttcaagaaaaagaaagccgtctaccaatatccgctgttgcagggcggcaaggcttccgtccacgccgtgcagattgctgggctcgacctgttcgtgctcgacgcgccgcatctgttcgaccgcccgggcggcccctacggcaatgcttcggggcggactgccggacaattgcggcgcttcgcggcgctgagccaggttggtggcgatatcgccggcggcgccatctccggctatcagcctgacatcgtccacgcccatgactggcagtcggcgatgacgctggcctatatgcgctacggcaaggcggtcggcgttccgtcgatgatgaccgtccacaatctcgccttccagggccagttcggcgccggcatcttcggcgaactcggcctgccggctgttgcgatggcgctcgacggcgtcgaatattatggcggcgtcggcttcctaaaggccggtctgcaggccgcctgggcgatcaccacggtcagcccgacctatgcgcaggagatccggtcggcggagttcggcatgggcctcgacggcctgatcaacatgcgcgccagcgatctccatggcatcgtcaacggcatcgacaccgctatctgggatccgcaaacggacaagcatctggtgtcgaactataccgccgcgacgctcgaggcacgggcgcccaacagggccgccgtggaggaacgcttcggcctcgaccgcgacgacagcccgatcgtctgcgtcatcagccggctgacctggcagaagggcatggatattttggctacagtgatcgacggcgtcgtcgcgaccggcgcgcggctcgccatactgggctcgggcgacgccggcctcgaaggcgcgctgcttgcagccgccgcgcgccaccgtggccgcatcggcgtggtcatcggctacgacgaggggctgtcgcacaccatgcagggcggttgcgacgccatcgtcatcccgtcgcgcttcgaaccctgcggactgacgcagctttacggcctgcgctacggctgcgtgccggtggtcgcccgcactggcggcctcgccgacaccatcatcgacgccaacgaagcggcgatggcggccggcgtggcgacagggttccagttcgctcccaacaatggcggcgcgatgctgcacgccattgcccggctggccgacgctcacgcgaatcccgcggctttcgaaaccatccagcgtcagggcatgaagacggatgtgtcgtgggatcgaagcgccgaaaaatatgttggactctatcgcctgctgctttcgaaaagggttgcctga

SEQ ID NO: 4854 - protein, 480 aa, Rhizobium loti
MQVLSVTPEIFPLIKTGGLADVTGALPIALAAKGVTMRTLIPGFPVVMAAFKKKKAVYQYPLLQGGKASVHAVQIAGLDLFVLDAPHLFDRPGGPYGNASGRTAGQLRRFAALSQVGGDIAGGAISGYQPDIVHAHDWQSAMTLAYMRYGKAVGVPSMMTVHNLAFQGQFGAGIFGELGLPAVAMALDGVEYYGGVGFLKAGLQAAWAITTVSPTYAQEIRSAEFGMGLDGLINMRASDLHGIVNGIDTAIWDPQTDKHLVSNYTAATLEARAPNRAAVEERFGLDRDDSPIVCVISRLTWQKGMDILATVIDGVVATGARLAILGSGDAGLEGALLAAAARHRGRIGVVIGYDEGLSHTMQGGCDAIVIPSRFEPCGLTQLYGLRYGCVPVVARTGGLADTIIDANEAAMAAGVATGFQFAPNNGGAMLHAIARLADAHANPAAFETIQRQGMKTDVSWDRSAEKYVGLYRLLLSKRVA

SEQ ID NO: 4855 - DNA, 2100 bp, Pisum sativum
  CDS (6)..(1847)
caaaaatggcaacagtgactgcttcaagtaacatagtatccagaacctctcatgtcaatttaccaactgtttcatgtgagtttaaaacagcaccaatgagacttggttctataaggaaagccaatactcataatggactcagagttttgaactcgttggacgagttattaaataggacgccgattaaaatgaagggagtgcaatcgaggaagaagggtgtccagagaaagaatgttaggcctaaaggtattatagtttgtggcatgaatttgatctttgttggaactgaggttgctccgtggagtaaaactggtggtttaggcgatgttcttggaggtcttccgccagcattatcagctaatgggcacagagttatgaccgtcactccgcgttatgaccaatacaaagatgcatgggatacaaatgtaacaatcgaggtaaaagtaggagatagaacagaaaaagtccgcttcttccattgctttaaacgaggagttgatcgcgtttttgtagatcaccctatatttcttgaaaaggtttgggggaaaactggaacaaaactttatggccctgccgcaggagacgattaccaagacaatcaactacgttttagcatcttttgtcaggcagctctggaagcagcgagagttctaaatcttaagagcaataaatatttctcaggaccatatggtgaagatgtcattttcgttgctaatgattggcacactgcccttatctcatgctacatgaaatccatgtaccaatcaattggcatctttaggaatgccaaagttgttttttgtatccacaacattgcttaccaaggaagatttgcatttaccgactattcacttctcaatctccctgaccaatttaaaagctcctttgacttccttgacgggcatgttaaaccaattgttggaagaaaaatcaattggatgaaagctggaattatagaatctcatcgagttttaactgttagtccatactatgcacaagaactagtgtcaggcccagataaaggagttgagttggacaacattcttcgccgagttggtgttactggaatcgtaaatggcatggatgttcaagagtggaatccatccaccgacaaatatataagtatcaaatacgatgcctcaacagtattggaaggaaaagctcttctgaaagaagaactgcaagcagaagttggattgccggttgacaaaaatgttcctctcattgctttcatcggtaggcttgaagagcaaaaaggttctgatattcttgtagaagccattcctcaatttataaaggagaatgttcaaatagtcgcactaggaacgggaaaaaaagaaatggaaaagcaacttcagcaacttgaaatatcataccctgacaaggccagaggagttgcgaaattcaatgttcccctagctcatatgatgattgcaggagctgattttatcttgattccaagtagatttgagccttgcggtctcattcagttacaagctatgcgctatggaacggtacctattgttgcctcgacgggtggattagtggacacagtcaaagaaggttttactggattccacatgggttccttcaatgtcaaatgtgatgctgtggatcctgttgatgtggatgctataccaaaaactgtcacaaaggcccttggagtctatggaacttcagcttttgcagaaatgatcaagaattgcatggctcaagaactttcatggaagggacctgctaagaagtgggaggaagtgctgctaaatttgggagttcctgacagtgaacctggaattgatggacaagaaattgctccacaggcaaaggaaaatgtggcaactccatgattaaaataatgatgtgatggaagcttcttctagtttccatctcttgaagtttcatggaacttcacccgagtgatggatcgattattagtgcattttttccaaggagtttaaatctgtaattataagtgatcttggacaagtttactattattttgccttaaaatgatagattagcattccttttaaaaaaaaaaaaaaaaaaaaaaaaaaaaaaaaaaaaaaaaaaaaaaaaaaaaaaaaaaaaaaaaaaaaa

SEQ ID NO: 4856 - protein, 613 aa, Pisum sativum
MATVTASSNIVSRTSHVNLPTVSCEFKTAPMRLGSIRKANTHNGLRVLNSLDELLNRTPIKMKGVQSRKKGVQRKNVRPKGIIVCGMNLIFVGTEVAPWSKTGGLGDVLGGLPPALSANGHRVMTVTPRYDQYKDAWDTNVTIEVKVGDRTEKVRFFHCFKRGVDRVFVDHPIFLEKVWGKTGTKLYGPAAGDDYQDNQLRFSIFCQAALEAARVLNLKSNKYFSGPYGEDVIFVANDWHTALISCYMKSMYQSIGIFRNAKVVFCIHNIAYQGRFAFTDYSLLNLPDQFKSSFDFLDGHVKPIVGRKINWMKAGIIESHRVLTVSPYYAQELVSGPDKGVELDNILRRVGVTGIVNGMDVQEWNPSTDKYISIKYDASTVLEGKALLKEELQAEVGLPVDKNVPLIAFIGRLEEQKGSDILVEAIPQFIKENVQIVALGTGKKEMEKQLQQLEISYPDKARGVAKFNVPLAHMMIAGADFILIPSRFEPCGLIQLQAMRYGTVPIVASTGGLVDTVKEGFTGFHMGSFNVKCDAVDPVDVDAIPKTVTKALGVYGTSAFAEMIKNCMAQELSWKGPAKKWEEVLLNLGVPDSEPGIDGQEIAPQAKENVATP

SEQ ID NO: 4857 - DNA, 3386 bp, Triticum aestivum
  CDS (251)..(2995)
gccgtttgcccgacgaatggcaccgtgccacgcccacggccctcctccgcctccgcccccgcctcgcccgcgcgcggagcacgagacacgccacgcgctggcccccggccaccgccaccgccaccagtccaccaccaccagtccaccaccaccactcttcagccccactccactccccgccgctttccggcccgccgcccgcttcaagctcccctcgccccaccagtcgccctgcctctccctattccccatggcgtgctccgcggcggcgggcgtcgaggcgaccgccctcctgtccccgcgctgccccgccccttccccgcccgacggccgctcccgccgccgcctcgccctcgcttcccgcacgcgccaccgcagcctcagggcggccgcgcagcgccctcacaagagcgcaaccggcgccgaccccctttataacaacagggccaatgtgcggagcgacgaggcgtcggtttccgctgaaaaagaacggcaaaggaaatacaacgatggagatggcatatcaaaccttaagctggaagatttggtaggaatgatacagaacaccgagaagaatatacttcttttgaatcaagcccgtcttcaggcaatggaacacgctgataaagttcttaaagaaaaggaagccttgcagagaaagataaacattttagagacgaggttgtcagaaacagatgaacaacataagctttcaagtgaagggaatttcagtgactctccactagcattggagcttggtattctaaaggaagagaacattctactgaaggaggacatagaatttttcaaaacaaagcttatagaggttgccgagatagaggagggtatattcaaattggagaaggagcatgctcttttagatgcttcccttagggagctggagtctaggtttatagccgcccaagcagatacgatgaaacttggtcctagggatgcctggtgggagaaagtagaaaaattggaagacttgcttgagaccacagcaaaccaagtagagcatgctgctgtgatattggaccacaatcatgatctgcaggataggcttgacaatttagaggcatcactgcaagcagcaaatatttcaaagttctcttgttctcttgttgatcttttgcagcaaaaggtcaaattggtagaagaccgcttccaagcatgtaacagcgaaatgcattctcagattgaactgtacgagcattcaatagtggaatttcatgatactcttagcaaactaatagaggaaagtgagaaaagatcactggagaattttacaggaaacatgccttcggaactatggagcaaaatttcccttttaattgatggatggttactggagaagaaaatatcttacaatgacgcaagtatgttgcgagaaatggttcagaaaagggacagtcgtcttcgggaagcatacttgtcatacagaggtaccgaaaacagggaagttatggacaacttacttaagatggcattaccaggaaccagttctggtttgcacatcgctcacatagcagcagagatggctcctgtcgcgaaggttggtggcctggcagatgtgatatctggtcttgggaaggcacttcagaaaaaaggccatctagtagagatcattcttcccaaatacgactgcatgcaggttgaccaagttagcaatctaaaggttttagatgttcttgtgcagtcctactttgaaggaaatatgttcaacaacaaaatttggaccgggactgttgaaggcctacccgtgtactttattgagccacagcatccagcgatgttcttttcgagggctcagtactatggagagcatgatgacttcaaacgtttttcatacttcagccgtgcggcactagaattactttatcaatctgggaagaaagttgatataatccactgccatgactggcaaactgcatttgttgcacctctttattgggatgtatatgcaaatctaggcttcaactcagctagaatttgcttcacctgtcataattttgaataccaaggaactgctccagctcgtgatttagcatggtgtggtcttgatgttgagcacctagacagaccagacaggatgcgggacaattcgcatggcagaataaatgctgttaagggagcagttgtgtattcaaacatcgtgacaactgtctcgccaacatatgcactagaggttcgctcagagggtgggcgtggactccaagatacacttaaagtacattccaggaaatttcttgggatacttaatggaatcgacacagatacatggaacccttgcacagataggtatctcaaggtccagtataatgctaaggatctccagggaaaggcagccaacaaagcagccctcagagagcaactaaacctggcttctgcatatccttcacaaccactggttggttgcattaccaggctggttgctcagaagggtgtacatcttatcaggcatgcaatatacaaaacagctgaattaggaggacagtttgtccttctgggttcaagtccagtaccagaaattcagagggagtttgaaggtattgcagaccattttcagaacaacaacaatatccggctgattttgaagtatgatgatgcgctgtctcattgcatatatgctgcgtctgacatgttcattgttccctctatatttgagccatgtggcctcactcagatgatagccatgagatatggttctgtgccaatcgttcggaaaactggtgggctgaatgacagtgtctttgacttcgatgacgaaacaatacccatggaggtgcggaacggctttacatttgtcaaggccgacgagcagggcctaagcagcgcgatggagagggcgttcaactgctacacgaggaagcccgaggtgtggaaacagcttgtgcagaaagacatgacgatcgatttcagctgggacacctcggcttcgcagtacgaggacatctaccagaaggcggtggctcgagcgagggcagtggcgtgagcacacacacacacggtagttggttccctgatgcctctctcccctgccctgccctcatgatacaaacggcactggacgaaatcgagggatcatggaaacagaatcatatagcaagctccatgctctcggcgcgcatttccggtaagggtgtgacggtgtatcgctggttatatgcgctgtttattgaaggcagaacgcgagctaaaaatggagtagctaccgtgaaccctcaagatcgtagtatgcgcgctgttgttggcataatattggtgtaaattgtagtaggctgtatattttcttgaggggttgcaacggagctgtatgcgtgcagtgcaggctgcagagtcgcacgtatgtactgtattatgcagaaaaaaaaaaaaaaaaaaaa

SEQ ID NO: 4858 - protein, 914 aa, Triticum aestivum
MACSAAAGVEATALLSPRCPAPSPPDGRSRRRLALASRTRHRSLRAAAQRPHKSATGADPLYNNRANVRSDEASVSAEKERQRKYNDGDGISNLKLEDLVGMIQNTEKNILLLNQARLQAMEHADKVLKEKEALQRKINILETRLSETDEQHKLSSEGNFSDSPLALELGILKEENILLKEDIEFFKTKLIEVAEIEEGIFKLEKEHALLDASLRELESRFIAAQADTMKLGPRDAWWEKVEKLEDLLETTANQVEHAAVILDHNHDLQDRLDNLEASLQAANISKFSCSLVDLLQQKVKLVEDRFQACNSEMHSQIELYEHSIVEFHDTLSKLIEESEKRSLENFTGNMPSELWSKISLLIDGWLLEKKISYNDASMLREMVQKRDSRLREAYLSYRGTENREVMDNLLKMALPGTSSGLHIAHIAAEMAPVAKVGGLADVISGLGKALQKKGHLVEIILPKYDCMQVDQVSNLKVLDVLVQSYFEGNMFNNKIWTGTVEGLPVYFIEPQHPAMFFSRAQYYGEHDDFKRFSYFSRAALELLYQSGKKVDIIHCHDWQTAFVAPLYWDVYANLGFNSARICFTCHNFEYQGTAPARDLAWCGLDVEHLDRPDRMRDNSHGRINAVKGAVVYSNIVTTVSPTYALEVRSEGGRGLQDTLKVHSRKFLGILNGIDTDTWNPCTDRYLKVQYNAKDLQGKAANKAALREQLNLASAYPSQPLVGCITRLVAQKGVHLIRHAIYKTAELGGQFVLLGSSPVPEIQREFEGIADHFQNNNNIRLILKYDDALSHCIYAASDMFIVPSIFEPCGLTQMIAMRYGSVPIVRKTGGLNDSVFDFDDETIPMEVRNGFTFVKADEQGLSSAMERAFNCYTRKPEVWKQLVQKDMTIDFSWDTSASQYEDIYQKAVARARAVA

SEQ ID NO: 4859 - DNA, 2919 bp, Oryza sativa
  CDS (165)..(2597)
ggtgccctcctcgccgtcgtcgctcgctgcccatttcatcccccgcacggcacgcgcgggacgaaagcaaagcacgcgcacacactcaaacccgcgcctcctccgctctcgtccgtcgcttcggttcggttccggctcgatcggggaggttcctcggggcgaccatgtcgtcggccgtcgtcgcgtcatccaccacgttcctcgtcgcgctcgcctcttcggcgtcacggggagggcccaggagggggagggtggtgggcgtggccgcgccgccggccctgctttacgacggccgcgccggaaggctagccctacgggcgccgcctccgccccggcctcggcctcggcgtcgggatgcgggcgtggtgcgccgcgcggatgatggggagaacgaggcggcggtggagcgggcgggtgaggacgacgacgaggaggaggagttctcttcgggcgcgtggcagccgccccgctcgcgtcgcggcggcgtcggcaaggtcttgaagcggaggggcaccgtcccgcccgtcggccggtacggctccggcggtgatgcggcgagagtgcgcggggcggccgcgccggcgccggcgccgacacaggacgccgcctcaagtaagaacggagcgcttctcagcggccgcgacgacgacacacctgcctcacggaacggatcggtcgttaccggcgccgacaagcctgccgccgccacgccgccggtgaccataacgaagctcccagcgccggactcccccgtgatccttccatccgtagacaagccgcagccggagttcgtcatcccagacgcgacggcgccggcgccgccaccgcccggttcaaatcccaggtcgtccgctcctctccccaagcctgacaattcggaatttgcagaggataagagcgcaaaagttgttgagagtgctccgaagccaaaggcgactagatcttcccctattcctgcggtagaagaggagacgtgggatttcaagaaatattttgatctgaacgaaccggacgccgcggaggatggcgatgacgatgatgactgggctgattcagatgcgtcagattctgagatcgaccaggatgacgattcgggccctttggctggggagaatgtcatgaacgtgatcgtggtggctgctgaatgttctccctggtgcaaaacaggtgggcttggagatgttgcaggtgctttacccaaagctttggcgaggagaggacatcgtgttatggttgtggtaccaaggtacggtgattacgcggaagcccaggatgtaggaatcaggaaatactacaaggctgctggacaggatctggaagtgaaatatttccatgcatttatcgatggagttgattttgtgttcattgacgctcctctcttccgtcaccgtcaggatgacatctatggggggaacagacaggaaatcatgaagcgcatgattctgttttgtaaggctgctgttgaggttccttggcacgttccatgcggtggtgtgccctatggggatggcaacttggtgttccttgcaaacgattggcacactgcactcctgcctgtttatctgaaggcatattacagagacaatggcatgatgcagtacactcgctctgtccttgtgatacataatatcgcttaccagggccgtggcccagtagatgaattcccctacatggaattgccggagcactacctggatcacttcaagctgtacgaccccgtcggcggcgagcacgccaacatcttcggcgcgggcctgaagatggcggaccgggtggtgaccgtgagccccggctacctctgggagctgaagacgacggagggcggctggggcctccacgacatcatacgggagaacgactggaagatgaacggcatcgtgaacggcatcgactaccgggagtggaacccggaggtggacgtgcacctgcagtccgacggctacgccaactacaccgtggcctcgctggactccagcaagccgcggtgcaaggcggcgctgcagcgcgagctggggctggaggtgcgcgacgacgtgccgctgatcgggttcatcgggcggctcgacgggcagaaaggtgtggacatcatcggcgacgcgatgccgtggatcgccgggcaggacgtgcagctggtgctgctgggctccggccgccgcgacctggaggtgatgctgcagcggttcgaggcgcagcacaacagcaaggtgcgcgggtgggtggggttctcggtgaagatggcgcaccggatcacggcgggcgccgacgtgctggtcatgccgtcgcggttcgagccgtgcggcctcaaccagctctacgccatggcgtacggcaccgtccccgtcgtgcacgccgtcggcgggctgagggacacaatgtcggcgttcgacccgttcgaggacaccggcctcgggtggacgttcgaccgcgccgagccgcacaagctcatcgaggcgctcggccactgcctcgagacgtaccgcaagtacaaggagagctggagggggctccaggtgcgcggcatgtcgcaggacctcagctgggaccacgccgccgagctctacgaggaggtccttgtcaaggccaagtaccaatggtgaagagaccatgtccgcccgcggtctccgcctgcgcgttcggcagctatagctatagcctccctgaagaagcttggcgctgctgtggaggtgcgactcggtggcggtgtggcgccggcgccggcgcttgcaggggaggtgtttgtgctgaccgagctgtgcgttgaggtgcgcaaattagcttccggtttgtgtgtttatggcgaggcatggtggagttgagggagtattaagctttgtttcagatgcatcatgcatgcgtaataggatgttgtatttaataatgtgtttgttatgtccattgatgcgatgttacttcttcatt

SEQ ID NO: 4860 - protein, 810 aa, Oryza sativa
MSSAVVASSTTFLVALASSASRGGPRRGRVVGVAAPPALLYDGRAGRLALRAPPPPRPRPRRRDAGVVRRADDGENEAAVERAGEDDDEEEEFSSGAWQPPRSRRGGVGKVLKRRGTVPPVGRYGSGGDAARVRGAAAPAPAPTQDAASSKNGALLSGRDDDTPASRNGSVVTGADKPAAATPPVTITKLPAPDSPVILPSVDKPQPEFVIPDATAPAPPPPGSNPRSSAPLPKPDNSEFAEDKSAKVVESAPKPKATRSSPIPAVEEETWDFKKYFDLNEPDAAEDGDDDDDWADSDASDSEIDQDDDSGPLAGENVMNVIVVAAECSPWCKTGGLGDVAGALPKALARRGHRVMVVVPRYGDYAEAQDVGIRKYYKAAGQDLEVKYFHAFIDGVDFVFIDAPLFRHRQDDIYGGNRQEIMKRMILFCKAAVEVPWHVPCGGVPYGDGNLVFLANDWHTALLPVYLKAYYRDNGMMQYTRSVLVIHNIAYQGRGPVDEFPYMELPEHYLDHFKLYDPVGGEHANIFGAGLKMADRVVTVSPGYLWELKTTEGGWGLHDIIRENDWKMNGIVNGIDYREWNPEVDVHLQSDGYANYTVASLDSSKPRCKAALQRELGLEVRDDVPLIGFIGRLDGQKGVDIIGDAMPWIAGQDVQLVLLGSGRRDLEVMLQRFEAQHNSKVRGWVGFSVKMAHRITAGADVLVMPSRFEPCGLNQLYAMAYGTVPVVHAVGGLRDTMSAFDPFEDTGLGWTFDRAEPHKLIEALGHCLETYRKYKESWRGLQVRGMSQDLSWDHAAELYEEVLVKAKYQW

SEQ ID NO: 4861 - DNA, 2394 bp, Oryza sativa
  CDS (34)..(2118)
ggaggaggaggagcggcggcggcggcggatcctatgtcgggggcaatcgcttcctcgccggcggctactctcttcctcgctggctcctcctcctcttcgccgcggcgcaggcggagcagggtgagcggggtttggtggcacttgtatggtggcacggggctgcggttgcattgggagcggcggggtttggttcgggacggagccgtcgtgtgctcggcgtcggccgccggtggtgaggatggcgtcgcgaaggcgaagacgaagtcagcggggagctcgaaggcggtcgctgtgcagggcagcacggccaaggctgatcatgttgaggattcagtttcatcacccaaatacgtgaaacctgccgttgcgaagcaaaatggagaggttgtgagcagagctaccaaatctgatgcaccagtgtctaaacccaaagttgacccgtcagttcctgcttccaaggctgaagctgatggtaatgcacaagctgtggaatcgaaggctgcactggacaagaaggaagacgtcggtgttgctgaaccgttggaagctaaggctgatgctggtggagatgcaggtgcagtaagctctgcagatgatagtgagaacaaggaatctggtccattggcagggccaaatgtgatgaatgtcattgtggtggcttctgaatgttctcctttctgtaaaacaggtggtcttggagatgttgtgggtgctttgcctaaggctctggcaagaagaggacatcgtgttatggttgtgataccaagatacggagaatatgcagaagccaaggatctaggtgtccgcaaacgttacagggtagctggacaggattcagaagtgagttattttcatgcttttatcgatggtgttgattttgtgtttctagaggcccctccctttcgacaccggcacaatgatatttatggaggagaaagatttgatgttttgaagcgtatgattttgttctgcaaagctgctgttgaggttccttggtttgctccatgtggtggttccatctacggtgatggcaatttagtcttcattgcaaatgattggcatactgcacttttacccgtatgtttgaaggcatattaccgagataatggcttgatgcagtatactcgctctgttcttgtgatacacaacattgctcatcagggtcgcggccctgtagatgacttcgccacgatggacttgcccgagcactacatcgatcatttcagactgtacgaccccgtcggcggtgagcacagcaacgtgttcgccgctggcctgaagatggctgaccgcgcggtcaccgtcagccatggctatctgtgggagatcaagacaatggacggtggctggggcctccacgagataataaaccacaacgactggaagctgcagggcatcgtgaatggcatcgacatggccgaatggaaccccgaggtggacgagcacctgcagtccgacggctacgccaactacacgttcgagacgctggacaccggcaagaaacagtgcaaggaggcgctgcagcggcagctgggcctgcaggtccgcgacgacgtgccgctgatcgggttcatcgggcggctcgaccaccagaagggcgtggacatcatcggcgacgcgatgccgtggatcgccgggcaggacgtgcaggtggtgatgctgggcacggggcggccggacctggaggagatgctgcggcggttcgagtcggagcacaacgacaaggtgcgcgggtgggtggggttctcggtgcagctggcgcaccggatcacggcgggcgccgacgtcctcctgatgccgtcgcggttcgagccgtgcgggctgaaccagctgtacgccatggcgtacagcaccgtgcccgtggtgcacgccgtgggcgggctccgcgacacggtggcgccgttcgacccgttcgccgacacggggctcgggtggacgttcgaccgcgccgaggcgaaccggatgatcgacgcgctcgggcactgcctcaacacgtaccggaactacaaggagagctggagggggctccaggcgcgcggcatggcgcaggacctcagctgggaccacgccgccgagctctacgaggacgtcctcgtcaaggccaagtaccagtggtgagctggtggtatttttcgcgacgcctctggatcccgccgtggatgggcgcgctttttctctagggcggctctgcgtcggagacgctcagacgcatcgcgcgcgttcgcgcccacacgatgactggcacgctgctgctgagacggcggcacgcgatgccatcatgccaccggacggtaggagcaacggtggaagtgaactgtactactggtgctacactgctactacatgagatctgctcttattggtcacgtactcacgttcacgctgaattaccga

SEQ ID NO: 4862 - protein, 694 aa, Oryza sativa
MSGAIASSPAATLFLAGSSSSSPRRRRSRVSGVWWHLYGGTGLRLHWERRGLVRDGAVVCSASAAGGEDGVAKAKTKSAGSSKAVAVQGSTAKADHVEDSVSSPKYVKPAVAKQNGEVVSRATKSDAPVSKPKVDPSVPASKAEADGNAQAVESKAALDKKEDVGVAEPLEAKADAGGDAGAVSSADDSENKESGPLAGPNVMNVIVVASECSPFCKTGGLGDVVGALPKALARRGHRVMVVIPRYGEYAEAKDLGVRKRYRVAGQDSEVSYFHAFIDGVDFVFLEAPPFRHRHNDIYGGERFDVLKRMILFCKAAVEVPWFAPCGGSIYGDGNLVFIANDWHTALLPVCLKAYYRDNGLMQYTRSVLVIHNIAHQGRGPVDDFATMDLPEHYIDHFRLYDPVGGEHSNVFAAGLKMADRAVTVSHGYLWEIKTMDGGWGLHEIINHNDWKLQGIVNGIDMAEWNPEVDEHLQSDGYANYTFETLDTGKKQCKEALQRQLGLQVRDDVPLIGFIGRLDHQKGVDIIGDAMPWIAGQDVQVVMLGTGRPDLEEMLRRFESEHNDKVRGWVGFSVQLAHRITAGADVLLMPSRFEPCGLNQLYAMAYSTVPVVHAVGGLRDTVAPFDPFADTGLGWTFDRAEANRMIDALGHCLNTYRNYKESWRGLQARGMAQDLSWDHAAELYEDVLVKAKYQW

SEQ ID NO: 4863 - DNA, 2903 bp, Oryza sativa
  CDS (86)..(2335)
ccgcgggaggagggctcgccgattccactacttcactccagtaggtggccaacgcgcggggtgggagcagcagcgacgacctccaatggcggcggcggccgtctcctccctcctcgccccttcgggatcctgctactcccccggatgccacagctgctggggtcccgggcccggaggcgggcggcgcctaccttccccgcgccggcgcccgattaccgccgcggctcgccctacttgggcagtgccgaggaggagcaggttggagtgggggcgtgtggaggctcagaattcgggcgctcgcaccagctgccgagcagcactgcaatggctatcatccacggcaaggtcccatgtgaatgttggttatgggtcgccgctggtgttcccaggtttgaccaaaccggggtcaagcaggtgtctatgcgttgttggaatggtcggcaatgcagggaatcaagttggtgacgatagtgatgatggaatcaaggttaccaatgagaagcttcgtgctgttatccgcaagagcaaagaggtgttggagatccatcggaatctacttgagaagatatcggcatcagaaaggaagaagatcacttcaattatagaggacagttccatttataatgagcaagatccatttggtcaaagagatagttctttttatcatcttgatgaagttccagacgatgatgaatttagctatgacctacagatgtaccttgatagacatccagatcaatctgaagttgttgcaactcaggattatgaggcacaactaagtcaaataagtgaaatgggacagtcagttgctgagggcacaagtgatgatccatctgcttcagcttctgtagatcttatcaatatcatattggtagcggcggagtgtgctccttggtccaaaacaggtgggcttggagatgttgctggagctttgccaaaggctttggctaggagaggtcaccgtgtcatggtagtagtgccaatgtataaaaactacgcagaacctcaacagctaggagagccaaggagataccaggttgcagggcaggatatggaggtaatttattatcatgcatacatagatggtgtggattttgttttcattgacaatcctatcttccaccacgttgagaatgacatttatggcggagaccgaacagacatcttaaaacggatggttttgttgtgcaaagcggctatagaggttccatggtatgttccttgtggtggctactgctacggtgatggaaatcttgtgttccttgcaaatgattggcatactgcactactgcctgtttatttgaaggcatactatcatgacaatggtttcatgatatatgcccgttctgttcttgtcatacacaatatagcacatcagggtcgtggcccattagatgacttcagttatctggatttgccagttgattacatggatcttttcaaactttatgacccatttgggggtgatcacctaaacatatttgcagctggtattaaagctgctgaccgtttgcttactgtaagccatggttatgcatgggagctcaaaacagctgaaggtggttggggtcttcatgggatcatcaatgaaagcgattggaaatttcagggcattgtaaatggcattgatacaactgattggaatcctaggtgtgatatccacctaaaatctgatgggtacaccaattattctctagaaacagttcaggcaggtaaacagcaatgtaaggcagcattgcagaaggaacttggtctcccagttcgtggcgatgttcctgtcattgctttcattggacggctagaccatcaaaaaggtgtagaccttatagcagaagcaatgccatggattgctggccaagatgtacagttaataatgttgggcactggacggcaagacctcgaagatacattgaggaggcttgagagccaacattacgatagagttagggggtgggttggtttttccatcaggttggctcatcgaatgacagcaggggctgatatactattgatgccatcaaggtttgagccatgtggattgaatcagctctatgccatgatgtatgggactgtcccagtagtccatgcggtcggtggtcttcgagacaccgttgagcactacaatccctacgaggagtccggacttggttggacttttgaaaaggcagaggcaaacagactgattgatgctctagggcactgcttgaacacgtacaggaactacaggactagttgggagggactccaaaagagagggatgatgcaagatctaagttgggataatgctgctaagctgtatgaggaagtcctcctagctgccaagtatcaatggtgatcagtccaagaagacctcgacggttgttcagtcattcatgaccgaaatgcctttttctcgtgtcagctgctcagatgcggccaccatctagttccatggcttacatcttcctgtgatttggatgaacagagtttttttgtcagatctgacatcattttcaagaaggcacatgatgaacctacttcccaggtgaatacagcagcggacgatgcctttgttggaaggtggcaaaacacatggaagattcagccgtctgccagcatgcacctctgtcctaaggagaggctccaagccccattgtgcgctctggagaggctccaaaccaccattgttcgcccctgggtaggttgttgagctcggttagatgcttttagtacagtagaatagcagatactagcggatagactagttgatatttcccctatgcaccgagtggttcggttgtaccttatttttttcttggctcttgttgtccagttcttcgatctttagacgattagcgtcccgggatttcccagatgacattgacattgatactagtgggaatttcccctgcaaatttactgtc

SEQ ID NO: 4864 - protein, 749 aa, Oryza sativa
MAAAAVSSLLAPSGSCYSPGCHSCWGPGPGGGRRLPSPRRRPITAAARPTWAVPRRSRLEWGRVEAQNSGARTSCRAALQWLSSTARSHVNVGYGSPLVFPGLTKPGSSRCLCVVGMVGNAGNQVGDDSDDGIKVTNEKLRAVIRKSKEVLEIHRNLLEKISASERKKITSIIEDSSIYNEQDPFGQRDSSFYHLDEVPDDDEFSYDLQMYLDRHPDQSEVVATQDYEAQLSQISEMGQSVAEGTSDDPSASASVDLINIILVAAECAPWSKTGGLGDVAGALPKALARRGHRVMVVVPMYKNYAEPQQLGEPRRYQVAGQDMEVIYYHAYIDGVDFVFIDNPIFHHVENDIYGGDRTDILKRMVLLCKAAIEVPWYVPCGGYCYGDGNLVFLANDWHTALLPVYLKAYYHDNGFMIYARSVLVIHNIAHQGRGPLDDFSYLDLPVDYMDLFKLYDPFGGDHLNIFAAGIKAADRLLTVSHGYAWELKTAEGGWGLHGIINESDWKFQGIVNGIDTTDWNPRCDIHLKSDGYTNYSLETVQAGKQQCKAALQKELGLPVRGDVPVIAFIGRLDHQKGVDLIAEAMPWIAGQDVQLIMLGTGRQDLEDTLRRLESQHYDRVRGWVGFSIRLAHRMTAGADILLMPSRFEPCGLNQLYAMMYGTVPVVHAVGGLRDTVEHYNPYEESGLGWTFEKAEANRLIDALGHCLNTYRNYRTSWEGLQKRGMMQDLSWDNAAKLYEEVLLAAKYQW

SEQ ID NO: 4865 - DNA, 1719 bp, Sulfolobus tokodaii
  CDS (1)..(1719)
atggctgaaatgaaaagaatagaagcaatttggtttccagaagaaataaaaagcgtctggatgataacagtagaattatcaaatgttgctagtgttggtggattggggaatgcagtttataatatggctaagggattagctgagcaaggaataaacgtaactgtaataatgcctagtcatggtcgacacttaaatgaccaatatagatcagcgttgaagctaagagaactttctttaacagcatatggagatagaattggaatggacggaaagaggtatccttacgctttaggttttgaagaagggagattagacggatttaatgtgattttagttaaaggacttgattataatactggagtattaattgataattggaacgtttataataacataatggaaaaatcagcattattagctagaggagttcaagcttattctgtcttttctataccgggcaatataccttcggtaattcatgctcatgattggcatgctgtactagctggagtaatggcaaaacaaacttttgagactaggaaagttgtagttccattagtgtttacaatacacttacttaacaaagttggagctccttggcattacgcttcagaagattgggctggattaagcaattgccctcattatatctggcaagttgtttcccataaattatatactacaagacaagtttgggatgagttgtcacaagggttgatagaaaaatttggagcatgggaagctgatgtagtaactacagtaagtaaaagttatcttacatacgacgtttacaattttataggaaactggatagagaacaaaagttgtgtaacttataacggaaccgattggagtattgatgaagttaaaaattacgcaagaaagattttcaatacagaggacagagttgaggtaaggagaagattatataatatgctcgagaatttaagattaattccagaggattatactactggaaacattttatggaataataggtttaggattgggattaaagatgattggacatacacaagattagatgatggtcctttagtcctatttgctggaagacttgtgtatcagaaaggagttgacttacttataagagcttttagggaggtagttaacaagataccaaatgctagattagtaattttaggtctaccttcaggtgattatggcttactctatgacttagtaaataaggcttctgaaattggtggtaacgttaggatcatcgcgtcttattccatgcccaaggatatttacaaattattttactatgctgcatcagtatttgtagtcccttctagatgggaaccttttggaatagtagctcttgaggctatggctgttggcactccagttgttgcctatgccgttggtggccttagagagtctattatagatttaaggagcgacataaataatggaacaggatttattataggaccagaaaacatctgggaattgtataggggtatacttacatcattagctctatctatgagtagtgagactaaaaataagaattacttatatatggatgaccttattttaaagacagacgatacggatttatggaataaagttagacaaaacggaattagaagagttgaggagaattttagatggagtgctactgcaaaatatttaataaattgttatagtaaagcacagactatggctaaatatagggcttcagcatcgttctaa

SEQ ID NO: 4866 - protein, 572 aa, Sulfolobus tokodaii
MAEMKRIEAIWFPEEIKSVWMITVELSNVASVGGLGNAVYNMAKGLAEQGINVTVIMPSHGRHLNDQYRSALKLRELSLTAYGDRIGMDGKRYPYALGFEEGRLDGFNVILVKGLDYNTGVLIDNWNVYNNIMEKSALLARGVQAYSVFSIPGNIPSVIHAHDWHAVLAGVMAKQTFETRKVVVPLVFTIHLLNKVGAPWHYASEDWAGLSNCPHYIWQVVSHKLYTTRQVWDELSQGLIEKFGAWEADVVTTVSKSYLTYDVYNFIGNWIENKSCVTYNGTDWSIDEVKNYARKIFNTEDRVEVRRRLYNMLENLRLIPEDYTTGNILWNNRFRIGIKDDWTYTRLDDGPLVLFAGRLVYQKGVDLLIRAFREVVNKIPNARLVILGLPSGDYGLLYDLVNKASEIGGNVRIIASYSMPKDIYKLFYYAASVFVVPSRWEPFGIVALEAMAVGTPVVAYAVGGLRESIIDLRSDINNGTGFIIGPENIWELYRGILTSLALSMSSETKNKNYLYMDDLILKTDDTDLWNKVRQNGIRRVEENFRWSATAKYLINCYSKAQTMAKYRASASF

SEQ ID NO: 4867 - DNA, 2270 bp, Perilla frutescens
  CDS (172)..(1986)
cttaggaaagggaccattttcctcccgccacgtgtcgtgtagccactagtatattagtagtccctgtattccccatgatttctgaaaaaatcagttcatcgctgatagcgtaaccgctcacaagctctgctcgactcaaagctcacccctgagatttgagtttgtgtcgttatggcaacagtaacagcttcgcagtttgcggcgtacgtgcatggaggagcaacctccgtggattccaagtcaaatttggggcaaattgggcagagggctcaactcatcactcacaatgggctgagatcagtgaacagagctgatgcgctccaaatgagaaacaacgtgaaagtgagtgctaagcgggtcggtcaagttcccatcaacaaagatcgatgtgaaacttcagggatgaccttgattttcgtgtcggccgagtgcggtccatggagcaaaaccggtggcctcggtgatgttgtgggtggattgccccctgccttggcggcaaatagacacagagtgatgactgtgtctccgcgttatgatcagtacaaagatgcttgggacacttctgtggttgttgagattcaagttggagacaaagtcgaaactgttggattcttccattgctacaagcgtggagttgatcgtgtttttgtcgatcaccctttgttcttggagaaggtctggggtaaaactaaatccaaggtttatggtccttctgctggagtcgattacgaggataatcaactgcggttcagcttgctgtccttggctgctttggaggctcctagggtgttgaatctaaccagcaacaagtatttctccggaccgtatggtgaggatgttgtcttcgttgctaatgactggcacaccgctgtgcttccgtgctacctgaaaaccatttaccaacctaagggaatctacacgaacgctaaggttgtcttgtgcatccacaacattgcatatcagggaagatttgcattctcggacttctataagcttaatctgcctgatcaactcaagagctctttcgatttcatggatgggtatgaaaaaccagtgaagggaaggaaaataaactggatgaaggctggaattatagaatcagacagagttctgactgtgagcccgtactacgccaatgaactcgtttctggtcctgataaaggagttgagttggataacatcctccgtaagtgtaccgtcaccggcatcgtgaatggcatggatactcaagagtggaacccggcgacggataaatacatcgataatcactatgatattaccactgttatggatggtaagccattgttgaaggaagctcttcaagcagaagtgggtttgcctgttgataggaatgttcctcttgttggatttatcggcagacttgaagagcagaaaggatcagacatcctggtggctgcgctgcataaatttattgagatggatgtgcaagtggtcatccttggaacggggaagaaggagttcgagaagcagatcgagcaactcgaggagttgtacccgggtaaagctgtaggagtggcgaagttcaatgtaccgttggcccataagataactgctggtgctgattttatgttggttcctagtagatttgaaccatgcggtctcatccaattacatgccatgagatatggaacaatacccatctgtgcttcaactggtggtctcgtggacaccgtgaaagaaggattcactggattccatatgggagcttttaatgttgagtgtgatgcggttgacccggccgacgtgttgaagatagtgaaaactgttgggagagctctggaagtgtatggcacccctgcattcagagaaatgataaataactgcatgtcactcgatctctcctggaagggacctgcaaagaactgggaaacggtgctgctgagcttgggcgtggccgggagcgaacccggtgttgaaggcgatgaaatcgctccgcttgccaaggaaaacgttgccactccttgaagaatgaagatgatatatctatctagtatctatatggaattgcatggtttaaactatatatatatgccccatgcatggctctctacctacttactactactaacacatcataacccttgcttgccattctccgttctccattctccattctcaactaactaataaacttctcacaccatctattcttcttccataatatctgtaggtgttatgtaacgcccactaatttttataaaatgaagagtctcatgtttggtttccaaaaaaaaaaaaaaaaaaaaaaa

SEQ ID NO: 4868 - protein, 604 aa, Perilla frutescens
MATVTASQFAAYVHGGATSVDSKSNLGQIGQRAQLITHNGLRSVNRADALQMRNNVKVSAKRVGQVPINKDRCETSGMTLIFVSAECGPWSKTGGLGDVVGGLPPALAANRHRVMTVSPRYDQYKDAWDTSVVVEIQVGDKVETVGFFHCYKRGVDRVFVDHPLFLEKVWGKTKSKVYGPSAGVDYEDNQLRFSLLSLAALEAPRVLNLTSNKYFSGPYGEDVVFVANDWHTAVLPCYLKTIYQPKGIYTNAKVVLCIHNIAYQGRFAFSDFYKLNLPDQLKSSFDFMDGYEKPVKGRKINWMKAGIIESDRVLTVSPYYANELVSGPDKGVELDNILRKCTVTGIVNGMDTQEWNPATDKYIDNHYDITTVMDGKPLLKEALQAEVGLPVDRNVPLVGFIGRLEEQKGSDILVAALHKFIEMDVQVVILGTGKKEFEKQIEQLEELYPGKAVGVAKFNVPLAHKITAGADFMLVPSRFEPCGLIQLHAMRYGTIPICASTGGLVDTVKEGFTGFHMGAFNVECDAVDPADVLKIVKTVGRALEVYGTPAFREMINNCMSLDLSWKGPAKNWETVLLSLGVAGSEPGVEGDEIAPLAKENVATP

SEQ ID NO: 4869 - DNA, 1701 bp, Sulfolobus acidocaldarius
  CDS (1)..(1701)
atgaagagatatgaaagcctatggtttgaggacgaactaaagcacgtctggatgatcagtgccgagctagagaaagtagctagtctagggggattgggaccagtagtatataatcttggtaaagaattagttaagcagggtataaaagtaactgtaatcatgccaagccatggtcgtcatcttaatgactattataggtcactccttaaattgaacgaaatatctttagtcgcagaaggagatagaataggtattgatggtaaatcttatcactacaagctagggtttgaacatggaaatttggatggaatgaacgtggttttaattaaaggactggattacaacacgggaaggataattgattcatggaacatttacgataacgccatggagaaatcttcacttctggctagggctgtcgagaagtatgcaaagttctcaatacctaatgacataccgtccataatacacgtacatgattggcactctgtaattgcaggtgtgactgctaaatttacatttgaggctaggagagtaatagttcctctagtatttacagttcacctgttaaacaaggtcagtgcaccttggcattacgcgtcagaagattggagtggactgatgaattatccacattacatttggagaataataaaacatgacttgtacacaactagagaagtgtgggatttcttctcttctggttccatagaaaagtttggttcttatgaggctgatctaataacatcagttagtaaaagctacctaacatatgatatatttaacttcataggaaactggatagagaacaagagttgtatccattataacggtactgattgggaagtagaggagactaaaaagtacgcttacagcaagtttgggactgaggatagggctgaaataagaaaaaggttatttgacgaactagaagtcctaagagtaacccctgaggattacactacaggtaacatactttggaataacagattcaatataggtataaaggatgactggacatatagtagactagaaaacggtcctctaattctatttgcaggaagaatggtttatcagaagggaatagactcattactcatagcatttgatgaagtacttaagaccattaacaatgcccgtctaataatattaggattaccctcctcagactatggattactacaaaatgtggtatctaatatatctagacacggtggtaacattaggataatcctaggcaaaatgagtaaggaactgtacaggctcttctactatagtgcctcagtgtttgtgataccctcaagatgggaaccatttgggctagttgcagtagagtcaatggctgtaggaaccccggtagttgcatactcggtaggcgggctgagagagagtatagtagacatcagggttgaccaagagcagggaacaggactactggtagaaccggaaaatgtctgggaactatcaaaagcgttaatttctgctttatcattgtctatggcttcagaaacaaacaatggagattttctaaaatatactgaagttaagacgaatgatgtgaagttatgggacaaaataaggcaaaattgtgtaaggagagttaatgagaatttcagatggtcagcaagtgctaagcagttacaggagtgctattctaaggctcagaccatggcgaaatatagactgttagcatcattttaa

SEQ ID NO: 4870 - protein, 566 aa, Sulfolobus acidocaldarius
MKRYESLWFEDELKHVWMISAELEKVASLGGLGPVVYNLGKELVKQGIKVTVIMPSHGRHLNDYYRSLLKLNEISLVAEGDRIGIDGKSYHYKLGFEHGNLDGMNVVLIKGLDYNTGRIIDSWNIYDNAMEKSSLLARAVEKYAKFSIPNDIPSIIHVHDWHSVIAGVTAKFTFEARRVIVPLVFTVHLLNKVSAPWHYASEDWSGLMNYPHYIWRIIKHDLYTTREVWDFFSSGSIEKFGSYEADLITSVSKSYLTYDIFNFIGNWIENKSCIHYNGTDWEVEETKKYAYSKFGTEDRAEIRKRLFDELEVLRVTPEDYTTGNILWNNRFNIGIKDDWTYSRLENGPLILFAGRMVYQKGIDSLLIAFDEVLKTINNARLIILGLPSSDYGLLQNVVSNISRHGGNIRIILGKMSKELYRLFYYSASVFVIPSRWEPFGLVAVESMAVGTPVVAYSVGGLRESIVDIRVDQEQGTGLLVEPENVWELSKALISALSLSMASETNNGDFLKYTEVKTNDVKLWDKIRQNCVRRVNENFRWSASAKQLQECYSKAQTMAKYRLLASF

SEQ ID NO: 4871 - DNA, 2793 bp, Triticum aestivum
  CDS (135)..(2531)
gcactccagtccagtccagcccactgccgcgctactccccactcccactgccaccacctccgcctgcgccgcgctctgggcggaccaacccgcgcatcgtatcacgatcacccaccccgatcccggccgccgccatgtcgtcggcggtcgcgtccgccgcgtccttcctcgcgctcgcgtccgcctcccccgggagatcacggaggaggacgagggtgagcgcgtcgccaccccacaccggggctggcaggttgcactggccgccgtcgccgccgcagcgcacggctcgcgacggagcagtggccgcgcgcgccgccgggaagaaggacgcggggatcgacgacgccgcgcccgcgaggcagccccgcgcactccgcggtggcgccgccaccaaggttgcggagcggagggatcccgtcaagacgctcgatcgcgacgccgcggaaggtggcgcgccgtccccgccggcaccgaggcaggaggacgcccgtctgccgagcatgaacggcatgccggtgaacggtgaaaacaaatctaccggcggcggcggcgcgactaaagacagcgggctgcccgcacccgcacgcgcgccccagccgtcgagccagaacagagtaccggtgaatggtgaaaacaaagctaacgtcgcctcgccgccgacgagcatagccgaggtcgcggctccggatcccgcagctaccatttccatcagtgacaaggcgccagagtccgttgtcccagccgagaaggcgccgccgtcgtccggctcaaatttcgtgccctcggcttctgctcccgggtctgacactgtcagcgacgtggaacttgaactgaagaagggtgcggtcattgtcaaagaagctccaaacccaaaggctctttcgccgcctgcagcacccgctgtacaacaagacctttgggacttcaagaaatacattggtttcgaggagcccgtggaggccaaggatgatggccgggctgttgcagatgatgcgggctccttcgaacaccaccagaatcacgattccgggcctttggcaggggagaacgtcatgaacgtggtcgtcgtggctgctgaatgttctccctggtgcaaaacaggtggtcttggagatgttgccggtgctttgcccaaggctttggcgaagagaggacatcgtgttatggttgtggtaccaaggtatggggactatgaggaagcctacgatgtcggagtccgaaaatactacaaggctgctggacaggatatggaagtgaattatttccatgcttatatcgatggagttgattttgtgttcattgacgctcctctcttccgacaccgccaggaagacatttatgggggcagcagacaggaaattatgaagcgcatgattttgttctgcaaggccgctgtcgaggttccatggcacgttccatgcggcggtgtcccttatggggatggaaatctggtgtttattgcaaatgattggcacacggcactcctgcctgtctatctgaaagcatattacagggaccatggtttgatgcagtacactcggtccattatggtgatacataacatcgctcaccagggccgtggcccagtagatgagttcccgttcaccgagttgcctgagcactacctggaacacttcagactgtacgaccccgtgggtggtgaacacgccaactacttcgccgccggcctgaagatggcggaccaggttgtcgtcgtgagcccggggtacctgtgggagctgaagacggtggagggcggctgggggcttcacgacatcatacggcagaacgactggaagacccgcggcatcgtgaacggcatcgacaacatggagtggaaccccgaggtggacgtccacctcaagtcggacggctacaccaacttctccctggggacgctggactccggcaagcggcagtgcaaggaggccctgcagcgggagctgggcctgcaggtccgcggcgacgtgccgctgctcggcttcatcgggcgcctggacgggcagaagggcgtggagatcatcgcggacgcgatgccctggatcgtgagccaggacgtgcagctggtcatgctgggcaccgggcgccacgacctggagggcatgctgcggcacttcgagcgggagcaccacgacaaggtgcgcgggtgggtggggttctccgtgcggctggcgcaccggatcacggccggcgccgacgcgctcctcatgccctcccggttcgagccgtgcggactgaaccagctctacgccatggcctacggcaccgtccccgtcgtgcatgccgtcggcggcctgagggacaccgtgccgccgttcgaccccttcaaccactccgggctcgggtggacgttcgaccgcgcagaggcgcagaagctgatcgaggcgctcgggcactgcctccgcacctaccgggactacaaggagagctggagggggctccaggagcgcggcatgtcgcaggacttcagctgggagcatgccgccaagctctacgaggacgtcctcgtcaaggccaagtaccagtggtgaacgctagctgctagccggtccagccccgcatgcgtgcatgacaggatggaattgcgcattgcgcacgcaggaatgtgccatggagcgccggcatccgcgaagtacagtgacatgaggtgtgtgtggttgagacgctgattccgatctggtccgtagcagagtagagcggaggtagggaagcgctccttgttacaggtatatgggaatgttgttaacttggtattgtaatttgttatgttgtgtgcattattacaaagggcaa

SEQ ID NO: 4872 - protein, 798 aa, Triticum aestivum
MSSAVASAASFLALASASPGRSRRRTRVSASPPHTGAGRLHWPPSPPQRTARDGAVAARAAGKKDAGIDDAAPARQPRALRGGAATKVAERRDPVKTLDRDAAEGGAPSPPAPRQEDARLPSMNGMPVNGENKSTGGGGATKDSGLPAPARAPQPSSQNRVPVNGENKANVASPPTSIAEVAAPDPAATISISDKAPESVVPAEKAPPSSGSNFVPSASAPGSDTVSDVELELKKGAVIVKEAPNPKALSPPAAPAVQQDLWDFKKYIGFEEPVEAKDDGRAVADDAGSFEHHQNHDSGPLAGENVMNVVVVAAECSPWCKTGGLGDVAGALPKALAKRGHRVMVVVPRYGDYEEAYDVGVRKYYKAAGQDMEVNYFHAYIDGVDFVFIDAPLFRHRQEDIYGGSRQEIMKRMILFCKAAVEVPWHVPCGGVPYGDGNLVFIANDWHTALLPVYLKAYYRDHGLMQYTRSIMVIHNIAHQGRGPVDEFPFTELPEHYLEHFRLYDPVGGEHANYFAAGLKMADQVVVVSPGYLWELKTVEGGWGLHDIIRQNDWKTRGIVNGIDNMEWNPEVDVHLKSDGYTNFSLGTLDSGKRQCKEALQRELGLQVRGDVPLLGFIGRLDGQKGVEIIADAMPWIVSQDVQLVMLGTGRHDLEGMLRHFEREHHDKVRGWVGFSVRLAHRITAGADALLMPSRFEPCGLNQLYAMAYGTVPVVHAVGGLRDTVPPFDPFNHSGLGWTFDRAEAQKLIEALGHCLRTYRDYKESWRGLQERGMSQDFSWEHAAKLYEDVLVKAKYQW

SEQ ID NO: 4873 - DNA, 5346 bp, Triticum aestivum
  CDS (29)..(4915)
cggcacgaggtttagtaggttccgggaaatggagatgtctctctggccacggagccccctgtgccctcggagcaggcagccgctcgtcgtcgtccggccggccggccgcggcggcctcacgcagccttttttgatgaatggcagatttactcgaagcaggacccttcgatgcatggtagcaagttcagatcctcctaataggaaatcaagaaggatggtaccacctcaggttaaagtcatttcttctagaggatatacgacaagactcattgttgaaccaagcaacgagaatacagaacacaataatcgggatgaagaaactcttgatacatacaatgcgctattaagtaccgagacagcagaatggacagataatagagaagccgagactgctaaagcggactcgtcgcaaaatgctttaagcagttctataattggggaagtggatgtggcggatgaagatatacttgcggctgatctgacagtgtattcattgagcagtgtaatgaagaaggaagtggatgcagcggacaaagctagagttaaagaagacgcatttgagctggatttgccagcaactacattgagaagtgtgatagtagatgtgatggatcataatgggactgtacaagagacattgagaagtgtgatagtagatgtgatggatcataatgggactgtacaagagacattgagaagtgtgatagtagatgtgatggatgatgcggcggacaaagctagagttgaagaagacgtatttgagctggatttgtcaggaaatatttcaagcagtgcgacgaccgtggaactagatgcggttgacgaagtcgggcctgttcaagacaaatttgaggcgacctcatcaggaaatgtttcaaacagtgcaacggtacgggaagtggatgcaagtgatgaagctgggaatgatcaaggcatatttagagcagatttgtcaggaaatgttttttcaagcagtacaacagtggaagtgggtgcagtggatgaagctgggtctataaaggacaggtttgagacggattcgtcaggaaatgtttcaacaagtgcgccgatgtgggatgcaattgatgaaaccgtggctgatcaagacacatttgaggcggatttgtcgggaaatgcttcaagctgcgcaacatacagagaagtggatgatgtggtggatgaaactagatcagaagaggaaacatttgcaatggatttgtttgcaagtgaatcaggccatgagaaacatatggcagtggattatgtgggtgaagctaccgatgaagaagagacttaccaacagcaatatccagtaccgtcttcattctctatgtgggacaaggctattgctaaaacaggtgtaagtttgaatcctgagctgcgacttgtcagggttgaagaacaaggcaaagtaaattttagtgataaaaaagacctgtcaattgatgatttaccaggacaaaaccaatcgatcattggttcctataaacaagataaatcaattgctgatgttgcgggaccgacccaatcaatttttggttctagtaaacaacaccggtcaattgttgctttccccaaacaaaaccagtcaattgttagtgtcactgagcaaaagcagtccatagttggattccgtagtcaagatctttcggctgttagtctccctaaacaaaacgtaccaattgttggtacgtcgagagagggtcaaacaaagcaagttcctgttgttgatagacaggatgcattgtatgtgaatggactggaagctaaggagggagatcacacatccgagaaaactgatgaggatgcgcttcatgtaaagtttaatgttgacaatgtgttgcggaagcatcaggcagatagaacccaagcagtggaaaagaaaacttggaagaaagttgatgaggaacatctttacatgactgaacatcagaaacgtgctgccgaaggacagatggtagttaacgaggatgagctttctataactgaaattggaatggggagaggtgataaaattcagcatgtgctttctgaggaagagctttcatggtctgaagatgaagtgcagttaattgaggatgatggacaatatgaagttgacgagacctctgtgtccgttaacgttgaacaagatatccaggggtcaccacaggatgttgtggatccgcaagcactaaaggtgatgctgcaagaactcgctgagaaaaattattcgatgaggaacaagctgtttgtttttccagaggtagtgaaagctgattcagttattgatctttatttaaatcgtgacctaacagctttggcgaatgaacccgatgtcgtcatcaaaggagcattcaatggttggaaatggaggcttttcactgaaagattgcacaagagtgaccttggaggggtttggtggtcttgcaaactgtacatacccaaggaggcctacagattagactttgtgttcttcaacggtcgcacggtctatgagaacaatggcaacaatgatttctgtataggaatagaaggcactatgaatgaagatctgtttgaggatttcttggttaaagaaaagcaaagggagcttgagaaacttgccatggaagaagctgaaaggaggacacagactgaagaacagcggcgaagaaaggaagcaagggctgcagatgaagctgtcagggcacaagcgaaggccgagatagagatcaagaagaaaaaattgcaaagtatgttgagtttggccagaacatgtgttgataatttgtggtacatagaggctagcacagatacaagaggagatactatcaggttatattataacagaaactcgaggccacttgcgcatagtactgagatttggatgcatggtggttacaacaattggacagatggactctctattgttgaaagctttgtcaagtgcaatgacaaagacggcgattggtggtatgcagatgttattccacctgaaaaggcacttgtgttggactgggtttttgctgatgggccagctgggaatgcaaggaactatgacaacaatgctcgacaagatttccatgctattcttccgaacaacaatgtaaccgaggaaggcttctgggcgcaagaggagcaaaacatctatacaaggcttctgcaagaaaggagagaaaaggaagaaaccatgaaaagaaaggctgagagaagtgcaaatatcaaagctgagatgaaggcaaaaactatgcgaaggtttctgctttcccagaaacacattgtttataccgaaccgcttgaaatacgtgccggaaccacagtggatgtgctatacaatccctctaacacagtgctaaatggaaagtcggagggttggtttagatgctcctttaacctttggatgcattcaagtggggcattgccaccccagaagatggtgaaatcaggggatgggccgctcttaaaagcaacagttgatgttccaccggatgcctatatgatggactttgttttctccgagtgggaagaagatgggatctatgacaacaggaatgggatggactatcatattcctgtttctgattcaattgaaacagagaattacatgcgtattatccacattgccgttgagatggcccccgttgcaaaggttggaggtcttggggatgttgttacaagtctttcacgtgccattcaagatctaggacatactgtcgaggttattctcccgaagtacgactgtttgaaccaaagcagtgtcaaggatttacatttatatcaaagtttttcttggggtggtacagaaataaaagtatgggttggacgagtcgaagacctgaccgtttacttcctggaacctcaaaatgggatgtttggcgttggatgtgtatatggaaggaatgatgaccgcagatttgggttcttctgtcattctgctctagagtttatcctccagaatgaattttctccacatataatacattgccatgattggtcaagtgctccggtcgcctggctatataaggaacactattcccaatccagaatggcaagcactcgggttgtatttaccatccacaatcttgaatttggagcacattatattggtaaagcaatgacatactgtgataaagccacaactgtttctcctacatattcaagggacgtggcaggccatggcgccattgctcctcatcgtgagaaattctacggcattctcaatggaattgatccagatatctgggatccgtacactgacaattttatcccggtcccttatacttgtgagaatgttgtcgaaggcaagagagctgcaaaaagggccttgcagcagaagtttggattacagcaaactgatgtccctattgtcggaatcatcacccgtctgacagcccagaagggaatccacctcatcaagcacgcaattcaccgaactctcgaaagcaacggacatgtggttttgcttggttcagctccagatcatcgaatacaaggcgatttttgcagattggccgatgctcttcatggtgtttaccatggtagggtgaagcttgttctaacctatgatgagcctctttctcacctgatatacgctggctcggacttcataattgttccttcaatcttcgaaccctgtggcttaacacaacttgttgccatgcgttatggatcgatccctatagttcggaaaactggaggacttcacgacacagtcttcgacgtagacaatgataaggaccgggctcggtctcttggtcttgaaccaaatgggttcagtttcgacggagccgacagcaatggcgtggattatgccctcaacagagcaatcggcgcttggttcgatgcccgtgattggttccactccctgtgtaagagggtcatggagcaagactggtcgtggaaccggcccgcactggactacattgaattgtaccatgccgctcgaaaattctgacacccaactgaaccaatgacaagaacaagcgcattgtgggatcgactagtcatacagggctgtgcagatcgtcttgcttcagttagtgccctcttcagttagttccaagcgcactacagtcgtacatagctgaggatcctcttgcctcctaccagggggaacaaagcagaaatgcatgagtgcattgggaagacttttatgtatattgttaaaaaaatttccttttcttttccttccctgcacctggaaatggttaagcgcatcgccgagataagaaccgcagtgacattctgtgagtagctttgtatattctctcatcttgtgaaaactaatgttcatgttaggctgtctgatcatgtggaagctttgttatatgttacttatggtatacatcaatgatatttacatttgtggaaaaaaaaaaaaaaaaa

SEQ ID NO: 4874 - protein, 1628 aa, Triticum aestivum
MEMSLWPRSPLCPRSRQPLVVVRPAGRGGLTQPFLMNGRFTRSRTLRCMVASSDPPNRKSRRMVPPQVKVISSRGYTTRLIVEPSNENTEHNNRDEETLDTYNALLSTETAEWTDNREAETAKADSSQNALSSSIIGEVDVADEDILAADLTVYSLSSVMKKEVDAADKARVKEDAFELDLPATTLRSVIVDVMDHNGTVQETLRSVIVDVMDHNGTVQETLRSVIVDVMDDAADKARVEEDVFELDLSGNISSSATTVELDAVDEVGPVQDKFEATSSGNVSNSATVREVDASDEAGNDQGIFRADLSGNVFSSSTTVEVGAVDEAGSIKDRFETDSSGNVSTSAPMWDAIDETVADQDTFEADLSGNASSCATYREVDDVVDETRSEEETFAMDLFASESGHEKHMAVDYVGEATDEEETYQQQYPVPSSFSMWDKAIAKTGVSLNPELRLVRVEEQGKVNFSDKKDLSIDDLPGQNQSIIGSYKQDKSIADVAGPTQSIFGSSKQHRSIVAFPKQNQSIVSVTEQKQSIVGFRSQDLSAVSLPKQNVPIVGTSREGQTKQVPVVDRQDALYVNGLEAKEGDHTSEKTDEDALHVKFNVDNVLRKHQADRTQAVEKKTWKKVDEEHLYMTEHQKRAAEGQMVVNEDELSITEIGMGRGDKIQHVLSEEELSWSEDEVQLIEDDGQYEVDETSVSVNVEQDIQGSPQDVVDPQALKVMLQELAEKNYSMRNKLFVFPEVVKADSVIDLYLNRDLTALANEPDVVIKGAFNGWKWRLFTERLHKSDLGGVWWSCKLYIPKEAYRLDFVFFNGRTVYENNGNNDFCIGIEGTMNEDLFEDFLVKEKQRELEKLAMEEAERRTQTEEQRRRKEARAADEAVRAQAKAEIEIKKKKLQSMLSLARTCVDNLWYIEASTDTRGDTIRLYYNRNSRPLAHSTEIWMHGGYNNWTDGLSIVESFVKCNDKDGDWWYADVIPPEKALVLDWVFADGPAGNARNYDNNARQDFHAILPNNNVTEEGFWAQEEQNIYTRLLQERREKEETMKRKAERSANIKAEMKAKTMRRFLLSQKHIVYTEPLEIRAGTTVDVLYNPSNTVLNGKSEGWFRCSFNLWMHSSGALPPQKMVKSGDGPLLKATVDVPPDAYMMDFVFSEWEEDGIYDNRNGMDYHIPVSDSIETENYMRIIHIAVEMAPVAKVGGLGDVVTSLSRAIQDLGHTVEVILPKYDCLNQSSVKDLHLYQSFSWGGTEIKVWVGRVEDLTVYFLEPQNGMFGVGCVYGRNDDRRFGFFCHSALEFILQNEFSPHIIHCHDWSSAPVAWLYKEHYSQSRMASTRVVFTIHNLEFGAHYIGKAMTYCDKATTVSPTYSRDVAGHGAIAPHREKFYGILNGIDPDIWDPYTDNFIPVPYTCENVVEGKRAAKRALQQKFGLQQTDVPIVGIITRLTAQKGIHLIKHAIHRTLESNGHVVLLGSAPDHRIQGDFCRLADALHGVYHGRVKLVLTYDEPLSHLIYAGSDFIIVPSIFEPCGLTQLVAMRYGSIPIVRKTGGLHDTVFDVDNDKDRARSLGLEPNGFSFDGADSNGVDYALNRAIGAWFDARDWFHSLCKRVMEQDWSWNRPALDYIELYHAARKF

SEQ ID NO: 4875 - DNA, 2502 bp, Arabidopsis thaliana
  CDS (1)..(2379)
atggcatcagttgccgagagctcttttcctcttctctgtcaaatcaagactcagcgtcgcatcaattcctctacgctgaggcattcccgtgtttcttaccatgatttgccttctggctcgctgtcttttcgttctcggagctttgttctgggacatcgatgcaagtgtgtgagccgcgtcgaggcttccggctcagacgatgatgagccagaggatgcgcttcaggctaccattgacaagagcaagaaggttcttgctatgcaaaggaaccttcttcaccagattgctgaaaggaggaagctggtctcatctattaaagagagcacacctgacttggatgatgcaaaagcttcttccaaacaagagtctgcttcttctgtgaatgctaatactgatgctactaaaaaagaaattatggatggagatgcaaacggtagtgttagtccaagcacttatggcaagtcatctttaagtaaagaaccagaagctaagactttctctcccagtactgaatccttgaagaaccgcaaacaaagctcggcctctgtgatatcttcttcccctgtaacctctcctcagaaaccatccgatgtagccactaatgggaagccttggtctagcgtagtagcgtctagtgtagatcctccttataaaccttcatctgttatgacctctcctgagaaaacttctgatcctgtaacttctcctggaaagccaagtaaatctcgcgctggtgcattttggtcagatccactaccgtcttatctgactaaagctcctcaaacatcaactatgaagacagagaagtacgtggaaaaaacacctgacgtagctagtagtgaaactaacgaacctggcaaggatgaagagaagccgcctccactggctggagcaaatgtcatgaatgtgatattggtagcagcagagtgtgctccattttcgaaaacaggtggccttggagatgtagctggtgctttaccaaagtctttggctaggcgtggacacagggttatggttgtggttcctcggtatgccgagtatgctgaagccaaagatttaggggtacggaagagatataaggtggccgggcaggatatggaagtaatgtacttccatgcatttatagatggtgtggattttgttttcattgatagccctgaatttcggcatctgagtaataacatttatggtggaaaccgacttgatatcttgaagcggatggttttattttgcaaggctgctgttgaggttccgtggtatgttccttgtggaggtgtgtgttatggtgatggaaatttggcttttatagcaaatgattggcacactgcgttactaccggtgtacctgaaggcctattaccgggatcacggaataatgaaatacacacgatctgttcttgtaattcataacattgctcatcaggggcggggaccggtagatgatttctcctacgtggatttaccgagccattacttggatagcttcaagttatatgacccagtaggaggtgagcacttcaatatttttgcagctggtctaaaagctgcggatagagttctcactgttagccatggatactcctgggaggttaagaccttagaaggaggttggggtctgcataacatcataaatgaaaacgactggaaatttagaggaattgtgaacggtatcgatacacaagaatggaacccagaatttgatacttacttgcactctgatgattataccaactattccttggagaatcttcacattggtaaaccccaatgtaaagctgcattacagaaagagctcggtttgcctgttcggcctgatgttccgctgatcggttttattggaagattggatcaccagaaaggtgttgatttgatagctgaggcggttccatggatgatgagtcaggatgttcagctggttatgttaggcacagggcgaccggatcttgaagaggtcctcagacaaatggagcatcaatatcgagataaagcacggggatgggttggattctcggttaaaacagcacacagaataacagctggtgcagacatattgctgatgccttctagatttgagccgtgtggtctaaaccagctttacgcaatgaactatggaaccattccggtggtccatgccgtgggaggattgagggatacagttcaacaatttgatccctatagtgaaacgggtcttggttggacatttgatagcgcggaagcaggtaagttgattcatgccttaggaaactgtttgttgacatatagagagtataaggagagttgggaagggcttcagagaagaggaatgacacaggatttgagttgggataatgctgcagagaagtacgaagaagttcttgttgctgctaagtatcattggtgagttaaataaaagttaccttttttactgtctataaagaacatgtctttggaattgttaagaagcttagttgtgtagatttggtgataaagctacattggagcttggcaaattctcatgccatgt

SEQ ID NO: 4876 - protein, 792 aa, Arabidopsis thaliana
MASVAESSFPLLCQIKTQRRINSSTLRHSRVSYHDLPSGSLSFRSRSFVLGHRCKCVSRVEASGSDDDEPEDALQATIDKSKKVLAMQRNLLHQIAERRKLVSSIKESTPDLDDAKASSKQESASSVNANTDATKKEIMDGDANGSVSPSTYGKSSLSKEPEAKTFSPSTESLKNRKQSSASVISSSPVTSPQKPSDVATNGKPWSSVVASSVDPPYKPSSVMTSPEKTSDPVTSPGKPSKSRAGAFWSDPLPSYLTKAPQTSTMKTEKYVEKTPDVASSETNEPGKDEEKPPPLAGANVMNVILVAAECAPFSKTGGLGDVAGALPKSLARRGHRVMVVVPRYAEYAEAKDLGVRKRYKVAGQDMEVMYFHAFIDGVDFVFIDSPEFRHLSNNIYGGNRLDILKRMVLFCKAAVEVPWYVPCGGVCYGDGNLAFIANDWHTALLPVYLKAYYRDHGIMKYTRSVLVIHNIAHQGRGPVDDFSYVDLPSHYLDSFKLYDPVGGEHFNIFAAGLKAADRVLTVSHGYSWEVKTLEGGWGLHNIINENDWKFRGIVNGIDTQEWNPEFDTYLHSDDYTNYSLENLHIGKPQCKAALQKELGLPVRPDVPLIGFIGRLDHQKGVDLIAEAVPWMMSQDVQLVMLGTGRPDLEEVLRQMEHQYRDKARGWVGFSVKTAHRITAGADILLMPSRFEPCGLNQLYAMNYGTIPVVHAVGGLRDTVQQFDPYSETGLGWTFDSAEAGKLIHALGNCLLTYREYKESWEGLQRRGMTQDLSWDNAAEKYEEVLVAAKYHW

SEQ ID NO: 4877 - DNA, 2592 bp, Sorghum bicolor
  CDS (59)..(1948)
cctcactttctccgcgccatccacggcacccgcgccctcctgctgctccctctccgcaatggcgacgccctcggccgtgggcgccgcgtgcctcgtcctagcgcgagccgccgccgggcttgggcttgggcccgggcggggcggcgatcgggcgcgcccgcgccggttccagcgcgtggtgcgcaggcggtgcgtcgcggagctgagcagggagggtcccgcgccgacgccgcgcccgctgccacccgcgctgctggcgcccccgctcgtgcccgccttcctcgcgccgccgtccgagcccgagggtgagccggcgtcgacaccgccgcccctgcccgacgccggtctcggcgacctcggtctccaacctgaagggattgctgagggttccatcgatgagacagtagttgtggcaagtgagcaagattctgagatcgtggttggaaaggagcaagctcgagctaaagtaacacaaagcattgtctttgtaactggcgaagcttctccttatgcaaagtctgggggtctaggagatgtttgtggttcattgccagttgctcttgctgctcgtggtcaccgtgtgatggttgtaatgcccagatatttaaatggtacctctgataagaattacgcaaatgcattttacacagaaaagcacattcggattccatgctttggcggtgaacatgaagttacctttttccatgagtacagagattcagttgactgggtgtttgttgatcatccctcatatcacagacctggaaatttatatggagataagtttggtgcttttggtgataatcagttcagatacacgctcctttgctatgctgcatgtgaggctcctttggtccttgaattgggaggatatatttatggacagaattgcatgtttgttgtgaatgattggcatgccagtctagtgccagtccttcttgctgcaaaatatagaccatatggtgtttataaagactcccgcagcattcttgtaatacataatttagcacatcagggtgtagagcctgcaagcacatatcctgaccttgggttgccacctgaatggtatggagctctggagtgggtattccctgaatgggcaaggaggcatgcccttgacaagggtgaggcagttaattttttgaaaggtgcagttgtgacagcagatcgaattgtgactgtcagtaagggttattcatgggaggtcacaactgctgaaggtggacagggtctcaatgagctcttaagctcccgaaagagtgtattaaacggaattgtaaatggaattgacattaatgattggaaccctgcgacggacaaatgtatcccttgtcattattctgttgatgacctctctggaaaagccaaatgtaaaagtgcattgcagaaggagctgggtttacctataaggcctgaagttcctctgattggttttattggaagattggattatcagaaaggcattgatctcattcaacttatcataccacatctcatgcgggacgacgttcaatttgtcatgcttggatctggtgacccagagctcgaagactggatgagatctacagagtcggacttcaaggataaatttcgtggatgggttggatttagtgttccagtttcccaccgaataactgccggctgcgatatattgttaatgccatccagattcgaaccttgtggtctcaatcagctatatgctatgcagtatggcacagttcctgttgtccatgcaactgggggccttagagatactgtggagaacttcaaccctttcggtgagaatggagaacagggtacagggtgggcattcgcacccctaaccacggaaaacatgtttgtggacattgcgaactgcaatttcgacatacaaggagcacaaatcttcctgggaagggctcatgaagaggggcatgtcaaaagacttcacgtgggaccatgccgctgaacaatacgaacaaatcttccagtgggccttcatcgatcgaccctatgtcatgtaaaggggaccacaagtggtgtgtccttaaagatcttcagttcttcatcctacagtggaaggatgagaaaacccctgtacattacatggaaggcggaccggctgttgggtggctccaatgtccaggttagccttacggagcctgctgctttggctggtttgtcccaaaggaccgtgatgcagtgaggaccagttgaacgacagttttgaagaataagaaggggatgctggaagcagtcgtgcaggcagcctcgcagtgatacatatggattatggaacaaactggagtcagtttctgctttgccactcactgtttaccttaagattattaccctgttgttgtcctttgttcgttagggcttataacttaatgactcatagaaaaccattccttgtttttcttgaccacttctgtgcgttctcggccgtttactagagatggccattgctgatggccgtttactatatatcgaaagcgtagctatgatggtatggaggaatcctgtaaagcgcatggtgttggactgttggtgtatgccttgtgtcccagcacgggtttccatgtttcaggtgctttatacttgtcgtgacca

SEQ ID NO: 4878 - protein, 629 aa, Sorghum bicolor
MATPSAVGAACLVLARAAAGLGLGPGRGGDRARPRRFQRVVRRRCVAELSREGPAPTPRPLPPALLAPPLVPAFLAPPSEPEGEPASTPPPLPDAGLGDLGLQPEGIAEGSIDETVVVASEQDSEIVVGKEQARAKVTQSIVFVTGEASPYAKSGGLGDVCGSLPVALAARGHRVMVVMPRYLNGTSDKNYANAFYTEKHIRIPCFGGEHEVTFFHEYRDSVDWVFVDHPSYHRPGNLYGDKFGAFGDNQFRYTLLCYAACEAPLVLELGGYIYGQNCMFVVNDWHASLVPVLLAAKYRPYGVYKDSRSILVIHNLAHQGVEPASTYPDLGLPPEWYGALEWVFPEWARRHALDKGEAVNFLKGAVVTADRIVTVSKGYSWEVTTAEGGQGLNELLSSRKSVLNGIVNGIDINDWNPATDKCIPCHYSVDDLSGKAKCKSALQKELGLPIRPEVPLIGFIGRLDYQKGIDLIQLIIPHLMRDDVQFVMLGSGDPELEDWMRSTESDFKDKFRGWVGFSVPVSHRITAGCDILLMPSRFEPCGLNQLYAMQYGTVPVVHATGGLRDTVENFNPFGENGEQGTGWAFAPLTTENMFVDIANCNFDIQGAQIFLGRAHEEGHVKRLHVGPCR

SEQ ID NO: 4879 - DNA, 1815 bp, Triticum turgidum subsp
  CDS (1)..(1815)
atggcggctctggtcacgtcccagctcgccacctccggcaccgtcctcggcatcaccgacaggttccggcgtgcaggtttccagggcgtgaggccccggaacccggcggatgcggccctcgtcatgaggactatcggagcgagcgccgccccgaagcaaagccggaaagcgcaccgcgggagccggcggtgcctctccatggtggtgcgcgccacgggcagcggcggcatgaacctcgtgttcgtcggcgccgagatggcgccctggagcaagaccggcggcctcggcgacgtcctcggaggcctccccccagccatggccgccaacggtcaccgggtcatggtcatctccccgcgctacgaccagtacaaggacgcctgggacaccagcgtcgtctccgagatcaaggtcgcggacgagtacgagagggtgaggtacttccactgctacaagcgcggggtggaccgcgtgttcgtcgaccacccgtgcttcctggagaaggtccggggcaagaccaaggagaagatctacgggcccgatgccggcaccgactacgaggacaaccagctacgcttcagcctgctctgccaggcagcgctggaagcacccaggatcctggacctcaacaacaacccatacttttctggaccctacggggaggacgtggtgttcgtgtgcaacgactggcacacgggccttctggcctgctacctcaagagcaactaccagtccaatggcatctatatgacggccaaggtggcgttctgcatccacaacatctcgtaccagggccgcttctccttcgacgacttcgcgcagctcaacctgcccgacaggttcaagtcgtccttcgacttcatcgacggctacgacaagccggtggaggggcgcaagatcaactggatgaaggccgggatcctgcaggccgacaaggtgctgacggtgagcccctactacgctgaggagctcatctccggcgaagccaggggctgcgagctcgacaacatcatgcgcctcacgggcatcaccggcatcgtcaacggcatggacgtcagcgagtgggaccccaccaaggacaagttcctcgccgtcaactacgacgtcaccaccgcgttggaggggaaggcgctgaacaaggaggcgctgcaggccgaggtggggctgccggtggaccggaaggtgcccctggtggcgttcatcggcaggctggaggagcagaagggccccgacgtgatgatcgccgccatcccggagatcttgaaggaggaggacgtccagatcgttctcctgggcaccgggaagaagaagtttgagcggctgctcaagagcgtggaggagaagttcccgaacaaggtgagggccgtggtcaggttcaacgcgccgctggctcaccagatgatggctggcgccgacgtgctcgccgtcaccagccgcttcgagccctgtggcctcatccagctccaggggatgcgctacggaacgccgtgcgcgtgcgcgtccaccggcgggctcgtcgacactatcgtggagggcaagaccgggttccacatgggccgcctcagcgtcgactgtaatgtggtggaaccggccgacgtgaagaaggtggtgaccaccctgaagcgcgccgtcaaggtcgtcggcacgccggcgtaccatgggatggtcaagaactgcatgatacaggatctctcctggaagggtcctgccaagaactgggaggacgtgcttttggaactgggtgtcgaggggagcgagccgggggtcatcggcgaagagattgcgccgctcgccatggagaacgtcgccgctccctga

SEQ ID NO: 4880 - protein, 604 aa, Triticum turgidum subsp
MAALVTSQLATSGTVLGITDRFRRAGFQGVRPRNPADAALVMRTIGASAAPKQSRKAHRGSRRCLSMVVRATGSGGMNLVFVGAEMAPWSKTGGLGDVLGGLPPAMAANGHRVMVISPRYDQYKDAWDTSVVSEIKVADEYERVRYFHCYKRGVDRVFVDHPCFLEKVRGKTKEKIYGPDAGTDYEDNQLRFSLLCQAALEAPRILDLNNNPYFSGPYGEDVVFVCNDWHTGLLACYLKSNYQSNGIYMTAKVAFCIHNISYQGRFSFDDFAQLNLPDRFKSSFDFIDGYDKPVEGRKINWMKAGILQADKVLTVSPYYAEELISGEARGCELDNIMRLTGITGIVNGMDVSEWDPTKDKFLAVNYDVTTALEGKALNKEALQAEVGLPVDRKVPLVAFIGRLEEQKGPDVMIAAIPEILKEEDVQIVLLGTGKKKFERLLKSVEEKFPNKVRAVVRFNAPLAHQMMAGADVLAVTSRFEPCGLIQLQGMRYGTPCACASTGGLVDTIVEGKTGFHMGRLSVDCNVVEPADVKKVVTTLKRAVKVVGTPAYHGMVKNCMIQDLSWKGPAKNWEDVLLELGVEGSEPGVIGEEIAPLAMENVAAP

SEQ ID NO: 4881 - DNA, 2575 bp, Manihot esculenta
  CDS (50)..(2305)
gtttgatgaaccccatctcaagctgttggggctgtcgcacttgtgagaaatggcatttataggatcacttccttttattatccaaaccaaagcagaaagttctgtccttctccatgacaaaaacctacagcgatccagattctccgttttcccatgtagatcacaaaactcttttaatttagccgtttcgttatctttgagttttaagcctgtaagagctacaggtaaggaaggcgttagtggtgatgggtcagaggatacacttcaagccaccatcgagaaaagcaagaaagttctcgccttgcaaagggacctacttcagaagattgctgaaagaaggaaattggtttcttctatacaaagtagtgttggtgaccacgacacaaacaaaacttctcatgaacagagggaaaactctttggcaaattcagataatacttcaactagtgatgtgaatatgcaccaacagcaaaatggcccagttcttccgagtagctatgtccattcaactgcagatgaggtatcagaaactgcatcttcagctattaatagaggtcatgctaaagatgataaggaacttgaacaacatgcatctcctagaacagcctttgttaagaattctaccaaacagtttaaagagatggattctgagaaactacagacagatgagataccatcttttctttcaaacaccacagatatttccactataaatgaagaaaatagtgaacattcaaatgaatcaacctcacctatggtcgacatttttgaaagtgattctatgactgaagacatgaagccacctcctttggctggggacaatgtcatgaatgttattttggtagctgcagaatgtgctccatggtccaaaacaggtggccttggtgatgtcgctggatctttaccaaaggctttggctcggcgtggacatcgggttatggttgtggcaccgcgatatggcaactatgttgaacctcaggatactggagtccgaaagaggtataaggtggatggtcaggattttgaagtatcatacttccaagccttcattgatggggttgattttgtattcattgacagtcctatgtttcgccacatagggaatgatatatatggaggaaacagaatggatatattaaagaggatggtattattttgcaaagctgctgttgaggttccttggcatgtcccatgtggtggagtctgctatggggatggaaatttggctttcattgcaaatgattggcatacagcattgttgccagtgtatctgaaggcatattatcgggataatggtttaatgcaatatacaagatctgttcttgtaattcataacatagctcaccagggtcggggtcccagtggagatttctcttacgtgggtctaccagaacattacattgatctcttcaaactgcatgatccgattggtggtgaccacttcaatatctttgcacctggtcttaaggtggcagatcgtgtggttactgttagtcatggatacgcctgggagcttaaaacatctgaaggtggttggggtcttcacaatatcataaatgagaaccactggaaattgcagggcattgttaatgggattgatgccaaagaatggaatccacagtttgatattcaactgacatcagatggttatactaactattccctggaaacacttgatactggcaagcctcagtgcaagacagccttacagaacgagctccggtttgccatccccccagatgtccctgttattgggttcattggaaggttggattatcagaaaggtgtcgatctcatagctgaggcaattccctggatggtgggtcaggatgtgcaactagtaatgttgggtactggcagacaagacttggaagagatgcttagacaatttgaaaaccaacatagagataaagtgaggggatgggttggtttttctgtgaagacagctcacaggataactgctggtgcagatattttgctcatgccatcaagatttgaaccatgtgggctaaaccagttatatgctatgatgtacgggacgattcctgtagtacacgctgtgggtggactaagggacacggtgcaacctttcgatccatttaatgagtcggggcttgggtggacatttgatagcgctgaatcacataaactgatacatgcattaggcaattgcttgctcacttaccgagagtacaagaagagctgggaaggcctgcagagaagagggatgactccaaacctcagctgggaccatgctgctgagaaatatgaggagactcttgttgcagccaagtaccagtggtgagcaatagtgcttttccttaaattttgacttttttttttctgttaaataatgcttccaagaggttgccctctgatgctagtaagggggccaatagatggccatgtatgttctgctatatagctcaatgtgtaatcagcttagagttatgattcaggagttgtaatcctttctggttttatcacacattagcagaggatggtttggatgtgatgagtggtgacccatgttttatccttgtgcttattctgttatctgaaaaaaaaaaaaaaa

SEQ ID NO: 4882 - protein, 751 aa, Manihot esculenta
MAFIGSLPFIIQTKAESSVLLHDKNLQRSRFSVFPCRSQNSFNLAVSLSLSFKPVRATGKEGVSGDGSEDTLQATIEKSKKVLALQRDLLQKIAERRKLVSSIQSSVGDHDTNKTSHEQRENSLANSDNTSTSDVNMHQQQNGPVLPSSYVHSTADEVSETASSAINRGHAKDDKELEQHASPRTAFVKNSTKQFKEMDSEKLQTDEIPSFLSNTTDISTINEENSEHSNESTSPMVDIFESDSMTEDMKPPPLAGDNVMNVILVAAECAPWSKTGGLGDVAGSLPKALARRGHRVMVVAPRYGNYVEPQDTGVRKRYKVDGQDFEVSYFQAFIDGVDFVFIDSPMFRHIGNDIYGGNRMDILKRMVLFCKAAVEVPWHVPCGGVCYGDGNLAFIANDWHTALLPVYLKAYYRDNGLMQYTRSVLVIHNIAHQGRGPSGDFSYVGLPEHYIDLFKLHDPIGGDHFNIFAPGLKVADRVVTVSHGYAWELKTSEGGWGLHNIINENHWKLQGIVNGIDAKEWNPQFDIQLTSDGYTNYSLETLDTGKPQCKTALQNELRFAIPPDVPVIGFIGRLDYQKGVDLIAEAIPWMVGQDVQLVMLGTGRQDLEEMLRQFENQHRDKVRGWVGFSVKTAHRITAGADILLMPSRFEPCGLNQLYAMMYGTIPVVHAVGGLRDTVQPFDPFNESGLGWTFDSAESHKLIHALGNCLLTYREYKKSWEGLQRRGMTPNLSWDHAAEKYEETLVAAKYQW

SEQ ID NO: 4883 - DNA, 2842 bp, Triticum aestivum
  CDS (89)..(2488)
gctgccaccacctccgcctgcgccgcgctctgggcggaggaccaacccgcgcatcgtaccatcgcccgccccgatcccggccgccgccatgtcgtcggcggtcgcgtccgccgcgtccttcctcgcgctcgcctccgcctcccccgggagatcacgcaggcgggcgagggtgagcgcgccgccaccccacgccggggccggcaggctgcactggccgccgtggccgccgcagcgcacggctcgcgacggaggtgtggccgcgcgcgccgccgggaagaaggacgcgagggtcgacgacgacgccgcgtccgcgaggcagccccgcgcacgccgcggtggcgccgccaccaaggtcgcggagcggagggatcccgtcaagacgctcgatcgcgacgccgcggaaggtggcgcgccggcaccgccggcaccgaggcaggacgccgcccgtccaccgagtatgaacggcacgccggtgaacggtgagaacaaatctaccggcggcggcggcgcgaccaaagacagcgggctgcccgcacccgcacgcgcgccccatccgtcgacccagaacagagtaccagtgaacggtgaaaacaaagctaacgtcgcctcgccgccgacgagcatagccgaggtcgtggctccggattccgcagctaccatttccatcagtgacaaggcgccggagtccgttgtcccagccgagaagccgccgccgtcgtccggctcaaatttcgtggtctcggcttctgctcccaggctggacattgacagcgatgttgaacctgaactgaagaagggtgcggtcatcgtcgaagaagctccaaacccaaaggctctttcgccgcctgcagcccccgctgtacaagaagacctttgggacttcaagaaatacattggcttcgaggagcccgtggaggccaaggatgatggctgggctgttgcagatgatgcgggctcctttgaacatcaccagaaccatgattccggacctttggcaggggagaacgtcatgaacgtggtcgtcgtggctgctgaatgttctccctggtgcaaaacaggtggtcttggagatgttgccggtgctttgcccaaggctttggcgaagagaggacatcgtgttatggttgtggtaccaaggtatggggactatgaggaagcctacgatgtcggagtccgaaaatactacaaggctgctggacaggatatggaagtgaattatttccatgcttatatcgatggagttgattttgtgttcattgacgctcctctcttccgacaccgccaggaagacatttatgggggcagcagacaggaaattatgaagcgcatgattttgttctgcaaggccgctgtcgaggttccttggcacgttccatgcggcggtgtcccttatggggatggaaatctggtgtttattgcaaatgattggcacacggcactcctgcctgtctatctgaaagcatattacagggaccatggtttgatgcagtacactcggtccattatggtgatacataacatcgcgcaccagggccgtggcccagtagatgaattcccgttcaccgagttgcctgagcactacctggaacacttcagactgtacgaccccgtgggtggtgagcacgccaactacttcgccgccggcctgaagatggcggaccaggttgtcgtggtgagccccgggtacctgtgggagctcaagacggtggagggcggctgggggcttcacgacatcatacggcagaacgactggaagacccgcggcatcgtcaacggcatcgacaacatggagtggaaccccgaggtggacgtccacctcaagtcggacggctacaccaacttctccctggggacgctggactccggcaagcggcagtgcaaggaggccctgcagcgcgagctgggcctgcaggtccgcgccgacgtgccgctgctcggcttcatcggccgcctggacgggcagaagggcgtggagatcatcgcggacgccatgccctggatcgtgagccaggacgtgcagctggtcatgctgggcaccggccgccacgacctggagagcatgctgcggcacttcgagcgggagcaccacgacaaggtgcgcgggtgggtggggttctccgtgcgcctggcgcaccggatcacggcgggcgccgacgcgctcctcatgccctcccggttcgagccgtgcgggttgaaccagctttacgccatggcctacggcaccgtccccgtcgtgcacgccgtcggcggggtgagggacaccgtgccgccgttcgaccccttcaaccactccggcctcgggtggacgttcgaccgcgccgaggcgcacaagctgatcgaggcgctcgggcactgcctccgcacctaccgggactacaaggagagctggaggggcctccaggagcgcggcatgtcgcaggacttcagctgggagcatgccgccaagctctacgaggacgtcctcctcaaggccaagtaccagtggtgaacgctagctgctagccgctccagccccgcatgcgtgcatgcatgagagggtggaactgcgcattgcgcccgcaggaacgtgccatccttctcgatgggagcgccggcatccgcgaggtgcagtgacatgagaggtgtgtgtggttgagacgctgattccgatctcgatctggtccgtagcagagtagagcggacgtagggaagcgctccttgttgcaggtatatgggaatgttgtcaacttggtattgtagtttgctatgttgtatgcgttattacaatgttgttacttattcttgttaagtcggaggcaaagggcgaaagctagctcacatgaaaaaaaaaaaaaaaaaaaaa

SEQ ID NO: 4884 - protein, 799 aa, Triticum aestivum
MSSAVASAASFLALASASPGRSRRRARVSAPPPHAGAGRLHWPPWPPQRTARDGGVAARAAGKKDARVDDDAASARQPRARRGGAATKVAERRDPVKTLDRDAAEGGAPAPPAPRQDAARPPSMNGTPVNGENKSTGGGGATKDSGLPAPARAPHPSTQNRVPVNGENKANVASPPTSIAEVVAPDSAATISISDKAPESVVPAEKPPPSSGSNFVVSASAPRLDIDSDVEPELKKGAVIVEEAPNPKALSPPAAPAVQEDLWDFKKYIGFEEPVEAKDDGWAVADDAGSFEHHQNHDSGPLAGENVMNVVVVAAECSPWCKTGGLGDVAGALPKALAKRGHRVMVVVPRYGDYEEAYDVGVRKYYKAAGQDMEVNYFHAYIDGVDFVFIDAPLFRHRQEDIYGGSRQEIMKRMILFCKAAVEVPWHVPCGGVPYGDGNLVFIANDWHTALLPVYLKAYYRDHGLMQYTRSIMVIHNIAHQGRGPVDEFPFTELPEHYLEHFRLYDPVGGEHANYFAAGLKMADQVVVVSPGYLWELKTVEGGWGLHDIIRQNDWKTRGIVNGIDNMEWNPEVDVHLKSDGYTNFSLGTLDSGKRQCKEALQRELGLQVRADVPLLGFIGRLDGQKGVEIIADAMPWIVSQDVQLVMLGTGRHDLESMLRHFEREHHDKVRGWVGFSVRLAHRITAGADALLMPSRFEPCGLNQLYAMAYGTVPVVHAVGGVRDTVPPFDPFNHSGLGWTFDRAEAHKLIEALGHCLRTYRDYKESWRGLQERGMSQDFSWEHAAKLYEDVLLKAKYQW

SEQ ID NO: 4885 - DNA, 1818 bp, Triticum monococcum
  CDS (1)..(1818)
atggcggctctggtcacgtcccagctcgccacctccggcgccgtcctcggcatcaccgacaggttccggcgtgcaggttttcagggcgtgaggccccggagcccggcggatgcggcgctcggcatgaggactgtcggagcaagcgcggcaccgaagcaacaaagcaggaaagcgcaccgcgggacccggcggtgcctctcggtggtggtgcgcgccacgggcagcggcggcatgaacctcgtgttcgtcggcgccgagatggcgccctggagcaagaccggcggcctcggcgacgtcctcgggggcctccccccagccatggccgccaacggtcaccgggtcatggtcatctccccgcgctacgaccagtacaaggacgcctgggacaccagcgtcgtctccgagatcaaggtcgccgacgagtacgagcgggtgaggtacttccactgcttcaaacgtggggtggaccgcgtgttcgtcgaccacccgtgcttcctggagaaggtccggggcaagaccaaggagaagatctatgggcccgacgccggcacggactacgaggacaaccagctacgcttcagccttctctgccaggcagcacttgaggtgcccaggatcctcgacctcaacaacaacccatacttttctggaccctacggggaagacgtggtgttcgtgtgcaacgactggcacacgggccttctggcctgctacctcaagagcaactaccagtccaatggcatctataggacggccaaggtggcgttctgcatccacaacatctcgtaccagggccgcttctccttcgacgacttcgcgcagctcaacctgcccgacaggttcaagtcgtccttcgacttcatcgacgggtacgacaagccggtggaggggcgcaagatcaactggatgaaggccgggatcctgcaggccgacaaggtgctgacggtgagcccctactacgcggaggagctcatctccggcgaagccaggggctgcgagctcgacaacatcatgcgcctcacgggcatcaccggcatcgtcaacggcatggatgtcagcgagtgggaccccaccaaggacaatttcctcaccgtcaactacaacgtcaccaccgcgttggaggggaaggtgctgaacaaggaggcgctgcaggccgaggtggggctgccggtggaccggaaggtgccgctggtggcgttcatcggcaggctggaggagcagaagggccccgacgtgatgatcgccgccatcccggagatcgtgaaggaggaggacgtccagatcgttctcctgggcaccgggaagaagaagtttgagcggctgctcaagagcgtggaggagaagttcccaagcaaggtgagggccgtggtcaggttcaacgcgccgctggctcaccagatgatggccggagccgacgtgctcgccgtcaccagccgctttgagccctgcggcctcatccagctccaggggatgcgctacggaacgccgtgcgcatgcgcgtccaccggcgggctcgtcgacaccatcgtggagggcaagaccgggttccacatgggccgcctcagcgtcgactgcaacgtggtggagccggccgacgtgaagaaggtggtgaccaccctgaagcgcgccgtcaaggtcgtcggcacgccggcgtaccatgagatggtcaagaactgcatgatacaggatctctcctggaaggggcctgccaagaactgggagcacgtgcttctggaactgggggtcgaggggagcgagccggggatcgtcggcgaggagatcgcgccgctcgccatggagaacgtcgccgctccctga

SEQ ID NO: 4886 - protein, 605 aa, Triticum monococcum
MAALVTSQLATSGAVLGITDRFRRAGFQGVRPRSPADAALGMRTVGASAAPKQQSRKAHRGTRRCLSVVVRATGSGGMNLVFVGAEMAPWSKTGGLGDVLGGLPPAMAANGHRVMVISPRYDQYKDAWDTSVVSEIKVADEYERVRYFHCFKRGVDRVFVDHPCFLEKVRGKTKEKIYGPDAGTDYEDNQLRFSLLCQAALEVPRILDLNNNPYFSGPYGEDVVFVCNDWHTGLLACYLKSNYQSNGIYRTAKVAFCIHNISYQGRFSFDDFAQLNLPDRFKSSFDFIDGYDKPVEGRKINWMKAGILQADKVLTVSPYYAEELISGEARGCELDNIMRLTGITGIVNGMDVSEWDPTKDNFLTVNYNVTTALEGKVLNKEALQAEVGLPVDRKVPLVAFIGRLEEQKGPDVMIAAIPEIVKEEDVQIVLLGTGKKKFERLLKSVEEKFPSKVRAVVRFNAPLAHQMMAGADVLAVTSRFEPCGLIQLQGMRYGTPCACASTGGLVDTIVEGKTGFHMGRLSVDCNVVEPADVKKVVTTLKRAVKVVGTPAYHEMVKNCMIQDLSWKGPAKNWEHVLLELGVEGSEPGIVGEEIAPLAMENVAAP

SEQ ID NO: 4887 - DNA, 2081 bp, Triticum aestivum
  CDS (120)..(1919)
tctgcttctacttctacttgagcggagcctgctgcgttcccacggccaccagccactccgcctgctccgcggttccacagcgcctagctcgaaaaggtcgtcattgagaggctgcaccaatgggttccattcctaattattgttcttatcaaacaaacagtgttggttcactgaaactgtcgcctcacatccaattccagcaatcttgtaacaatgaagttatgttcctatccatgcgaaataagacacagctggccaaaagaagagccacaaattatggaactcatcgtaattctagtaggactcctgcacctatcgtatgttcaactggaatgcccataattttcgttgccactgaagtgcacccatggtgcaaaactggaggccttggtgatgtcgtaggaggattgcccccagctctggctgcaatggggcaccgggttatgacgatagctcctcgctatgatcagtacaaggatacatgggatacaaatgttcttgttgaggtaattgttggtgacagaacagaaacagtgcgcttttttcactgctacaaaaggggggttgatcgtgtttttgttgatcatcctatgtttcttgagaaggtatggggcaaaactggatcaaaattgtatgggcctaccactggaacagacttccgagataaccaattacggttctgccttttgtgccttgctgcattggaggctccgagggttcttaatctcaacaattctgaatacttctctggaccatatggagaaaatgttgtcttcgttgcaaatgactggcacactgcagttttgccatgctatttgaagagcatgtataagcaaaatggaatttatgtgaatgccaaggttgctttctgcattcacaatatcgcctatcagggcagatttcccagagtggacttcgaacttcttaatttacctgaaagtttcatgccgtcatttgattttgttgatgggcatgttaagccagtagtagggagaaagattaactggatgaaggcagggatcactgagtgtgatgtggtccttacagttagtccacattatgtcaaagaacttacttctggcccagagaaaggtgttgagttggatggcgtccttcgtgcaaagcctcttgaaactggaattgtaaatggaatggatgttgttgattggaatccagcaacagataagtacatcagtgtcaaatacaatgcaacaacggtggcggaagcaagagctctcaataaagaaatactgcaggctgaagttggattgcctgtggactctagcatacctgttatagttttcattggacgtcttgaagaacagaaagggtcagacatactaattgcagccataccggagtttctcgaggagaatgttcagataattgttctcggcacagggaagaagaaaatggaggaggaactgatgctgctagaagcgaagtacccacagaatgccagaggcatagcaaaattcaatgtcccattggcgcacatgatgtttgccggggctaatttcataattgttccaagtaggttcgagccatgtggcctcatccaattgcaagggatgagatatggagtgattcccatctgttcatccaccggaggactcgttgacacggtgagcgagggtgtcaccggattccacatgggttcgttcaatgtcgagtttgaaaccgtcgatccagcagatgtcgcggcagttgcttcgaatgtcacacgagctctgaaacagtacaaaacaccgtcgttccacgcaatggttcagaattgcatggcgcaggacctatcttggaagggaccggcaaagaagtgggaggaggctcttcttggcctaggagtcgagggaagtcagccgggcatcgagggcgaggagatcgctccacttgcgaaacagaatgtggccactccctgaaatctccaaatattagggagagtgttctaagattcgacaaaataatgaggttgctaaagatgaagctgtattcatctaggctttgccatttctctactactccatgtgtaacatactacctgaatttcaacaagtatgcatccttaaaaaaaaaaaaaaaaa

SEQ ID NO: 4888 - protein, 599 aa, Triticum aestivum
MGSIPNYCSYQTNSVGSLKLSPHIQFQQSCNNEVMFLSMRNKTQLAKRRATNYGTHRNSSRTPAPIVCSTGMPIIFVATEVHPWCKTGGLGDVVGGLPPALAAMGHRVMTIAPRYDQYKDTWDTNVLVEVIVGDRTETVRFFHCYKRGVDRVFVDHPMFLEKVWGKTGSKLYGPTTGTDFRDNQLRFCLLCLAALEAPRVLNLNNSEYFSGPYGENVVFVANDWHTAVLPCYLKSMYKQNGIYVNAKVAFCIHNIAYQGRFPRVDFELLNLPESFMPSFDFVDGHVKPVVGRKINWMKAGITECDVVLTVSPHYVKELTSGPEKGVELDGVLRAKPLETGIVNGMDVVDWNPATDKYISVKYNATTVAEARALNKEILQAEVGLPVDSSIPVIVFIGRLEEQKGSDILIAAIPEFLEENVQIIVLGTGKKKMEEELMLLEAKYPQNARGIAKFNVPLAHMMFAGANFIIVPSRFEPCGLIQLQGMRYGVIPICSSTGGLVDTVSEGVTGFHMGSFNVEFETVDPADVAAVASNVTRALKQYKTPSFHAMVQNCMAQDLSWKGPAKKWEEALLGLGVEGSQPGIEGEEIAPLAKQNVATP

SEQ ID NO: 4889 - DNA, 2591 bp, Triticum aestivum
  CDS (256)..(2199)
ctcccactcttctctccccgcgcacaccgagtcggcaccggctcatcacccatcacctcggcctcggccaccggcaaaccccccgatccgcttttgcaggcagcgcactaaaaccccggggagcgcgccccgcggcagcagcagcaccgcagtgggagagagaggcttcgccccggcccgcaccgagcggggcgatccaccgtccgtgcgtccgcacctcctccgcctcctcccctgtcccgcgcgcccacacccatggcggcgacgggcgtcggcgccgggtgcctcgcccccagcgtccgcctgcgcgccgatccggcgacggcggcccgggcgtccgcctgcgtcgtccgcgcgcggctccggcgcttggcgcggggccgctacgttgccgagctcagcagggagggccccgcggcgcgccccgcgcagcagcagcaactggccccgccgctcgtgccaggcttcctcgcgccgccgccgcccgcgcccgcccagtcgccggccccgacgcagccgcccctgccggacgccggcgtgggggaactcgcgcccgacctcctgctcgaagggattgctgaggattccatcgacagcataattgtggctgcaagtgagcaggattctgagatcatggatgcgaatgagcaacctcaagctaaagttacacgtagcatcgtgtttgtgactggtgaagctgctccttatgcaaagtcaggggggctgggagatgtttgtggttcgttaccaattgctcttgctgctcgtggtcaccgtgtgatggttgtaatgccaagatacttgaatgggtcctctgataaaaactatgcaaaggcattatacactgggaagcacattaagattccatgctttgggggatcacatgaagtgaccttttttcatgagtatagagacaacgtcgattgggtgtttgtcgatcatccgtcatatcatagaccaggaagtttatatggagataattttggtgcttttggtgataatcagttcagatacacactcctttgctatgctgcatgcgaggccccactaatccttgaattgggaggatatatttatggacagaattgcatgtttgttgtgaacgattggcatgccagccttgtgccagtccttcttgctgcaaaatatagaccatacggtgtttacagagattcccgcagcacccttgttatacataatttagcacatcagggtctggagcctgcaagtacatatcctgatctgggattgccacctgaatggtatggagctttagaatgggtatttccagaatgggcaaggaggcatgcccttgacaagggtgaggcagttaactttttgaaaggagcagtcgtgacagcagatcgaattgtgaccgtcagtcagggttattcatgggaggtcacaactgctgaaggtggacagggcctcaatgagctcttaagctcccgaaaaagtgtattgaatggaattgtaaatggaattgacattaatgattggaaccccaccacagacaagtgtctccctcatcattattctgtcgatgacctctctggaaaggccaaatgtaaagctgaattgcagaaggagctgggtttacctgtaagggaggatgttcctctgattggctttattggaagactggattaccagaaaggcattgatctcattaaaatggccattccagagctcatgagggaggacgtgcagtttgtcatgcttggatctggggatccaatttttgaaggctggatgagatctaccgagtcgagttacaaggataaattccgtggatgggttggatttagtgttccagtttcccacagaataactgcaggttgcgatatattgttaatgccatccaggtttgaaccttgtggtcttaatcagctatatgctatgcaatatggtacagttcctgtagttcatggaactgggggcctccgagacacagtcgagaccttcaacccttttggtgcaaaaggagaggagggtacagggtgggcgttctcaccgctaaccgtggacaagatgttgtgggcattgcgaaccgcgatgtcgacattcagggagcacaagccgtcctgggaggggctcatgaagcgaggcatgacgaaagaccatacgtgggaccatgccgccgagcagtacgagcagatcttcgaatgggccttcgtggaccaaccctacgtcatgtagacggggactggggaggtcgaagcgcgggtctccttgagctctgaagacatgttcctcatccttccgcggcccggaaggatacccctgtacattgcgttgtcctgctacagtagagtcgcaatgcgcctgcttgcttggtccgccggttcgagagtagatgacggctgtgctgctgcggcggtgacagcttcgggtggatgacagttacagttttggggaataaggaagggatgtgctgcaggatggttaacagcaaagcaccactcagatggcagcctctctgtccgtgttacagctgaaatcagaaaccaactggtgactctttagccttagcgattgtgaagtttgttgcattctgtgtatgttgtcttgtccttagctgacaaatatta

SEQ ID NO: 4890 - protein, 647 aa, Triticum aestivum
MAATGVGAGCLAPSVRLRADPATAARASACVVRARLRRLARGRYVAELSREGPAARPAQQQQLAPPLVPGFLAPPPPAPAQSPAPTQPPLPDAGVGELAPDLLLEGIAEDSIDSIIVAASEQDSEIMDANEQPQAKVTRSIVFVTGEAAPYAKSGGLGDVCGSLPIALAARGHRVMVVMPRYLNGSSDKNYAKALYTGKHIKIPCFGGSHEVTFFHEYRDNVDWVFVDHPSYHRPGSLYGDNFGAFGDNQFRYTLLCYAACEAPLILELGGYIYGQNCMFVVNDWHASLVPVLLAAKYRPYGVYRDSRSTLVIHNLAHQGLEPASTYPDLGLPPEWYGALEWVFPEWARRHALDKGEAVNFLKGAVVTADRIVTVSQGYSWEVTTAEGGQGLNELLSSRKSVLNGIVNGIDINDWNPTTDKCLPHHYSVDDLSGKAKCKAELQKELGLPVREDVPLIGFIGRLDYQKGIDLIKMAIPELMREDVQFVMLGSGDPIFEGWMRSTESSYKDKFRGWVGFSVPVSHRITAGCDILLMPSRFEPCGLNQLYAMQYGTVPVVHGTGGLRDTVETFNPFGAKGEEGTGWAFSPLTVDKMLWALRTAMSTFREHKPSWEGLMKRGMTKDHTWDHAAEQYEQIFEWAFVDQPYVM

SEQ ID NO: 4891 - DNA, 1872 bp, Oryza sativa
  CDS (1)..(1872)
atggcgacggcggcggggatggggatcggggcggcgtgcctggtggcgccgcaggtgaggccggggaggaggttgcggctccagcgggtgcggaggcggtgcgtggcggagctgagcagggacggtgggtcggcgcagcgcccgctggcaccggcgccgctggtgaagcagccggtcctgccgaccttcctcgtgccgacgtcgacgccacccgcgcccacgcagtcgccggcgccggcgccgaccccgccgccgttgccggactccggcgtgggggagatcgagcccgatctagaaggtctcacagaagattccatcgacaaaacaatttttgtggctagtgagcaggagtctgagatcatggatgtgaaggagcaagctcaagctaaagtaacacgcagcgttgtctttgtaaccggtgaagcttctccttatgcaaagtcaggtggactaggagatgtttgtggttcactgccaattgctcttgctcttcgtggtcatcgtgtgatggttgtaatgccgagatacatgaacggggccttgaacaaaaattttgcaaacgcattttacactgagaagcacattaagattccatgctttggcggagaacatgaagttactttttttcacgagtatagggattctgttgattgggtgtttgttgatcatccctcatatcatagacctggaaatttgtatggagataattttggtgcttttggcgataatcagttcagatacacactcctgtgctatgcggcgtgtgaagccccattaattcttgaactgggaggatatatctatggacagaaatgcatgtttgttgtgaatgattggcatgccagtcttgtgccagtccttcttgctgcaaaatatagaccatatggtgtttacagggatgcccgcagtgttcttgtcatacataatctagcacatcagggtgtggagcctgccagtacatatcctgacctgggattgccacctgaatggtatggagcattagaatgggtgtttccagagtgggcaaggcggcatgcccttgacaagggtgaggcagtcaattttttaaaaggcgcagttgtgacagcagatcgaattgtgactgtcagccaggggtattcatgggaggtcacaactgctgaaggtgggcaaggcctcaatgagctcttaagctcccggaagagtgtattgaatggaattgtaaatggaattgacattaatgattggaacccatccacagacaagtttctcccttatcattattctgttgatgacctgtccggaaaggccaagtgtaaagctgaattgcagaaggagctgggtttacctataaggcccgatgtgcctctgattggctttattggaagattggactatcaaaaaggcattgatctaattaaacttgccattccagatctcatgcgggacaatattcaattcgtcatgcttggatctggtgacccaggttttgaaggatggatgagatccacagaatcagggtacagggataaatttcgtggatgggttggatttagtgttccagtttcccaccgaataactgcaggttgcgatatattgttgatgccatccagattcgaaccttgtggcctcaatcagctatatgctatgcaatatggtacagtgcctgttgttcatggaactggaggcctcagagatacagtggagaattttaacccgtttgctgagaaaggagagcagggtacagggtgggcattctcgccactaaccattgaaaaaggcattgcggatggcaatttcgacatacagggaacacaagtcctcttgggagggtctaatgaagcgaggcatgtcaagcgactttacatgggaccatgccgcctcacagtatga

SEQ ID NO: 4892 - protein, 623 aa, Oryza sativa
MATAAGMGIGAACLVAPQVRPGRRLRLQRVRRRCVAELSRDGGSAQRPLAPAPLVKQPVLPTFLVPTSTPPAPTQSPAPAPTPPPLPDSGVGEIEPDLEGLTEDSIDKTIFVASEQESEIMDVKEQAQAKVTRSVVFVTGEASPYAKSGGLGDVCGSLPIALALRGHRVMVVMPRYMNGALNKNFANAFYTEKHIKIPCFGGEHEVTFFHEYRDSVDWVFVDHPSYHRPGNLYGDNFGAFGDNQFRYTLLCYAACEAPLILELGGYIYGQKCMFVVNDWHASLVPVLLAAKYRPYGVYRDARSVLVIHNLAHQGVEPASTYPDLGLPPEWYGALEWVFPEWARRHALDKGEAVNFLKGAVVTADRIVTVSQGYSWEVTTAEGGQGLNELLSSRKSVLNGIVNGIDINDWNPSTDKFLPYHYSVDDLSGKAKCKAELQKELGLPIRPDVPLIGFIGRLDYQKGIDLIKLAIPDLMRDNIQFVMLGSGDPGFEGWMRSTESGYRDKFRGWVGFSVPVSHRITAGCDILLMPSRFEPCGLNQLYAMQYGTVPVVHGTGGLRDTVENFNPFAEKGEQGTGWAFSPLTIEKGIADGNFDIQGTQVLLGGSNEARHVKRLYMGPCRLTV

SEQ ID NO: 4893 - DNA, 2028 bp, Triticum aestivum
  CDS (30)..(1754)
gctgcaggtagccacaccctgcgcgcgccatggcggctctggtcacgtcccagctcgccacctccggcaccgtcctcggcatcaccgacaggttccggcgtgcaggtttccagggcgtgaggccccggagcccggcggatgcggctctcggcatgaggaccgtcggagctagcgccgccccaacgcaaagccggaaagcgcaccgcgggacccggcggtgcctctccatggtggtgcgcgccaccggcagcggcggcatgaacctcgtgttcgtcggcgccgagatggcgccctggagcaagaccggcggcctcggcgacgtcctcgggggcctccccccagccatggccgccaacggccaccgggtcatggtcatctccccgcgctacgaccagtacaaggacgcctgggacaccagcgtcgtctccgagatcaaggtcgttgacaagtacgagagggtgaggtacttccactgctacaagcgcggggtggaccgcgtgttcgtcgaccacccgtgcttcctggagaaggtccggggcaagaccaaggagaagatctacgggcccgacgccggcacggactacgaggacaaccagcagcgcttcagccttctctgccaggcggcgctggaagtgccgaggatcctgaacctcgacaataacccctacttttctgggccctacggggaggacgtggtgttcgtgtgcaatgactggcacacgggccttctggcctgctacctcaagagcaactaccagtccaatggcatctacagggccgcaaaggtggcattctgcatccacaacatctcgtaccagggccgcttctccttcgacgacttcgcgcagctcaacctgcccgacaggttcaagtcgtccttcgacttcatcgacggctacgacaagccggtggaggggcgcaagatcaactggatgaaggccgggatcctgcaggccgacaaggtgctgacggtgagcccctactacgcggaggagctcatctctggcgaagccaggggctgcgagctcgacaacatcatgcgcctcactgggatcaccggcatcgtcaacggcatggatgttagcgagtgggaccccaccaaggacaagttcctcgccgtcaactacgacatcaccaccgcgttggaggggaaggcgctgaacaaggaggcgctgcaggccgaggtggggctgccggtggaccggaaggtgcccctggtggcgttcatcggcaggctggaggagcagaagggccccgacgtgatgatcgccgccatcccggagatcctgaaggaggaggacgtccagatcgttcttctgggcaccgggaagaagaagttcgagcggctactcaagagcattgaggagaaattcccgagcaaggtgagggccgtggtcaggttcaacgcgccgctggctcaccagatgatggccggcgccgacgtgctcgccgtcaccagccgcttcgagccctgcggcctcatccagctccaggggatgcgctacggaacgccgtgcgcgtgcgcgtccaccggcgggcttgtcgacacgatcgtggagggcaagaccgggttccacatgggccggctcagtgtcgattgcaacgtggtggagccggccgacgtgaagaaggtggtgaccaccctgaagcgcgccgtcaaggtcgtcggcacgccggcataccatgagatggtcaagaactgcatgatacaggatctctcctggaaggggccagcctggaaggtaagtcgatgaccgccaagatcaatgcgacacaaccaggaaatgacagatgaccgccaagatcaacgcacacaacaaatgacgcaaggggagcgatcatggctgaaacagcttcactattttccttgctagtacagtactacttgctcagtttgctgttaaactgtgagtctgtgacgcactaaacttatttaataagttgtgcagcagcaacttatttaatgtaagtcatgcaaagagccagcttctaaatacttcctaaaatacaaaaaaaaaaaaaaaaaaa

SEQ ID NO: 4894 - protein, 574 aa, Triticum aestivum
MAALVTSQLATSGTVLGITDRFRRAGFQGVRPRSPADAALGMRTVGASAAPTQSRKAHRGTRRCLSMVVRATGSGGMNLVFVGAEMAPWSKTGGLGDVLGGLPPAMAANGHRVMVISPRYDQYKDAWDTSVVSEIKVVDKYERVRYFHCYKRGVDRVFVDHPCFLEKVRGKTKEKIYGPDAGTDYEDNQQRFSLLCQAALEVPRILNLDNNPYFSGPYGEDVVFVCNDWHTGLLACYLKSNYQSNGIYRAAKVAFCIHNISYQGRFSFDDFAQLNLPDRFKSSFDFIDGYDKPVEGRKINWMKAGILQADKVLTVSPYYAEELISGEARGCELDNIMRLTGITGIVNGMDVSEWDPTKDKFLAVNYDITTALEGKALNKEALQAEVGLPVDRKVPLVAFIGRLEEQKGPDVMIAAIPEILKEEDVQIVLLGTGKKKFERLLKSIEEKFPSKVRAVVRFNAPLAHQMMAGADVLAVTSRFEPCGLIQLQGMRYGTPCACASTGGLVDTIVEGKTGFHMGRLSVDCNVVEPADVKKVVTTLKRAVKVVGTPAYHEMVKNCMIQDLSWKGPAWKVSR

SEQ ID NO: 4895 - DNA, 3901 bp, Vigna unguiculata
  CDS (161)..(3604)
ggcacgagaattgaattaaattgaacaccaccgccacacgcactacaacgtcgtttttgttttattcagttgaaacttgaaaccttcatattcatcatcaatcaaatgctcagataacaaaacgaaacgtcgtttaaagcaaagttagtaactaactacgatggagatgtcgttgcagctaaactacaaaacgccgttttgtttcaagctcactccattttctgttttaacaccttcttcatggcacaaagcaagtattcgagtttcttgcgttaatgctagtgcagatttttctaggaagagacaacagaagaagagttcaattgcgaagccaaagggttctaatccaaagggttttgttccaaaatcatctattggatcaagcagtaagaaaaatcctagagtcagtaagaagggagattctttagctccagttgttagtgaggttttggaggatgataataaacaaacacttgatgttattattgatgatgatgaagatgaattttcggtggaggaaaattgtggtgtggatgataaaattaataaaattgctcgagagttcggggaatcgtccttgatagatgagacattcgatgttgaaaacattcctataattgatgatgttcaattatatgaggagggaaattcttacgttggagatgatgggaatgttaaagattcagagggaaggagattatactatgctgaaattgatggaaatcttagaggtacatatactgatactaatggggaaatagctgggaatatcgttgaggaaacaagtgctgctatcgatgatgttaaaattaacgaggaagcttctcggatgttgaagttgaagttggaagaaaatttgcgaaaacaggaaatagagaggattgcggaggaaaattttttacgaggggcaaagttgtttgtatatcctcctgtggttaaacctgatgaagatatagaggtgtttcttaacaagaacctttcgacactaagtgatgaacctgatattttgattttgggggcgtttaatgattgggagtggaaatcttttaccattagattgaataaaacacatcttaaagatgattggtggagttgccaattgtatgtgccaagagaagcctataaaatagactttgtgttctttaatggacaaagtgtttatgacaataatgaccaaaaagacttttgtataccagttgttggtggaatggatgcattggtgttcgaagattttttgctcgaggagaagcgtaaagaattagaaaaacttgctaaggagcaggctgaaagggaaagacaggctgaagagcaaaggcgaatagatgcagacaaagctgtaaagggagaggacaggttgcaggcaaggatggaggttgaaaaaatgcaagatacgttgctgcagttgatgaaaaatgctgtaacctctattgataatgtttggtatattgagcctagtgagtttaacagcaatgactcagtcagattatattataatggaaactcgggtcctcttcaacatgctaaggaagtatgggttcatggcggtcacaacaattggaaggatggattaacaattgttgaaaggcttgtcaaatcaggtttgaaaggtggtgcttggtggtatgctgatgttgttgtacctgaccaagctcttgtcctggattgggtctttgctgatggtccacctcaaaatgcagttgtgtatgataacaaccgtatgcaagatttccatgctattgtccctatggctacacccgacgcacagtattgggttgaggaagagcagctaatatacagaaaacttcaggaggagaggaagttgaaagaggaagttatacgggcgaaggctgaaaaaacagcacaaatgaaagccgaaacaaaggaaaaaactttgaaaaagtttttactatctcaaaagcatatcgtctacactgagccgcttgatattcaagcagggagtacagtgacggtgttttataacccctcaaacacaaatctgaatggaagacctgaggtttggtttagaggctcatttaatcgttggtctcatcgtaatggtccattgccacctcagagaatgttgcctgctgagagtggcacacatgtcaaagcctctgttaaagttccattggatgcatacatgatggactttgtattctctgagagtgaaaatggtggagtttttgataacaaatttggaatggattaccacatacctgtttttggaggtattgtgaaggaacctcctatgcatattgttcatattgctgttgagatggccccaattgcaaaggttggaggccttggtgatgttgttactagtctttcccgagctgttcaagatttaaatcataatgtggatatcattcttccaaaatatgactgcttgaaccttagcaatgtaaaggacttgcaatttcacaaaagctatttctggagtgggactgaaataaaagtatggcacggaaaggtcgagggcctctcggtctactttttggagcctcagaatggattattttgggtgggctgtgtatatggtcgtgcaaatgatgcagagagatttggttttttttgccatgccgctcttgaatttctactccaaaatggaagtcatcctgatatcatccactgccatgactggtcgagtgctccagttgcatggctatttaaagaacagtatacacattatggtcttagtaaggctcgagttgtcttcacaattcataaccttgaatttggtgccaatctcattggaaaagctatggcatacgctgacaaggctacaactgtctcccccacttattcaagggagattgctgggaatcatgcagttgctactcatcttcacaagtttcatggtataataaatggaatcgacccagatatatgggacccatttaatgataactccattcctgtaccatacacagcagaaaatgttgttgaaggaaaaagagcgtccaaggaagccttacaacaaaagcttggtttgaaaaaagctgatcttcctttggtgggagttattactcgattgactcatcaaaaagggatccatctcatcaaacatgccatatggcgtaccctagaacgcggtggacaggtcgtattacttggttcggctcctgatcaccgtatacaaaatgattttgtgaatttggccaatcaattgcattccagtcataatgatcgggcaagactttgccttgcatatgatgaacctctttcccacatgatatatgctggtgctgatttcattcttgttccttcaatctttgagccatgtggactcactcaactcacagcaatgagatacggttcaataccaattgttcgaaaaactgggggactttatgatacggtgtttgacgttgataatgataaggatagagcacaagtgcaaggtcttgagccaaatggattcagttttgatggggctgatgcgggaggtgttgattatgctcttaatagggcaatatctgcttggtatgatggccgtgagtggtttaacacattatgcaagacagtaatggagcaagattggtcttggaaccgccctgctctcgactatttggagctttaccatgcagcatgcaagttggaatgagagtttagtgagcgggaagccatgcaaattaaggttcatcgccgttgtacagctttagtctaaagcaaaattagtgcacatagttaatcctagtgaaaagataatagcaaagtgacatcatttgtagacaccagcttcttgttcatttttttgttggcacacaataatgtaggtaaatattacatagttttagtatagatgctgagagtttgtcctcttaaataaatgaacatgaacttgtgaataaaaaaaaaaaaaaaaaaaaaaaaaaaaaaaaaaaaaaaaaaaaaaaaaaaa

SEQ ID NO: 4896 - protein, 1147 aa, Vigna unguiculata
MEMSLQLNYKTPFCFKLTPFSVLTPSSWHKASIRVSCVNASADFSRKRQQKKSSIAKPKGSNPKGFVPKSSIGSSSKKNPRVSKKGDSLAPVVSEVLEDDNKQTLDVIIDDDEDEFSVEENCGVDDKINKIAREFGESSLIDETFDVENIPIIDDVQLYEEGNSYVGDDGNVKDSEGRRLYYAEIDGNLRGTYTDTNGEIAGNIVEETSAAIDDVKINEEASRMLKLKLEENLRKQEIERIAEENFLRGAKLFVYPPVVKPDEDIEVFLNKNLSTLSDEPDILILGAFNDWEWKSFTIRLNKTHLKDDWWSCQLYVPREAYKIDFVFFNGQSVYDNNDQKDFCIPVVGGMDALVFEDFLLEEKRKELEKLAKEQAERERQAEEQRRIDADKAVKGEDRLQARMEVEKMQDTLLQLMKNAVTSIDNVWYIEPSEFNSNDSVRLYYNGNSGPLQHAKEVWVHGGHNNWKDGLTIVERLVKSGLKGGAWWYADVVVPDQALVLDWVFADGPPQNAVVYDNNRMQDFHAIVPMATPDAQYWVEEEQLIYRKLQEERKLKEEVIRAKAEKTAQMKAETKEKTLKKFLLSQKHIVYTEPLDIQAGSTVTVFYNPSNTNLNGRPEVWFRGSFNRWSHRNGPLPPQRMLPAESGTHVKASVKVPLDAYMMDFVFSESENGGVFDNKFGMDYHIPVFGGIVKEPPMHIVHIAVEMAPIAKVGGLGDVVTSLSRAVQDLNHNVDIILPKYDCLNLSNVKDLQFHKSYFWSGTEIKVWHGKVEGLSVYFLEPQNGLFWVGCVYGRANDAERFGFFCHAALEFLLQNGSHPDIIHCHDWSSAPVAWLFKEQYTHYGLSKARVVFTIHNLEFGANLIGKAMAYADKATTVSPTYSREIAGNHAVATHLHKFHGIINGIDPDIWDPFNDNSIPVPYTAENVVEGKRASKEALQQKLGLKKADLPLVGVITRLTHQKGIHLIKHAIWRTLERGGQVVLLGSAPDHRIQNDFVNLANQLHSSHNDRARLCLAYDEPLSHMIYAGADFILVPSIFEPCGLTQLTAMRYGSIPIVRKTGGLYDTVFDVDNDKDRAQVQGLEPNGFSFDGADAGGVDYALNRAISAWYDGREWFNTLCKTVMEQDWSWNRPALDYLELYHAACKLE

SEQ ID NO: 4897 - DNA, 3519 bp, Vigna unguiculata
  CDS (386)..(3010)
ggcacgagagaaacgatcaattggtcgctaaaatggcttcgaagctaacaacatgttttatttgctggaatctgaatagcaacaacggcttcaactgtaataataacaatactcgcgtaatgcactctccttttcaaccttattgcaaaatgcgacaccgtattcccagttctcgccacaaaagacaatatatcaagaaagcatcacacccttccattgatggagctctcaatcaaaatcaaaactctgatgatgattctctccacaatttcaaccctccaattctactgcctcttaataataattccacaccatcggccttgaacgtaaacggagcagagcggctgaacagttgtctggcagtcaactcgaccatttgttagccatgataaaaaatgcagagaaaaatatccttcttctgaatcaagctagagttcatgcacttgaagaccttgaaaagattcttgccgaaaaggaagccttacaaggagaaattaatgtcttagcgatgagattggccgagtctgatgtgcggattgaagttgcggcccaggaaaagacacgtgttgaactcttggagggtgagttggagaaactgcgtagtgaattggcgcaaaagggcagtattgaaggaagagatgctgaattgcatgaacttcaaaatggagtatttagtgatgcaattacaaacaatctaagtcataatgataagatccattcccttaccgaggagctaaattcaattagagaagaaaatgccactttgaagaatgccatagaatcatttaaagcacagctcaatgatgttgcaaacaatgatgaacgtttagcggtattggaaaaagaacgcttatctttgcgatcagccctaaaagacatggaatcaaaactgtcaatatttccagaagatgtatctgaactgtctacacttagagttgaatgcaaggatttgtctgataaggttgaaaatttgcaattgctgctagacaaagcaaccaaacaagacagccaagctgttacagtgctgcaacaaaaccaggatcttcaaaggaaggttgataaattggaagcatccctcgaagaagctaacatctataagctgtcatctgataaattgcaaaaatctaatgaactaatgcaacaaaagataaaactattggagagccagctacaaaaatcagatgaagatataaactcttacgttcagttgtatcagcagtcagtgaaggaatttcaagatacactcgatcttctgaaaaaagaaagcaagagaagggcgccggatgaaccagtggaagatatgccgtgggaattctggagtcggttgttgcttctaattgatggttgggcacttgaaaagaagatatcagtagatgatgcaaagcttttgagagaaaaggtctggaagagagacaagagtgttagtgatgtatatatggcttacaaagaaaagaccgaacatgaggctatatctgcatttcttgggcttacatcatctgcaacaagtccaggattgtacgtgattcatattgcagcagagatggcaccagtagctaaggttggtggcttgggggatgttatcagtggtctaagtaaagcattgcaaaagaaaggacaccttgttgaaattatacttcccaaatatgactgtatgcaatatgaccgcattggtgacttaagagctttggatgtggtgatagagtcatactttgatggtcaattattcaaaaataaaatctgggttggcactgttgaaggccttcctgtttatttcattgagcctcatcatcctggtaagttcttttggagaggagattattatggcgcgcatgacgacttcagaagattttcatattttagccgtgcagctcttgagtttcttcttcaagctggcaagaagccagatatcatccattgccatgattggcagacagcatttattgctcctctatattgggatgtatatgccccaaaaggattaaattcagctaggatatgttttacatgccacaactttgagtatcaagggactgcaggagcttcagagttggaagcatgtggtcttgatagccaccagctaaacagaccagatagaatgcaggacaactcagcacataacagagtcaattctgtcaagggtgcagttgtttactcaaacattgtaacaacagtgtcccccacttatgctcaagaagtgagaactgcagagggaggtaaaggcctccattcaactctctctacccactccaaaaagttcatcggtattcttaatggtattgacactgatatatggaatcctgccactgatccatttcttcaagtccagtacaatgcaaatgatcttcaagggaaatcagagaataaggaagccttgagaaggaatctaggtctttcttctgcagacgttaggaggccattggttggctgcattacaagattggttccacaaaaaggtgttcatcttatccgacatgcaatatatctaacattggaactgggaggacaatttgttctacttggttcaagtccagtccctcatattcagagagaatttgagggcattgccaaccactttcagaatcacgaccacataaggttgatattgaagtatgatgagtctctctcccatgctatttatgctgcatctgacatgttcatcattccatcaatctttgaaccttgtggcctaacacagatgatatcaatgagatatggtgccatacctattgccagaaaaaccggtggcctaaatgacagtgtttttgacgttgatgatgatacaataccttcacagtttcgaaatggatttacattcttgaatgccgatgagaagggaataaacgatgccttagtacgtgcaattaatctcttcacaaacgatcctaagagttggaagcaacttgttcagaaggacatgaacatagatttcagctgggattcttcagcagcacaatatgaggagctctactcaaagtctgtgactagaggaagggcaacaaaacgtgcttaatttagcaaaaggaggcttttctgtgctatccgttcaattttgtcagtttcctaaacagagatgggagatcagatttaatgctcaatgaggaggatttatctgaacatgcctgtcatgcaaaaacatctcaaattgagaatgaatataaagaataataatatgaatgcaacatggttactgaaactatgctgctagctagattagtttccgtgaagcaaccgttctcatgcattgatggattctatatctaggtgatatttgaacttcactatacctcacaggattgtgtaattatttcccccttttcttcgttatttaattagtttgccaacagtgtataaaggtcacacatgtaaaagcgttacaggctttcatcttagttttctactaaaaagaatgtagaatgtaatcaaatgtcaagcaaaataaaaattgttcactgcctgtaaactttttatcttttatttttgacaaagcttataactttttcctaaaaaaaaaaaaaaaaa

SEQ ID NO: 4898 - protein, 874 aa, Vigna unguiculata
MIKNAEKNILLLNQARVHALEDLEKILAEKEALQGEINVLAMRLAESDVRIEVAAQEKTRVELLEGELEKLRSELAQKGSIEGRDAELHELQNGVFSDAITNNLSHNDKIHSLTEELNSIREENATLKNAIESFKAQLNDVANNDERLAVLEKERLSLRSALKDMESKLSIFPEDVSELSTLRVECKDLSDKVENLQLLLDKATKQDSQAVTVLQQNQDLQRKVDKLEASLEEANIYKLSSDKLQKSNELMQQKIKLLESQLQKSDEDINSYVQLYQQSVKEFQDTLDLLKKESKRRAPDEPVEDMPWEFWSRLLLLIDGWALEKKISVDDAKLLREKVWKRDKSVSDVYMAYKEKTEHEAISAFLGLTSSATSPGLYVIHIAAEMAPVAKVGGLGDVISGLSKALQKKGHLVEIILPKYDCMQYDRIGDLRALDVVIESYFDGQLFKNKIWVGTVEGLPVYFIEPHHPGKFFWRGDYYGAHDDFRRFSYFSRAALEFLLQAGKKPDIIHCHDWQTAFIAPLYWDVYAPKGLNSARICFTCHNFEYQGTAGASELEACGLDSHQLNRPDRMQDNSAHNRVNSVKGAVVYSNIVTTVSPTYAQEVRTAEGGKGLHSTLSTHSKKFIGILNGIDTDIWNPATDPFLQVQYNANDLQGKSENKEALRRNLGLSSADVRRPLVGCITRLVPQKGVHLIRHAIYLTLELGGQFVLLGSSPVPHIQREFEGIANHFQNHDHIRLILKYDESLSHAIYAASDMFIIPSIFEPCGLTQMISMRYGAIPIARKTGGLNDSVFDVDDDTIPSQFRNGFTFLNADEKGINDALVRAINLFTNDPKSWKQLVQKDMNIDFSWDSSAAQYEELYSKSVTRGRATKRA

SEQ ID NO: 4899 - DNA, 2221 bp, Phaseolus vulgaris
  CDS (30)..(1850)
ctcacaactcctccgtcaccggtataagcatggcaacggtatcgatggcatcgtgcgtggcgtcaaaaggcgcgtggagtacagagacaaaagtgaaatcttcgggtcagatgagcctgaaccgtcatgaattgaaatacgatgggttgagatctctgaacaaggtactcgtgcgaagcacgcatgcgagcaaaatgggaagctctttggctgcgaagagtagcaaaagtgggcgtgagaaggttttggagaagatcgagtgcgggatgaacttgatctttgttggggctgaggttgcaccttggagtaaaactgggggcctcggtgatgttctcggaggacttccatcagctttggccgaacatggacaccgtgttatgacagtgtcaccgcgttacgaccaatacaaggatgcatgggacactaatgttaccgtggaggtcaaagttgctgatagaatagaaactgtccgtttttttcactgctacaagcaaggtgttgatcgtgtttttgtagaccacccatgtttccttgagaaggtgtggggcaagaccggttcaaaactctacggccctagtgctggagtggattatgaagataaccaacttagatacagcttgttatgccaggctgcccttgaggcaccaagggttttgaacttaaacagcaacaaatatttctcgggaccatatggtgaagatgtgatctttgttgccaatgattggcacactgctcttcttccgtgctacttgaaatcaatgtaccagaccaggggggtttatagaaacacaaaggttgcattttgtattcataacatatcctaccagggtaggcatccctttgaagacttccctcttctcaatttacctaatgaatacaggagcgcttttgactttactgatgggcatcttaagcctgtgaggggaaggaaaattaactggatgaaagctgcaatattagaatcggacctagtgctcactgtaagtccatattatgccaaggaacttgtttccggagaggatagaggtgtagaattggacaacataattcgcaaaactggcgttgccggtatcgtgaatggcatggatattcgggagtggagtccaaaaactgataaattcatagatatacacttcgatacaacaagtgtcaaggaagcaaaattcctgctgaaagaggcccttcaggcagaggttggcttacctgtaaacagggatatccctctgataggcttcattggtaggcttgaagagcagaaaggttcagatattcttgtggaagccatcccaaagttcattgaccagaatgttcagatcataattcttggaactggcaaaaagagcatggagaagcagattgagcaactagaggaaatttatccggagaaggccagaggcatagcaaaattcgatggtcccttggctcacaagataattgctggatctgacttcataatgatcccaagtagatttgaaccctgtggtctagttcagttgcattctatgccatatggaacggtgccaatagtttcttccactggtggactcgttgataccgttcaagaagggtttactggattccacatgggtgcatttaacgtagactgtgaagctattgatcctgctgatgtggaaaagatagcaactaccgtaaggagagcccttggaacatatggtaccgtagccatggaaaagattatccagaactgcatggcccaagacttttcatggaagggaccagccaaacaatgggaaaaagtgctgtttagcctagacgttggtcgcagtgaagctggaattgaaggtgatgagattgctcctcttgcaaaggaaaatgtggccactccttgagcatcagcattaagatcctctttctgaatatgatcatggacgagggattataaacgaagcatcttcacataatttgatcaaccatttcgaaggggcggaacttcaatttcaagcaaactatcaaactaacataaaggtttttcataagcaaggtcttgtcataaaggaaatttgaagtacttgagttttataagtttaaattcagcataaggtgaataaatgtcaatgcatgcttccaaatcttaggaaggagcatgtcatctttttttattttctgaccttattggctttggtctcaccgttctttatgtacattacaaattaaataagcactatgtttccaagtaaaaaaaaaaaaaaaaaaaaaaaaa

SEQ ID NO: 4900 - protein, 606 aa, Phaseolus vulgaris
MATVSMASCVASKGAWSTETKVKSSGQMSLNRHELKYDGLRSLNKVLVRSTHASKMGSSLAAKSSKSGREKVLEKIECGMNLIFVGAEVAPWSKTGGLGDVLGGLPSALAEHGHRVMTVSPRYDQYKDAWDTNVTVEVKVADRIETVRFFHCYKQGVDRVFVDHPCFLEKVWGKTGSKLYGPSAGVDYEDNQLRYSLLCQAALEAPRVLNLNSNKYFSGPYGEDVIFVANDWHTALLPCYLKSMYQTRGVYRNTKVAFCIHNISYQGRHPFEDFPLLNLPNEYRSAFDFTDGHLKPVRGRKINWMKAAILESDLVLTVSPYYAKELVSGEDRGVELDNIIRKTGVAGIVNGMDIREWSPKTDKFIDIHFDTTSVKEAKFLLKEALQAEVGLPVNRDIPLIGFIGRLEEQKGSDILVEAIPKFIDQNVQIIILGTGKKSMEKQIEQLEEIYPEKARGIAKFDGPLAHKIIAGSDFIMIPSRFEPCGLVQLHSMPYGTVPIVSSTGGLVDTVQEGFTGFHMGAFNVDCEAIDPADVEKIATTVRRALGTYGTVAMEKIIQNCMAQDFSWKGPAKQWEKVLFSLDVGRSEAGIEGDEIAPLAKENVATP

SEQ ID NO: 4901 - DNA, 2107 bp, Astragalus membranaceus
  CDS (96)..(1919)
gttttttggttaacggcactcctcactctctagtagccatttccgttcagcttccttccatcggcgattgttgctccttactgctctctcacagaatggcaacggtgacggggtcttatgtggtgtcgagaagcgcgtgcttcaattcccagggaagaacagaagccaaagtgaattcacctcagaagataaatctcaatagccaagcattcacttacgttggcttgagatctctcaacaagctgcacgtgcaaaccgcacgtgcaaccaaaacatcttcgtcttccttgaaggctactaacaaagatttggtgaaaatagtgtgtgggaatgggatgaacttggtgtttgtgggagctgaggtgggaccatggagtaaaactggaggacttggtgatgttcttggaggacttccaccagctttggctggaaatgggcaccgtgttatgactgtgtcaccgcgttacgatcaatacaaggatgcatgggacactggtgtgtctgtggagatcaaagttggagatagattcgaaactgtccgattctttcactgctacaaacgaggagttgatcgtgtttttgtagatcacccacttttccttgagaaggtgtggggaaagaccgaatctaaactctatggccctaaaactggtgtggattataaagataaccaacttagattcagcttgttgtgccaggctgcacttgaggcaccaagggttttgaacttaaacagcaacaaacatttctcaggaccatatggcgaagatgtagttttcgttgccaatgattggcatactgctcttcttccatgctatctgaaatccttgtacaagtccaagggaatttacaaaagcgcaaaggtagcattttgtattcataacatagcgtatcagggaaggcatgccttttcagacctctcccttctcaatttaccaaatgaattcagaagctctttcgactttattgatgggtatgataagcctgtgaagggaaggaaaattaactggatgaaggctggagtgttagaatctgaccgagtcttcactgtaagtccatattatgccaaggagcttgtttctggagaggatagaggtgtggaattggacaatataattcgttcgattggtatcactggtattgtaaatggcatggataatcgagagtggagtccacaaactgatagatacatagatgtacactacgatgcatcaactgtcaccgaagcaaaagctatactgaaagaagcccttcaagcagaggttgggttgcctgttgacaggaatatccctgtgatagggttcattggcaggctagaagagcagaaaggttcagatattcttgttgaatctatcccaaagttcattgaccagaatgttcagataatagttcttggaactggcaaaaagatcatggagaaacaaattgaacagctggaggtaacctatcctggcaaggctataggagtagcaaaattcaacagtcccttggctcacaagattattgctggagctgactttatagtgatcccaagtagatttgagccatgtggtttagttcagttgcatgccatgccatacggaacggtgcctatagtttcctcaactggtggacttgttgacaccgtaaaagaaggttataccggattccatgtaggagcattcagcgtcgagtgtgaagctgttgatcctgctgatgtggagaagttagcaactacagtcaacagagcccttaaaacctatggtacccaagccttgaaagagatgatcctgaattgcatggcccaagacttttcttggaagggaccggcgaaacaatgggagcaggcgctgttgagcttagaggtcgctggcagcgaacctggaattgatggagaggaggtcgctcctcttgcaaaggaaaatgttgccactccttgaacatccccatggatttcctgatttcagaaggattttgtagccacaaattggtaatatgaccaacgagttctaacgatgggattgtgtggttacaagggaataaagttgaaggtctttctcaagcaatgtatatatttatttatatataactaaaactaacataacgtttattataaaaaaaaaaaaaa

SEQ ID NO: 4902 - protein, 607 aa, Astragalus membranaceus
MATVTGSYVVSRSACFNSQGRTEAKVNSPQKINLNSQAFTYVGLRSLNKLHVQTARATKTSSSSLKATNKDLVKIVCGNGMNLVFVGAEVGPWSKTGGLGDVLGGLPPALAGNGHRVMTVSPRYDQYKDAWDTGVSVEIKVGDRFETVRFFHCYKRGVDRVFVDHPLFLEKVWGKTESKLYGPKTGVDYKDNQLRFSLLCQAALEAPRVLNLNSNKHFSGPYGEDVVFVANDWHTALLPCYLKSLYKSKGIYKSAKVAFCIHNIAYQGRHAFSDLSLLNLPNEFRSSFDFIDGYDKPVKGRKINWMKAGVLESDRVFTVSPYYAKELVSGEDRGVELDNIIRSIGITGIVNGMDNREWSPQTDRYIDVHYDASTVTEAKAILKEALQAEVGLPVDRNIPVIGFIGRLEEQKGSDILVESIPKFIDQNVQIIVLGTGKKIMEKQIEQLEVTYPGKAIGVAKFNSPLAHKIIAGADFIVIPSRFEPCGLVQLHAMPYGTVPIVSSTGGLVDTVKEGYTGFHVGAFSVECEAVDPADVEKLATTVNRALKTYGTQALKEMILNCMAQDFSWKGPAKQWEQALLSLEVAGSEPGIDGEEVAPLAKENVATP

SEQ ID NO: 4903 - DNA, 1389 bp, Bradyrhizobium japonicum
  CDS (1)..(1389)
atggacgacttcgtccgcgtcggcggacttggagccgtttccgctgccctgcccagagcccttcgccccttcgccgatatccggatcatgttgcccggctatcgcgacatcatcgagcaactcacgcatattcagatcgttggccgctgcccgtcgtttgcggatctgccggcctgctcgctcggccgggccgcgaccaaggacggcctgccggtctatgtgctgttatgctcgcaactctacgaccggcccggcaatccctatggcgacgagtccggacgcgactggccggacaacgacatccgcttcgcacgctttgcctcggcagccgctgagctggccatgggcaagctggacaagaattgggcagcagacctgatccatgccaacgactggcaggcctcgctcgtgcccgcctatctcgcctggcgcggcgccaagctgccgtcgatcctgaccattcacaacctcgcctatcagggcctcttcccgaaggactcgctgcggcggatcggcgcaccggaaagcgccttccacatcgacggcctcgaattctacgaccaggtctccttcctcaaggctggcctcgtctacgcctcgcatctcaccaccgtcagcggcacctatgcgcgcgagatcaccacggccgagttcggctgcggcctggagggtctgctccggctgcgctcggacgccgccgagctcaccggcatcctcaacggcatcgacgagagctgggacccgcgctcctgcgcccagctcgcccagcaattcggcgccggcgactgggtcggcaagaaggccaatgcggactacgtgcgcaagcagttcgggctggcggtgtcgcgcggcccgatgttcggcatcgtcgcgcggctcgtgcaccagaagggcatcgatctcgtgctgtccgcggccgacgagatcatcgatgccggcggccagatcgtggtcaccggctccggcgagccggcgctcgagcaggcgctgatcgacgcacatcgccgccgccccgatgcgatcggcgttgcgatcggcttcaacgacgcccaggcgcggcgcatcttcgccggcagcgacttcaccctgatgccgtcgcgcttcgagccgtgcggcctcagccagatgtacgcccagcgcttcggctcgctgccgatcgggcaccagaccggcggcttggccgagaccatcaccgacggcgagaccggcttcctgttctcgagaccctcgcacgaatccttcctcggcggcgtccgccgggccttcgaagccttcatggcgcaggaccagctcgactccatgcgccgcagcgccatgggacggtcgttctcctggagcatctcggccgacagctatagcgcgctgtaccggaagctggcagcggtgtga

SEQ ID NO: 4904 - protein, 462 aa, Bradyrhizobium japonicum
MDDFVRVGGLGAVSAALPRALRPFADIRIMLPGYRDIIEQLTHIQIVGRCPSFADLPACSLGRAATKDGLPVYVLLCSQLYDRPGNPYGDESGRDWPDNDIRFARFASAAAELAMGKLDKNWAADLIHANDWQASLVPAYLAWRGAKLPSILTIHNLAYQGLFPKDSLRRIGAPESAFHIDGLEFYDQVSFLKAGLVYASHLTTVSGTYAREITTAEFGCGLEGLLRLRSDAAELTGILNGIDESWDPRSCAQLAQQFGAGDWVGKKANADYVRKQFGLAVSRGPMFGIVARLVHQKGIDLVLSAADEIIDAGGQIVVTGSGEPALEQALIDAHRRRPDAIGVAIGFNDAQARRIFAGSDFTLMPSRFEPCGLSQMYAQRFGSLPIGHQTGGLAETITDGETGFLFSRPSHESFLGGVRRAFEAFMAQDQLDSMRRSAMGRSFSWSISADSYSALYRKLAAV

SEQ ID NO: 4905 - DNA, 1530 bp, Agrobacterium tumefaciens
  CDS (1)..(1530)
atgcggattcttgccgttacggccgaaatgtttcccttcgtcaaaaccggcggattggccgatgccacgagcgctttgccgcaggcgctggaacgaaaaggggctgacgttcggacattgctacccctctaccgcgggctcacgccgcttgtccgcggccggaagccggtcctggttgccaatattctggagcagccggtatcagtttattacgttgtttccgatggtcacaagcttctgcttcttgaagcggcaagcctgttcgacagagacggacatccctatggcgtaaaaggcgagccttttgctgacaacgatcttcgctttgcggttctgtccaaagtagcggcggaaatagccctcggcgcgattgacggctggcagccggatgttgtccatgtccatgattggcacgcggctctgacctgcgtctatctcgcggattcgacgccctcggtagcctccgttctaacccttcacaatctcgcatttcagggtcagtatccgctggagagggcgggtatgcttggactaccctcgcacctctgcactgtcgattgccttgaatattacgatgacatgtcatttttgaagggcggtctgacgaccgcgtcggcggtaacgacggttagtccaacttatgcaagagaaatccttacgccggaaatggggatgggaatgcatggcgtgctcgccaggcggcgaggggacctgcgcggcatcgtcaacggtgtcgatcacgacgtctggaatccggcaacagatccgtacattctcgcaaatttcacggctgccacggcgacaagacggagcctcaacaaatatgccttgcttcaggcccttggcctagcccctacccagggccctgtcttcggcgtggtcagtcgcctgacctggcaaaagggaatcgatctcctccctcacgtcgtaccccttataatagaaaggaaaggcaggctgatcgttcacggagagggagatacggcactggaagacagcttgcaggcgctggcaaagcgctatccggaactagtctgcgcccatatcggctatgacgaacggctggcgcacatgatccaggccggctcggatttcatcatccagccgtcacggttcgaaccctgcgggctgacgcagctttacgcgctgcgatacggcgcgctgcccatcgtcagccgcacgggcgggctggcggaaaccattatcgacgcgaatgacgcggccattgaagcgggcgtagcaacaggctttcaattcgagccggcgaatgaagacgatctgcgcgccgcgctggagcgtgccattagcgcctataacgaccgggaacttttccgacggcttcagacgcaggccatgcaggccaatttttcctgggacaagagtgccgcacaatatatggcgcttttcgagagccttgtcggcaacagcacgcgcgaaacggatgccgtcgccgacatcagaaccgagacttttgcaaagataagagctgataggcggctggcgggaaccccaggatcaccaacaggttag

SEQ ID NO: 4906 - protein, 509 aa, Agrobacterium tumefaciens
MRILAVTAEMFPFVKTGGLADATSALPQALERKGADVRTLLPLYRGLTPLVRGRKPVLVANILEQPVSVYYVVSDGHKLLLLEAASLFDRDGHPYGVKGEPFADNDLRFAVLSKVAAEIALGAIDGWQPDVVHVHDWHAALTCVYLADSTPSVASVLTLHNLAFQGQYPLERAGMLGLPSHLCTVDCLEYYDDMSFLKGGLTTASAVTTVSPTYAREILTPEMGMGMHGVLARRRGDLRGIVNGVDHDVWNPATDPYILANFTAATATRRSLNKYALLQALGLAPTQGPVFGVVSRLTWQKGIDLLPHVVPLIIERKGRLIVHGEGDTALEDSLQALAKRYPELVCAHIGYDERLAHMIQAGSDFIIQPSRFEPCGLTQLYALRYGALPIVSRTGGLAETIIDANDAAIEAGVATGFQFEPANEDDLRAALERAISAYNDRELFRRLQTQAMQANFSWDKSAAQYMALFESLVGNSTRETDAVADIRTETFAKIRADRRLAGTPGSPTG

SEQ ID NO: 4907 - DNA, 1449 bp, Bradyrhizobium japonicum
  CDS (1)..(1449)
atgacgcctgctcgcgtcctcgcggtcgcctccgaagtctatcccatcgtcaagaccggcggcctcgcggatgtcgccggcgcgctgccgattgcgctgaaggcgcacggcgtcgagatgcgcaccctgatgccgggctatcccgacgtgatgcggctgctctcgggcgcggaggagatccggcgctggccggattatttcggcgggccgggccggctgctcgccggcgcgcatgacgggctcgacctgttcgtgctcgacgtgccgcatctctacgcgcggccgggcaacccatacgtcacgacagagggggtcgactggccggacaacggcgtgcgctttgcggcgctgtcgcgcgtggcggccgacatcggccacggactcgttccggccttcgtgcccgacatcgtgcacgcccatgactggcaggccgggctcgcgcccgcttatctgcactacgacaatcgtccgcggcccggcaccgtgatgacgatccacaacatggcctatcagggcaagttcgctcctgagctgatcggtgcgatcggcctgccgtggagctccttcgacgtcaacggcctcgaatatttcggcggcatcagcttcctgaaggccggcctgcaattcgccgatcgcatcacgacggtgtccccgacctacgcgcgtgagatccagagcgacgaaggcggcatggggctcggcggcctgctgcgcgcgcgcgcgggcgcattgagcgggatcctcaacggcatcgacatcgcggtgtggaatccgcagaccgattcgcacatcgcctatcggttcggcgcggaggaccttacattccgcgctgcgaacaaggcggtgcttcagcaacaattcaatctcgattcctcggacgaagcccccctgctcggcgtcatcagccggctgtcctggcagaaggggctcgatctcctgctcgaggccattccgaccattttgggcgaaggcatgcagctcgcgctgctcggcagcggcgaccgcgatctccaggatcgctatcaggccgccgcccgcgcgaatcccggccggatcggggtcgtaatcggctacgacgagatcctggcgcatctgatccaggccggctcggacgcgctcatcgtgccgtcgcggttcgagccgtgcggcctgacccagctctgcgccctgcgctatggcgccgtgccgatcgtctcgcgcgtcggcggcctcgaggataccatcgtcgatatcggcgaggccggccgcgaggccaccggcttcaagttcggcccggtgacggcggatgccctcgccggcacgctgcgcaaggccaacacggctttccacgacaagctgacctggcggcagctgcaacgaaacggccttgcgaccgacgtctcctggcgcagccgcgccggcgactatgcagcgctgtatcggagcctgatcgaatcgcgccgcgcctag

SEQ ID NO: 4908 - protein, 482 aa, Bradyrhizobium japonicum
MTPARVLAVASEVYPIVKTGGLADVAGALPIALKAHGVEMRTLMPGYPDVMRLLSGAEEIRRWPDYFGGPGRLLAGAHDGLDLFVLDVPHLYARPGNPYVTTEGVDWPDNGVRFAALSRVAADIGHGLVPAFVPDIVHAHDWQAGLAPAYLHYDNRPRPGTVMTIHNMAYQGKFAPELIGAIGLPWSSFDVNGLEYFGGISFLKAGLQFADRITTVSPTYAREIQSDEGGMGLGGLLRARAGALSGILNGIDIAVWNPQTDSHIAYRFGAEDLTFRAANKAVLQQQFNLDSSDEAPLLGVISRLSWQKGLDLLLEAIPTILGEGMQLALLGSGDRDLQDRYQAAARANPGRIGVVIGYDEILAHLIQAGSDALIVPSRFEPCGLTQLCALRYGAVPIVSRVGGLEDTIVDIGEAGREATGFKFGPVTADALAGTLRKANTAFHDKLTWRQLQRNGLATDVSWRSRAGDYAALYRSLIESRRA

SEQ ID NO: 4909 - DNA, 1431 bp, Bacillus cereus
  CDS (1)..(1431)
atgaatattttatttgcagtatcagaatgtgtaccgtttgtgaaatcgggaggattagctgatgtagcgggtgcgctcccaaaagagctaaaaaaattaggagtggacgttcgtattatacttccgaattatagtctcattccgcaaaagttaagagatggatgtacgttacataaagtaattaacgtccctcttgggtggagaaatcaatattgtggaattttaaaaggtgagcaagacggaattacgtattacttaatagataatgaatattattttaagagagattctctgtatggtcattacgatgacggagagcgtttttcttatttctcaaaagcagtgttagagtgtattccgcaccttgattttgaagtggatgttcttcatagccatgattggcatacggctatggttaatttcttacttcgtgaaaagtatcaagataacccgttatatgagcgtattaaaacggtatatacgattcataacttgcagttccaaggtgtatttcctcctgaagtgatctacgacttgttagagcttggtgatgaatattttcatagtgagcagctagagttttatggaaacgtaaactttatgaaaggcggtattattgcttcggatcaaattacagcggtgagcccgacgtataaagaagaaattcaatatgaatttttcggtgagaagttagatggattactgcgaaaatataatgataagcttagcggcattgtaaatggtattgatacgagcgtatataatccagaaacggattcgtatattaaggcccagtatgatgcagagtcattatatgaaaagagtgaaaataaacgcgccttgcagcgttattttggtttgccagaaaaagaggatacaccaattatttcaatggtaacgagattaacgaagcaaaaaggtcttgatttagtacgtactgtattccgcgaaataatggaagaagatgtacaatgtattattttaggttcaggtgattcggaatatgagcaattctttgagtggatggcatatgagtatccggagaaggtaaaagtttatatcggatttaatgaagaattagctcaccaagtgtatgcgggaagcgatttgtttttaatgccatcgctgtttgaaccgtgtggacttggacaacttatcgcattagcatacggtacgattccaattgtaagagaaacaggtgggttaaacgacacggtacattcttatgatgaagaaactggagaaggaaatggtttcagtttcacgaattttaatgcacatgacatgctgcatacgattcatcgtgcaattgaattctatcatgataaaccagtgtgggagcagcttgtaaaacaagcgatgactgaagattatagctgggagcaatcggctcttgcttataaggaattgtataaaagtctcatggaataa

SEQ ID NO: 4910 - protein, 476 aa, Bacillus cereus
MNILFAVSECVPFVKSGGLADVAGALPKELKKLGVDVRIILPNYSLIPQKLRDGCTLHKVINVPLGWRNQYCGILKGEQDGITYYLIDNEYYFKRDSLYGHYDDGERFSYFSKAVLECIPHLDFEVDVLHSHDWHTAMVNFLLREKYQDNPLYERIKTVYTIHNLQFQGVFPPEVIYDLLELGDEYFHSEQLEFYGNVNFMKGGIIASDQITAVSPTYKEEIQYEFFGEKLDGLLRKYNDKLSGIVNGIDTSVYNPETDSYIKAQYDAESLYEKSENKRALQRYFGLPEKEDTPIISMVTRLTKQKGLDLVRTVFREIMEEDVQCIILGSGDSEYEQFFEWMAYEYPEKVKVYIGFNEELAHQVYAGSDLFLMPSLFEPCGLGQLIALAYGTIPIVRETGGLNDTVHSYDEETGEGNGFSFTNFNAHDMLHTIHRAIEFYHDKPVWEQLVKQAMTEDYSWEQSALAYKELYKSLME

SEQ ID NO: 4911 - DNA, 1458 bp, Bacillus stearothermophilus
  CDS (1)..(1458)
atgaaggtcctatttgccgtttccgaatgtgcaccgtttgccaaatcagggggattggctgacgtcgccggcgcactgccgaaagagctgcgccggctcggcattgatgcccgcgtgatgttgccgaaatatgaaacgatcgcccctgaatggaaaaagaaaatgaaaaaagtcgccgagctcatcgtgccggttgggtggcggcgccaatattgcggcgtggaggagcttcggcatgacggagtcatctattactttatcgacaacgaatattattttaagcggccgcagctgtacggccattatgatgatggcgagcggttcgcctatttttgtcgggcggtgctcgaagtgttgccggaaattcagttccagcccgacgtaattcactgccatgactggcatacaggcatggtgccgtttttgcttcgggaacaataccggcatgagctgttttatgtcgacatgcgcaccgtctttacgattcataacttgcagtttcaagggctgtttccgcgcggcattttagaagacttattgaatttggatggtcgctatttcactgtggatcatcttgagttttatggctgcgtcagctttatgaaaggggcgctcgttgcttccgatttgattacaacagtgagcccgacgtataaagaggagattcaaaccgcctattacggcgagcggttagacggtttgctgcgggcgcggcgggatgatctgctcggcattttaaacggcattgacgatgagttttacaatccagaagcggatccgtttttgacggcgacgtatagcgtacatacgcgggaaagaaaacaactcaacaagcgtgccttgcagcggcagttcggcttgccggagtgggacgatgtaccgcttatcgcgatggtcacgagaatgacggcgcaaaaagggcttgatttagtaacatgcgtctttcatgagatgatgagtgaagatatgcagcttgtcgtactcggcacgggcgactggcggtttgaacaatttttctcgcaaatggctgcggcgtatccgggcaaagtcggcgtgtacatcggcttccatgaaccgctcgcccaccaaatttacgccggtgccgatttgtttttaatcccgtcgttatttgaaccgtgcgggctgagccaaatgatcgcgctccggtatggaacgatcccgatcgtccgggaaactgggggattaaacgatacggtgcaatcatacaatgagataacaaaagaaggaaatgggttcagctttaccaattttaacgctcatgacatgctgtatacgatccgccgggcgctgtcattttaccgccaaccatccgtttgggaacagttgacggaacgggcgatgcgcggtgattacagttggcgtcggtcggcaaaccaatataaacaagcctatgaacagctgatcaaaaaggaggagcacacgcttgttcacggataa

SEQ ID NO: 4912 - protein, 485 aa, Bacillus stearothermophilus
MKVLFAVSECAPFAKSGGLADVAGALPKELRRLGIDARVMLPKYETIAPEWKKKMKKVAELIVPVGWRRQYCGVEELRHDGVIYYFIDNEYYFKRPQLYGHYDDGERFAYFCRAVLEVLPEIQFQPDVIHCHDWHTGMVPFLLREQYRHELFYVDMRTVFTIHNLQFQGLFPRGILEDLLNLDGRYFTVDHLEFYGCVSFMKGALVASDLITTVSPTYKEEIQTAYYGERLDGLLRARRDDLLGILNGIDDEFYNPEADPFLTATYSVHTRERKQLNKRALQRQFGLPEWDDVPLIAMVTRMTAQKGLDLVTCVFHEMMSEDMQLVVLGTGDWRFEQFFSQMAAAYPGKVGVYIGFHEPLAHQIYAGADLFLIPSLFEPCGLSQMIALRYGTIPIVRETGGLNDTVQSYNEITKEGNGFSFTNFNAHDMLYTIRRALSFYRQPSVWEQLTERAMRGDYSWRRSANQYKQAYEQLIKKEEHTLVHG

SEQ ID NO: 4913 - DNA, 1533 bp, Bordetella bronchiseptica
  CDS (1)..(1533)
atgacgaccatacgtaccttggtggtggccgcggaggcgtttccgctggccaagacgggcggcctgggcgacgccgtggcgggcatggtgcaggcgctgggccaccggccgggcggtgtggacgtgcagtgcgagttgctgatgcccgcctatcgcggcacgctggacaggctgtaccggccgcgcacggtcgcgcggctgggcggactgcccggcggcccggccagtctggtgcgcggccattgcccgggctcgggattgtcggtgctgctgctgcgcaacgacgcgctgtacgaccggcccggcatttacgtggacgacagcggccagggctacccggacaatgcccgccgctatgcggccctggcccacgcggccgcccggctggcgcagggcctgcccgggctgcggccgccgcacgtggtgcacgcgcacgactggcatgccgcgctcgcgccgctgctcatccacgcggccggactgcactacgtcaagacgctgctcaccattcacaacctggcgttccagggtacgtttccggccgagctggccagcgcgctgggcatcccgctggcgtgccggcacgacgacggcgcgctgtccgatgaccgagtgaatttcctcaaggccggcatccgttatgcgacccgcgtcaccaccgtcagccgcgcctatgcgcgcgagattctcacgccggcgttcggttgcggattgcacggtttgctgcgcgcgcgcggcgccgacctgagcccggtgcccaatggcatcgacaccgcgctgtggaatccggccgccgacccgcatctgggcggcctgcgcttcgacgcgctggatatgcgcaacaaggcctgttgcaaggccgcgctgcaggccgagctgggcctgcagctgcgcgcggacgcgaccgtgctggccatgggcagccgcctgaccggccagaagatggccgacgtggccatcgccgccctgcccgccctgttggaggcgcacgaacacttgcagttcgcgctgatcggccgcggcgagccggacctcgaagcggcgctgcgcgccctggcggcgcgctacccgggccgctgcgcggtccacatcggctacgacgaaccgcttgcgcaccggctgcacgccggcgccgacctgctgctgcacggcagccgcttcgagcctttcggcctgaccccgctgtacgccatgcgctatgggaccctgccggtggcctcgcgggtgggcggcatggtcgataccatccgcgacccgggcccggcgatcgaagagtcctgcgccggccagggcacgggtttcctgttcgatggcagcgagcccgccgacatgcggcaggccgtgacgcgtgcgctgcgcgcgctggccaagccggcggtgcgcgacgccatgcgccgcaatgccatgcaggccgatttcagctggcgcacctcggcgcaggcttatgcggggctgtacgccaatctggccagcgggccgcagcgcggccgggtgcccgcgcccacgctgccgctgctggccaacgcggcctga

SEQ ID NO: 4914 - protein, 510 aa, Bordetella bronchiseptica
MTTIRTLVVAAEAFPLAKTGGLGDAVAGMVQALGHRPGGVDVQCELLMPAYRGTLDRLYRPRTVARLGGLPGGPASLVRGHCPGSGLSVLLLRNDALYDRPGIYVDDSGQGYPDNARRYAALAHAAARLAQGLPGLRPPHVVHAHDWHAALAPLLIHAAGLHYVKTLLTIHNLAFQGTFPAELASALGIPLACRHDDGALSDDRVNFLKAGIRYATRVTTVSRAYAREILTPAFGCGLHGLLRARGADLSPVPNGIDTALWNPAADPHLGGLRFDALDMRNKACCKAALQAELGLQLRADATVLAMGSRLTGQKMADVAIAALPALLEAHEHLQFALIGRGEPDLEAALRALAARYPGRCAVHIGYDEPLAHRLHAGADLLLHGSRFEPFGLTPLYAMRYGTLPVASRVGGMVDTIRDPGPAIEESCAGQGTGFLFDGSEPADMRQAVTRALRALAKPAVRDAMRRNAMQADFSWRTSAQAYAGLYANLASGPQRGRVPAPTLPLLANAA

SEQ ID NO: 4915 - DNA, 1428 bp, Chlamydophila caviae
  CDS (1)..(1428)
atgaaaatcatacaaactgctgtagaatttgctccttttattaaagctggcggattaggtgatgccgtctatggcttatcaaaagcattgtctgaaagccatgatgttgaggtattacttcctttctttcctctaatcaccccctctttttcttctcaagtaattgacgagaaggttttttcttacgaattcctagggagacagcatgcgcattccatttcctattcctatgaaggaatgattctcacaataattaaattggattcacaattagatctgttctcaacatcaacaatctatactgaagatgatacattacgcttcagcgctttctctgctgccgctgccgcctacattggggaattagatcatgtggacattgtacacatgcatgattggcatatggggcttctaagcggccttttaaaagaacctaaccgcccgcattatccaaaaagaatttttacaattcataattttagttatcgaggctattgcagcacacaattacttgggacatcagggatcagcgatttcgggttaagtaattatcaattatatagagatcctcagatgagtgtattactgaaaggagctctatattgttctgattatattaccactgtctcccctacatatgctcaagagattcttaatgattattctgattatgaaatgcacgatgcgatcatggctagacgccatgttttctgtgggatcttaaatggtatagatgaacagatctggaatcctgaaacggatgcttctttggctgtcaattacagcaaagatttacttgatgctcctgatgttttattcacaaagaaagaggaaaataaaaatgctctatatgagaaattagggctgtcctatgaatactctcctttaatgtgcatcatttctcgcattgtagaacaaaaagggcctgaatttatgaaagcagccattctccatgctatggaaaatggctatgctttagtcatagtaggcacgtgttacgatccagaaattcaaagaaaatttacaaatttacaagagtcgttaacgacttctccgaatatccgcattatcttagattataacgatcctctagcccggttagtgtatggggctgcggacatgatctgtattccttctcattttgagccctgtgggctcacacaactcattggaatgcgttatggaacggttcccttagttagatctaccggaggccttgccgatacggttgtaacgggaatcaatgggttcacattctctcagacggataatttcaatgatttccttcacatgctaacgctagcaattaccacttacagacaagagccggacatatggttccaacttgtagaagaaggtatgctgcgatcttcgggtctaacaacaatggcgatacattatttaggagtctataattccttattatga

SEQ ID NO: 4916 - protein, 475 aa, Chlamydophila caviae
MKIIQTAVEFAPFIKAGGLGDAVYGLSKALSESHDVEVLLPFFPLITPSFSSQVIDEKVFSYEFLGRQHAHSISYSYEGMILTIIKLDSQLDLFSTSTIYTEDDTLRFSAFSAAAAAYIGELDHVDIVHMHDWHMGLLSGLLKEPNRPHYPKRIFTIHNFSYRGYCSTQLLGTSGISDFGLSNYQLYRDPQMSVLLKGALYCSDYITTVSPTYAQEILNDYSDYEMHDAIMARRHVFCGILNGIDEQIWNPETDASLAVNYSKDLLDAPDVLFTKKEENKNALYEKLGLSYEYSPLMCIISRIVEQKGPEFMKAAILHAMENGYALVIVGTCYDPEIQRKFTNLQESLTTSPNIRIILDYNDPLARLVYGAADMICIPSHFEPCGLTQLIGMRYGTVPLVRSTGGLADTVVTGINGFTFSQTDNFNDFLHMLTLAITTYRQEPDIWFQLVEEGMLRSSGLTTMAIHYLGVYNSLL

SEQ ID NO: 4917 - DNA, 1467 bp, Chlorobium tepidum
  CDS (1)..(1467)
atggccagaagaaattttaaggttctttatgtctctggcgagagttctccttttgtaagggtcagttctctggccgactacatggcatcattcccccaggcgctcgaagaggagggtttcgaggccagaatcatgatgcccaaatatggtatcatcaacgaccggaagttccgtttgcatgatgtgctcaggctgtcggacattgaagtccctctcaaggacaagaccgacatgctgcacataaaggttaccgccctcccgtcaagcaagattcaaacctatttcctctataacgagaaatatttcaagcgctacgggcttttctccgacatttcgctcggaggagaccacaagggcagcgcggagcgaatcatctttttcagcgtcggcgtcatggagacgctcgtgcgcctgggctggcagcccgacattatccactgccatgactggcacgccggtctggtggcgctgctcgccaagacgcgatacgccaaacacgacttcttcaaaaaggtgaaggttgtgcagaccattcataatgtttaccgccagggcgtttttccgtcgaaggcgttccagaagcatctcgacccggaggtgtgcgacgcgctcgacatggagggcggcgaggtcaacctgctggctaccggcatcaagcacgccgatctggtcaccaccacctcggatcgctacgcccgccagcttctcgatgatccggagctttcgttcggcatggacaaggcgctgaaggcgtgcggcgaccgtttccacggtattctcaacggcatggacactcgccagtggaatccatcctcggacaagctcatcaagaagcgctacagcgccgaacagccggagatgaaactcgaggacaagaaggtgctgctcgaagaggttggtctgccattttccgaagagacgccggttgtcggcgtgatcggaagcttcgatcaataccagggcgcggagatcgtcaaggcaagcctcgcgaagctgcttgagctcgacattcagctcatcgtgttcggttcgggcgacaaggagttcgaccaggcgctcaaggagaccgcggaggaaaacgaggagaagatggccttccggcccgaattcactgatgcgttttaccaccagatgatcgccggacttgacattttgctcatgacctcccgcatcgaggcgtgcggcatgatgcagatgtttgccatgaactacggcaccgtgccggttgcctacgcgggcggcggcattgtcgataccatcgaggaggtctccggcgacaagggtaccggcttcatctttaccgactacacgcccgaggcgctgacggcgaagttgcaggaggcgctggcactgtttgccaacagggagcgctggagcgcgctcatgctcgaatgcatggggcgcgatttttcgtggagcacgtcggcggggcagtatgccgagctctaccgaaatctgcttggctga

SEQ ID NO: 4918 - protein, 488 aa, Chlorobium tepidum
MARRNFKVLYVSGESSPFVRVSSLADYMASFPQALEEEGFEARIMMPKYGIINDRKFRLHDVLRLSDIEVPLKDKTDMLHIKVTALPSSKIQTYFLYNEKYFKRYGLFSDISLGGDHKGSAERIIFFSVGVMETLVRLGWQPDIIHCHDWHAGLVALLAKTRYAKHDFFKKVKVVQTIHNVYRQGVFPSKAFQKHLDPEVCDALDMEGGEVNLLATGIKHADLVTTTSDRYARQLLDDPELSFGMDKALKACGDRFHGILNGMDTRQWNPSSDKLIKKRYSAEQPEMKLEDKKVLLEEVGLPFSEETPVVGVIGSFDQYQGAEIVKASLAKLLELDIQLIVFGSGDKEFDQALKETAEENEEKMAFRPEFTDAFYHQMIAGLDILLMTSRIEACGMMQMFAMNYGTVPVAYAGGGIVDTIEEVSGDKGTGFIFTDYTPEALTAKLQEALALFANRERWSALMLECMGRDFSWSTSAGQYAELYRNLLG

SEQ ID NO: 4919 - DNA, 1449 bp, Clostridium perfringens
  CDS (1)..(1449)
atggaggggtttaaattgataaaagttttatttgcaacatcagaggcaaatccatttataaaaactgggggactaggtgatgtaatgggagcattacctaaggagcttaaaagaaagggaatagatgctagagtaattttgcctaaatatagtgctataaaaggagaacttttagataagcttagttttaaaaaatggtttatggttcctgttggttggagaaatcaatattgtggagtatatcagtgtgaatatgatgaagttatatattatttattagatagtgagttttatttccacagaaatggtttatatggagaaggtgatgatggagagagatttgctttctttgatagagctgttttagaaactttaaaagagattgattggtgtccagatattattcattgtaatgattggcaaacaggaatgataccagtacttcataaattagagtattctaaagatccattttataagaatattaagactgtgacttcaattcataatcttttattccaaggtaatttttcagcagatgttttaccagaactttttggatatgattatgaaccagtgagaaatggaagtttagaattttatggtggaatgagttttatgaagggagctataaattatagcgataggattttaactgtaagtgaaacttatgccaaggaaattaaaactccttactttggagaaaatttagatggcttattaagagaaagaggatatgcactaaaaggaatagtaaatggtatagattatgatgaatttaatcctagtaaggatagtttaatagctaaaaatttctcagtgaaaactatagaagataaagtgttaaataaattagctcttcaaaaggaattagggttacctataaatccagatatacctatgataagtattgtatctaggcttacaaatcaaaagggatgcgacttaatagttaatatagcaaatagattacttcaaagaaatgtgcaattagttatattaggaacaggtgattataattatgaaaatcattttaagggattgcaagagctttatccaactaaggtatctgcaaatataaagtttgataatggattagctcatagaatatatgcatcttcagatattttcttaatgccatcattatttgagccttgtggactaggacaacttatagcattaagatatggagctattccaatagttagagaaacaggtggattaaaggacacaattcattcctataataaatatactggaatagggaatggctttagtttcacaaattataatcataatgatttaatgcatgttattgaattagctttagaaacatatgatgataaagagatttggagatcattaattatacaagctatggattctgataatagttggaataagtcagcagaaaaatataaggaattatatgaagaattaatcaagtag

SEQ ID NO: 4920 - protein, 482 aa, Clostridium perfringens
MEGFKLIKVLFATSEANPFIKTGGLGDVMGALPKELKRKGIDARVILPKYSAIKGELLDKLSFKKWFMVPVGWRNQYCGVYQCEYDEVIYYLLDSEFYFHRNGLYGEGDDGERFAFFDRAVLETLKEIDWCPDIIHCNDWQTGMIPVLHKLEYSKDPFYKNIKTVTSIHNLLFQGNFSADVLPELFGYDYEPVRNGSLEFYGGMSFMKGAINYSDRILTVSETYAKEIKTPYFGENLDGLLRERGYALKGIVNGIDYDEFNPSKDSLIAKNFSVKTIEDKVLNKLALQKELGLPINPDIPMISIVSRLTNQKGCDLIVNIANRLLQRNVQLVILGTGDYNYENHFKGLQELYPTKVSANIKFDNGLAHRIYASSDIFLMPSLFEPCGLGQLIALRYGAIPIVRETGGLKDTIHSYNKYTGIGNGFSFTNYNHNDLMHVIELALETYDDKEIWRSLIIQAMDSDNSWNKSAEKYKELYEELIK

SEQ ID NO: 4921 - DNA, 1335 bp, Deinococcus radiodurans
  CDS (1)..(1335)
atgcgtgtgctgcatctcgcctccgaggtcttccccttttcccgctccggtggcctgggcgacgtgctgggagcgctgcccgctgtgcaggcgcggctgggcgaagacgcagaagtcacggtcctctcgccgtggtacgcctccttgcagggcgagccgcaggaactctggcgcggggaagcctggggcgagcaggcgtggctgggcgaactccgtcaggacggcgtgcgctacctctttctcggcctgaacgagtttcagcgccccggcctctatcaccccgacgacgtagagcgcttctgcgccttcgggcgagcggcgctcccggcactggacgcggtgggcgtgaccccggacgtgctgcacgggcacgactggcaggcgggactggtggtcgcccacgcccggctgcgtggcctgcggaccgccttttcggtccacaacctgcaataccagggccgctggaacctgcacgaagcggcgggctggaccgggctcccggactggaccttcgggcccgatggggtggagtttttcggcgacctcaacctgatgaaagcgggcctgaactttgctgggcacgtcaccaccgtcagccccacctacgcgcaggaaatcaccacgccgcaatacggcgaggggttggaagggctgctggtgcggctgacccacgagggccgactctcgggcatcctcaacgggctcgaccaggaccgctggaacccgcgcaccgaccccgacatcgccgcctacagcgacccggcaggcaaggcaggggccgtgaaggcgctgcggcaggaattcggcctggacgacgccccgattctggcgacggtcagccgcctcgccgaccagaagggcatggacctgctgattacggcgctgcccgaactggtgcgcgactggaacgtggtggtgctcggcggcggcgacccgctgctggaagccgcgctgaccggctgggccaaccacccccgcgtcgccttcgcttcgggcatgaacgagccgttggcgcaccgcatctacgccggcgcccacgcgtttgccatgcccagccgcttcgagccgtgcggcctctcgcagctcatcgccatgcgctacggcaccctgcccatcgtgcgcgaaaccggcggactggccgacaccgtgccgcccgaagtcggtttccgctttgccgacgccaccgcgcccgccttcctgcaagcctgccgcgaggcccaggccgcctttcaggacccggcgcagtggcagacccgcgccacccgcgccatgtcattggatttctcctgggacggtccggcacggcaatacctggaactttaccgggggctgtaa

SEQ ID NO: 4922 - protein, 444 aa, Deinococcus radiodurans
MRVLHLASEVFPFSRSGGLGDVLGALPAVQARLGEDAEVTVLSPWYASLQGEPQELWRGEAWGEQAWLGELRQDGVRYLFLGLNEFQRPGLYHPDDVERFCAFGRAALPALDAVGVTPDVLHGHDWQAGLVVAHARLRGLRTAFSVHNLQYQGRWNLHEAAGWTGLPDWTFGPDGVEFFGDLNLMKAGLNFAGHVTTVSPTYAQEITTPQYGEGLEGLLVRLTHEGRLSGILNGLDQDRWNPRTDPDIAAYSDPAGKAGAVKALRQEFGLDDAPILATVSRLADQKGMDLLITALPELVRDWNVVVLGGGDPLLEAALTGWANHPRVAFASGMNEPLAHRIYAGAHAFAMPSRFEPCGLSQLIAMRYGTLPIVRETGGLADTVPPEVGFRFADATAPAFLQACREAQAAFQDPAQWQTRATRAMSLDFSWDGPARQYLELYRGL

SEQ ID NO: 4923 - DNA, 1386 bp, Fusobacterium nucleatum
  CDS (1)..(1386)
atgaaagttctttttgcaacaggagaagcttttccatttgttaaaacaggggggttaggagatgtgtcttattctctcccaaaaaccttaaaacaaaaggaaaatgttgatattagagttattttacctaagtatagtaaaatttcaaatgaattattaaaagatgctaggcacttaggacataaggaaatttgggttgcacatcataatgaatatgtaggaattgaagaggttgaactggaaggagttatttactattttgtagataatgaaagatattttaaaagacctaatgtttatggtgaatttgatgactgtgaaagatttttatttttctgcaaagcagttgttgaaactatggatatcacaaaatttaaacctgatatcattcattgtaatgattggcaatcagctcttatacctatatatttaaaggaaagaggaatatatgatgtaaaaactatttttactattcataatcttagatttcaaggttttttctttaataatgtaatagaagatttattagaaattgatagggcaaaatatttccaagaagatggtttaaaatattacgatatgatttctttcttaaaaggaggagttgtttattctgattatattacaacagtgagtgatagttatgctgaagaaataaaaactcaagagcttggtgaaggtatacatggattatttcaaaaatatgattataaattatcaggaatagtcaatggaattgataaaatttcatatccattatctaaaaaacctcataaaatattaaaggctgatttacaaaaaaaattaggtttagatgtagaagaggatacacctttaattgttattataactcgtttagatagacaaaagggcctagattatattgttgaaaaatttgatgaaatgatgagtttaggaatacaattcattcttttaggaacaggtgaaaaacgttatgaacatttctttgcttatcaagaatatctccataaaggacaagtatgttcatacattggttttaatcaagaattatctactgaaatctatgcaggagcagatatatttttaatgccttctgtttttgagccttgtggactttctcaaatgatagcaatgagatatggttgtatacctgttgttagagaaacaggaggcttaaaagatactgtaaaaccatataatgagtatacaggtgaaggagatggctttggttttaaacaagctaatgctgatgatatgataaaaactttaaaatatgcaattaaaatgtatcatagacctaatgtatggcaagagattattaagaatgctaagaaaagagataactcttgggataaacctgcaaagagatataaggaattataccaaaggttgatagaaggataa

SEQ ID NO: 4924 - protein, 461 aa, Fusobacterium nucleatum
MKVLFATGEAFPFVKTGGLGDVSYSLPKTLKQKENVDIRVILPKYSKISNELLKDARHLGHKEIWVAHHNEYVGIEEVELEGVIYYFVDNERYFKRPNVYGEFDDCERFLFFCKAVVETMDITKFKPDIIHCNDWQSALIPIYLKERGIYDVKTIFTIHNLRFQGFFFNNVIEDLLEIDRAKYFQEDGLKYYDMISFLKGGVVYSDYITTVSDSYAEEIKTQELGEGIHGLFQKYDYKLSGIVNGIDKISYPLSKKPHKILKADLQKKLGLDVEEDTPLIVIITRLDRQKGLDYIVEKFDEMMSLGIQFILLGTGEKRYEHFFAYQEYLHKGQVCSYIGFNQELSTEIYAGADIFLMPSVFEPCGLSQMIAMRYGCIPVVRETGGLKDTVKPYNEYTGEGDGFGFKQANADDMIKTLKYAIKMYHRPNVWQEIIKNAKKRDNSWDKPAKRYKELYQRLIEG

SEQ ID NO: 4925 - DNA, 1377 bp, Gloeobacter violaceus
  CDS (1)..(1377)
atgaaggtattgtttgcggcggcggagtgtgcccccttagccaaggtgggcggcatggcggacgtggtgggctcgttgcccctggccctggccgagatggggctcgatgtacggatcatcctgccctactacggctttttgggggagctgcccaagtccgagcagccggtctggaccggcggcgccatgttccagcaggtcgaaatttacgaagcgcgcctgcccggcagcgacatccccctctatctggtcggtcacccggcctttgccaacgagcgcatctacggttttgaggacgaagcctggcgcttcacgctcttctcgcgcacggtggccgaatttctctggcggggcggttgggatccgcaggtgctccactgccacgactggcacacgggactgttgcccctctggatgcggtcgatgccggtgatgacggtcttcaccatccacaacctcgcctaccagggaccgcccctgccgtactttcgcgccttcgtggacgtcccctacgacacgggcgcctggaacccgatggtggcggggatcatccacagcgacgcgatcacggcggtctcgcccacctatgcgcgcgaaatttgcacccccgagtacggcgagcgcctggacggcctgctcaggggccagggaaaccgcctgaccggtatcctcaacggcatcaacaccaaggccctcgacccggccaccgacaagcacctgacggtcaactacgacacgaccagtctcgatcggcgcgtcgagaacaaactggccctccagcgcgagttcggcttcgaggtcagtgccgatcgcttgctggtgggtatcgtctcgcggctggtggaccagaagggcttcgatttgctcgcgccgctctgggacaactggatgcacaccagcggcgcccaactggtcgtgctcggcagcggcgacccgttttacgaatttctgtttcgctcggcggcggagcgctacccggaccgcatcaaggcggtgctgagctacaacgtgcccatcgcccagcgcatctacggcggcgcggatctgtttttgatgccctcgcgcttcgagccctgcggcatcggccagatgattgcgctgcgctacggggcggtgcctttggtgcgcaagaccggtggcctcgccgacacggttttcttccacaatccgctcgatgaaaaaggcaacggctttttgttcgaccgctacgacccggccaacctgcttgccatgctctaccgcgccgaggaagcgtttcgctacaaagactactggcgacgactgcaattgcgcggcatggaagcggacctcagttggcgcgcctccgcccatcagtacgcggatctctacaagtcgctgattgctcgcctgggctaa

SEQ ID NO: 4926 - protein, 458 aa, Gloeobacter violaceus
MKVLFAAAECAPLAKVGGMADVVGSLPLALAEMGLDVRIILPYYGFLGELPKSEQPVWTGGAMFQQVEIYEARLPGSDIPLYLVGHPAFANERIYGFEDEAWRFTLFSRTVAEFLWRGGWDPQVLHCHDWHTGLLPLWMRSMPVMTVFTIHNLAYQGPPLPYFRAFVDVPYDTGAWNPMVAGIIHSDAITAVSPTYAREICTPEYGERLDGLLRGQGNRLTGILNGINTKALDPATDKHLTVNYDTTSLDRRVENKLALQREFGFEVSADRLLVGIVSRLVDQKGFDLLAPLWDNWMHTSGAQLVVLGSGDPFYEFLFRSAAERYPDRIKAVLSYNVPIAQRIYGGADLFLMPSRFEPCGIGQMIALRYGAVPLVRKTGGLADTVFFHNPLDEKGNGFLFDRYDPANLLAMLYRAEEAFRYKDYWRRLQLRGMEADLSWRASAHQYADLYKSLIARLG

SEQ ID NO: 4927 - DNA, 1440 bp, Lactobacillus plantarum
  CDS (1)..(1440)
atgactagggtattattcgcggcggcagaagcggcccctttttataagactggtggcttaggcgatgttagtatggcgttaccgcgcgccttgcaagcggaaggaatcgagacgcgtgtagtgattccgtattaccctcaccagatgccgaccgaatatcagcagcagttagtgccagtgacgcattttactgttcaagtgggtgaacatgcgatgtattgcggtattaaaactctgacagtcgcgcacgttcagtattatctaattgataatttagattattttggtcgtgaaggattatatggttattgggatgatggtgcacgctttgccttctttcagatggcggtttgtgaaatgatggagcagatcgattatatccctgatattttacaactcaatgattggcatacggcgtttattcctgtcttgctagctgaaaagtactattggatcgaagcgtatcgtgatattaaaacggtgctgacgattcataacttacagtttcaaggtgtctacgatccgattattttggatagtctctttcgaatcggaactgagacttacaccgaagccggcgtggcgttttacgatcaagtgaactggctgaagggcggtattaactttgcagatgccgttaatacggtgtcaccgacctacgcacaagagattcaaacaccagcttttggggaacgtctcgacggggtgctgcgggccaatcggtacaaactgagtgggattcttaatggcattgatatgcaattatacgatcccgcaaccgacctggcactaacggcgaattattcggctaaggatttgaaacctaagcgtcagaataaacgtgccttacagcgccgattagggttgcctgtcaaaaacatgccggtattggcagtcgtttctcggttaacgaagcaaaagggtatcgacctcttgctggatgcattgaatccattcttgcagcaacaagatgtgcaactcattgttttgggaacgggtgacccagcattggaacgcgcgttacgcacctatcagtcggcgtatccgcaaaaggtggtcgccgcgattcaatttgatacgcagctagctcagcaaatctatgcggccagtgatatctttcttatgccttctgcctttgaaccgtgtggcttgtcgcagatgatggcgatgcattacgggacgttaccgatcgtgcacgcggtcggtgggttgcgggacacggtcattccgtacaatcgctataccggtcagggaaccggctttagctttgacgactaccagccagcggttctacgtaaaattatgattctagccgtgaccttatatcggcagcatccactggtttggcggcagctgcaacaccaagcaatgacttgtgattttggctgggaacattctgcacagcagtaccgtgcgacttatcagaagctaatgcgttag

SEQ ID NO: 4928 - protein, 479 aa, Lactobacillus plantarum
MTRVLFAAAEAAPFYKTGGLGDVSMALPRALQAEGIETRVVIPYYPHQMPTEYQQQLVPVTHFTVQVGEHAMYCGIKTLTVAHVQYYLIDNLDYFGREGLYGYWDDGARFAFFQMAVCEMMEQIDYIPDILQLNDWHTAFIPVLLAEKYYWIEAYRDIKTVLTIHNLQFQGVYDPIILDSLFRIGTETYTEAGVAFYDQVNWLKGGINFADAVNTVSPTYAQEIQTPAFGERLDGVLRANRYKLSGILNGIDMQLYDPATDLALTANYSAKDLKPKRQNKRALQRRLGLPVKNMPVLAVVSRLTKQKGIDLLLDALNPFLQQQDVQLIVLGTGDPALERALRTYQSAYPQKVVAAIQFDTQLAQQIYAASDIFLMPSAFEPCGLSQMMAMHYGTLPIVHAVGGLRDTVIPYNRYTGQGTGFSFDDYQPAVLRKIMILAVTLYRQHPLVWRQLQHQAMTCDFGWEHSAQQYRATYQKLMR

SEQ ID NO: 4929 - DNA, 1488 bp, Nitrosomonas europaea
  CDS (1)..(1488)
atgtcttcatctccttcccgcaaaaatccacgggtgttgtttgtcacttccgaagtatttccgttatgcaaaaccggagggctgggtgatgtcagtgccgcattacctgccgcgctgcgtgaactgaaggcagatgtacgcttactcgtacccggctacccgtcagtactatccgggctcaaatacaaacgtaagctggcagaattcgatctcctgccgcacttccctccaaccacattattttcctcccggttacagatcaatgaatccgtcagtctgcccttatatgtgatccactgcccggaactctatcagcgaccaggcggcatctatctggatgacgacgggcaggactggccggataacgcacaacgcttcggcctgctgtcaaaaatgggtgcactcctcgccagtgatgccagcccgctctcctggataccggatatcatccattgcaatgactggcaaagcgggctcacacctgcttatctccactaccactccgggaagaaagcagccagcctgatgacactgcacaaccttgcttttcagggctgctttccacccgatgaagtagccaggctgggattgccacccgaaagcttcagcgtgcatggcgtcgaatactacggcaatctatcgttcctcaaggcgggaatctactatgcaacccggattactacggtcagccctacttacgcccgggaaatccagcatgagccgctgggattcggtttacagggattactggccgaacgcagcaacgccatcaccggaatcatcaacgggatcgataacaccgtctggaatccggcaaccgatccgcacatcgtaaaaaaatattcaagccgcaacctggcagcaaaaaaaattaacaagctcgctctgcaacgggagatggggctggaagaaaacgaaacgattccgctgtttgccggaatcagccgtctcagttaccagaaaggctacgatattctgttgcaggtcgcacccatgctggcagatctccctgctcaactggtattgctgggaaagggagatcaatctctggaaaaacaactcgttatgcttgcacaaaccaaccctgccagaattgccgtccgcatcgactacgacgaagcgctctcgcatcggatcaatgccagtgcggactgctttctgatgccttcccgctttgaaccgtgcggactgaaccagatgtacagccagcgctacggcactccgcccatcgtccatacaaccggcggactgatcgatacagtgactgatctggcccctgatactccagccggcgaatctgcaagcggattccattttcacgaaatgaccgcagatgcattcatgaatggaatcggacgggcaattgatgcctattacaacaccaggttatggaaaaccctgcagcacaatggcatgcgtaaggatttcagctggcgatccagtgctttggcatacctgtccatttactcgctgttgatgcagcgataa

SEQ ID NO: 4930 - protein, 495 aa, Nitrosomonas europaea
MSSSPSRKNPRVLFVTSEVFPLCKTGGLGDVSAALPAALRELKADVRLLVPGYPSVLSGLKYKRKLAEFDLLPHFPPTTLFSSRLQINESVSLPLYVIHCPELYQRPGGIYLDDDGQDWPDNAQRFGLLSKMGALLASDASPLSWIPDIIHCNDWQSGLTPAYLHYHSGKKAASLMTLHNLAFQGCFPPDEVARLGLPPESFSVHGVEYYGNLSFLKAGIYYATRITTVSPTYAREIQHEPLGFGLQGLLAERSNAITGIINGIDNTVWNPATDPHIVKKYSSRNLAAKKINKLALQREMGLEENETIPLFAGISRLSYQKGYDILLQVAPMLADLPAQLVLLGKGDQSLEKQLVMLAQTNPARIAVRIDYDEALSHRINASADCFLMPSRFEPCGLNQMYSQRYGTPPIVHTTGGLIDTVTDLAPDTPAGESASGFHFHEMTADAFMNGIGRAIDAYYNTRLWKTLQHNGMRKDFSWRSSALAYLSIYSLLMQR

SEQ ID NO: 4931 - DNA, 1434 bp, Oceanobacillus iheyensis
  CDS (1)..(1434)
atgaaaaacattttatttgtcacctcagaatgtacaccatttattaagacaggcggacttgcggatgtatctggatcgttgccacaagctcttcaggaacatggaggaatggaagtaagagtgatgttacctttatatgatgaaattgatcgttcttggaaggatcaatttgaatttgtgtgcgcttttacggtctcattagggtggagagaacaaactgcagagctatatcgttatcgttataatgacgtcacgtattatttcatcggaaacgattattattttactagaaaaggaatatacggctattacgatgatggagaacgatttgtattttttagtcaggctattatagcttctttagaatatatcgattttataccaagtgtattacatgcccatgattggcaaacagggatagctgttgcactagctaaaatctatcaacctattgaagaattgattaccgtttttaccattcataatatatattaccaagggacaatgcctttaacgacatttgatgatttttttcaattaggcagagaacatttagcaggcatggaatggaatcaaatgattaatagtttgaaatcaggcatttttcatgccgataaaataacgacagtaagtccaacctatgcagaagaaatactaacaccttattacggtgccggactggaagagatgctttggaatcggcgagaagacttgataggagtgctaaatgggattgatttaaaagattataatcctgctatagataaatctttaccagttaactaccgttctgcacggtcgaaaaaaatagagaatcgtaagttactctatgaagaaataggtttgaatcttaaagatggagtacctctttatattatggttactagactagtagaacagaaaggaattcatcttgttcaacgaattttagaggaatttttacaagaggatattcaattgattgttcttggaaatggagaacaggaatttgaatactatttcaaagacatcgaataccgttacccagataaaatgattacccacctgcattttaatgaatcattagctaggagattatatgcaagtgccgattttctcctgatgccatcgaagtttgagccatgtgggttatctcaattaattgctttacaatataaaaccgtacctattgtccgtgagacaggaggattaaaagatacgataattgcttttaatgaaattacaggagaaggaaatggctttcgatttgccaattataatgcacatgaacttttacatgtactgaagtactctctggagatttatcaacaaccttcactttggtcagtattaataaagaatgtaaataaaagtaaatttagttggaaggattccgcgtctgcatatgcagacgtatatcaacagctcgatgcttcatctgtatcttataaatag

SEQ ID NO: 4932 - protein, 477 aa, Oceanobacillus iheyensis
MKNILFVTSECTPFIKTGGLADVSGSLPQALQEHGGMEVRVMLPLYDEIDRSWKDQFEFVCAFTVSLGWREQTAELYRYRYNDVTYYFIGNDYYFTRKGIYGYYDDGERFVFFSQAIIASLEYIDFIPSVLHAHDWQTGIAVALAKIYQPIEELITVFTIHNIYYQGTMPLTTFDDFFQLGREHLAGMEWNQMINSLKSGIFHADKITTVSPTYAEEILTPYYGAGLEEMLWNRREDLIGVLNGIDLKDYNPAIDKSLPVNYRSARSKKIENRKLLYEEIGLNLKDGVPLYIMVTRLVEQKGIHLVQRILEEFLQEDIQLIVLGNGEQEFEYYFKDIEYRYPDKMITHLHFNESLARRLYASADFLLMPSKFEPCGLSQLIALQYKTVPIVRETGGLKDTIIAFNEITGEGNGFRFANYNAHELLHVLKYSLEIYQQPSLWSVLIKNVNKSKFSWKDSASAYADVYQQLDASSVSYK

SEQ ID NO: 4933 - DNA, 1443 bp, Pasteurella multocida
  CDS (1)..(1443)
atgaaagtattacatgcttgctcggagttataccccttgttaaaaaccggtgggttggcagatgtgatgggcgcattaccttttgcacaaaaagagattggaattgacgcacgtattgtcttaccggcgtatcctgcaattaaagcgggcattcctgagacgactgttgtcagtgaatttgataattttgcagggcatattgtgttgcgttatggtgaatataaaggtcttggtgtgtatttaattgatgcgcctcatttatatcaacgtgaaggcaatccttaccatgatcaatggtataacgattatgccgacaactataaacgttttgcattattgggctgggtcgcagcggaattagccacgggattagacagttggtggcatgcggatgtggtgcatgcacatgactggcatgccggattagccagtgcttatttgtttaataaaggtcgccctgccaaatctgttttcacgattcataatttagcctatcaaggacaatttgcttatcaccatttagttgaaattggtttacctgctggcatgttccatgtggatggattggaattgcacggtcagatttcttacttaaaagcaggactttattattctgatgcggtgacggcagtgagcccaacttatgcaaaagaaatcaccacgcctgaatttgggtatggcttacaagggctattaaccacattaaattcacaaggaaaattagtcgggattttaaatggtgtggatgatcaaatctggcatccaaatcatgatgcgtacattgagcatcattacaaattaaaagccatgacgggtaaacgtaaaaacaaagaggcattgcaagcttactttaacttaccacaagatccggacgcgttattatttgtgatggtgacacgtttaacagagcaaaagggggtggatctgttaattgacagtgccgaagaaattgtaaaacagggtgggcaattaacgattttaggttcaggatcgccgcatttagaagccggtatcttacatttagcccagcaatatccacaccaaattgcggtgaaaattggctatgatgaagccttatctcatttaatgattgcaggtggtgacgtcattttagtgccaagtcgttttgagccttgtggcttaacacagttatacggtttgaaatatggcaccttaccgttagtcagagccaccggtggtttggcggatacagtggtaaatgcgacagtagaaaacatcaagtcacgattagctacaggatttgtatttgagcaagcaaaccgtgaggcattacgccaagccttagtaaatgcctttgcgttatggcaaaaacagcgcctttggtttacggtgcgtagcgtcgcgatggaacaagattttagctggcaaatttcagcgacgggttatcatgccctatatcaacgtcttttatcgttcaactag

SEQ ID NO: 4934 - protein, 480 aa, Pasteurella multocida
MKVLHACSELYPLLKTGGLADVMGALPFAQKEIGIDARIVLPAYPAIKAGIPETTVVSEFDNFAGHIVLRYGEYKGLGVYLIDAPHLYQREGNPYHDQWYNDYADNYKRFALLGWVAAELATGLDSWWHADVVHAHDWHAGLASAYLFNKGRPAKSVFTIHNLAYQGQFAYHHLVEIGLPAGMFHVDGLELHGQISYLKAGLYYSDAVTAVSPTYAKEITTPEFGYGLQGLLTTLNSQGKLVGILNGVDDQIWHPNHDAYIEHHYKLKAMTGKRKNKEALQAYFNLPQDPDALLFVMVTRLTEQKGVDLLIDSAEEIVKQGGQLTILGSGSPHLEAGILHLAQQYPHQIAVKIGYDEALSHLMIAGGDVILVPSRFEPCGLTQLYGLKYGTLPLVRATGGLADTVVNATVENIKSRLATGFVFEQANREALRQALVNAFALWQKQRLWFTVRSVAMEQDFSWQISATGYHALYQRLLSFN

SEQ ID NO: 4935 - DNA, 1506 bp, Prochlorococcus marinus
  CDS (1)..(1506)
atgcgcgttctttttgctgctgctgaatgcgcaccgatggttaaggtcggtgggatgggagatgttgtagcttctttgccatcagcattggcaaaacttggacatgatgttcgtttgataattcctggctatagcaaactttggggattacttgatatttctaaggatcccatatatacggcccaaacaatgggagcagaattttccgtttacgaaactaagcacccaacttctaatcttcctatttatttagtcggacatcctgtttttgatcctgagaggatttatggaggtgaagatgaagattggcgatttactttttttgcaagtgcgacagcagaatttgcttggaatgtatggaagccacaagtattgcattgccatgattggcacactggaatgatccctgtctggatgcatcaggaccctgaaattagtacagtatttaccatccataatttgaagtatcaaggaccttggcggtggaaattggaacgcatgacatggtgtccgtggtacatgagtggagatcacacaatggcggctgcaatgctttttgcagatcgtgtaaatgcagtttctccaacatattcaagggaaatacgtacttctgaatatggtgaaagtttagaaggtcttttaaattatatttcggggaaactacgaggcatacttaatggaatcgatttagatgaatgggatccagctactgataaggccttgcctgcaaattttagttctggcaagatgtctacccgtaagaaaaataaagaggcccttcagagacaaatggggcttgaagtcaataatgataaatacttgcttgggatggtgggtagactcgttgatcagaaaggtgttgatttacttcttcaggtttctagaagacttttggcatacactgactctcaaatagttgttcttggtacaggagatcaaattctcgaatcagctttatgggagcttgctattgatcaccctggtcgatttgcagttttccttacctatgatgattatctttcgcgtttaatttatgcagggagtgatgctttcttaatgcctagtcgtttcgagccatgtggtattagccagctacttgctatgcgctatggctccataccaattgttagaaatgtaggtggattagttgatactgttattcctcatgatcctattaacaaatcaggaacaggcttttgctttgatagatttgaaccaattgacttttatacagctttggttagatcttgggaggcatttcgtcatagacgtagttggaaggagttacagaaacgagctatgactcagatgtacagttgggagcgctctgctatggaatatgaaactatgtataaagaagttagtggatacaaggaaccttccccagatgctattgaagttgaaaaattttctgtaggtcaagatgcagatccttccttgaaaaatgagaagctttctgtaggtcaagatgaagattcttccttgaaaaatgagaggtttatttaa

SEQ ID NO: 4936 - protein, 501 aa, Prochlorococcus marinus
MRVLFAAAECAPMVKVGGMGDVVASLPSALAKLGHDVRLIIPGYSKLWGLLDISKDPIYTAQTMGAEFSVYETKHPTSNLPIYLVGHPVFDPERIYGGEDEDWRFTFFASATAEFAWNVWKPQVLHCHDWHTGMIPVWMHQDPEISTVFTIHNLKYQGPWRWKLERMTWCPWYMSGDHTMAAAMLFADRVNAVSPTYSREIRTSEYGESLEGLLNYISGKLRGILNGIDLDEWDPATDKALPANFSSGKMSTRKKNKEALQRQMGLEVNNDKYLLGMVGRLVDQKGVDLLLQVSRRLLAYTDSQIVVLGTGDQILESALWELAIDHPGRFAVFLTYDDYLSRLIYAGSDAFLMPSRFEPCGISQLLAMRYGSIPIVRNVGGLVDTVIPHDPINKSGTGFCFDRFEPIDFYTALVRSWEAFRHRRSWKELQKRAMTQMYSWERSAMEYETMYKEVSGYKEPSPDAIEVEKFSVGQDADPSLKNEKLSVGQDEDSSLKNERFI

SEQ ID NO: 4937 - DNA, 1500 bp, Prochlorococcus marinus
  CDS (1)..(1500)
atgcgcgtgctatttgctgctgcggaatgcgcgccgatggtcaaggttggtggaatgggtgatgtggtgggctcattgcccccagctctggccaagcttgatcatgatgtgcgtctgatcatgcctggttacggcaagctctggagcttgctggatatccctactgatccgatttggcggggtcagaccatgggcaacgagttcgccatctatgagacaagtcatcccagcaatggtttgcccctttatctggtagggcatccagtgtttgatcctgaaaggatctacggcggagaagacgaagattggcgttttacgtttttcgcaagcgcgacaacggaatttgcctggaacgtttggaaaccgcaagtgctgcattgccacgactggcataccgggatgattcctgtgtggatgcatcaggaccctgaaatcagcacggtctttaccattcacaacctcaaatatcagggcccctggcgctggaaacttgatcggatgacttggtgcccctggtacatgcaaggggatcacaccatggcggcagccttgctttatgccgatcgggtgaatgccgtctcccccacctatgccagagagatttgtacatctgaatacggggagagccttgatggcttgttgaactacatctctggaaaactgcgtgggatcctcaatggcattgacctgcaggattgggaccctggcaatgacaagtctttgccagccactttcaatgccgatgacctttcaggtcgtgctgtgaacaagcaggcccttcaacagcgcatggggcttgaggtcaatccagacacctatctactggggatggtgagtcggttggtggatcagaaaggggttgatcttctgctgcaggtgacagagcggttgcttgcttacacagattcccagatcgtcgtgctgggcactggtgagcgtggtttggaatccggcctgtggcaattggcaattcagaaccctggccgcttctcggttttcctcacttacgacgatgacctagcacgtttgatctacggcggcagtgacgcatttctgatgccgagtcgcttcgaaccctgtggcattagtcagctgttggccatgcgctacggcagcgtgccggtggtgcgcaaagtgggtggtcttgtcgacacggtgccttcctacgaccctattcatcaaaccggtactggattctgcttcgatcgatttgagcctgttgacttctatacagcattagtgaggtcttgggaggcgttccgtcatcgtgattgctggcgtgagttgcagcaacgtggaatgactcaaaactacagctgggatcgctccgctctcgactatgagcagatgtatcgggatgtctgtggctttaaggagccgtctcctgatgcggcggttgtggagcaattttctctcggccagggttcagatccttcccgtcagaaccaggacagcaatgcgaaaaaaagaaccagacgcaagaagaaggggaatgattaa

SEQ ID NO: 4938 - protein, 499 aa, Prochlorococcus marinus
MRVLFAAAECAPMVKVGGMGDVVGSLPPALAKLDHDVRLIMPGYGKLWSLLDIPTDPIWRGQTMGNEFAIYETSHPSNGLPLYLVGHPVFDPERIYGGEDEDWRFTFFASATTEFAWNVWKPQVLHCHDWHTGMIPVWMHQDPEISTVFTIHNLKYQGPWRWKLDRMTWCPWYMQGDHTMAAALLYADRVNAVSPTYAREICTSEYGESLDGLLNYISGKLRGILNGIDLQDWDPGNDKSLPATFNADDLSGRAVNKQALQQRMGLEVNPDTYLLGMVSRLVDQKGVDLLLQVTERLLAYTDSQIVVLGTGERGLESGLWQLAIQNPGRFSVFLTYDDDLARLIYGGSDAFLMPSRFEPCGISQLLAMRYGSVPVVRKVGGLVDTVPSYDPIHQTGTGFCFDRFEPVDFYTALVRSWEAFRHRDCWRELQQRGMTQNYSWDRSALDYEQMYRDVCGFKEPSPDAAVVEQFSLGQGSDPSRQNQDSNAKKRTRRKKKGND

SEQ ID NO: 4939 - DNA, 1452 bp, Prochlorococcus marinus subsp
  CDS (1)..(1452)
atgagaattcttcttgctgctgctgaatgcgctccaatgatcaaagttggagggatgggagatgtagttggttcattaccaccctcattgataaaacttggtcatgatgtaagagttataattcctggctatagcaaattatggaatctactagaagtatcaagcgaaccagtatttagagcaaatactatgggaaatgatttctctgtgtatgaagcaaaacatccaatacataattacgtaatctacctagttggacatccaacttttgattcgggccacatatatggaggagaagatgaagactggcgatttacattttttgcaagtgctactgctgaattttcctggaattgttggaagccccaagttctacattgccatgattggcacacgggtatgattccagtatggatgcatcaagatcccgaagtaagtacagtttttactatacataatttaaaatatcaaggaccatggagatggaagcttgaaaaaatgacctggtgtccatggtatatgcatggagatcatacgatggctgctgcaatgttatatgcagatagagttaatgcagtttctccaacatatgctgatgagataaaaactcatgagtatggagaaagtcttgagggattattgaattatatttctggtaaattaagaggtatcctcaatgggattgatctaaatgaatgggatcctgataaagataaagtgttacctgcacaattcaatattaaaaatttagaaagtagattagaaaataagattattcttcagaaagaaatgggacttgaggtcaatagtaaaaaatatcttttaggtatggtaagtaggctagtggaccaaaaaggtgttgatttagttttgcaagtttcccgaagattactcgcatatacagattctcaaattgctattttaggtacaggtgatagatctttagaatctggattatggcaattagcattagattatcctggaagattttcagtgtttcttacttatgatgattctttatcaaggcttatatatggaggatctgatgcattcttaatgccaagccgatttgaaccctgcggtatcagtcaattacttgctatgagatatggatcaattccaatagtaagaagagttggaggcttggttgatactgttttgcctcatgatccagaaaataatagtggtacaggtttttgttttgatcgatttgaaccgattgacttttatactgctctagtaagatcttgggaggcatttaggcataaagatagttggaaatcattacagctcagagctatgagtcaagaatttagttggcagagatcggcattagaatatgaatcgatgtataaagatgtatgtgggataaaggcgccatccccggatattgctgaaattgaaaagttttcttatgggcaatctgctgatccttctcttaaaacaatgtga

SEQ ID NO: 4940 - protein, 483 aa, Prochlorococcus marinus subsp
MRILLAAAECAPMIKVGGMGDVVGSLPPSLIKLGHDVRVIIPGYSKLWNLLEVSSEPVFRANTMGNDFSVYEAKHPIHNYVIYLVGHPTFDSGHIYGGEDEDWRFTFFASATAEFSWNCWKPQVLHCHDWHTGMIPVWMHQDPEVSTVFTIHNLKYQGPWRWKLEKMTWCPWYMHGDHTMAAAMLYADRVNAVSPTYADEIKTHEYGESLEGLLNYISGKLRGILNGIDLNEWDPDKDKVLPAQFNIKNLESRLENKIILQKEMGLEVNSKKYLLGMVSRLVDQKGVDLVLQVSRRLLAYTDSQIAILGTGDRSLESGLWQLALDYPGRFSVFLTYDDSLSRLIYGGSDAFLMPSRFEPCGISQLLAMRYGSIPIVRRVGGLVDTVLPHDPENNSGTGFCFDRFEPIDFYTALVRSWEAFRHKDSWKSLQLRAMSQEFSWQRSALEYESMYKDVCGIKAPSPDIAEIEKFSYGQSADPSLKTM

SEQ ID NO: 4941 - DNA, 1560 bp, Pseudomonas putida
  CDS (1)..(1560)
atgatcagtgccgctgtcgagcctcacgtagacgctttcaaaccggataaccgcgagccgctcaccccggatttcgccacgacaggcaaggcacccggcgcccagcgccagcacaacccgaacaagcgcaagattctgttcgtgacctcggaaatcgccgacctggtgaaaaccggtggcctgggtgacgtgtccgctgccctgccccgtgccctggcgcacctgcacgatgtgcgggtcctcatccccggctaccgccaggtgatggaaagcgacaaccctatacatatcgtgggtgaactgggcggccatgcggccctgccgccctgcaagatcgggcgcatggacatggccgacggcctggtcatctatgtgttgatctgcccagaactgtaccagcgcgacggcacaccctatggtgccaacaatggccgcgactggcccgacaaccacatccgcttcgcccgcctgggcctggctgccgccgaaatcgcggccggcgaaggcaagatccactggacgccggaagtggtgcacgcgcatgactggccggccggcctggccccggcctacatgcactggcgtggcctgaatacgcccacgctgttcaccatccacaacctggcgtaccaaggtgtgtacagccgcggctgcagcccggagctggcaatacccgaacatgccatgcagcaagaaggcatggaattctacggcaagctgtcgttcctcaaggccggcctggcctactccagccacatcaccacagtcagcgccacctatgcccgggaaatcaccacccctgaatttggctgcggcctggacggtttcctcgccagcaaggcccagcaaggcctgctcggtggcatccccaacggcatcgacgaaagctgggactcggctaccgacaagcacctgcaacacaacttcagcatcaatgactgggagggcaaagcgcgtaacacccaggaggtgcgcgagctgttcggcctggacgattccgaaggcccgctgttcgccgtggtgtcacggctggtctatcaaaagggcctggacctgaccctgggcgtggccgactacatcgtcgagcaaggcgggcagatcgcgatcatcggccgcggcgagccggaagaggaacaggccatgcgcgagctggcgctgcgccacccaggccgcatcggtgtgcgtatcggcttcaatgaaaccgatgcccggcgcatgttcgccggcagcgatttcctgctgatgccgtcgcgctacgagccgtgcggcctcagccagatgtacgcgcaacgcttcggctcgctgccggtagcacgtaataccggtggcctggccgacaccatcgagtgcggcgtgacgggcttcctgttcaacgagtccaccgtcgagagctaccgcgaggcactcagccgcgccttctatgtttacggcaagaaggacctgctgaacgccatgcgctgcctgtcgatgacccagccgttcaactggtgccaggcggttgaaccctatgcccgcctgtacgaggacctggtcaagcagacacaactgagccattactga

SEQ ID NO: 4942 - protein, 519 aa, Pseudomonas putida
MISAAVEPHVDAFKPDNREPLTPDFATTGKAPGAQRQHNPNKRKILFVTSEIADLVKTGGLGDVSAALPRALAHLHDVRVLIPGYRQVMESDNPIHIVGELGGHAALPPCKIGRMDMADGLVIYVLICPELYQRDGTPYGANNGRDWPDNHIRFARLGLAAAEIAAGEGKIHWTPEVVHAHDWPAGLAPAYMHWRGLNTPTLFTIHNLAYQGVYSRGCSPELAIPEHAMQQEGMEFYGKLSFLKAGLAYSSHITTVSATYAREITTPEFGCGLDGFLASKAQQGLLGGIPNGIDESWDSATDKHLQHNFSINDWEGKARNTQEVRELFGLDDSEGPLFAVVSRLVYQKGLDLTLGVADYIVEQGGQIAIIGRGEPEEEQAMRELALRHPGRIGVRIGFNETDARRMFAGSDFLLMPSRYEPCGLSQMYAQRFGSLPVARNTGGLADTIECGVTGFLFNESTVESYREALSRAFYVYGKKDLLNAMRCLSMTQPFNWCQAVEPYARLYEDLVKQTQLSHY

SEQ ID NO: 4943 - DNA, 1455 bp, Pseudomonas syringae
  CDS (1)..(1455)
atgtctcaggtcaacaggcgcaaagtgctgttcgtgacctccgaactggccgacctggtgaaaaccggcgggctgggcgatgtgtctgccgcactgccacgcgccatgcgccacctgcacgacgttcgtgttctgattcctggttatccgcaagtgatcaacagcggcaacccgatccatatcatcagccagctgggtgggcatgctgcactgccgccctgcaaggttgggcgtatggatatgaaagatggcttggtcatctacgtgctgatctgcccggaactgtacgagcgcgaaggcacgccttacgctgacactaacggccgcgactggtccgacaaccacatccgttttgcccgtctgggcctggccgctgccgagtttgctgctggcgaagtgaaaagccagtggtgccccgagctggttcacgcccacgactggcctgccggtctggcgccggcttacatgcgctggcgcggacagtccacgccgagtattttcacggttcacaacctggcctatcaaggcaccgtgagtactgcgtcgagccgtgaactgggcatcccggatgaggcgatcaccccggaaggcatggaattttacggcaagctgtcgttcatcaaggccggcatggcgttcgcgaaccacatcaccacggtcagcgccacttacgcccgggaaatcaccacacctgaattcggctgcggccttgagggctttttgcagagcaaggccgacaaaggtcagctcagcggcattcccaacggtatcgatgaaagctgggacgccgccactgacgaacacctgatctgtcacttcgcgcccaatgagtggacgcgcaaggaaatcaacgccgattacgtccgcgagctgtttgagctggacgcctccagcgggccgctttacgcggtggtttcgcgcctcgtttaccagaaaggcctggacctgaccatcggcgtggccgagcacatcgtcaacaacggtgggcagattgcaatcatcggccgcggggagcccgaagaagaagatgccatgcgcgaactggcggcacgctttcctggccgtatcggtgtgcgtatcggtttcaacgaaaccgatgcacgacgcatgtttgccggcagtgattttctgctgatgccgtcgcgctatgaaccctgcggcttgagccagatgtacgcccagcgtttcggctcgctgcctgtcgcccgcaacaccggcggcctggcggacaccatcgaggatggcgttaccggctttctgttcaatgaatcaaccgtcgaaagctacaccgaagccctgaaccgcacgtttcaggtcttcgctcacccggaactgctcaatgccatgcgctgccgcgcaatggctgcccccttcaactggcatcaggcagtggagccctacgcagagctttatcgcgacctgttgaagaaaaacgtgagcatgaccagcaactaa

SEQ ID NO: 4944 - protein, 484 aa, Pseudomonas syringae
MSQVNRRKVLFVTSELADLVKTGGLGDVSAALPRAMRHLHDVRVLIPGYPQVINSGNPIHIISQLGGHAALPPCKVGRMDMKDGLVIYVLICPELYEREGTPYADTNGRDWSDNHIRFARLGLAAAEFAAGEVKSQWCPELVHAHDWPAGLAPAYMRWRGQSTPSIFTVHNLAYQGTVSTASSRELGIPDEAITPEGMEFYGKLSFIKAGMAFANHITTVSATYAREITTPEFGCGLEGFLQSKADKGQLSGIPNGIDESWDAATDEHLICHFAPNEWTRKEINADYVRELFELDASSGPLYAVVSRLVYQKGLDLTIGVAEHIVNNGGQIAIIGRGEPEEEDAMRELAARFPGRIGVRIGFNETDARRMFAGSDFLLMPSRYEPCGLSQMYAQRFGSLPVARNTGGLADTIEDGVTGFLFNESTVESYTEALNRTFQVFAHPELLNAMRCRAMAAPFNWHQAVEPYAELYRDLLKKNVSMTSN

SEQ ID NO: 4945 - DNA, 1626 bp, Ralstonia solanacearum
  CDS (1)..(1626)
atgtcgctgaacgtcctctttgtcgcatcggaagcggtgccgctggccaagaccggtggcttgggagacatggtcggggcatgcgccggcgcgctgcagcgcgccggattgcacgtgaccgtgatgctgccggggtaccccgccgcgcaggcgcagctgcgcgatgcccgggtggcctgcgcgcttcccgatctgccgggcgggcccgcgcgcgtgctgctgggcgcgatgcccgataccggcgtgccggtgctgctgctcgacgccccggcgctgttcgatcgcccgggcaacccgtacctcgatgcctgcggcgagccctacgccgacaacgcgctgcgcttcgccgcgttcagccatgcggccgcgcacgtggccggcggcgtgcccgacctgcccgcattcgacatcgtgcaggcgcatgactggcatgccgcgctggtgccgctgctggtcaagcgcgcgggacggccggtcaagacggtcctgaccgtgcacaacctggcgttccagggcaacttcccgccacgtatcgcgcaggacctcggtcttcccccggaggcggtgcgcgaggccggattctttgggcagttcagtttcctgaaggcggggctgatgtgggccgaccgcatcaccaccgtgagccggacctatgcgcgcgagatcctgaccgacgcgttcggctacggcatgcaggacgtgctgcgggcgcgccggcatgacctcgtcgccattctcaacggcatcgacaacgcggtgtggaatccctcgaaagatgcttacctgtcgcggccgtttttcgcgggcaacctgagtggcaagcacgccgccaagctgcagctgcagacgctgctgcgcctgccgaaagacgcgcatgcgccactgctggcgctgggcagccgcctgacgcaccagaagatggcggacgtggcgctgcaggcgctgccgcagatgctggaagcccatcccgacctgcaggtggcggtgctgggctgcggcgagcgccgctatgaaagcgccatggccgccctggccgaacggcatccgcgccggatggcggccgtgatcggctataccgagcgcaacgcgcacatgctgcacgccggcgccgacctgctgctgcacggcagccgtttcgagccgtgcggcctgacaccgctgtatgccatgcgctacggcacggtgccggtggcctcgcgggtgggcgggctggtcgacacgatcgccgatcgcggctcgcccgaggcggcgctgcgcggcgccaccggcttcctgttcgacggcgagacgcccgaggccatggcgggcgcggtggcgcgcgcgctgcgcgtgttcgtccagccgcgcgcatggcgcgtcctgcaatacaacggcatgacgacggacttcggctggtcgcagccggcaagcgagtacctagcgctgtatgccacgctggcaccgcgcgccacgccgatgccgcatctgcagcactggccgatgcgcacgcttgcgcggcccgcgagccccccggacacggcgccggtgggcaaacccgcgcgccggcgccggacgacggcgttgtccaccacggcccgcgcgcacccggtggcgcgcgccgccggccgggaaaagatccgcgcatga

SEQ ID NO: 4946 - protein, 541 aa, Ralstonia solanacearum
MSLNVLFVASEAVPLAKTGGLGDMVGACAGALQRAGLHVTVMLPGYPAAQAQLRDARVACALPDLPGGPARVLLGAMPDTGVPVLLLDAPALFDRPGNPYLDACGEPYADNALRFAAFSHAAAHVAGGVPDLPAFDIVQAHDWHAALVPLLVKRAGRPVKTVLTVHNLAFQGNFPPRIAQDLGLPPEAVREAGFFGQFSFLKAGLMWADRITTVSRTYAREILTDAFGYGMQDVLRARRHDLVAILNGIDNAVWNPSKDAYLSRPFFAGNLSGKHAAKLQLQTLLRLPKDAHAPLLALGSRLTHQKMADVALQALPQMLEAHPDLQVAVLGCGERRYESAMAALAERHPRRMAAVIGYTERNAHMLHAGADLLLHGSRFEPCGLTPLYAMRYGTVPVASRVGGLVDTIADRGSPEAALRGATGFLFDGETPEAMAGAVARALRVFVQPRAWRVLQYNGMTTDFGWSQPASEYLALYATLAPRATPMPHLQHWPMRTLARPASPPDTAPVGKPARRRRTTALSTTARAHPVARAAGREKIRA

SEQ ID NO: 4947 - DNA, 1446 bp, Rhizobium loti
  CDS (1)..(1446)
atgcaggttctgtcggtcacgcccgagatcttcccgctgatcaagaccggcgggcttgccgacgtgaccggtgcgctgcccgtcgcgctggcagccaagggcgtgaccatgcgcacgctcattccaggctttcccgcggtgatggaaggcttcaagaaaaggaaggctgtttaccaatacccgctgctccagggtggcaaggcttcgatccatgctgtccagatcgcagggctcgatcttttcgtgctcgacgcgccgcatctcttcgaccgtcccggcggtccctacggcaatgcttcgggcgccgactggccggacaattggcggcgttttgcggcactgagccaggccggcgccgatatcgccggcggcgccatctcgggctacttgcccgagatcgtccatgcccatgactggcagtcggcgatgacgctggcctatatgcgctacggcaaggcggtcggcacgccgtcgatgatgacggtccacaatctcgccttccagggccagttcggcgcaggcatcttcggcgagctcggcctgccggcggtggcgatggcgcttgacggtgtcgaatattatggcggagtcggcttcctcaaggccggcctgcaggccgcctgggcgatcaccacggtcagcccgacctatgcgcaggaaatccgctcgccggaattcggcatgggcctcgacggcctgatcaacatgcgctccagcgatctctacggcatcgtcaacggcatcgacaccgccatctgggatccggagacggacaagcatctggtatcgaactatacggccaccacgctcaaggcgcgggcgccgaacagggcggccgtggaggaacgcttcggcctcgaccgcgacgacagcccgattgtctgcgtcatcagccggctgacctggcagaagggcatggacatattggcgacggtgatcgacggcatcgtcgcgaccggcgcgcggctggccatattgggctcgggcgacgccggcctcgaaggcgcgctgcttgccgcagccgcacgccaccgtggccgcatcggcgtggtcatcggctatgacgaagggttgtcgcacaccatgcagggcggctgcgacgccatcatcatcccgtcgcgcttcgaaccctgcggattgacgcagctctacggcctccgctacggctgcgtgccggtggtcgcccggaccggcggcctagccgacaccatcatcgacgccaacgaagcggcgatggcggccggcgtggccacagggctccagttcgctcccaacaatggcggcgcgatgctgcacgccatccgccgcctggtcgatgcctacgccgaccccgcggccttcgagaccatccagcgccagggcatgaaggccgatgtgtcatgggacaagagcgcggaaaaatatcttgaactctatcgcctgctgctttcgaaaagggttgcctga

SEQ ID NO: 4948 - protein, 481 aa, Rhizobium loti
MQVLSVTPEIFPLIKTGGLADVTGALPVALAAKGVTMRTLIPGFPAVMEGFKKRKAVYQYPLLQGGKASIHAVQIAGLDLFVLDAPHLFDRPGGPYGNASGADWPDNWRRFAALSQAGADIAGGAISGYLPEIVHAHDWQSAMTLAYMRYGKAVGTPSMMTVHNLAFQGQFGAGIFGELGLPAVAMALDGVEYYGGVGFLKAGLQAAWAITTVSPTYAQEIRSPEFGMGLDGLINMRSSDLYGIVNGIDTAIWDPETDKHLVSNYTATTLKARAPNRAAVEERFGLDRDDSPIVCVISRLTWQKGMDILATVIDGIVATGARLAILGSGDAGLEGALLAAAARHRGRIGVVIGYDEGLSHTMQGGCDAIIIPSRFEPCGLTQLYGLRYGCVPVVARTGGLADTIIDANEAAMAAGVATGLQFAPNNGGAMLHAIRRLVDAYADPAAFETIQRQGMKADVSWDKSAEKYLELYRLLLSKRVA

SEQ ID NO: 4949 - DNA, 1443 bp, Rhizobium tropici
  CDS (1)..(1443)
atgaaggttctctcggtttcgtccgaagtcttccccttgatcaagacagggggtctggccgatgtggtcggcgccctgcctattgcactgaagccctatggcgtcgaaaccaagaccctcatcccaggctatcctgcggtcatgaaagccattcgcgatccggttgttcgtctggagcttccggatcttcttggcgaggccgccaccattctagaagtcgagcacgcgggcatttccttcctcgtgctcgacgcaccggcctattacagccgcaccggcggcccctatgtcgatgcgacgggcaaggactatcccgacaattggcgacgtttcgccgcgctgtcgctggccggcgcggaaattgcagctggtctcctgcccggctggcggccggatctcgtgcacgcacatgattggcagtcggcgctggtgccggtctatatgcgttactatccgacgccggaactgccgagcgttctgaccatccacaacatcgcattccagggccagttcggcgccgatatcttccccggccttcgtctgccggcgcatgctttctcggtggaaggcatcgaatattacggtgatgtcggcttcctgaaaggtgggctgcagacggcgcatgccctgaccaccgtcagcccttcctatgccgaggaaatcctgacgccggaattcggcatgggcctcgaaggcgtcatcgccagcaaggcctacaatctctacggcatcgtcaacggcatcgacgcagatatctggaatccggcgaccgatccgatgatcgcgcaaacctatagcgcggcgacgctgaaggagcgcgccatcaaccgccatcgggtcgtcgagcatttcggcctcgaagaggatgatggtccgatcttctgcgtcgtcagccgcctcacctggcagaagggcatggatattctggcggaggttgcgagcgaggtcgtccacatgggtggcaagctcgcaattctcggcgcaggcgacgcggcgctggagggcgcgctctttgccgcagccggccgtcaccgcggtcgcgtcggcgttgtcggcaggcacaacgagcccatgtcgcatctgatgcaggccggctgcgacgcgattatcatcccctcgcgtttcgaaccctgtggtctcacgcagctttatggcttacgttcaggctgcctgccaatcgttgcgcgaacgggcgggctgaacgatacgattatcgacgccaaccacgccgcgctgcaggcaaaagtcgcgaccggcattcaattttcacccgtcaccgcggaggggctgttgcaggccatgcgccgcgcgatgcacctcttccaggatcgaaaggtctggacgcagatgcaaaagcagggcatgaaatccgacgtatcctggggcaggagcgcagaacgctacgccgctctctactccagtctagtctcgagaggcgcttaa

SEQ ID NO: 4950 - protein, 480 aa, Rhizobium tropici
MKVLSVSSEVFPLIKTGGLADVVGALPIALKPYGVETKTLIPGYPAVMKAIRDPVVRLELPDLLGEAATILEVEHAGISFLVLDAPAYYSRTGGPYVDATGKDYPDNWRRFAALSLAGAEIAAGLLPGWRPDLVHAHDWQSALVPVYMRYYPTPELPSVLTIHNIAFQGQFGADIFPGLRLPAHAFSVEGIEYYGDVGFLKGGLQTAHALTTVSPSYAEEILTPEFGMGLEGVIASKAYNLYGIVNGIDADIWNPATDPMIAQTYSAATLKERAINRHRVVEHFGLEEDDGPIFCVVSRLTWQKGMDILAEVASEVVHMGGKLAILGAGDAALEGALFAAAGRHRGRVGVVGRHNEPMSHLMQAGCDAIIIPSRFEPCGLTQLYGLRSGCLPIVARTGGLNDTIIDANHAALQAKVATGIQFSPVTAEGLLQAMRRAMHLFQDRKVWTQMQKQGMKSDVSWGRSAERYAALYSSLVSRGA

SEQ ID NO: 4951 - DNA, 1524 bp, Rhodopirellula baltica
  CDS (1)..(1524)
atgaatatcgtctacctgacgaccgaagccgttccattcgccaaaaccggtggtctcgccgacgtctgtggcactctgcccaaagtggttgccgctcaagggcatcgctgtgcggtcatcatgcctgccttttcatcgatcgaacgatcgttgcaaccgatcgagacgaccgacatcagcttcgcggttccaatgtcggatcaaaagctgatcggttgccgcctattgaaaagccatctgccgaaagatcccaacgatccagaggactcggccgaggtcccggtttatttcatcgaccaaccgcaatacttccgacgcccctcgctctacggtgacgccaacggagactaccacgacaacgccgaacgattcattttttactgtcgtgccgcgatcatcgcgatgactcgattggggtatccggtcgatttggtgcactgcaacgattggcaatctgctttggtacccgcgctgttgcgagctgcgtcggacaacgtggcaaagacccaaccaattgcgacgatgctgtcgattcacaacatggcctatcaaggcaactttggtttcgatgcgtttccgtggactggtttgagttgggatcacttccgaccggaatcattcgagtactacaaccagctgaacttcctcaaaaccggtgttgtgacctccgatgttgtgtcgacggtcagccccacgtatgccttggaaatccaaacgccagagtacggctgcggactggattcgatcctgcaaggcatcccgcaacctgtcgcgggaatcatcaacggaatcgacacaaacatttggaatcccgaaaccgatccacacctcaaacgcaattacagcgtggtggattgggctgacgcaaagattgacaacaaacttgcgttgcaagccgaggtgggtttgccacaagatcctgacgttccgttgctgggattgattggtcgtttggcggatcaaaaagggtgggacctgatccttcccgttttaaaacaacacctcgccgaagcacgtccaacgcagtgggtcgtactaggcagcggcgatcccaaaatcgaggagcaactacgcgagctgaccgagcaacatcccgaacaactggccgcgtacatcggcttcagcgatgcattggctcatcgcatcgaagcgtcgagcgacatgttcatcatgcccagccactacgaaccctgcgggctcaatcaactctatagccttcggtacggtactccgtgcgttgtgaccaagaccggcggtttagcggacacaatcgtggatgcgactccggagaacgttgcggcaaatctcgccacagggttccatttgaatgacagcagcgccggtgcgcttgaccacgcgatcaaccgggctctgcagcttcgatatcactctcccgaaaaatggaaaaatcttgtcgaattcggtatgtcgcaggattggacgtggaggaaaagtgcagaccaatacattcaactttatgcccgcacaatttccctaaatcgtcgaaggcgatcgggaagctag

SEQ ID NO: 4952 - protein, 507 aa, Rhodopirellula baltica
MNIVYLTTEAVPFAKTGGLADVCGTLPKVVAAQGHRCAVIMPAFSSIERSLQPIETTDISFAVPMSDQKLIGCRLLKSHLPKDPNDPEDSAEVPVYFIDQPQYFRRPSLYGDANGDYHDNAERFIFYCRAAIIAMTRLGYPVDLVHCNDWQSALVPALLRAASDNVAKTQPIATMLSIHNMAYQGNFGFDAFPWTGLSWDHFRPESFEYYNQLNFLKTGVVTSDVVSTVSPTYALEIQTPEYGCGLDSILQGIPQPVAGIINGIDTNIWNPETDPHLKRNYSVVDWADAKIDNKLALQAEVGLPQDPDVPLLGLIGRLADQKGWDLILPVLKQHLAEARPTQWVVLGSGDPKIEEQLRELTEQHPEQLAAYIGFSDALAHRIEASSDMFIMPSHYEPCGLNQLYSLRYGTPCVVTKTGGLADTIVDATPENVAANLATGFHLNDSSAGALDHAINRALQLRYHSPEKWKNLVEFGMSQDWTWRKSADQYIQLYARTISLNRRRRSGS

SEQ ID NO: 4953 - DNA, 1434 bp, Rhodobacter sphaeroides
  CDS (1)..(1434)
atggagacggcgcgcggacgggtgttgtcggtggcttccgaatgcgtgccgctgctgaagaccggggggctcgccgatgtggtgggcgcgcttccgggggcgctggcggcggaaggctgggagatgcgggtgctgatgccctgctaccggccgctgaaatggcggctcgaggagatggaggaggtcttcgccgaagaggatctcttcggggggccggggcgggtgatggcgggcgaggtggccgggcggaagatgctgctccttgatgcgccgcatctctacgaccgagggcggccctatgcgggtccggacggcgactggggcgacaatgcgcagcggtttgcggcgctttcctggatcggcgcgggatcgcgcgcgaggggctcggggacgggctggcggccggatgtggttcatgcccacgactggcaggcgggcttcacgccggcctatatgaactattggggcagcggcggagcgagttcggtgctgacggtgcacaacatcgccttccagggctgggcgccggcgagccttctgtcggcgctgcgcctgccgccgcagaagttccatccggccgcgctcgaatattacggcgggctctcgtcgctgaaggcggggctggtctcggccgatcatatcaccaccgtctcgcccacctatgcctgcgagctgatgcggcccgagttcggcatgggcctgcagggcgtgattgcccagcgggctgggcaggtgaccggcatcctgaacggggtcgacaccgacatctggtcgcccgaggtcgaggagcggccctatgacgccgagagcctgaaggccaaggcggagaaccgcgccgtgctgtcgggcgccttcaaactgtcggtgccggggccgcttgcgatcctcgtgagccgcctgacctatcagaagggcatcgacctcatccccgaggtgctgccggacttcatcgccgcgggcgggggccttgcagttctgggcacgggtgacgcgccgctcgaggcggcgatgcgcgagctcgaggtgcgctttccgggtcgggtcggggtgcggatcggctatgacgaagggctgtcgcatctgatgttcgcgggcggcgatgcggttttggtgccctcgcggttcgagccctgcgggctcacgcagatgtacgggctgcgctacggggccattccggtggtggccctgacagggggccttgccgacacgatcatcaacgccaatccggccgccatggccgcgggctgtgcgaccggcctcaccttccatccgaccgagccgcccgccttcgccgaggcgctgaggcggctgatccatctttatgccgatcccgcggcctgggagacggtgcaacggaatgcgatgcgccatccggtgggctgggagacctcggccgcggcctatgcggcgctctaccgggagctcgtcgcgtga

SEQ ID NO: 4954 - protein, 477 aa, Rhodobacter sphaeroides
METARGRVLSVASECVPLLKTGGLADVVGALPGALAAEGWEMRVLMPCYRPLKWRLEEMEEVFAEEDLFGGPGRVMAGEVAGRKMLLLDAPHLYDRGRPYAGPDGDWGDNAQRFAALSWIGAGSRARGSGTGWRPDVVHAHDWQAGFTPAYMNYWGSGGASSVLTVHNIAFQGWAPASLLSALRLPPQKFHPAALEYYGGLSSLKAGLVSADHITTVSPTYACELMRPEFGMGLQGVIAQRAGQVTGILNGVDTDIWSPEVEERPYDAESLKAKAENRAVLSGAFKLSVPGPLAILVSRLTYQKGIDLIPEVLPDFIAAGGGLAVLGTGDAPLEAAMRELEVRFPGRVGVRIGYDEGLSHLMFAGGDAVLVPSRFEPCGLTQMYGLRYGAIPVVALTGGLADTIINANPAAMAAGCATGLTFHPTEPPAFAEALRRLIHLYADPAAWETVQRNAMRHPVGWETSAAAYAALYRELVA

SEQ ID NO: 4955 - DNA, 1434 bp, Salmonella typhimurium
  CDS (1)..(1434)
atgcaggttttacatgtatgttcagagatgttccccctgctgaagactggggggctggcggatgtgataggcgcgttgcctgcggcacaaattgcggatggtgttgatgttcgcgttctgcttccagggtttcccgatatccgtcgggggatacccgacgcgcatgtggtgagccgccgcgatactttcgcaggtaagatatcgctgctgttcgggcattataacggcgtgggcatttatctgatcgacgcgccgcatctgtacgagcgtccaggcagtccctatcacgatacgaatttatatgcctataccgataacgtgctgcgctttgccctgttagggtgggtcggctgtgaaatggcctgcggacttgatccattctggcgccccgacgtggtgcacgcccatgactggcacgccgggctggcgcccgcctatctggcggcgcgcgggcggccggcgaaatcggtctttaccgtacacaacctggcctatcaaggcatgttttatgcaaagcatatggatgacatcgaactgccgtggtcattctttaatatgcatgggctggagttcaacggacaactctcctttttgaaggccggtttgtactatgccgaccatataacggcggtgagcccgacctatgcgcgtgaaattactgaaccgcagtttgcttatggtatggaaggcctgctgcgtcagcgtcatctggaagggcgcttgtccggcatactgaacggcgtggatgagaagatctggaacccggaatccgatctgctgctggcgtcgcgctacacgcgcgataccctggaagagaaggcggaaaacaaacgtcagctacaaattgcgatggggttgaaggttaacgacaaagtgccgctgttcgccgtggtaagccgtctgaccaaccagaaaggtctggatctggtgctggaggcgttaccggggctgctggagcagggcgggcagttggcgctactcggcgcgggcgatccggtgcttcaggaagggttcctcgcggcggcggcggaacacccagggcaggttggcgtacagatcggctatcacgaagctttctcgcatcgcattatgggcggcgcggacgttattctggtgcccagtcgtttcgaaccgtgcggcttaacgcagttatatggcttaaagtatggcacgctgcctctggtgcggcgtaccggggggttggccgatacggtctccgacagttcgctggaaaatctggcggacggtatcgccagcggttttgtctttgaagacagtaatgcctggtcgttgctacgcgcgattcggcgtgcttttgtgttgtggtcacggccttcgctttggcggtttgtacaacggcaggcgatggcgatggattttagctggcaagttgccgcgaaatcataccgcgagctgtactatcgcttgaaatag

SEQ ID NO: 4956 - protein, 477 aa, Salmonella typhimurium
MQVLHVCSEMFPLLKTGGLADVIGALPAAQIADGVDVRVLLPGFPDIRRGIPDAHVVSRRDTFAGKISLLFGHYNGVGIYLIDAPHLYERPGSPYHDTNLYAYTDNVLRFALLGWVGCEMACGLDPFWRPDVVHAHDWHAGLAPAYLAARGRPAKSVFTVHNLAYQGMFYAKHMDDIELPWSFFNMHGLEFNGQLSFLKAGLYYADHITAVSPTYAREITEPQFAYGMEGLLRQRHLEGRLSGILNGVDEKIWNPESDLLLASRYTRDTLEEKAENKRQLQIAMGLKVNDKVPLFAVVSRLTNQKGLDLVLEALPGLLEQGGQLALLGAGDPVLQEGFLAAAAEHPGQVGVQIGYHEAFSHRIMGGADVILVPSRFEPCGLTQLYGLKYGTLPLVRRTGGLADTVSDSSLENLADGIASGFVFEDSNAWSLLRAIRRAFVLWSRPSLWRFVQRQAMAMDFSWQVAAKSYRELYYRLK

SEQ ID NO: 4957 - DNA, 1431 bp, Streptococcus mutans
  CDS (1)..(1431)
atgaaaatcttatttgtagcagcggaaggggctccttttgcaaagacaggcggtctgggcgatgttattggtgccttgcccaaatcccttgtgaaaaataataatgaagtcagtgttatccttccttattatgatgttgttgatgctaaatttggtgaccaaatagaagatctgttctactttttcaccaatgtcggctggcgtcgtgaatatgttggtatcaaacatatcttcagagatggcgttgacttttactttattgacaataagcattatttttatcgtggtcaaatctatggtgaatttgatgatggtgaacgctttgcttacttccaattagctgctttagaagctatggaaaaaattcaatttattccggatattcttcatgtccatgattatcacaccgccatgattccttacttgctaaaggaaaaatatcattggattaatgcttatcatgggattaagacagtatttaccattcataatatcgagtttcaaggtcaattcaatccttctatgttaggagagctttttggagttggtgatgagcgttatcgtgatgggacgctgcggtggaatgattgcctcaactggatgaaggcagcggtgctctatgcagatcgtgtcaccactgtttcaccatcttatgctaaagaaattatgactcctgaatttggtaaaggactggatcaaattatgcggatggaatcaggtaagttaagtggtgttgtcaatggtattgacacggacttatttgatccggaaacagatccacatctggcagtgcatttttcaaaagatgatctgtcaggtaaagctaaaaataaagcagccttgcaggagcgtgttggtttaccagtacgtgaggatgttcctttggttggtattgtctctcgtctgacagatcagaagggttttcagttggttgttgatcaacttaatacaatgatgcaactggatttacagattgttttactaggaacaggctatgctgattttgaaaatgcttttgcttggttcggtcatgcttatccagacaaaatgtcagccaatatcacttttgatttagaattagctcagcaaatttatgctgccagcgatattttcttaatgccgagtgcatttgagccttgtggcttgtcacaaatgatggctatgcgttatggtaccttaccgcttgtacatgaagtaggcggacttcgggatactgttattccttataatgagtttgaaaagacaggaacaggttttggtttccaagacttctcaggttattggctgaccaaaacgcttgaagctgcgctagatgtctattataatagaaaagaagactggaaaattctccaaaaaaatgcgatgacaactgacttctcttgggatacagccagtcaatcttatgaacatctatataaagaactagcttag

SEQ ID NO: 4958 - protein, 476 aa, Streptococcus mutans
MKILFVAAEGAPFAKTGGLGDVIGALPKSLVKNNNEVSVILPYYDVVDAKFGDQIEDLFYFFTNVGWRREYVGIKHIFRDGVDFYFIDNKHYFYRGQIYGEFDDGERFAYFQLAALEAMEKIQFIPDILHVHDYHTAMIPYLLKEKYHWINAYHGIKTVFTIHNIEFQGQFNPSMLGELFGVGDERYRDGTLRWNDCLNWMKAAVLYADRVTTVSPSYAKEIMTPEFGKGLDQIMRMESGKLSGVVNGIDTDLFDPETDPHLAVHFSKDDLSGKAKNKAALQERVGLPVREDVPLVGIVSRLTDQKGFQLVVDQLNTMMQLDLQIVLLGTGYADFENAFAWFGHAYPDKMSANITFDLELAQQIYAASDIFLMPSAFEPCGLSQMMAMRYGTLPLVHEVGGLRDTVIPYNEFEKTGTGFGFQDFSGYWLTKTLEAALDVYYNRKEDWKILQKNAMTTDFSWDTASQSYEHLYKELA

SEQ ID NO: 4959 - DNA, 1425 bp, Synechococcus elongatus
  CDS (1)..(1425)
atgcgaattctatttgttgctgctgaggcggcaccactggcgaaagtgggaggcatgggagatgtggttggctctctgcccaaggtgttacgccgcatgggacatgatgtgcgcatttttatgccctattatggcttcttgcccgataaggtggagattcccaaggaccccatctggattggccatgccatgtttcagacattccatgtctatgaaaccgtgttgccggggtcggatgttcccctttacctttttggccatccctgctttaatccccgccgcatctactacggtgaggatgaggactggcggttcaccttttttgccaatggggcagcagaatttgcttggaactactggaaaccccaaattatccattgccacgattggcacacgggcatgatccccgtctggatgcatcaggatcccgacattaccaccgtgtttacgatccataacttggcctatcaaggaccttggcggtggcgcctagagcaaattacttggtgtccgtggtacatgcagggccataatacaatggcggcagcgttgcagtatgccgatcgcgtcaataccgtttcgcccacctacgccgaacagattaaaacccctgaatatggcgaaaaattggagggattgctatcgtttattagtggcaaactctctggcattctcaatggtattgatactgagctttttgatcccagtagcgatcgcgcccttgcccaaaactacaccgcagataccctagagcggcgtagggccaacaaaattgctctccaggaagaattaggactcgaggtgaactccggcgctttcttggtggggatggtcagccgcctggtggagcaaaaggggctggatctattgattcaaattttagatcgctttcttgcctataccgatagtcagtttgtcctcttagggacgggcgatcgctactacgaaacccagatgtggcaaattgcctcacggtttccggggcgctgtagtgtgcagttgctctacagtgatgtcctgtcgcgccgcatctatggcggtgccgacgccttcattatgccgagtcgctttgaaccctgtggcatttcccagatgattgcgctgcgctatggttgtgtgccgattgtccgccgcaccggtggccttgtggataccgtctcccaccacaaccctgagcagcaaaccggaacgggctactgctttgaccgctatgagccccttgacttttacacctgtctagtgcgggcatgggaagggtatcgctacaaacgggagtggcatgccctccagcagcggggtatgcgcgaggactttagctggacaaaatcggcactcgcctacaatgctctttataattccatctatggcttgccgccggaaaccatgcccaatcctagtccaacgctggtaccggcagtgacctag

SEQ ID NO: 4960 - protein, 474 aa, Synechococcus elongatus
MRILFVAAEAAPLAKVGGMGDVVGSLPKVLRRMGHDVRIFMPYYGFLPDKVEIPKDPIWIGHAMFQTFHVYETVLPGSDVPLYLFGHPCFNPRRIYYGEDEDWRFTFFANGAAEFAWNYWKPQIIHCHDWHTGMIPVWMHQDPDITTVFTIHNLAYQGPWRWRLEQITWCPWYMQGHNTMAAALQYADRVNTVSPTYAEQIKTPEYGEKLEGLLSFISGKLSGILNGIDTELFDPSSDRALAQNYTADTLERRRANKIALQEELGLEVNSGAFLVGMVSRLVEQKGLDLLIQILDRFLAYTDSQFVLLGTGDRYYETQMWQIASRFPGRCSVQLLYSDVLSRRIYGGADAFIMPSRFEPCGISQMIALRYGCVPIVRRTGGLVDTVSHHNPEQQTGTGYCFDRYEPLDFYTCLVRAWEGYRYKREWHALQQRGMREDFSWTKSALAYNALYNSIYGLPPETMPNPSPTLVPAVT

SEQ ID NO: 4961 - DNA, 1398 bp, Synechococcus sp
  CDS (1)..(1398)
atgcggattctgttcgtggctgccgaatgtgctcccttcgccaaagtgggaggcatgggagatgtggttggttccctgcccaaagtgctgaaagcttctgcccatgatgtcggaatcttcatgcggtactacggctttctgaccagtaagctcgatattcccgctgaaccgatctggtggggctacgcgatgtttaatcacttcgcggtttacgaaacgcagctgcccggttcagatgtgccgctctacttaatggggcatccagcttttgatccgcatcgcatctactcaggagaagacgaagactggcgcttcacgttttttgccaatggggctgctgaattttcttggaactactggaaaccacaagtcattcactgccacgattggcacactgggatgattccggtttggatgcaccagtccccggatatctcgactgtcttcaccattcataacttggcctaccaagggccgtggcgctggaagctcgagaaaatcacctggtgcccttggtacatgcagggcgacagcaccatggcggcggccttgctctatgccgatcgcgtcaacacggtatcgcccacctatgcccagcagattcaaacaccgacctacggtgaaaagctggagggtcttctctcatttatcagtggcaagctaagcggcatccttaacgggattgatgttgatagctacaaccctgcaacggatacgcggattgtggccaactacgatcgcgacactcttatagctcgactgaacaataggctggcgctccaaaaggagatggggcttgaggtcaatcccgatcgcttcctgattggctttgtggctcgtctagtcgagcagaagggcattgacttgctgctgcaaattcttgatcgctttctgtcttacagcgatgcccaatttgttgtcttaggaacgggcgagcgctactacgaaacccagctctgggagttggcgacccgctatccgggccggatgtccacttatctgatgtacgacgaggggctgtcgcgacgcatttatgccggtagcgacgccttcttggtgccctctcgttttgaaccttgcggtatcacgcaaatgctggcactgcgctacggcagtgtgccgattgtgcgccgtacgggggggttggtcgatacggtcttccaccacgatccgcgtcatgccgagggcaatggctattgcttcgatcgctacgagccgctggacctctatacctgtctggtgcgggcttgggagagttaccagtaccagccccaatggcaaaagctacagcaacggggtatggccgttgatctgagctggaaacaatcggcgatcgcctacgaacagctctacgctgaagcgattgggctaccgatcgatgtcttacaggaggcctag

SEQ ID NO: 4962 - protein, 465 aa, Synechococcus sp
MRILFVAAECAPFAKVGGMGDVVGSLPKVLKASAHDVGIFMRYYGFLTSKLDIPAEPIWWGYAMFNHFAVYETQLPGSDVPLYLMGHPAFDPHRIYSGEDEDWRFTFFANGAAEFSWNYWKPQVIHCHDWHTGMIPVWMHQSPDISTVFTIHNLAYQGPWRWKLEKITWCPWYMQGDSTMAAALLYADRVNTVSPTYAQQIQTPTYGEKLEGLLSFISGKLSGILNGIDVDSYNPATDTRIVANYDRDTLIARLNNRLALQKEMGLEVNPDRFLIGFVARLVEQKGIDLLLQILDRFLSYSDAQFVVLGTGERYYETQLWELATRYPGRMSTYLMYDEGLSRRIYAGSDAFLVPSRFEPCGITQMLALRYGSVPIVRRTGGLVDTVFHHDPRHAEGNGYCFDRYEPLDLYTCLVRAWESYQYQPQWQKLQQRGMAVDLSWKQSAIAYEQLYAEAIGLPIDVLQEA

SEQ ID NO: 4963 - DNA, 1542 bp, Synechococcus sp
  CDS (1)..(1542)
atgcgcatcctcttcgctgccgcggaatgcgccccgatgatcaaggtcggtggcatgggggatgtggtgggatcgctgcctccggctctggccaagcttggccacgacgtgcggctgatcatgccgggctactccaagctctggaccaagctgacgatctcggacgaacccatctggcgcgcccagacgatgggtacggaattcgcggtttacgagacgaagcatccaggcaatgggatgaccatctacctggtgggacatccggtgttcgatcccgagcggatctatggcggtgaagatgaggactggcgcttcaccttctttgccagtgccgccgctgaattcgcctggaatgtctggaagccgaatgttcttcactgccacgactggcacaccggcatgattccggtctggatgcaccaggacccggagatcagcacggtcttcaccatccacaacctcaagtaccagggcccctggcgttggaagctggatcgcatcacctggtgcccctggtacatgcagggagatcacaccatggcggcggcacttctgtacgccgaccgggtcaacgccgtctcccccacctacgccgaggaaatccgtacggcggagtacggcgaaaagctggatggtttgctcaatttcgtctccggcaagctgcgcggcatcctcaatggcattgacctcgaggcctggaacccccagaccgatggggctctgccggccaccttcagcgccgacgacctctccggtaaagcggtctgcaagcgggtgttgcaggagcgcatgggtcttgaggtgcgtgacgacgcctttgtcctcggcatggtcagccgactcgtcgatcagaagggcgtcgatctgcttctgcaggtggcggaccgtttgctcgcctacaccgacacgcagatcgtggtgctcggcaccggtgaccgtggcctggaatccggcctgtggcagctggcctcccgccatgccggccgttgcgccgtcttcctcacctacgacgacgacctctcccgactgatctatgccggcagtgacgccttcctgatgcccagtcgcttcgagccctgcggcatcagccagctgtacgccatgcgttacggctccgttcctgtggtgcgcaaggtgggcggcctggtggacaccgttcctccccacagtccagctgatgccagcgggaccggcttctgcttcgatcgttttgagccggtcgacttctacaccgcattggtgcgtgcctgggaggcctaccgccatcgcgacagctggcaggagttgcagaagcgcggcatgcagcaggactacagctgggaccgttcggccatcgattacgacgtcatgtaccgcgatgtctgcggtctgaaggaacccacccctgatgccgcgatggtggaacagttctcccagggacaggctgcggatccctcccgcccagaggatgatgcgatcaatgctgctcccgaggcggtcaccgcgccgtccggccccagccgcaacccccttaatcgtctcttcggccgcagggccgactga

SEQ ID NO: 4964 - protein, 513 aa, Synechococcus sp
MRILFAAAECAPMIKVGGMGDVVGSLPPALAKLGHDVRLIMPGYSKLWTKLTISDEPIWRAQTMGTEFAVYETKHPGNGMTIYLVGHPVFDPERIYGGEDEDWRFTFFASAAAEFAWNVWKPNVLHCHDWHTGMIPVWMHQDPEISTVFTIHNLKYQGPWRWKLDRITWCPWYMQGDHTMAAALLYADRVNAVSPTYAEEIRTAEYGEKLDGLLNFVSGKLRGILNGIDLEAWNPQTDGALPATFSADDLSGKAVCKRVLQERMGLEVRDDAFVLGMVSRLVDQKGVDLLLQVADRLLAYTDTQIVVLGTGDRGLESGLWQLASRHAGRCAVFLTYDDDLSRLIYAGSDAFLMPSRFEPCGISQLYAMRYGSVPVVRKVGGLVDTVPPHSPADASGTGFCFDRFEPVDFYTALVRAWEAYRHRDSWQELQKRGMQQDYSWDRSAIDYDVMYRDVCGLKEPTPDAAMVEQFSQGQAADPSRPEDDAINAAPEAVTAPSGPSRNPLNRLFGRRAD

SEQ ID NO: 4965 - DNA, 1317 bp, Thermus caldophilus
  CDS (1)..(1317)
atgatacgcgtgctccacctggcccccgaggcctaccccctggccaaggtgggagggcttgccgacgtggtgggggccctccccaaggccctgaggcctttgggggtggaggcccatgtcctcctcccctggcacggggggctagaggccaggcgggtgggggaggtggccttcgccttcttcgggcgggaggagagggcccccttgggggagcgggtggagggtggggtgcggtttctcctcctcggggtggaggggtttgggcgggagcgggtctacggctaccccgacgacgccgagcgctacctccgcttcgccctggcggccaaggaggtggcgagggggtacgacctggtccacgcccacgactggacggcggccctcctcgccctctacgcccccacggtctacaccatccacaacctggcccaccagggcctcgtggacccggggctcttcttttcctggaccgggcttccctggagcctcttccacatggaggccctggagttctacggccgggtgaacctgatgaagggggggatcgtcttcgcccgccgggtcaccacggtgcgcccctcttacgccgaggagatccagacccccgagttcggcatgggcctggacggggtcttgaggaggcacgccgggaagcttaggggcatcttgaacggcctggacacggaggtctttgaccccggcaaagacccctacctccccgccccctacacccgggaggacccctcggggaaggcccgggccaaggaggtcttccgggagaggacggggcttaggccccccgtcctcgcttacgtgggccgcctggattaccagaagggcctggacctcgtcttaaaggccctcccccgcctcctggagatgggctttcgcctctacgtccagggcgtgggggacggggggcttcaggaggcgttcctccgggcggaggaggaaaaccccgaaggggtacgcttcctccccgcctacgacgaggccatggcccgcctggcctacgccggggcggaggcggtcttggtcccgagccgctttgagccctgcggcctggtgcagatgatcgcgagccgctacggcacccctcccgtggcccgggcggtgggggggctcaaggacaccgtggaggacgggagggccggggtcctttttgagacctaccaccccgaggggcttctttacggcgtgctccgcctcttccgcctgggggcggaggagatgggccttagggccatggagaaggacttctcctgggaggggccggcgcgggcctaccgggaggtgtaccgggaggccttgggctag

SEQ ID NO: 4966 - protein, 438 aa, Thermus caldophilus
MIRVLHLAPEAYPLAKVGGLADVVGALPKALRPLGVEAHVLLPWHGGLEARRVGEVAFAFFGREERAPLGERVEGGVRFLLLGVEGFGRERVYGYPDDAERYLRFALAAKEVARGYDLVHAHDWTAALLALYAPTVYTIHNLAHQGLVDPGLFFSWTGLPWSLFHMEALEFYGRVNLMKGGIVFARRVTTVRPSYAEEIQTPEFGMGLDGVLRRHAGKLRGILNGLDTEVFDPGKDPYLPAPYTREDPSGKARAKEVFRERTGLRPPVLAYVGRLDYQKGLDLVLKALPRLLEMGFRLYVQGVGDGGLQEAFLRAEEENPEGVRFLPAYDEAMARLAYAGAEAVLVPSRFEPCGLVQMIASRYGTPPVARAVGGLKDTVEDGRAGVLFETYHPEGLLYGVLRLFRLGAEEMGLRAMEKDFSWEGPARAYREVYREALG

SEQ ID NO: 4967 - DNA, 1458 bp, Vibrio parahaemolyticus
  CDS (1)..(1458)
atggctactaacaacttatccattctgtttgtagcttctgaggttgaaggtcttattaaaagtggtggcttggcagatgttgccaaggcactgccggaagcccttcaaaacctacagcaagatgtaagaattacgattcctgcgtacaccagtatcgaaagattagcggacgcagaagttgtgctagaaacaaatctaacgtcatggccgcatacaaagtatcgagttctattgcttacgttaggaaacaatcctgtctatctgattgattgtgatccgtacttcaatcggccatcaatgtatgcagagaacaaccaagcgtataccgataatggtgaacgttttgcatttttcagcgctgcatgcctcgacatgttgccgaaactggcgtttcaacctgatatcatccatgcaaatgattggcacacagggctggttccgtttttgcttaagcacaggtatggcaatgatcccttttttgctcatacaaaaagcgtcatttcaattcataatgcggtctttaaaggcgtatttagttacgacgacgtacagtgtttgcctgagtttcactgccgaaacgttcccgatgcggcggtgagtgcaacgcatattactatgctcaaagctggcgtaatgaatgccgataagataaatgcagtcagcccaacgtacgctgaagagctaaagacagaacttggcagtcatggaatggcatgggagtttcagcaacgagcaggggatctagtcggaattttaaatggttgcgattacagtgcttggaatccggaaactgatatttatttgccaatgaactatagtgccgacaaacaaagtatggttctaggtaaaaacacttgtaagcgcgcattacagcagaggctaaaccttgctgaaaaagacgtagccatgtttggtatggtttgtcgtttgactcagcaaaaaggcgtgcattacttgctgccggctttggcggattttttgaagcatgatgttcaagtcgttgttgttgggacgggtgatcccgttttggctgcacaattggaagaggttgcggcgcaattctccgacaagtttgtgtttgttgaggcgtatgacaatgaactcgcgcatttagttgaagctggttcggatttcttcttaatgccttctgaattcgaaccatgtggcttaaatcagatctacagcatggcttatggcaccttgcctatcgtgagaggggtaggtggcttaaaagacagtgtgaatgattacgacgtagacccttgcgacgctactggatttgtattttatgaaccgacgtctcaagcgctgctacttactatgctgcgagcgttgctgttgtatgcgcaaaacctgacggaagtgcaaagagtacaactgcatgcaatgcaaaaagatttctgctggcggaaggccgcagaatcgtatttgcaactctatcgttcagcgttaaattga

SEQ ID NO: 4968 - protein, 485 aa, Vibrio parahaemolyticus
MATNNLSILFVASEVEGLIKSGGLADVAKALPEALQNLQQDVRITIPAYTSIERLADAEVVLETNLTSWPHTKYRVLLLTLGNNPVYLIDCDPYFNRPSMYAENNQAYTDNGERFAFFSAACLDMLPKLAFQPDIIHANDWHTGLVPFLLKHRYGNDPFFAHTKSVISIHNAVFKGVFSYDDVQCLPEFHCRNVPDAAVSATHITMLKAGVMNADKINAVSPTYAEELKTELGSHGMAWEFQQRAGDLVGILNGCDYSAWNPETDIYLPMNYSADKQSMVLGKNTCKRALQQRLNLAEKDVAMFGMVCRLTQQKGVHYLLPALADFLKHDVQVVVVGTGDPVLAAQLEEVAAQFSDKFVFVEAYDNELAHLVEAGSDFFLMPSEFEPCGLNQIYSMAYGTLPIVRGVGGLKDSVNDYDVDPCDATGFVFYEPTSQALLLTMLRALLLYAQNLTEVQRVQLHAMQKDFCWRKAAESYLQLYRSALN

SEQ ID NO: 4969 - DNA, 1458 bp, Vibrio vulnificus
  CDS (1)..(1458)
atggctactaaccctttgtcgattctgtttgtagcatctgaagtagaaggtttgatcaaaagtggtggcttggcggatgttgccaaggcactgcctgaagctttagtaaaccttcagcatgatgcgagaattgccattccggcttataccgcaattcctaatgtgtgtgatgatgaagtcatcctcgatacacatctagaaacctggccacatactcattatcaagtcaaaaaacgtttcttaggtgacaaccctgtctacttaattgcgtgtgggcattattttgaccgtccgtcgatgtacgctgagaataatcaggcgtataccgataacggtgagcgctttgctttttttagtgctgcttgtttggatatgttaccaaaaattggtttccagcctgacatcgtgcatgccaatgattggcatacaggcttagtgccatttttgcttaagcaccgttacggtcaagatccgttttttgcacaaacaaagagtattttatctatccataatgcggtctttaaaggtgtctttcactatgatgagatgcagtgtttacctgaatttcattgccgaaatgtacccgatgccgctgtcagctctacgcatatgacgatgctgaaagcaggggttatgaatgctgataaaatcaacgcagtgagcccaacttatgcagaggagctgaaaactgaacttggcagtcacggaatggcttgggagtttcagcaacgcgcgggtgatctcgtcgggattctaaacggctgcgattattctgcatggcatccagatactgacagctatttacccatcaactacaaagcaactaagcagagtatggtgagagggaaaaatggctgtaaacgtgcgcttcaagagcaagtcggcctacctgtaaaggacgtcgctatgtttggtatggtgtgtcgcttgacgcatcagaaaggggtgcattacctattgccagtattaactgagttcctgaagttggatgttcagttggttttggttgggaccggtgatccgttgcttgctgcgcaattacgtgatgttgcagcacagtttggtgaaaagtttgtctttgttgaagcttataacaatcaactcgcacacttagttgaggctgcatccgatttctttttaatgccttcagaatttgaaccttgtggcttaaaccaaatctatagcatggcgtatggctccttgccgatcgtgagaggcgttgggggtctcaaagacagtgtatgcgattatgatgtgaaccctgagactgcgacaggatttgtgttctatgaacctacagcacaagcgttgttgattaccatgcaaagagcgttgttgctgtatgcacagaacctaacagagcttcgacgagttcagctatacgcgatggaacgagatttttgctggaacaaggcagcagagcaatatgtggagttgtatcgttctgcgctgaaatag

SEQ ID NO: 4970 - protein, 485 aa, Vibrio vulnificus
MATNPLSILFVASEVEGLIKSGGLADVAKALPEALVNLQHDARIAIPAYTAIPNVCDDEVILDTHLETWPHTHYQVKKRFLGDNPVYLIACGHYFDRPSMYAENNQAYTDNGERFAFFSAACLDMLPKIGFQPDIVHANDWHTGLVPFLLKHRYGQDPFFAQTKSILSIHNAVFKGVFHYDEMQCLPEFHCRNVPDAAVSSTHMTMLKAGVMNADKINAVSPTYAEELKTELGSHGMAWEFQQRAGDLVGILNGCDYSAWHPDTDSYLPINYKATKQSMVRGKNGCKRALQEQVGLPVKDVAMFGMVCRLTHQKGVHYLLPVLTEFLKLDVQLVLVGTGDPLLAAQLRDVAAQFGEKFVFVEAYNNQLAHLVEAASDFFLMPSEFEPCGLNQIYSMAYGSLPIVRGVGGLKDSVCDYDVNPETATGFVFYEPTAQALLITMQRALLLYAQNLTELRRVQLYAMERDFCWNKAAEQYVELYRSALK

SEQ ID NO: 4971 - DNA, 1425 bp, Xanthomonas axonopodis
  CDS (1)..(1425)
atgttcgtggtgtcggaaatggcggacttcatcaaggctggcgggttgggcgacgtggcggccgcgctgccgcgcgcgctgcgccaccgctacgacgtccgcgtgctgattcccggctaccgtgccgtgctcgagcgcgcaggcaaggtggagatcgttggtcgcgtgttggcgcatgccgcgctgccggcctgcgacatcggccgcatcgtgcaatcggacgggctgccgatctacatcctgttgtccaaggaactgttcgagcgcgacggctcgccctatgtgagcaccagcggttcggagttcgaagacaacgcgattcgctttgccaccttgtcgcatgccgccgcgcagatcgcggccggccatgccggcctgggctggaagccgcgcctgctgcatctgaacgactggccgtgcgcgctggcggccggctatgtgcgctggtccggcggcaccacgccgtgcctgctgaccatccataacctggcctaccagggcctggtgccgtattcgatggccgccgcgctgggcatccccgccgagcgggtggccgagttggagttctacgggcagatgtcgttcctgcgcggtggcatcgtcaacgccgaccacgtcaacacggtcagcgtcagctacgccaagcagatcaccggcccggcacagggctgcggcctggaccggctgttggccgggcgcgccgccaagggcgcgctcaccggcatcgtcaacggcatcgacgccagctgggacccgcgcaccgaccaatacctggattcgcacttcagcgtgaaccaatggcagggccgccaggccaacgcagcgcaggtacgcaaggcattcgggctgcgcgagagcgctggcccactgtttgcggtggtctcgcggttggtgcatcagaagggcctggacctgatctgcgaggtggccccgcaaatcgtggccgctggcggccagatcgcggtgatcggcggcggcgagccggagatcgaacagcaggtggccgagctgaccaggcgctatcccggccaggtgggcgccttcatcggcttcgaggaaggcctggcccggcggatgttcgccggtgccgacttcctgctgatgccctcgcgcttcgagccctgcggcctgagccagatgtatgcgcagcgcttcggctgcctgccgatcgcccacgcgaccggcgggctgatcgataccgtggacgacggcgtgaccggcttcctgttccagcacgccagcgtcgaagccctgcgccgctgcctggagcgcgccttccgcaccttccgcctgcccagcctgttgtctgcgatgcggcgcgcagccatgctgcgtcccagcggttgggacgtggcaggcaagaaatacctctcgctctacgaacacaccgctgccaccgcgcccgcgctcgcgacggtgccatga

SEQ ID NO: 4972 - protein, 474 aa, Xanthomonas axonopodis
MFVVSEMADFIKAGGLGDVAAALPRALRHRYDVRVLIPGYRAVLERAGKVEIVGRVLAHAALPACDIGRIVQSDGLPIYILLSKELFERDGSPYVSTSGSEFEDNAIRFATLSHAAAQIAAGHAGLGWKPRLLHLNDWPCALAAGYVRWSGGTTPCLLTIHNLAYQGLVPYSMAAALGIPAERVAELEFYGQMSFLRGGIVNADHVNTVSVSYAKQITGPAQGCGLDRLLAGRAAKGALTGIVNGIDASWDPRTDQYLDSHFSVNQWQGRQANAAQVRKAFGLRESAGPLFAVVSRLVHQKGLDLICEVAPQIVAAGGQIAVIGGGEPEIEQQVAELTRRYPGQVGAFIGFEEGLARRMFAGADFLLMPSRFEPCGLSQMYAQRFGCLPIAHATGGLIDTVDDGVTGFLFQHASVEALRRCLERAFRTFRLPSLLSAMRRAAMLRPSGWDVAGKKYLSLYEHTAATAPALATVP

SEQ ID NO: 4973 - DNA, 1425 bp, Xanthomonas campestris
  CDS (1)..(1425)
atgttcgtggtgtcggagatggcggacttcatcaaggccggcggcctgggtgatgtggcggcggcactgccgcgcgcattgcgccatcgctacgacgtgcgcgtgttgatccccggctaccgcgcggtgctggcgcgcgcgggcaaggtggagatcgtgggtcgtgtgctggcgcatgccgcgctgccggcctgcgacatcggccgcatcgtgcaatcggacggcctgccgatctacatcctgctgtccaaggaactgttcgaacgcgatggctcgccgtatgtgagcaccagcggttcggagttcgaagacaacgcaatccgctttgccaccttgtcgcacgctgccgcgcagatcgccgccggccgtgccgggctgggctggcggccgcgcctgctgcatctcaacgactggccgtgtgccctggctgccgcctacgtgcgctggtccggcggcaccacgccgtgcctgctgaccatccataacctggcctaccagggcctggtgccgtattcgatggccgccgcactgggcatcccggccgagcgcgtctcggagctggagttctacgggcagatgtcgttcctgcgcggtggcatcgtgcatgccgaccacgtcaacacggtgagcgtcagctacgcgcagcagatcaccggcccggcgcagggctgcgggctggaccgcctgctggccggccgcgccgccaagggcgcgctgagcggcatcgtcaacggcatcgacgccagctgggacccgcgcaccgacgaatacctggacagccatttcagcgtgaaccactggcagggccgccaggccaacgccgcgcaggtgcgcaaggccttcggtctgcgtgagagcaccggcccgctgttcgcggtggtgtcgcgcctggtgcaccagaagggcctggacctgatttgcgaggtcgccccgcagatcgtggccgctggcggccagatcgcggtgatcggcggcggtgagccggagatcgaacaacaggtggccgagctgacccggcgctatcccggccaggtcggtgcgttcatcggttttgaggaaggcctggcgcggcgcatgttcgccggcgccgacttcctgctgatgccctcgcgcttcgagccgtgcggcctgagccagatgtacgcgcagcgcttcggctgcctgccgatcgcgcatgccaccggcgggctgatcgacaccgtggacgatggtgtcaccgggttcctgttccagcaggccagcgccgaagcgctgcggcgctgcctggagcgcgccttccgcaccttccgcctgcccagcctgctgtcggcgatgcgccgcgccgcgatgctgcggcccagcggctgggatgtggcgggcaagaaatacatctcgctatacgagcgcaccgctgcaaccgcacccgctgttgcgacggtgtcatga

SEQ ID NO: 4974 - protein, 474 aa, Xanthomonas campestris
MFVVSEMADFIKAGGLGDVAAALPRALRHRYDVRVLIPGYRAVLARAGKVEIVGRVLAHAALPACDIGRIVQSDGLPIYILLSKELFERDGSPYVSTSGSEFEDNAIRFATLSHAAAQIAAGRAGLGWRPRLLHLNDWPCALAAAYVRWSGGTTPCLLTIHNLAYQGLVPYSMAAALGIPAERVSELEFYGQMSFLRGGIVHADHVNTVSVSYAQQITGPAQGCGLDRLLAGRAAKGALSGIVNGIDASWDPRTDEYLDSHFSVNHWQGRQANAAQVRKAFGLRESTGPLFAVVSRLVHQKGLDLICEVAPQIVAAGGQIAVIGGGEPEIEQQVAELTRRYPGQVGAFIGFEEGLARRMFAGADFLLMPSRFEPCGLSQMYAQRFGCLPIAHATGGLIDTVDDGVTGFLFQQASAEALRRCLERAFRTFRLPSLLSAMRRAAMLRPSGWDVAGKKYISLYERTAATAPAVATVS

SEQ ID NO: 4975 - DNA, 2345 bp, Antirrhinum majus
  CDS (10)..(1836)
caggttcctatggctacagtaacagcttcacagttggtgtcacatgtccatggtggagcaacgtcttcaccggatactaaaacaaacttggcccaggttggcctcaggaaccagcaattcactcacaatgggttgagatcaataaacatggttgataagcttcaaatgaggaacaatgcgaaacaatccaggagcttggtaaagaaaactgataatggtagccctttgggaaaaattatttgtggaacagggatgaacttggttttcgtgttagctgaggttggtccgtggagcaaaaccggtggcctcggtgacgttgttggaggattgcctcccgcaatggcaggaaatggacacagagttatgacagtatcaccacgttacgatcagtacaaagacgcttgggacactagtgttgttgttgagataaaagttggagacagcattgagactgtcagatttttccactgctataaacgtggggtggatcgtgtttttgttgatcatcctatattcctcgaaaaggtctggggcaaaactaaatcaaagatttatggccctaatgctggaactgattatcaggacaatcaacttcgattcagcttattgtgccaagctgctttggaagcgcccagggtcctgaatctaaccagcagcaaatatttctctggaccatatggcgaggatgttgtatttgtcgctaatgactggcacactgctttgcttccgtgctacctgaaaagtatgtaccaatctaaaggaatgtaccttcatgctaaggttgccttctgcatccacaacattgcatatcagggaagatttgggtcctcagacttttgtcttctcaatctccccgatcagttcaaaagttcttttgacttcttcgatgggtacgagaaacccgtgaagggaaggaaaattaactggatgaaggctggaatcttagaatcagatagggtcgtaactgtgagtccttactatgccatggaacttgtttctggggctgagaaaggtgttgaactggataatgtcattgctaagacaagcataactgggattgtgaatggtatggatacccaagagtggaatccagcaactgataagcacatcgatactaactacgatatcaccactgtcatggatgctaagcctctgttgaaagaagctcttcaagcagcagtcggattgcctgtggacaagaacattcctgtcattggatttattggcagactcgaagagcagaaaggctcggatatccttgttgctgccatttctaagtttgtcgggttggatgttcaaataataatcctcggaactggcaagaagaagtttgagcagcagattcaggagctggaggtgttgtatcctgataaagcaagaggagtggccaagtttaacgttcccttggctcacatgatcactgctggagctgattttatgctggtcccaagtagattcgaaccttgtggtctcatccaattacacgccatgcgatatggaacgatacccatctgtgcctcaactggtggtcttgtcgacactgtgacagaaggatttactgggttccatatgggagctttcaatgttgaatgtgccaccgtggacccagccgatgtgcaaaagatagccacaactgttgagagagctcttgctgcttatggtagcgttgcctataaagaaatgattcagaactgcatggcacaagatctctcctggaagggacctgcaaagaactgggaaaagatgctgcttagcttgggcgtttcagggagtgaacctggtgttgacggcgaggaaattgctccacttgccaaggaaaatgtcgccactccttagaggctgatcaatatatagactgttgaacataaagtatgactgactgcaatatatagatctgttgaacataaagtatgactgactgactatatgacctgaaatgcttatgatcttataggaataattgcatagtgaagcagtttgtttagatgggtaatggttagattatgggatggtaatgcgtgtgggtgctctataatatatgaggcgaaggaggtcttatatgatagtcagtagcaattgacagatggggtttattttaagaacgtgccactgtgtggtcaagccaagcaccatataaacgtaattaaataaagttgatggcgctagtaggtggtgttgtttatgcttattctggtaattggtatcggtataaagtaggtttgaattgttgaaacgtgcctcgatgtgattcttgtcctggatatgcattcggattctttatataaaagttatagtattaaatgcaaaaaaaaaaaaaaaaaaaaaaaaaaaaaaaaaaaaaaaaa

SEQ ID NO: 4976 - protein, 608 aa, Antirrhinum majus
MATVTASQLVSHVHGGATSSPDTKTNLAQVGLRNQQFTHNGLRSINMVDKLQMRNNAKQSRSLVKKTDNGSPLGKIICGTGMNLVFVLAEVGPWSKTGGLGDVVGGLPPAMAGNGHRVMTVSPRYDQYKDAWDTSVVVEIKVGDSIETVRFFHCYKRGVDRVFVDHPIFLEKVWGKTKSKIYGPNAGTDYQDNQLRFSLLCQAALEAPRVLNLTSSKYFSGPYGEDVVFVANDWHTALLPCYLKSMYQSKGMYLHAKVAFCIHNIAYQGRFGSSDFCLLNLPDQFKSSFDFFDGYEKPVKGRKINWMKAGILESDRVVTVSPYYAMELVSGAEKGVELDNVIAKTSITGIVNGMDTQEWNPATDKHIDTNYDITTVMDAKPLLKEALQAAVGLPVDKNIPVIGFIGRLEEQKGSDILVAAISKFVGLDVQIIILGTGKKKFEQQIQELEVLYPDKARGVAKFNVPLAHMITAGADFMLVPSRFEPCGLIQLHAMRYGTIPICASTGGLVDTVTEGFTGFHMGAFNVECATVDPADVQKIATTVERALAAYGSVAYKEMIQNCMAQDLSWKGPAKNWEKMLLSLGVSGSEPGVDGEEIAPLAKENVATP

SEQ ID NO: 4977 - DNA, 2211 bp, Ipomoea batatas
  CDS (93)..(1919)
cgtgcttccacactcttgcagtagctgctataaccgccgttgctcagccgcggagtttccggtgaagcgggtgtggtgtgagactgtgagtgatggcaactataactgcctcacactttgtttctcatgtctgtgggggtgccacttctggagaatcaaaagtggggttgggtcaattagccctgaggagtcaagctgtgactcacaatgggttgagacctgtgaacaagattgacatgttacaattgagaaccagtgccaagaagcccagcaaaaatggaagggaaaatgagggtggaatggcagcaggaactattgtgtgtaaacaacaagggatgaacttggtctttgtgggatgtgaggtgggtccctggtgcaaaactggtggacttggagatgttcttggaggattgccaccagccttggcagcgcgcgggcatagagttatgacagtgtgtccccgttatgatcagtacaaagatgcttgggatacctgtgtggttgttgagctacaagttggagacagaattgaacctgttcgtttcttccattcatacaaacgcggagttgatcgcgtttttgtggatcatcctatgttcctggagaaggtttggggaaaaactggatctatgctctatggccccaaggctgggaaagattacaaggacaaccagttgcggttcagtttgttgtgccaagcagcacttgaggcaccgagagttttgaatcttaactccagcaactacttcagtggaccttatggtgaggatgttgttttcgttgccaatgattggcacactgctctccttccatgctatctgaaaaccatgtaccagtcgagaggaatctacatgaacgccaaggttgctttctgcattcacaacattgcctaccaaggcagattcgccttttcagacttttctcttctgaatctgcctgacgagtacaagggttcttttgattttattgatgggtatgacaagccagtgaaggggagaaagataaactggatgaaagctggaatacgtgaagcagacagggtttttactgtgagcccaaactacgccaaggagcttgtttcttgcgtttcgaagggtgtggaattggacaaccacatccgagactgcggcatcactggtatttgtaatggaatggatacccaagagtggaaccctgcaactgacaagtaccttgctgttaaatatgatatcacaactgttatgcaagcgaagcccttgttgaaggaagctcttcaagcggcagttggtttgccagttgacaggaatattccactgattggttttatcggcagacttgaagagcagaaaggctcagacattctttatgctgcgatttctaagttcatttcaatggatgttcagatattgattctcggaactgggaagaagaaatttgagcagcagattgagcagctcgaagtgatgtatccggacaaagctagaggagtggcaaagttcaacgttcctttggctcacatgattactgctggcgctgattttatgttgatcccgagcagatttgagccgtgtggtctcattcagttgcatgctatgcgatatggaacaccgtgcatctgtgcctcaactggcggactcgttgacactgtgaaagaaggttatacagggttccacatgggggctttcaacgtcgactgtgaaactgttgacccagaggacgtgctgaaggtgataaccactgttggtagagcacttgcgatgtacggaacccttgcattcactgaaatgatcaagaactgcatgtcacaagagctctcgtggaagggacctgccaagaattgggaaacagtgctgttgagcttaggagttgctgggagcgagcccggggttgaaggagacgaaattgcaccacttgcaaaggaaaacgtcgccactccatgaaaactatggtttcataagctggcatatgaaactaataaagttttatatatatgttgaaagagcagaggcgatttggtgctcttgagcattatgaggtgatgaaagagccaatgggggactctttctttattgttttttggtatgcccaggtggtagtaaatacagagtttaaactaactagtttggtgctttaagacattgggaacttgcagcacttcagcaggctaaatgtataatataaataaacaatggcctcttgtggttttgtgctttgaaaaaaaaaaaaaaaaaa

SEQ ID NO: 4978 - protein, 608 aa, Ipomoea batatas
MATITASHFVSHVCGGATSGESKVGLGQLALRSQAVTHNGLRPVNKIDMLQLRTSAKKPSKNGRENEGGMAAGTIVCKQQGMNLVFVGCEVGPWCKTGGLGDVLGGLPPALAARGHRVMTVCPRYDQYKDAWDTCVVVELQVGDRIEPVRFFHSYKRGVDRVFVDHPMFLEKVWGKTGSMLYGPKAGKDYKDNQLRFSLLCQAALEAPRVLNLNSSNYFSGPYGEDVVFVANDWHTALLPCYLKTMYQSRGIYMNAKVAFCIHNIAYQGRFAFSDFSLLNLPDEYKGSFDFIDGYDKPVKGRKINWMKAGIREADRVFTVSPNYAKELVSCVSKGVELDNHIRDCGITGICNGMDTQEWNPATDKYLAVKYDITTVMQAKPLLKEALQAAVGLPVDRNIPLIGFIGRLEEQKGSDILYAAISKFISMDVQILILGTGKKKFEQQIEQLEVMYPDKARGVAKFNVPLAHMITAGADFMLIPSRFEPCGLIQLHAMRYGTPCICASTGGLVDTVKEGYTGFHMGAFNVDCETVDPEDVLKVITTVGRALAMYGTLAFTEMIKNCMSQELSWKGPAKNWETVLLSLGVAGSEPGVEGDEIAPLAKENVATP

SEQ ID NO: 4979 - DNA, 2988 bp, Pisum sativum
  CDS (140)..(2398)
caaaaagccccaacctttgattcatacaaacaccactttcttcaattggtccaacccaatttgacaacatcactcaattcttgctttttcactcaatttcaccatctgggtcttcctcatttttgaatcaaatttcttgatgatgctatcactaggttctgatgcaactgtgttaccttttcatgctaagaatctcaaatttactccaaagttaagtactttgaatggtgatttagcatttagtaagggtttgggtgttggtagattgaactgtggaagtgttagattgaatcataagcagcatgtaagagctgttggtaagagttttggtgcagatgagaatggagatgggtcagaggatgatgttgttaatgctacaattgaaaagagcaaaaaggttcttgctttgcaaagggaacttattcaacagattgctgaaagaaagaaactagtttcttctatagatagtgacagcattcctggattggaaggaaacggtgtttcttatgaaagcagtgaaaaatctctgtcaagggactcaaatccacagaaaggttcttccagcagcggcagtgctgttgaaaccaaacggtggcactgttttcagcaactatgtcgttctaaagaaacggagacatgggccgtttcatctgttggcattaatcaaggttttgatgaaattgaaaagaaaaatgacgctgtaaaggcgtcatctaagctacacttcaatgaacaaattaaaaacaagctgtacgagagacctgatacgaaagacatttcaagtagcatcagaacttctagtctaaagtttgaaaatttcgaaggtgcgaatgaaccaagttcaaaggaggttgctaatgaagctgaaaattttgagagcggcggtgaaaagccaccaccgttggctgggaccaatgttatgaacattatattggtttctgcagaatgcgctccttggtcgaaaacaggcgggcttggagatgttgctggatcactcccaaaggctttggctcggcgtggacatagagttatgattgttgcacctcattatggtaattatgctgaagcacacgatataggagtacggaagagatacaaagtagctggtcaggacatggaagtgacgtatttccatacttatattgatggtgtcgatattgtttttattgacagtccaatatttcgcaatctagagagtaatatatatggcggaaaccgattggatattctaaggcgcatggtgttgttttgcaaggcggcggttgaggttccttggcatgttccgtgtggtggaatttgctatggagatggaaatctggtcttcatagcaaatgattggcatactgcattgctgccggtgtatctgaaagcatattatcgcgatcatggtttgatgaactatacacgatcagttctcgtgattcataacatagctcaccagggtcggggcccggtcgaggatttcaacaccgtggatttatctggaaactacttagaccttttcaaaatgtacgaccctgttggaggtgagcacttcaacatctttgcagccggtttaaaaaccgccgacaggattgtcaccgtcagtcacggttacgcatgggagcttaaaacttcagaaggtggttggggtttgcataacatcataaatgaaagtgactggaaatttcggggaattgtgaacggtgtcgacacaaaagattggaaccctcaattcgacgcttacttgacatcagacggctacactaactacaacctgaaaaccctacaaaccggcaagcgtcaatgtaaggcagctttgcaaagggagctcggtttgcctgtccgtgaggatgttccgataatttccttcatcggaaggctcgatcaccagaaaggtgttgatcttatagccgaagcgattccttggatgatgagccacgatgttcaactagtcatgttgggaaccggaagagctgatttagaacaaatgctcaaagaattcgaagcccaacactgcgacaaaatccgaagttgggttggtttttcggttaagatggctcataggataacagcaggttcagatatattactcatgccgtcaagattcgagccgtgtggactgaatcaactctatgcgatgagttacggaacagttcctgttgtacacggggtgggcggactcagagacacggtgcagccttttaatccgttcgacgaatcgggtgtcggttggacatttgatcgcgccgaagctaacaagttaatggcggcattatggaattgcttattgacttataaggattataagaagagctgggaagggattcaagaaagagggatgtcacaggatcttagctgggacaatgctgctcaacaatatgaagaggttcttgttgctgccaaataccaatggtgatttcttgacatgcactccatctttgtagtttgatcaaaacgaagggctttcatgctgaatttgtttcacaagagcatatacacggtgttgcagctgtggagacagttcgatctagaacgagaaattttctcttactagatcgaacggtttacagagctgttgcaccgtgtagtttggaggaacatttgctatgtgaactaaggaatgtgtaattcaattggtacataatgtttttggcacatacaatgtaaaatgaagtgtattgactgaaaataaaaaaaaaaaaaaaaggaattccgcaaagcaaaggctttaaccgtttgtcatcatgatacaagaggtatgaatcctgagttgctttacgaagctctcaaagtcagtcctggaactgtttctgtttgccatttcattggcaataaggctgctgcttgggtgcctaattattctgttgaccgtccttgtgtcatctagatgctaacttcatgttcaaactggatttgtgttcaaataataaatgtatgtaaggacaagtatcatattttatgtatcctaaataaaacaagttagaactaaaaaaaaaaaaaaaaaaa

SEQ ID NO: 4980 - protein, 752 aa, Pisum sativum
MMLSLGSDATVLPFHAKNLKFTPKLSTLNGDLAFSKGLGVGRLNCGSVRLNHKQHVRAVGKSFGADENGDGSEDDVVNATIEKSKKVLALQRELIQQIAERKKLVSSIDSDSIPGLEGNGVSYESSEKSLSRDSNPQKGSSSSGSAVETKRWHCFQQLCRSKETETWAVSSVGINQGFDEIEKKNDAVKASSKLHFNEQIKNKLYERPDTKDISSSIRTSSLKFENFEGANEPSSKEVANEAENFESGGEKPPPLAGTNVMNIILVSAECAPWSKTGGLGDVAGSLPKALARRGHRVMIVAPHYGNYAEAHDIGVRKRYKVAGQDMEVTYFHTYIDGVDIVFIDSPIFRNLESNIYGGNRLDILRRMVLFCKAAVEVPWHVPCGGICYGDGNLVFIANDWHTALLPVYLKAYYRDHGLMNYTRSVLVIHNIAHQGRGPVEDFNTVDLSGNYLDLFKMYDPVGGEHFNIFAAGLKTADRIVTVSHGYAWELKTSEGGWGLHNIINESDWKFRGIVNGVDTKDWNPQFDAYLTSDGYTNYNLKTLQTGKRQCKAALQRELGLPVREDVPIISFIGRLDHQKGVDLIAEAIPWMMSHDVQLVMLGTGRADLEQMLKEFEAQHCDKIRSWVGFSVKMAHRITAGSDILLMPSRFEPCGLNQLYAMSYGTVPVVHGVGGLRDTVQPFNPFDESGVGWTFDRAEANKLMAALWNCLLTYKDYKKSWEGIQERGMSQDLSWDNAAQQYEEVLVAAKYQW

SEQ ID NO: 4981 - DNA, 2329 bp, Arabidopsis thaliana
  CDS (67)..(2025)
aacaaccagacgaaatcaaacataaatctgtaacagtcgaagaaactctcactctttaattgatcaatggcgtctcttcaaatcagtggctccgttaaattcgagccgttcgttggattcaaccggatccgccatttccgtccgatcgccagtctcggatttcctcgttttcgacggagattcagtatcggacggtcattgttgcttcgtcgttcttcttccttctccggtgactctcgtgagtctgatgaagagagatttatcacagacgcagagagagatggttctggctccgttcttggctttcagctcactcctcctggtgatcaacaaacagttagcactagcacaggagaaattacacatcatgaagagaagaaagaggctattgatcaaattgtaatggctgactttggcgtacctggaaatagagctgttgaagaaggagctgcagaggttgggattccgagtggaaaagctgaagttgtcaataaccttgttttcgttacatccgaggcggctccttactcgaaaacaggaggattaggagatgtttgtggttctttgccaatagctttagctggtcgtgggcatcgtgttatggtcatttctcctcggtacttaaatggaactgctgcagacaagaactatgcccgggctaaggatttggggatacgtgtaacagtaaattgctttggtggttctcaagaagtttccttctatcatgagtatagagatggtgttgattgggtttttgttgatcacaaatcctaccatagacctggtaatccctacggagatagtaaaggagcctttggtgacaatcagtttcggttcacgttactttgccatgctgcatgtgaagcccctctcgtgctgcctcttggagggttcacttatggagagaaatcactcttccttgtcaatgactggcatgccggccttgttcccatacttttggccgcaaagtatcgcccatatggagtttataaggatgcaagaagcattctcattatccataacctcgctcatcagggggtggagccagcagctacatacaccaacttgggattgccttcggaatggtatggagcagtcgggtgggtatttccaacgtgggcaagaactcatgcccttgacaccggtgaagcggttaatgttctcaagggtgctattgtgacctctgaccgtatcattactgtgagccagggctatgcatgggaaatcactactgttgaaggtggttatggtcttcaagatttgctttctagtcggaaaagtgttataaatgggatcacaaatggaattaatgttgatgaatggaatccatccacggatgaacacattcctttccattactctgctgatgatgtctccgagaagatcaaatgcaagatggcactacaaaaggaattgggtctccccattaggcctgaatgtcctatgattggttttataggaagacttgattaccagaagggcattgatctgatccaaaccgctggtcctgatctcatggtggatgacattcaattcgtcatgcttggttcgggtgacccaaaatatgaaagctggatgagaagtatggaggaaacatacagagacaaattccgtggttgggttgggttcaatgtccccatctctcatcgaatcacagccggctgtgacattcttctcatgccgtcgagattcgagccctgtggtttaaatcagctatacgcaatgagatacggaaccattccagttgttcatggcactggaggactcagagatacggttgagaatttcaacccttatgcagaaggtggagctggtactggtacagggtgggtcttcactcccttgtcgaaagatagcatggtctcggccttgaggttggctgcagcaacgtacagagagtataaacagtcatgggaaggattgatgagaagaggaatgacccgaaactactcttgggaaaacgctgccgttcagtatgagcaagtttttcagtgggttttcatggaccctccctatgtcagctagaccaaacataaactgaaccaaaccgagttggaccggatcagaccagacctgaccaatcagatggagagtgtggaacctccttttccggctatcgaaaatctatggttttcaacgtttccacattaaaccgtgtatctatctatgtctattatcttaaactcgtatggtgtttgttttggggaggtatagaattttagttatgaggttataatatgtttttctttcggttatgacatgtgtgtcttactcttttcctaattatctgaatctgaactagatttctttcgaaaaaaaaaaaaaaaag

SEQ ID NO: 4982 - protein, 652 aa, Arabidopsis thaliana
MASLQISGSVKFEPFVGFNRIRHFRPIASLGFPRFRRRFSIGRSLLLRRSSSFSGDSRESDEERFITDAERDGSGSVLGFQLTPPGDQQTVSTSTGEITHHEEKKEAIDQIVMADFGVPGNRAVEEGAAEVGIPSGKAEVVNNLVFVTSEAAPYSKTGGLGDVCGSLPIALAGRGHRVMVISPRYLNGTAADKNYARAKDLGIRVTVNCFGGSQEVSFYHEYRDGVDWVFVDHKSYHRPGNPYGDSKGAFGDNQFRFTLLCHAACEAPLVLPLGGFTYGEKSLFLVNDWHAGLVPILLAAKYRPYGVYKDARSILIIHNLAHQGVEPAATYTNLGLPSEWYGAVGWVFPTWARTHALDTGEAVNVLKGAIVTSDRIITVSQGYAWEITTVEGGYGLQDLLSSRKSVINGITNGINVDEWNPSTDEHIPFHYSADDVSEKIKCKMALQKELGLPIRPECPMIGFIGRLDYQKGIDLIQTAGPDLMVDDIQFVMLGSGDPKYESWMRSMEETYRDKFRGWVGFNVPISHRITAGCDILLMPSRFEPCGLNQLYAMRYGTIPVVHGTGGLRDTVENFNPYAEGGAGTGTGWVFTPLSKDSMVSALRLAAATYREYKQSWEGLMRRGMTRNYSWENAAVQYEQVFQWVFMDPPYVS

SEQ ID NO: 4983 - DNA, 4127 bp, Solanum tuberosum
  CDS (143)..(3835)
gaattcgcggccgcagatagtgtgttgatgaaggagaagagagatatttcacatgggatgttctatttgattctgtggtgaacaagagttttacaaagaacattcctttttcttttttccttggttcttgtgtgggtcagccatggatgttccatttccactgcatagatcattgagttgcacaagtgtctccaatgcaataacccacctcaagatcaaacctattcttgggtttgtctctcatggaaccacaagtctatcagtacaatcttcttcatggaggaaggatggaatggttactggggtttcattttccatttgtgcaaatttctcgggaagaagacggagaaaagtttcaactcctaggagtcaaggctcttcacctaaggggtttgtgccaaggaagccctcagggatgagcacgcaaagaaaggttcagaagagcaatggtgataaagaaagtaaaagtacttcaacatctaaagaatctgaaatttccaaccagaagacggttgaagcaagagttgaaactagtgacgatgacactaaaggagtggtgagggaccacaagtttctggaggatgaggatgaaatcaatggttctactaaatcaataagtatgtcacctgttcgtgtatcatctcaatttgttgaaagtgaagaaactggtggtgatgacaaggatgctgtaaagttaaacaaatcaaagagatcggaagagagtggttttataattgattctgtaataagagaacaaagtggatctcagggggaaactaatgccagtagcaagggaagccatgctgtgggtacaaaactttatgagatattgcaggtggatgttgagccacaacaattgaaagaaaataatgctgggaatgttgaatacaaaggacctgtagcaagtaagctattggaaattactaaggctagtgatgtggaacacactgaaagcaatgagattgatgacttagacactaatagtttctttaaatcagatttaattgaagaggatgagccattagctgcaggaacagtggagactggagattcttctctaaacttaagattggagatggaagcaaatctacgtaggcaggctatagaaaggcttgccgaggaaaatttattgcaagggatcagattattttgttttccagaggttgtaaaacctgatgaagatgtcgagatatttcttaacagaggtctttccactttgaagaatgagtctgatgtcttgattatgggagcttttaatgagtggcgctataggtcttttactacaaggctaactgagactcatctcaatggagattggtggtcttgcaagatccatgttcccaaggaagcatacagggctgattttgtgttttttaatggacaagatgtctatgacaacaatgatggaaatgacttcagtataactgtgaaaggtggtatgcaaatcattgactttgaaaatttcttgcttgaggagaaatggagagaacaggagaaacttgctaaagaacaagctgaaagagaaagactagcagaagaacaaagacgaatagaagcagagaaagctgaaattgaagctgacagagcacaagcaaaggaagaggctgcaaagaaaaagaaagtattgcgagaattgatggtaaaagccacgaagactcgtgatatcacctggtacatagagccaagtgaatttaaatgcgaggacaaggtcaggttatactataacaaaagttcaggtcctctctcccatgctaaggacttgtggatccacggaggatataataattggaaggatggtttgtctattgtcaaaaagcttgttaaatctgagagaatagatggtgattggtggtatacagaggttgttattcctgatcaggcacttttcttggattgggtttttgctgatggtccacccaagcatgccattgcttatgataacaatcaccgccaagacttccatgccattgtccccaaccacattccggaggaattatattgggttgaggaagaacatcagatctttaagacacttcaggaggagagaaggcttagagaagcggctatgcgtgctaaggttgaaaaaacagcacttctgaaaactgaaacaaaggaaagaactatgaaatcatttttactgtctcagaagcatgtagtatatactgaacctcttgatatccaagctggaagcagcgtcacagtttactataatcccgccaatacagtacttaatggtaaacctgaaatttggttcagatgttcatttaatcgctggactcaccgcctgggtccattgccacctcagaaaatgtcgcctgctgaaaatggcacccatgtcagagcaactgtgaaggttccattggatgcatatatgatggattttgtattttccgagagagaagatggtgggatttttgacaataagagcggaatggactatcacatacctgtgtttggaggagtcgctaaagaacctccaatgcatattgtccatattgctgtcgaaatggcaccaattgcaaaggtgggaggccttggtgatgttgttactagtctttcccgtgctgttcaagatttaaaccataatgtggatattatcttacctaagtatgactgtttgaagatgaataatgtgaaggactttcggtttcacaaaaactacttttggggtgggactgaaataaaagtatggtttggaaaggtggaaggtctctcggtctattttttggagcctcaaaacgggttattttcgaaagggtgcgtctatggttgtagcaacgatggtgaacgatttggtttcttctgtcacgcggctttggagtttcttctgcaaggtggatttagtccggatatcattcattgccatgattggtctagtgctcctgttgcttggctctttaaggaacaatatacacactatggtctaagcaaatctcgtatagtcttcacgatacataatcttgaatttggggcagatctcattgggagagcaatgactaacgcagacaaagctacaacagtttcaccaacttactcacaggaggtgtctggaaaccctgtaattgcgcctcaccttcacaagttccatggtatagtgaatgggattgacccagatatttgggatcctttaaacgataagttcattccgattccgtacacttcagaaaacgttgttgagggcaaaacagcagccaaggaagctttgcagcgaaaacttggactgaaacaggctgaccttcctttggtaggaattatcacccgcttaactcaccagaaaggaatccacctcattaaacatgctatttggcgcaccttggaacggaacggacaggtagtcttgcttggttctgctcctgatcctagggtacaaaacaattttgttaatttggcaaatcaattgcactccaaatataatgaccgcgcacgactctgtctaacatatgacgagccactttctcacctgatatatgctggtgctgattttattctagttccttcaatatttgagccatgtggactaacacaacttaccgctatgagatatggttcaattccagtcgtgcgtaaaactggaggactttatgatactgtatttgatgttgaccatgacaaagagagagcacaacagtgtggtcttgaaccaaatggattcagctttgatggagcagatgctggcggagttgattatgctctgaatagagctctctctgcttggtacgatggtcgggattggttcaactctttatgcaagcaggtcatggaacaagattggtcttggaaccgacctgctcttgattatttggagctttaccatgctgctagaaagttagaatagttagtttgtgagatgctagcagaaaaattcacgagatctgcaatctgtacaggttcagtgtttgggtctggacagctttatcatttcctatatcaaagtataaatcaagtctacactgaggatcaatagcagacagtcctcaagttcatttcattttttggggcaaacatatgaaagagcttagcctcttaataatgtcggcctattgatgattatttgttttgggaagaaatgagaaatcaaaggatgcaaaataaaaaaaaaaaaaaaaaaaaaaactcgtgccgaattc

SEQ ID NO: 4984 - protein, 1230 aa, Solanum tuberosum
MDVPFPLHRSLSCTSVSNAITHLKIKPILGFVSHGTTSLSVQSSSWRKDGMVTGVSFSICANFSGRRRRKVSTPRSQGSSPKGFVPRKPSGMSTQRKVQKSNGDKESKSTSTSKESEISNQKTVEARVETSDDDTKGVVRDHKFLEDEDEINGSTKSISMSPVRVSSQFVESEETGGDDKDAVKLNKSKRSEESGFIIDSVIREQSGSQGETNASSKGSHAVGTKLYEILQVDVEPQQLKENNAGNVEYKGPVASKLLEITKASDVEHTESNEIDDLDTNSFFKSDLIEEDEPLAAGTVETGDSSLNLRLEMEANLRRQAIERLAEENLLQGIRLFCFPEVVKPDEDVEIFLNRGLSTLKNESDVLIMGAFNEWRYRSFTTRLTETHLNGDWWSCKIHVPKEAYRADFVFFNGQDVYDNNDGNDFSITVKGGMQIIDFENFLLEEKWREQEKLAKEQAERERLAEEQRRIEAEKAEIEADRAQAKEEAAKKKKVLRELMVKATKTRDITWYIEPSEFKCEDKVRLYYNKSSGPLSHAKDLWIHGGYNNWKDGLSIVKKLVKSERIDGDWWYTEVVIPDQALFLDWVFADGPPKHAIAYDNNHRQDFHAIVPNHIPEELYWVEEEHQIFKTLQEERRLREAAMRAKVEKTALLKTETKERTMKSFLLSQKHVVYTEPLDIQAGSSVTVYYNPANTVLNGKPEIWFRCSFNRWTHRLGPLPPQKMSPAENGTHVRATVKVPLDAYMMDFVFSEREDGGIFDNKSGMDYHIPVFGGVAKEPPMHIVHIAVEMAPIAKVGGLGDVVTSLSRAVQDLNHNVDIILPKYDCLKMNNVKDFRFHKNYFWGGTEIKVWFGKVEGLSVYFLEPQNGLFSKGCVYGCSNDGERFGFFCHAALEFLLQGGFSPDIIHCHDWSSAPVAWLFKEQYTHYGLSKSRIVFTIHNLEFGADLIGRAMTNADKATTVSPTYSQEVSGNPVIAPHLHKFHGIVNGIDPDIWDPLNDKFIPIPYTSENVVEGKTAAKEALQRKLGLKQADLPLVGIITRLTHQKGIHLIKHAIWRTLERNGQVVLLGSAPDPRVQNNFVNLANQLHSKYNDRARLCLTYDEPLSHLIYAGADFILVPSIFEPCGLTQLTAMRYGSIPVVRKTGGLYDTVFDVDHDKERAQQCGLEPNGFSFDGADAGGVDYALNRALSAWYDGRDWFNSLCKQVMEQDWSWNRPALDYLELYHAARKLE

SEQ ID NO: 4985 - DNA, 25 bp, Artificial sequence
  Primer sequence
atgcaggttttacatgtatgttcag

SEQ ID NO: 4986 - DNA, 26 bp, Artificial sequence
  Primer sequence
ttatttcaagcgatagtaaagctcac

SEQ ID NO: 4987 - DNA, 2420 bp, Saccharomyces cerevisiae
  CDS (739)..(2115)
atatacgatgtcttagtgaaatagagccaaaaaaaaaaaagaaaattattacaaaaaaccgaaacccaaatgataaataataatagtaacaaataataataatggaaatcaaaaaagtcgtatcaaatattaagcgaaggatggaaggtacctcttgttctaggtgccacgatgcagaaaaaaagatcaggaaaaacgaatgggaaaaagagaaaaagctggaaacgggattctcttttttctatgctgcttttgctttgcactattggatagtgtctgtagtatctaaactgattgcctatctcttctgtgctggcatcttattcgatgtatatagttcttaatatctagtgaaaaatttttgacaaatttctcgagacctgaatcttcgacacgcaagaaaaaattgaaaaattaacgtggaccctgggaagcgatgagctagagaaggtaaatacagggtcgtacgacgcagaagcatcccaaaattgttgcaacaagtatggaatgtcacattagagatttcccaatcttacatgactctttattgctgttttgtagatagccttccatgtaaaatgcatttgccgtcacattctgtgtgcggttgctgggtgctgtaaacaagctaaagaaatttcgctatcgaacttaaagaacaacgcagtacactagttgggagtgaaaacagtatcatagagtgtgtatgggagagagaaagagttagatactagtagtatggaaggtgaacagtctccgcaaggtgaaaagtctctgcaaaggaagcaatttgtcagacctccgctggatctgtggcaggatctcaaggacggtgtgcgctacgtgatcttcgattgtagggccaatcttatcgttatgccccttttgattttgttcgaaagcatgctgtgcaagattatcattaagaaggtagcttacacagagatcgattacaaggcgtacatggagcagatcgagatgattcagctcgatggcatgctggactactctcaggtgagtggtggaacgggcccgctggtgtatccagcaggccacgtcttgatctacaagatgatgtactggctaacagagggaatggaccacgttgagcgcgggcaagtgtttttcagatacttgtatctccttacactggcgttacaaatggcgtgttactaccttttacatctaccaccgtggtgtgtggtcttggcgtgcctctctaaaagattgcactctatttacgtgctacggttattcaatgattgcttcactactttgtttatggtcgtcacggttttgggggctatcgtggccagcaggtgccatcagcgccccaaattaaagaagtcccttgcgctggtgatctccgcaacatacagtatggctgtgagcattaagatgaatgcgctgttgtatttccctgcaatgatgatttctctattcatccttaatgacgcgaacgtaatccttactttgttggatctcgttgcgatgattgcatggcaagtcgcagttgcagtgcccttcctgcgcagctttccgcaacagtacctgcattgcgcttttaatttcggcaggaagtttatgtaccaatggagtatcaattggcaaatgatggatgaagaggctttcaatgataagaggttccacttggcccttttaatcagccacctgatagcgctcaccacactgttcgtcacaagataccctcgcatcctgcccgatttatggtcttccctgtgccatccgctgaggaaaaatgcagtgctcaatgccaatcccgccaagactattccattcgttctaatcgcatccaacttcatcggcgtcctattttcaaggtccctccactaccagtttctatcctggtatcactggactttgcctatactgatcttttggtcgggaatgcccttcttcgttggtcccatttggtacgtcttgcacgagtggtgctggaattcctatccaccaaactcacaagcaagcacgctattgttggcattgaatactgttctgttgcttctattggccttgacgcagctatctggttcggtcgccctcgccaaaagccatcttcgtaccaccagctctatggaaaaaaagctcaactgaaacagatgtataaatatcatataatcgtattgttttaaatcatttctttataccatctatatagtactactagtatttaatggtgccgttattacccgcgcttgattttcctttttttttttgatcaaaaggatggaacaggctgaaagtaaaccaaaaggatcaaagtgcaagcaaaggtgccacagaaaagtttatcaaaaaaccatacctagctgtgagagttttagactctgttttggtgactgcatatctattcataaatcgacacgaacttttcgtgcaggatacataataaaaatagc

SEQ ID NO: 4988 - protein, 458 aa, Saccharomyces cerevisiae
MEGEQSPQGEKSLQRKQFVRPPLDLWQDLKDGVRYVIFDCRANLIVMPLLILFESMLCKIIIKKVAYTEIDYKAYMEQIEMIQLDGMLDYSQVSGGTGPLVYPAGHVLIYKMMYWLTEGMDHVERGQVFFRYLYLLTLALQMACYYLLHLPPWCVVLACLSKRLHSIYVLRLFNDCFTTLFMVVTVLGAIVASRCHQRPKLKKSLALVISATYSMAVSIKMNALLYFPAMMISLFILNDANVILTLLDLVAMIAWQVAVAVPFLRSFPQQYLHCAFNFGRKFMYQWSINWQMMDEEAFNDKRFHLALLISHLIALTTLFVTRYPRILPDLWSSLCHPLRKNAVLNANPAKTIPFVLIASNFIGVLFSRSLHYQFLSWYHWTLPILIFWSGMPFFVGPIWYVLHEWCWNSYPPNSQASTLLLALNTVLLLLLALTQLSGSVALAKSHLRTTSSMEKKLN

SEQ ID NO: 4989 - DNA, 1345 bp, Arabidopsis thaliana (mouse-ear cress)
  CDS (29)..(1345)
agacgctgatgcgatttgctctgttttcatggcgggcgcctcatcaccggcgagtttgagagcttctcgtagccgtcggctggggaaggagacgaatcgatccgatctattcaaaaaacctgcagttccattcgcattcgcgctaattcttgctgatgcaatcctagtcgcacttattatcgcctatgttccatacacgaagatcgattgggatgcttacatgtcacaggttagtgggtttctcgggggagagagagactatgggaacttgaaaggcgatacagggccattggtttatccagcaggtttcctctatgtttactctgcagtgcagaacttaactggaggggaagtctaccctgctcagattctttttggtgttctctacattgtcaatctggggatcgtcttgatcatctacgtgaagactgatgtggtgccatggtgggcattaagtctactatgtttatccaagaggatacattcaatctttgttctccgtctctttaatgattgttttgccatgactctcctacatgcatcaatggctctctttctctatcgtaaatggcatctagggatgcttgttttcagtggagctgtttctgtaaagatgaatgtacttttgtatgctccaactttgttacttctgctacttaaggccatgaatatcattggagtggtgtctgctttggctggtgcagctcttgttcagatactcgtgggactgccgtttctgataacatatccggtttcatacatagcaaacgcctttgatcttggacgtgttttcattcatttctggtctgttaacttcaaatttgttccagaacgagtttttgtgtccaaagaatttgcagtatgcttgctcattgctcacctttttctccttgtggcgttcgcaaattataagtggtgcaagcatgaaggcgggattataggcttcatgcgttctaggcatttcttcttgacacttccgtcttcactctcgttcagtgatgtatcagcctcacggattattacgaaagaacatgtcgtcacggccatgtttgttgggaatttcatcggcattgtatttgctcgctctctgcactaccagttctactcatggtacttctattcgctaccttatctactatggagaacaccgtttcccacttggctgcgcttgatcatgttcctcggcattgagctctgttggaatgtttatccatcaacaccgtcctcctcgggtttgctattgtgtctacacttgatcattctggtgggtctctggttagctccttcagtcgatccttatcagctcaaagaacaccctaaatcccaaatacacaaaaaagcataa

SEQ ID NO: 4990 - protein, 438 aa, Arabidopsis thaliana (mouse-ear cress)
MAGASSPASLRASRSRRLGKETNRSDLFKKPAVPFAFALILADAILVALIIAYVPYTKIDWDAYMSQVSGFLGGERDYGNLKGDTGPLVYPAGFLYVYSAVQNLTGGEVYPAQILFGVLYIVNLGIVLIIYVKTDVVPWWALSLLCLSKRIHSIFVLRLFNDCFAMTLLHASMALFLYRKWHLGMLVFSGAVSVKMNVLLYAPTLLLLLLKAMNIIGVVSALAGAALVQILVGLPFLITYPVSYIANAFDLGRVFIHFWSVNFKFVPERVFVSKEFAVCLLIAHLFLLVAFANYKWCKHEGGIIGFMRSRHFFLTLPSSLSFSDVSASRIITKEHVVTAMFVGNFIGIVFARSLHYQFYSWYFYSLPYLLWRTPFPTWLRLIMFLGIELCWNVYPSTPSSSGLLLCLHLIILVGLWLAPSVDPYQLKEHPKSQIHKKA

SEQ ID NO: 4991 - DNA, 1533 bp, Drosophila melanogaster
  CDS (1)..(1533)
atggcgccgccaaaggccgccagccaccgtccggcggtgcggcgcaagaagtcgggcaccctggtggactccatcctggacaagtacctcaacgtgcgcttcttcaagtatctgctcctggagccggccgctctgcccatagttggcctcttcgtgctcctggcggagctggtcatcaacgtggtggtcatccagcgggtgccctacacagagatcgactgggtggcttacatgcaggagtgcgagggcttcctgaacggcaccaccaactatagtctgttgcgcggcgacacaggacctcttgtgtatccagccgccttcgtgtacatctactcggctctctactacgtcacgtcccacggaacgaacgttcgcctggcgcagtacatcttcgccgggatctacctgctccagctggccctggtgctgaggctgtactcgaagagcagaaaggtgccgccttatgtgctagtgctcagtgccttcacgtcgtatcggatccactcgatatacgtgctgcgactgttcaacgatcccgtggcagtgctgctcctctatgccgcactcaatttgttcctggacaggaggtggaccctgggtagcaccttcttcagcttggcggtgggcgttaagatgaacatcctgctgtttgcgcctgcgctcttgctgttctacttggccaacctggggcttctgcggacgatcctgcagctggctgtctgcggagtgatacaactgctgctgggcgctcctttcctgctcacccatcctgtggagtatctgcggggcagctttgatttgggacgcatcttcgagcacaagtggacggtcaactatcggtttctgagcagagatgtgttcgagaaccgcaccttccacgtttcgcttttgggcctgcatctgctgctcctgctggccttcgccaagcccatctggacctttttccagagctacgtgcgcctgcgccgcattgaggatcagctgcagccgcaaataacccagcagaacctccagctgaaggcgcagaaaagaccaaagaaagtggaaaaggacaaggacaaggaccagaagaagtttacaaccgagcagcaatccttcctgaaggccttcgagaagagcctgcagaaggcgtctggaggaaaggccactccggcgcccgcacaggcggaaccggaacgctatggcatccacttcgatcgctgcacccagctggccctgctgccgttcttcctgtgcaacctggtgggcgtggcctgctctcgatccttgcactatcagttctacgtctggtacttccactcgctaccctatttggcctggtcgacgccgtactcgctgggcgtgcgctgcctgatcctcggactgattgagtactgctggaacacctatcccagtacgaatttctccagcgctgccctccacttcacccacatcatactgctcgctggggtggccaagcagcttatccagaccatgcggattaataatgcggccaagagggagcagcaggagcaacagaaaaagctgcagtaa

SEQ ID NO: 4992 - protein, 510 aa, Drosophila melanogaster
MAPPKAASHRPAVRRKKSGTLVDSILDKYLNVRFFKYLLLEPAALPIVGLFVLLAELVINVVVIQRVPYTEIDWVAYMQECEGFLNGTTNYSLLRGDTGPLVYPAAFVYIYSALYYVTSHGTNVRLAQYIFAGIYLLQLALVLRLYSKSRKVPPYVLVLSAFTSYRIHSIYVLRLFNDPVAVLLLYAALNLFLDRRWTLGSTFFSLAVGVKMNILLFAPALLLFYLANLGLLRTILQLAVCGVIQLLLGAPFLLTHPVEYLRGSFDLGRIFEHKWTVNYRFLSRDVFENRTFHVSLLGLHLLLLLAFAKPIWTFFQSYVRLRRIEDQLQPQITQQNLQLKAQKRPKKVEKDKDKDQKKFTTEQQSFLKAFEKSLQKASGGKATPAPAQAEPERYGIHFDRCTQLALLPFFLCNLVGVACSRSLHYQFYVWYFHSLPYLAWSTPYSLGVRCLILGLIEYCWNTYPSTNFSSAALHFTHIILLAGVAKQLIQTMRINNAAKREQQEQQKKLQ

SEQ ID NO: 4993 - DNA, 1221 bp, Schizosaccharomyces pombe
  CDS (1)..(1221)
atgtcttcagttgagacaagaaattcttttaatccttttcgggtattatttgatcttggttcctatggctggttacatccttcaaggctccttctgttggaaattccttttgtctttgctattatttccaaagttccctacacggagatagactggattgcttacatggagcaggtgaattcatttctattaggagaaagagattataaatctcttgtcggatgtacaggccctctggtctaccctggagggcacgtatttttgtacacccttttgtactaccttactgatggagggaccaacattgtaagggcgcaatacatttttgcctttgtatactggattacaacggctattgtagggtatttgtttaaaattgtccgcgctcctttttatatatatgttttgcttatactttcaaaacgtctacacagtatatttatcttacgtttatttaacgatggattcaacagtttattctcttccctttttattttgtcttcatgcaaaaaaaagtgggttagagcttcaattctactaagtgtcgcttgttctgtcaagatgtcctccttgctttatgtcccagcttatttagttcttttgctccaaatcttggggcccaaaaagacctggatgcatatttttgttattataattgtacaaattttattttctattcccttccttgcctatttttggtcgtattggactcaagcctttgattttggcagagcattcgattataagtggacagtaaactggagattcattccacgcagcatttttgagtctacatcattttccacatcaatactttttcttcatgttgctttgctagttgcatttacctgcaaacactggaataaactgagcagagcaacaccatttgcaatggtaaactccatgctgaccttgaagcctttaccaaaactccaactcgcaactcctaattttatctttactgcattagcaacatccaatttgattggtatattatgtgcaagatccctgcattatcaattttatgcatggtttgcttggtattcaccatatctatgctatcaagctagttttcctgctccgatagtaattggcttatggatgttacaagaatacgcatggaatgtttttcctagtactaaactatcttcattaatcgctgtatgcgtgccgcttattactattttgaagctatacacatccgactacagaaaaccctga

SEQ ID NO: 4994 - protein, 406 aa, Schizosaccharomyces pombe
MSSVETRNSFNPFRVLFDLGSYGWLHPSRLLLLEIPFVFAIISKVPYTEIDWIAYMEQVNSFLLGERDYKSLVGCTGPLVYPGGHVFLYTLLYYLTDGGTNIVRAQYIFAFVYWITTAIVGYLFKIVRAPFYIYVLLILSKRLHSIFILRLFNDGFNSLFSSLFILSSCKKKWVRASILLSVACSVKMSSLLYVPAYLVLLLQILGPKKTWMHIFVIIIVQILFSIPFLAYFWSYWTQAFDFGRAFDYKWTVNWRFIPRSIFESTSFSTSILFLHVALLVAFTCKHWNKLSRATPFAMVNSMLTLKPLPKLQLATPNFIFTALATSNLIGILCARSLHYQFYAWFAWYSPYLCYQASFPAPIVIGLWMLQEYAWNVFPSTKLSSLIAVCVPLITILKLYTSDYRKP

SEQ ID NO: 4995 - DNA, 1446 bp, Debaryomyces hansenii
  CDS (1)..(1446)
atgacagaacagagtataaaagacggccaacggccagagttacctccttttacgttgaggaatgtgctaaatgatatttacaatgggatattggctttattcactgatccattctgtaccaggatcatttgtcctgttgtcattgtattgacatcattactatctaaagctataatatataaggttccttatacagaaattgatttcaggacttacatccaacaaattcaaataattaacgatggggaacttgattattcgttagtgcaaggagatacgggccaaattgtatacccagctggatttgttcaaatatatcaagtgctcaactggttaaccgatgaaggtactgatattcacgcaggccaaacagcctttggttatttgttggctttgactaactttttggttataattgcctatacaatgactcctgattttcaaccatggccagtgtattgtttgcttttgagcaaaagattgttttccatatacgtgcttcgattattcaatgactgttttactactgtttgtatggttagtgttacaattttgttacaacaggcagcatattggtataagaagggcggatcttcaattagttttctattgaccatggttgcagctgatttatacagtattgcaatttctataaagatgaatgcattattgtattttcctggatttatcatagttgcatatttcttatgcggtgaaaacttattgaagtttggtacagtattattggttattccaattgttcaggtccttatgggttggaagttcttgttaccattttttaatgatgaagaagcttcatacattagatggaactacatcaaccaagcatttaactttaacagaaagttcttatataaatggactgtcaattggagatttgtttccgaggaattcttcttatcagatgttttcagtaatgggttattaattgctaatgcttcagtcttaattttcttcatatttacaagatatatctcgcctaggattacatgcaaaccagtatctcgtctcataaaggatgctatggtaggacctttcagtagcacaattaataaaaacaatttgttgatagatccaaaatgtggtccaaagcttgttatgttaatattaggatctaccaatataataggcattttgtttgcaaggtctttgcactatcaatttctttcgtggtactgctggcaattacctttcatgctatatatgactgggtggagtttactagtttgtattcctctttgggtagtacatgaatggtgctggaacgtatttccatcgacacccatgagttcaggcttgttggtaagcattctagctattgtattatttggtgtgtggtacaatacgaatgaatggttccccaaactagcagacaacgaggctgctactatcgatgagtccggtgagtccaagaaggataaatag

SEQ ID NO: 4996 - protein, 481 aa, Debaryomyces hansenii
MTEQSIKDGQRPELPPFTLRNVLNDIYNGILALFTDPFCTRIICPVVIVLTSLLSKAIIYKVPYTEIDFRTYIQQIQIINDGELDYSLVQGDTGQIVYPAGFVQIYQVLNWLTDEGTDIHAGQTAFGYLLALTNFLVIIAYTMTPDFQPWPVYCLLLSKRLFSIYVLRLFNDCFTTVCMVSVTILLQQAAYWYKKGGSSISFLLTMVAADLYSIAISIKMNALLYFPGFIIVAYFLCGENLLKFGTVLLVIPIVQVLMGWKFLLPFFNDEEASYIRWNYINQAFNFNRKFLYKWTVNWRFVSEEFFLSDVFSNGLLIANASVLIFFIFTRYISPRITCKPVSRLIKDAMVGPFSSTINKNNLLIDPKCGPKLVMLILGSTNIIGILFARSLHYQFLSWYCWQLPFMLYMTGWSLLVCIPLWVVHEWCWNVFPSTPMSSGLLVSILAIVLFGVWYNTNEWFPKLADNEAATIDESGESKKDK

SEQ ID NO: 4997 - DNA, 1617 bp, Yarrowia lipolytica
  CDS (1)..(1617)
atgatcctcatcaaaaataaagtggcgctgaagctgctacagctagccaatgaccgcaaatactccatgacagtatgtggtgtgcttcttgctctggaagcagtctttctcgtggccatcatccacaaggtcccatacaccgagatcgattggaaggcctacatggagcaggctgctctgatcctggggggtgagtacgactacagtaaaattgttggtggaactggtcccatggtctaccccggaggccacgctcgaatcttcactgctctttacgacgtgacctctggtggtgagaatattcgcctggcccagtacatctacgctgctgtatacctgggcacccagttctttgcattcaccgtctatctgctcgccgacgctccaccttacctgttccctcttctctgtctgtctaaacgactgcattctatctatgttcttcgacttttcaacgacgtctttggtaccttcgccatgaccttttgtgtcttcaccctgcagaaccagatgtggctgctttccggtctttggatgtccctggcaattggaatcaagatgaatttcatgctctatcttcctgccttcctgcttattactctccaaggtatgagcagaaacggccttcttgttgtcttcgccctttccatcgtcggaattcaggtcttcctggcactgcctttctgcaatccctcccctgatcacatctggtcctacctggctggtgcttttgacctttctcgagcattcatgtggaaatggactgtcaactggcggtttgttggacagaaggtcttcgagaaccgaaagttccatggcatcctgttgtggacgcacctcacagcactcatcggtttcgcctgcacgatctggaatgctccttccggctaccagaacccgtttgagatgttcttcacaaacccccctcctgccccacgaggtctcaccgctgcccagcgagcagagtgggaccgaatcagacaggaagcctctggcaacgaggtccagtttgatgtccagcagaagcgatccaagcgtgaacagaagcgaatgcaggagcaggaggaggagatcaaaaagcagcaactggctcagcaggaaggacgagagaagcctcccctgttctactctcgaacccagttctccactctggttacccaagagtacgtcttcgtcaccatggctacctgtaacctaatcggtgtgctcttcgctcgatctctccactatcagttttactcatggttctactggactatgcctttcctcctgtaccgagctacatacgccatttcgcctttgtctcctatgcagtctaccctgcgatatgagggccgtctcagcaagacagagatcagaatattcttcaccgacatcatcggctttgtcttcatttttggcacctgggcgcttcaggagtatgcctggaacgtgtatcccagcactttctggtcatctataatcgcagttagttgcatcgccatcactatcatcggtgtctatgtttctgagtgccgatacccctcagccaacaacactgaagcccccacttccaatgagctgcagaaatacttggccaaggttgagaaggagaacgaggccagggccaagaactag

SEQ ID NO: 4998 - protein, 538 aa, Yarrowia lipolytica
MILIKNKVALKLLQLANDRKYSMTVCGVLLALEAVFLVAIIHKVPYTEIDWKAYMEQAALILGGEYDYSKIVGGTGPMVYPGGHARIFTALYDVTSGGENIRLAQYIYAAVYLGTQFFAFTVYLLADAPPYLFPLLCLSKRLHSIYVLRLFNDVFGTFAMTFCVFTLQNQMWLLSGLWMSLAIGIKMNFMLYLPAFLLITLQGMSRNGLLVVFALSIVGIQVFLALPFCNPSPDHIWSYLAGAFDLSRAFMWKWTVNWRFVGQKVFENRKFHGILLWTHLTALIGFACTIWNAPSGYQNPFEMFFTNPPPAPRGLTAAQRAEWDRIRQEASGNEVQFDVQQKRSKREQKRMQEQEEEIKKQQLAQQEGREKPPLFYSRTQFSTLVTQEYVFVTMATCNLIGVLFARSLHYQFYSWFYWTMPFLLYRATYAISPLSPMQSTLRYEGRLSKTEIRIFFTDIIGFVFIFGTWALQEYAWNVYPSTFWSSIIAVSCIAITIIGVYVSECRYPSANNTEAPTSNELQKYLAKVEKENEARAKN

SEQ ID NO: 4999 - DNA, 1389 bp, Kluyveromyces lactis
  CDS (1)..(1389)
atggtggaagaaggcgctaataaaactgtaggggctcccactgtaggagacgatcaacaaccgaaggaatttgtacgtccgccatttacgccatttcaagatattttagatgcattcaattatcttatgtggaatcccgaggccaatgctattgcaatgcctgtcttgatacttttagaatccattgcaatgaagttcattcaaaataaagtgtcttatacagagattgattatactgcatatatggaacaaatatggatgattcaaaacggagaaagagattattctcaaataaaaggcggaactggaccattggtatatccagcaggtcatgtattcatatacaagatatttgagtgggtaagtgatggattagagaatataagcgaagctcaagatttattcagatatctttatgtgataactttgatgatacaattcatgtgttttgggttgttgaatatacctcctgggtatgcgatatttgccatactttccaaaagattacactcggtttacgtgctaagacttttcaacgactgttttacgaccttgtttatgtctttggctgtgttggtaatgatactttgtgcgaagtataagattagaggatttctggtacttatcggcagtagtttttactcaatggcagtaagcatcaaaatgaacgcattgctatatctcccaggtgtgttgttaacaatatacctattagagcgttgtaatactttcaaaatcgtactaaacttagcggtgatggttatttggcaggtaataatagccattccattttggaaagagtatccttgggaatatttgcaaagcgcgttcaatttcagcaggcaattcatgtacaaatggtcagtgaactggcaaatggtagacgaggaagtattcttggacccacttttccataggtctctattaatatctcatgtcattgttttagtcgtgtttttgttttacaagctgataccaacgaacatgaatacaccggcaggtttactgaagattggcaaagctaaccttttacatccttttaccgatgctgtattcagtgcgatgagagtaaacgcagaacaaattgcatacattttacttgttaccaattacattggagtactatttgctcgatcattacactaccaattcctatcttggtaccattggacgttaccagtactattgaattgggccaatgttccgtatccgctatgtgtgctatggtacctaacacatgagtggtgctggaacagctatccgccaaacgctactgcatccacactgctacacgcgtgtaacacatcactgttattggctgtattcttaagaggacccgcaaactcgaaaagtggtgataacgaaacaacacacgagaaagctgagtag

SEQ ID NO: 5000 - protein, 462 aa, Kluyveromyces lactis
MVEEGANKTVGAPTVGDDQQPKEFVRPPFTPFQDILDAFNYLMWNPEANAIAMPVLILLESIAMKFIQNKVSYTEIDYTAYMEQIWMIQNGERDYSQIKGGTGPLVYPAGHVFIYKIFEWVSDGLENISEAQDLFRYLYVITLMIQFMCFGLLNIPPGYAIFAILSKRLHSVYVLRLFNDCFTTLFMSLAVLVMILCAKYKIRGFLVLIGSSFYSMAVSIKMNALLYLPGVLLTIYLLERCNTFKIVLNLAVMVIWQVIIAIPFWKEYPWEYLQSAFNFSRQFMYKWSVNWQMVDEEVFLDPLFHRSLLISHVIVLVVFLFYKLIPTNMNTPAGLLKIGKANLLHPFTDAVFSAMRVNAEQIAYILLVTNYIGVLFARSLHYQFLSWYHWTLPVLLNWANVPYPLCVLWYLTHEWCWNSYPPNATASTLLHACNTSLLLAVFLRGPANSKSGDNETTHEKAE

SEQ ID NO: 5001 - DNA, 1395 bp, Pichia pastoris
  CDS (1)..(1395)
atgcctccgatagagccagctgaaaggccaaagcttacgctgaaaaatgttatcggtgatctagtggctcttattcaaaacgttttatttaacccagattttagtgtcttcgttgcacctcttttatggttagctgattccattgttatcaaggtgatcattggcactgtttcctacacagatattgatttttcttcatatatgcaacaaatctttaaaattcgacaaggagaattagattatagcaacatatttggtgacaccggtccattggtttacccagccggccatgttcatgcttactcagtactttcgtggtacagtgatggtggagaagacgtcagtttcgttcaacaagcatttggttggttatacctaggttgcttgttactatccatcagctcctactttttctctggcttagggaaaatacctccggtttattttgttttgttggtagcgtccaagagactgcattcaatatttgtattgagactcttcaatgactgtttaacaacatttttgatgttggcaactataatcatccttcaacaagcaagtagctggaggaaagatggcacaactattccattatctgtccctgatgctgcagatacgtacagtttagccatctctgtaaagatgaatgcgctgctatacctcccagcattcctactactcatatatctcatttgtgacgaaaatttgattaaagccttggcacctgttctagttttgatattggtgcaagtaggagtcggttattcgttcattttaccgttgcactatgatgatcaggcaaatgaaattcgttctgcctactttagacaggcttttgactttagtcgccaatttctttataagtggacggttaattggcgctttttgagccaagaaactttcaacaatgtccattttcaccagctcctgtttgctctccatattattacgttagtcttgttcatcctcaagttcctctctcctaaaaacattggaaaaccgcttggtagatttgtgttggacattttcaaattttggaagccaaccttatctccaaccaatattatcaacgacccagaaagaagcccagattttgtttacaccgtcatggctactaccaacttaataggggtgctttttgcaagatctttacactaccagttcctaagctggtatgcgttctctttgccatatctcctttacaaggctcgtctgaactttatagcatctattattgtttatgccgctcacgagtattgctggttggttttcccagctacagaacaaagttccgcgttgttggtatctatcttactacttatcctgattctcatttttaccaacgaacagttatttccttctcaatcggtccctgcagaaaaaaagaatacataa

SEQ ID NO: 5002 - protein, 464 aa, Pichia pastoris
MPPIEPAERPKLTLKNVIGDLVALIQNVLFNPDFSVFVAPLLWLADSIVIKVIIGTVSYTDIDFSSYMQQIFKIRQGELDYSNIFGDTGPLVYPAGHVHAYSVLSWYSDGGEDVSFVQQAFGWLYLGCLLLSISSYFFSGLGKIPPVYFVLLVASKRLHSIFVLRLFNDCLTTFLMLATIIILQQASSWRKDGTTIPLSVPDAADTYSLAISVKMNALLYLPAFLLLIYLICDENLIKALAPVLVLILVQVGVGYSFILPLHYDDQANEIRSAYFRQAFDFSRQFLYKWTVNWRFLSQETFNNVHFHQLLFALHIITLVLFILKFLSPKNIGKPLGRFVLDIFKFWKPTLSPTNIINDPERSPDFVYTVMATTNLIGVLFARSLHYQFLSWYAFSLPYLLYKARLNFIASIIVYAAHEYCWLVFPATEQSSALLVSILLLILILIFTNEQLFPSQSVPAEKKNT

SEQ ID NO: 5003 - DNA, 1329 bp, Candida glabrata
  CDS (1)..(1329)
atgcagacagtgagatcggaagataaccctcctaaaaaggaagagttcaagaggccaccaattgacttactacaggacttgaaagacggtattaaccatgttgtgtataatccactaggtaataaaatagtcatgccactaatgtttttactagaatcagtattgttgaagtatgttattgctgctataccatacactgaaattgattataaggcatacatggaacaagtggaaatgatctatgaggaaggtaattataactacctagaaattactggtgggacaggacctctggtttatcctgcaggccatgttttgattttccgagtgttaaattactttactgaaggaatgaatcatatagaggtaggacaaaagatttttaggtatctgtacttgatcaccctattaatgcagtatacttgttactatcaattacgtttacctccatggtgtgtcgtacttgcctctttatcgaaaaggttacattctatttacgttttaaggctgttcaatgattgttttactactttctttatggtattgtttgttctgctctacactcttagaagcaacaatagtactaaaatgtcgatggttatatcaacttttggatctttggtttacagtatggctatctcagttaaaatgaatgcgttattatatttacctgggtatttggtttcaacgtatctgataaatgaaggcaaactaataaactgtttgatttcggcatcggtgatcctattctggcaagttatcgtttctttgaggttcttacgttcatatccagttgaatacttggcaggtgctttcgattttagcagacaatttatgtttaaatggagtgttaattggcaatttctagatgaagatgcctttcaagatcgagttttccataccacattattgggctcccaatttgtagcagttgttgcgatgacgctctgtctttatccacgcttacctttagatgcttggaaatctctgaaagcgcctttcacgcaagttgtgattgcagatctgcggttcattgtaccttttttactaatgacttctaatttcattggggtgttgttttcgagatccctacattaccagtttttgtcctggtatcattggactctaccgtgcttgatctactggtcaaagttgcctatgcctttagggttcatatggtacatctgtcatgagtactgttggaactcgtatcctccaaacgaaaaagcaagcatcctcctattcacactaaatgcatctctgctgtgtcttctggcaatcaattgtatgagaccagttatagtaaacatcaagagaaagcaacaatga

SEQ ID NO: 5004 - protein, 442 aa, Candida glabrata
MQTVRSEDNPPKKEEFKRPPIDLLQDLKDGINHVVYNPLGNKIVMPLMFLLESVLLKYVIAAIPYTEIDYKAYMEQVEMIYEEGNYNYLEITGGTGPLVYPAGHVLIFRVLNYFTEGMNHIEVGQKIFRYLYLITLLMQYTCYYQLRLPPWCVVLASLSKRLHSIYVLRLFNDCFTTFFMVLFVLLYTLRSNNSTKMSMVISTFGSLVYSMAISVKMNALLYLPGYLVSTYLINEGKLINCLISASVILFWQVIVSLRFLRSYPVEYLAGAFDFSRQFMFKWSVNWQFLDEDAFQDRVFHTTLLGSQFVAVVAMTLCLYPRLPLDAWKSLKAPFTQVVIADLRFIVPFLLMTSNFIGVLFSRSLHYQFLSWYHWTLPCLIYWSKLPMPLGFIWYICHEYCWNSYPPNEKASILLFTLNASLLCLLAINCMRPVIVNIKRKQQ

SEQ ID NO: 5005 - DNA, 1299 bp, Ashbya gossypii
  CDS (1)..(1299)
atgagcgcagcagttccgaccacacgggcgggaactcccccaaccctacagtgtggatggcggagtgcatgtggaaagctgctggacatcgccaattatgtcatcttcagcccggaggcgtctgccgtggtcatgccggtgctcgtggcgtgggaatgtgtgctgttgaagctgattgtgaagcacgtgccctacacggagattgactacttggcatacatggagcagatatggcagatcaacaatggtgaacgcgactattcaaagatcgagggcggcacggggccgctggtgtacccggcgggacatgtactgatccatcgcctgcttgagcgcgccacagatggcctgcagaatgtcgcgcgcggacaggatattttcacgtggctctacttgctgacactcgtcctgcagttcggcgtctaccgcatgctgcgactgcccccgtggtgcattgtgctcgcgtgtctgtccaagcgtctgcactctgtctacgtcctgcggctgttcaacgacggctggacgaccctcatggtggtggtcgcagtctttctgcttctgctagccgcacgccaccccaggctctgcctgccggccgcgctcgtctacagcgctgctgtcagcatcaaaatgaatgcgctgctatacctgcccggcgtcctggtcgcactctttctactcacacgcggccacctgcttgcgctcgcgctctgtggcgccgtggccgtcgcatggcaggtcctggtcgccgcagacttcctctccactcaccccgccgagtactttgccaccgccttcgacttccgccggcaattcatgtaccgctggagcgtcaactggcagctcgtcggcgagcaagtcttttcacaccccaccttccaccgctgcctgctgctctcccacatcgccatcctgatgctcttcttcttcacgcgctatgccgagccgcgccagccaaactggttccgcactgctgcagctgccctgcgtcacccggccaccgccgtcctagccgccagcccgccccgggcccacgtcgcctacgtcctcctcgtctcgaacttcatcggcgtgctcttcgctcgctccctgcactaccagttcctggcctggtaccattggaccctacccgccttgcttcactgggctcgcatgccctgcctgctcgcgctgctatggtacgtcctgcacgagctctgctgggatacctacccgccctcctccgttgctagtgccacgctgtacgctctcaactccgccctacttctccttctgtacatcaacggcccgcctgcctag

SEQ ID NO: 5006 - protein, 432 aa, Ashbya gossypii
MSAAVPTTRAGTPPTLQCGWRSACGKLLDIANYVIFSPEASAVVMPVLVAWECVLLKLIVKHVPYTEIDYLAYMEQIWQINNGERDYSKIEGGTGPLVYPAGHVLIHRLLERATDGLQNVARGQDIFTWLYLLTLVLQFGVYRMLRLPPWCIVLACLSKRLHSVYVLRLFNDGWTTLMVVVAVFLLLLAARHPRLCLPAALVYSAAVSIKMNALLYLPGVLVALFLLTRGHLLALALCGAVAVAWQVLVAADFLSTHPAEYFATAFDFRRQFMYRWSVNWQLVGEQVFSHPTFHRCLLLSHIAILMLFFFTRYAEPRQPNWFRTAAAALRHPATAVLAASPPRAHVAYVLLVSNFIGVLFARSLHYQFLAWYHWTLPALLHWARMPCLLALLWYVLHELCWDTYPPSSVASATLYALNSALLLLLYINGPPA

SEQ ID NO: 5007 - DNA, 1662 bp, Anopheles gambiae str
  CDS (1)..(1662)
atgcgtattccgggcagtgagacagtgagaccagaccaaagaagagaaaaaaaccaaaacaaatccagcaaccagctctggagaggagcgatggggaaaattccagccaatcaaccgaaatcggtgccgccggtgccgcggaaggaaccgcaaactctgctcgccaagatacgcaaagagtacgtaagcttaacgtttgccaaatcgctcatcttcgacccggcccggttgccgctgatctcgatcctaattttggccgctgagttggtgctgaacgtgttcgtggtgcaaaatgtgcgctacaccgaaatcgactggaaggcgtacatgcaggagtgtgaagggtttctcaacggcaccaccgactattcgcagctacgaggtgataccggcccgctcgtctatcctgccgggtttgtctacatctacagcgcgctgtacttcctaacatcacacggcaccaacattcgcttggcccagtatgtcttcgttggcatctatctggttcagctgatgctcgtactccggctgtactgtaagagctgcaaagtccctccatacgtgatggtcattaccattttcacctcctaccggattcactccatctacgtgctgcggttgttcaacgatccgattgcgatcctgttcctctacgccgccctgaatgcgttcattgacggtcgatggacgctcggcagcgtaatgctcagcttgggcgtatcggtaaagatgaacatccttctgtttgctccggccattctgctgctgtacattaccaatctgggatggctgaaaacggcccttcagctgacggtctgtggagtgatacagctgatcctgggtgctccgttccttcttacccatccgtggcagtaccttaagggtagcttcgatttggggcgcgtgttcgagcacaagtggacagtaaactatcgcttcctcgagccggaagtgttcgaaagtaaggtgtttcatctggcactgctcggactgcatctcacgctgctgctcgtgtttgcatcgccctgctacaagtacttccaaaattactgccgcctgcgccacctggagatgatgctgatgccacagatagaggcacaaaatcgggccgaaaaggaaaaggtgaaaaagggcaagcaatcgaaagccaaagcattgccggctgctaaaggagacaacggggaggaaaagctaacgcaggatcaggaaaagtttttgaaatcgtttgaaaagggcattaaaaagatgtccggtaagcagcagcagcagcagaatgtcgccccggtggaaacggaatcaccggcagcagcgaacccagcggccaacaaattttccatccacttcgatcgatccacccaactcgcgctgctccccattttcctgtccaactttatcggcatcgtttgtgcgcgtagcttgcactaccaattttacgtgtggtacttccacagcttgccctacctcacttggtacacggagtatacgaacagtttgaagtttttgcttcttctgctgctggaattctgctggaacacgtacccgagcacggtactgagcagcgtggtcctgcacgcctgccacgtgtgcctgctggttggcattggaaggaaattgttccgtcggattccggatcttgctcagctgaacaataagacagagtaa

SEQ ID NO: 5008 - protein, 553 aa, Anopheles gambiae str
MRIPGSETVRPDQRREKNQNKSSNQLWRGAMGKIPANQPKSVPPVPRKEPQTLLAKIRKEYVSLTFAKSLIFDPARLPLISILILAAELVLNVFVVQNVRYTEIDWKAYMQECEGFLNGTTDYSQLRGDTGPLVYPAGFVYIYSALYFLTSHGTNIRLAQYVFVGIYLVQLMLVLRLYCKSCKVPPYVMVITIFTSYRIHSIYVLRLFNDPIAILFLYAALNAFIDGRWTLGSVMLSLGVSVKMNILLFAPAILLLYITNLGWLKTALQLTVCGVIQLILGAPFLLTHPWQYLKGSFDLGRVFEHKWTVNYRFLEPEVFESKVFHLALLGLHLTLLLVFASPCYKYFQNYCRLRHLEMMLMPQIEAQNRAEKEKVKKGKQSKAKALPAAKGDNGEEKLTQDQEKFLKSFEKGIKKMSGKQQQQQNVAPVETESPAAANPAANKFSIHFDRSTQLALLPIFLSNFIGIVCARSLHYQFYVWYFHSLPYLTWYTEYTNSLKFLLLLLLEFCWNTYPSTVLSSVVLHACHVCLLVGIGRKLFRRIPDLAQLNNKTE

SEQ ID NO: 5009 - DNA, 1446 bp, Mus musculus
  CDS (7)..(1323)
gtcaagatggctgctgggctgcggaaacgcggccagccggcttctgtcggccagccggcaggaatctggaaacaatggctacagcgtgcctggcaagaacgctacctactgctgcgggaaccgcgctacacattgctggtggcctcctgcctctgcatagcagaggtgggcatcaccttctgggtcattcacagggtggcatacacagagattgactggaaggcctacatggcccaggtggagggtttcatcaatggcacatatgactacacacagctgcagggtgacaccggacctcttgtctacccagctgggtttttgtacatctttacggggctattctatgctactgaccggggcactgatatccctatggcccagaacatctttgctgtactctaccttgtcaccttggtgcttgttttcttgatataccaccagacctccaaggtacctcccttcgtctttttcttcatgtgttgtgcctcttaccgtgtccattccatctttgtactgcggctcttcaatgacccagtagctatggccttgctcttcctgagcatcaaccttttcctggcacagtgctggagctggggctgctgctgtttcagcctggctgtctcggtgaagatgaatgtgctgctcttcgccccgggattgctattccttcttcttactcagtttggcttccgtggtgccctccccaagctggccatctgtgctgctcttcaggtggtgctgggattgcccttcctgctggagaaccccattggctacctatcccgctcctttgaccttggtcgtcagtttcttttccaatggacagtaaactggcgcttcctgcctgaaaccatcttcctgcatcgtgccttccatctagccctgttggctgcccaccttagcctcctcttgctgtttgccctctgtaggtggcacagaacaggggaaagtattctggcactgctgaaggatccttccaaaaggaaagttccaccccaagccctcacacctaaccagattgtttccatcctcttcacctccaacttcattggcatctgctttagccactcgctccactaccagttttatgtctggtatttccacacactgccctacctcctgtgggccatgcctgcacgctggctcacacacctgctcaggttgctggtgctgggactcattgagctctcctggaatacgtacccatccacgtccttcagctctgccgccctccacctgtgccacgctgtcgtcctgctgcagctctggctgtcccccgagtccttccctaagagcattcagccaagcaggaaaactcactgaaacccaccccttccttctaggacgtgctcagcatcatgggtggaacggactctgtgttcttagaataaaccttgccaagtccaaaaaaaaaaaaaaaaaaaaaaaaaaaaaaaaaaaaaaaaa

SEQ ID NO: 5010 - protein, 438 aa, Mus musculus
MAAGLRKRGQPASVGQPAGIWKQWLQRAWQERYLLLREPRYTLLVASCLCIAEVGITFWVIHRVAYTEIDWKAYMAQVEGFINGTYDYTQLQGDTGPLVYPAGFLYIFTGLFYATDRGTDIPMAQNIFAVLYLVTLVLVFLIYHQTSKVPPFVFFFMCCASYRVHSIFVLRLFNDPVAMALLFLSINLFLAQCWSWGCCCFSLAVSVKMNVLLFAPGLLFLLLTQFGFRGALPKLAICAALQVVLGLPFLLENPIGYLSRSFDLGRQFLFQWTVNWRFLPETIFLHRAFHLALLAAHLSLLLLFALCRWHRTGESILALLKDPSKRKVPPQALTPNQIVSILFTSNFIGICFSHSLHYQFYVWYFHTLPYLLWAMPARWLTHLLRLLVLGLIELSWNTYPSTSFSSAALHLCHAVVLLQLWLSPESFPKSIQPSRKTH

SEQ ID NO: 5011 - DNA, 1164 bp, Oryza sativa
  CDS (1)..(1164)
atggctggacaaatgtcatctgtggctagaattgctatatttttggacaaaagagtagtagactataatttaactaacttatatggaggacaaaaaatttggaaaataaaactcatcgcacgcagaacagacaacgacggcgttggcgcgagaaccacgaggcgccgagctgggcctgcatccggatgggccttcgggccggaggcccatgaggttctcgggttgggccggatgagctcctcctcctcgtcgtcgtcgtcttcgtctcgagttcttggttggttggatctacctcgagctgcccggagcttggctgtggaggcggccatggcgcgggtgggcaagcacggcgagtcgtcgccgccgtccgaccgtaggccgctccacttcgcggcgttcctgctgctcgccgacgcggcgctcgtcgccctcatcgtcgtcttcgtcccgtataccaagatcgactgggacgcgtacatggctcagaaggtggacgcgtttgtggaaggggagagggattacaccaagatcgagggcgacacggggccgctcgtctacccggccggcttcctctacgtttactccgccatcaagcttctcaccgccggccaagtcttccccgcgcagagggttcactccatctttgtgctccgccttttcaacgattgtttcgctatgacgtttctccatgctgccatggttttgattatgtatcacaagtggtaccttggtctagtaattttcaggtctgtaaattttaaatttgtccctgagaagttctttgtatcaaaagagctagctgttgcattgttggttcttcacctcactactcttttggtctttgcacactacaagtggcttaaattcaaagatgccacatcaattggacagttaatttttgccaagcccaaactgtcaactcttaacaaagaacatattgtaacggtcatgtttgttggaaatttcattggcatcgtgtgcgcacgatcattacactaccaattttattcctgggtcattttatttcttgctgtggagctctgctggaatatctatccttccactgcctattcgtcactgctgttgctattcattcacatctccatcttgtttggcttatggagctcacctgcagagtacccctatgccaatggaaagaaatga

SEQ ID NO: 5012 - protein, 387 aa, Oryza sativa
MAGQMSSVARIAIFLDKRVVDYNLTNLYGGQKIWKIKLIARRTDNDGVGARTTRRRAGPASGWAFGPEAHEVLGLGRMSSSSSSSSSSSRVLGWLDLPRAARSLAVEAAMARVGKHGESSPPSDRRPLHFAAFLLLADAALVALIVVFVPYTKIDWDAYMAQKVDAFVEGERDYTKIEGDTGPLVYPAGFLYVYSAIKLLTAGQVFPAQRVHSIFVLRLFNDCFAMTFLHAAMVLIMYHKWYLGLVIFRSVNFKFVPEKFFVSKELAVALLVLHLTTLLVFAHYKWLKFKDATSIGQLIFAKPKLSTLNKEHIVTVMFVGNFIGIVCARSLHYQFYSWVILFLAVELCWNIYPSTAYSSLLLLFIHISILFGLWSSPAEYPYANGKK

SEQ ID NO: 5013 - DNA, 1329 bp, Neurospora crassa
  CDS (1)..(1329)
atggccgctccgtcaagtaggccagaatcaaacccgcccctctacaagcaagcccttgatttcgccctagatgtcgccaacggtcgccatgctctgtcgaagctcatcccgcccgccctcttcctggtcgatgcgctcctctgcggcctgatcatctggaaagtgccttacaccgaaatcgactgggcggcctatatggagcaagtctcccaaatcctctcgggcgagcgcgactacaccaaggtccgcggcggcaccggtccgctcgtttacccggctgcgcacgtctacatctacaccggactataccacttgacggatgaggggaggaacatcttgcttgcgcaacagctgtttgcgggtctttatatggttacgttggcggttgttatggggtgttactggcaggccaaggcaccaccatatctattcccgctcctgactctctcgaaacggctacacagcatcttcgtcctgcgctgcttcaacgactgcttcgccgtcctgttcctctggcttgccatcttcttctttcagcggcgcaactggcaagccggcgcattactctacaccctcggcctcggcgtcaaaatgacgctactactctccttaccagccgtaggcattgtcctcttcctcggcagtggcagttttgtcaccactctgcagctcgtagcaacaatgggtctggtccagatcctcatcggcgtccccttcctggcacactaccccacggaatacctctcccgggccttcgagctctcccggcaattcttctttaaatggaccgtcaactggcgcttcgtcggcgaggaaatatttctcagcaaggggttcgcgctcacactgctcgctttgcacgttctcgttttgggaatcttcatcaccacccgttggatcaaacctgcgcgcaagtctcttgttcagctaatctctcctgtcctcttggcgggcaaaccgcctctgactgtccccgagcaccgcgctgcggcgcgggatgtgacgccgaggtacatcatgaccacgatcctgtctgccaatgctgtgggcctcctctttgctaggtccctccactaccagttctatgcctatgtcgcatggtcgactccattcctcctctggcgcgcggggttgcaccctgtcttggtgtacctgctatgggcggtgcatgagtgggcgtggaacgtgttccccagcacgccggcgagctcggcggtggtggtgggcgtattaggcgttacggtcgcaggagtgtggtttggcgcacgggaggagtgggagcccgggatgaagtcgtcatcgaagaaggaggaggcggcgatgcggtga

SEQ ID NO: 5014 - protein, 442 aa, Neurospora crassa
MAAPSSRPESNPPLYKQALDFALDVANGRHALSKLIPPALFLVDALLCGLIIWKVPYTEIDWAAYMEQVSQILSGERDYTKVRGGTGPLVYPAAHVYIYTGLYHLTDEGRNILLAQQLFAGLYMVTLAVVMGCYWQAKAPPYLFPLLTLSKRLHSIFVLRCFNDCFAVLFLWLAIFFFQRRNWQAGALLYTLGLGVKMTLLLSLPAVGIVLFLGSGSFVTTLQLVATMGLVQILIGVPFLAHYPTEYLSRAFELSRQFFFKWTVNWRFVGEEIFLSKGFALTLLALHVLVLGIFITTRWIKPARKSLVQLISPVLLAGKPPLTVPEHRAAARDVTPRYIMTTILSANAVGLLFARSLHYQFYAYVAWSTPFLLWRAGLHPVLVYLLWAVHEWAWNVFPSTPASSAVVVGVLGVTVAGVWFGAREEWEPGMKSSSKKEEAAMR

SEQ ID NO: 5015 - DNA, 1923 bp, Caenorhabditis elegans
  CDS (1)..(1923)
atgcgagagttaatctctcggctagtggttggcctattttcggtcaatgatacgggatttagagcagttgcggcgctgctgatgattgccgaagccgttttatcacatttagtcattttaaaagttaattacaccgaaatcgactggagcacgtatatgcaacaagtcgagtgctacgtgaacaaggggatcctcaactacacgcaaatcggcggtgacacgggtccctgcgtctacccggccggccatctcttcgtcttccgcttgctccactttttcacgagctccggccgcaatatccgcgcggctcagcacattttccaaggattctacatgtttaatctatttatggtctttcgaatccttcacaagactatgcggatcccgccgatcgtgctgcttctcgtgtcgatcaccggctatcggatacactcgattttcgtgttgcggctcttcaacgatcctctagctatgatgctcttctacgtggcaatggatcggtttttggagcaaaaatggcttgtcggatgtgttttttatagcctggcagtatcgattaaaatgaacgtgttgcttttcgcgccggcgctgttcttcacacttttgctcaacaatagttatatggcgacgttgggatatttgacagtttgcgggctaatccaactgtacgtcggtggcccattcctcctctacgactggaaatcgtatctgcaacaatccttcgatttgggccgagttttcatgttcaaatggactgtcaactggcgattcttgcccgaagaggtacccccccccgctgggtttttcctcgacaagcgattccacgcggcacttttggttgggcatttgacgtttttggcggttttcgcgtcgtacatgtggtttagacgcctaaacggtctccgcacctcggtctacctacgtcttttcgaaggcatcaccaccaccacaggcgccgtcgagacctactacgccttctgtacctcaaatctgatcggaatcgccttctcccgatcccttcactaccagttctacagttggtacttccatcagataccgttccttctcttctgcgactatccccacgtggcaagtgtctccacgattccgtggcgtcaatttctgtggaaagtaccgttgctcgccgccgtcgagctcagctggaacgtctatccatcgacgtggtggagttctgcgttgctccacgtttgccacgtcatcattttctggcatctaatcgtgacgagacccgcgcgacctggcgattcagtgtccagggagacgctccgaaggcttgagcagcggcagaaaatgcttgagcaagagctccgagagcatggacaagttgtgccgaaattcaaatttccagcgtttttggaagagcagcaggaagagcaagtggatgttcggaagaggatgaagcagccgattggggagaagaggacgaaaaagcagttggatgcggaatttgagacgtatttcgaggagcagatggacggatttcgggaggagcacacgatttattacacccacgatggaaaaccgcaagtttctgggcttgcaccactggataagccggaaaaaatgaagatgcacgagaaagttgcagcattatatacgcaggcgctgaagctacaagctcaattaaatcccaatgaaactccaacaacatggaaatcattcaaatttcccaaaaatgccgacaaaaacctgctggaaagctatctgaagcttcacggagcaggagcacaacaagactctgaagaatctgaaatttcctcagccgaagaagaagcttcagacgacgagaatagcggtgaggaagagcccaatacggagaaaattgagcaaaattcgtgtaaagctgaagcctcggagcaagagagcaatggaggtgtgaggcggcgaattttggtcgattaa

SEQ ID NO: 5016 - protein, 640 aa, Caenorhabditis elegans
MRELISRLVVGLFSVNDTGFRAVAALLMIAEAVLSHLVILKVNYTEIDWSTYMQQVECYVNKGILNYTQIGGDTGPCVYPAGHLFVFRLLHFFTSSGRNIRAAQHIFQGFYMFNLFMVFRILHKTMRIPPIVLLLVSITGYRIHSIFVLRLFNDPLAMMLFYVAMDRFLEQKWLVGCVFYSLAVSIKMNVLLFAPALFFTLLLNNSYMATLGYLTVCGLIQLYVGGPFLLYDWKSYLQQSFDLGRVFMFKWTVNWRFLPEEVPPPAGFFLDKRFHAALLVGHLTFLAVFASYMWFRRLNGLRTSVYLRLFEGITTTTGAVETYYAFCTSNLIGIAFSRSLHYQFYSWYFHQIPFLLFCDYPHVASVSTIPWRQFLWKVPLLAAVELSWNVYPSTWWSSALLHVCHVIIFWHLIVTRPARPGDSVSRETLRRLEQRQKMLEQELREHGQVVPKFKFPAFLEEQQEEQVDVRKRMKQPIGEKRTKKQLDAEFETYFEEQMDGFREEHTIYYTHDGKPQVSGLAPLDKPEKMKMHEKVAALYTQALKLQAQLNPNETPTTWKSFKFPKNADKNLLESYLKLHGAGAQQDSEESEISSAEEEASDDENSGEEEPNTEKIEQNSCKAEASEQESNGGVRRRILVD

SEQ ID NO: 5017 - DNA, 1507 bp, Homo sapiens
  CDS (7)..(1323)
gttaagatggcggctgggctgcggaaacgcggccggtccggttccgcggcccaggcagagggactctgcaagcaatggctgcagcgcgcctggcaagagcggcgcctgctgctgcgggagccgcgctacacgctgctggtggccgcctgcctctgcctggcggaggtgggcatcaccttctgggtcattcacagggtggcatacacagagattgactggaaggcctacatggccgaggtagaaggcgtcatcaatggtacctatgactatacccaactgcagggtgacaccggaccacttgtgtacccagctggtttcgtgtacatctttatggggttgtactatgccaccagccgaggcactgacatccgcatggcccagaacatctttgctgtgctctacctggctaccttgctgcttgtcttcttgatctatcaccagacctgcaaggtacctcccttcgtctttttcttcatgtgctgcgcctcttaccgtgtccactccatctttgtgctgcggctcttcaatgacccagtggccatggtgctgctcttcctcagtatcaacctcctgctggcccagcgctggggctggggttgctgctttttcagcctggcagtctctgtgaagatgaatgtgctgctcttcgcccctgggttactgtttcttctcctcacacagtttggcttccgtggggccctccccaagctgggaatctgtgctggccttcaggtggtgctggggctgcccttcctgctggagaaccccagcggctacctgtcccgctcctttgaccttggccgccagtttctgttccactggacagtgaactggcgcttcctcccagaggcgctcttcctgcatcgagccttccacctggccctgttgactgcccacctcaccctgctcctgctgtttgccctctgcaggtggcacaggacaggggaaagtatcttgtcgctgctgagggatccctccaaaaggaaggttccaccccagccccttacacccaaccagatcgtttctaccctcttcacctccaacttcattggcatctgcttcagccgctccctccactaccagttctacgtctggtatttccacacactgccctacctcctgtgggccatgcctgcacgctggctcacacacctgctcaggttgttggtgctggggctcatcgagctctcctggaacacatacccttccacatcctgcagctctgctgccctgcacatatgccatgccgtcatcctgctgcagctctggctgggcccgcagcctttccccaagagcacccaacacagcaagaaagcccactgaagtccacccctttccctcaggacctgagtctaccctcaggacctggggttggttggactctgcccttccaaataaaccttgctaagtccaaaaaaaaaaaaaaaaaaaaaaaaaaaaaaaaaaaaaaaaaaaaaaaaaaaaaaaaaaaaaaaaaaaaaaaaaaaaaaaaaaaaaaaaaaaaaaa

SEQ ID NO: 5018 - protein, 438 aa, Homo sapiens
MAAGLRKRGRSGSAAQAEGLCKQWLQRAWQERRLLLREPRYTLLVAACLCLAEVGITFWVIHRVAYTEIDWKAYMAEVEGVINGTYDYTQLQGDTGPLVYPAGFVYIFMGLYYATSRGTDIRMAQNIFAVLYLATLLLVFLIYHQTCKVPPFVFFFMCCASYRVHSIFVLRLFNDPVAMVLLFLSINLLLAQRWGWGCCFFSLAVSVKMNVLLFAPGLLFLLLTQFGFRGALPKLGICAGLQVVLGLPFLLENPSGYLSRSFDLGRQFLFHWTVNWRFLPEALFLHRAFHLALLTAHLTLLLLFALCRWHRTGESILSLLRDPSKRKVPPQPLTPNQIVSTLFTSNFIGICFSRSLHYQFYVWYFHTLPYLLWAMPARWLTHLLRLLVLGLIELSWNTYPSTSCSSAALHICHAVILLQLWLGPQPFPKSTQHSKKAH

SEQ ID NO: 5019 - DNA, 1455 bp, Drosophila melanogaster
  CDS (1)..(1455)
atggcgccgccaaaggccgccagccaccgtccggcggtgcggcgcaagaagtcgggcaccctggtggactccatcctggacaagtacctcaacgtgcgcttcttcaagtatctgctcctggagccggccgctctgcccatagttggcctcttcgtgctcctggcggagctggtcatcaacgtggtagtcatccagcgggtgccctacacagagatcgactgggtggcttacatgcaggagtgcgaaggcttcctgaacggcaccaccaactacagtctgttgcgcggcgacacaggacctcttgtgtatccagccgccttcgtgtacatctactcggctctctactacgtcacgtcccacggaacgaacgttcgcctggcgcagtacatcttcgccgggatctacctgctccagctggccctggtgctgaggctgtactcgaagagcagaaaggtgccgccgtatgtgctagtgctcagtgccttcacgtcgtatcggatccactcgatatacgtgctgcgactgttcaacgatcccgtggcagtgctgctcctctatgccgcactcaatttgttcctggacaggaggtggactctgggtagcaccttcttcagcttggcggtgggcgttaagatgaacatcctgctgtttgcgcctgcgctcttgctgttctatttggccaacctgggacttctgcggacgatcctgcagctggctgtctgcggagtgatacaactgctgctgggcgctcctttcctgctcacccatcctgtggagtatctgcggggcagctttgatttgggacgcatcttcgagcacaagtggacggtcaactatcggtttctgagcagagatgtgttcgagaaccgcaccttccacgtttcgcttttgggcctgcatctgctgctcctgctggccttcgccaagcccacttggacctttttccagagctacgtgcgcctgcgccgcattgaggatcagctgcagccgcaaatagcccagcagaacctcgagctgaaggcgcagaaaagaccaaagaaggtggaaaaggacaaggacaaggaccagaagaagtttacaaccgagcagcaatccttcctgaaggccttcgaaaagagcctgcagaaggcgtccggcggcaaggccactccggcgcccgcacaggcggaaccggaacgctatggcatccacttcgatcgctgcacccagctggccctgctgccgttcttcctgtgcaacctggtgggcgtggcctgctcccgatccttgcactatcagttctacgtctggtacttccactcgctaccctatttggcctggtcgacgccgtactcgttgggcgtgcgctgcctgatcctcggactgattgagtactgctggaacacctatcccagtacgaacttctccagcgctgcccttcacttcacccacatcataccgccatatcagttgtaa

SEQ ID NO: 5020 - protein, 484 aa, Drosophila melanogaster
MAPPKAASHRPAVRRKKSGTLVDSILDKYLNVRFFKYLLLEPAALPIVGLFVLLAELVINVVVIQRVPYTEIDWVAYMQECEGFLNGTTNYSLLRGDTGPLVYPAAFVYIYSALYYVTSHGTNVRLAQYIFAGIYLLQLALVLRLYSKSRKVPPYVLVLSAFTSYRIHSIYVLRLFNDPVAVLLLYAALNLFLDRRWTLGSTFFSLAVGVKMNILLFAPALLLFYLANLGLLRTILQLAVCGVIQLLLGAPFLLTHPVEYLRGSFDLGRIFEHKWTVNYRFLSRDVFENRTFHVSLLGLHLLLLLAFAKPTWTFFQSYVRLRRIEDQLQPQIAQQNLELKAQKRPKKVEKDKDKDQKKFTTEQQSFLKAFEKSLQKASGGKATPAPAQAEPERYGIHFDRCTQLALLPFFLCNLVGVACSRSLHYQFYVWYFHSLPYLAWSTPYSLGVRCLILGLIEYCWNTYPSTNFSSAALHFTHIIPPYQL

SEQ ID NO: 5021 - DNA, 1581 bp, Drosophila virilis
  CDS (1)..(1581)
atggcaccgccaagaaccaacaaccggcctgtgacccgacgcaaaaagcccagcaacctgttgcttttgcttaaagagaaatatgtcaattggaactttattaaatacctggcattcgagccggctgcgctgcccattgtttcggtgctgattgttttggccgaggcagttatcaacgtgcttgtcattcaacgtgtgccctacacggagattgattggaaggcctacatgcaggaatgtgaaggctttctgaatggcacaaccaattattcgctgctacgaggtgacaccggtccgttggtatacccggctgcatttgtttacatttactcgggactgtactatttaaccggccagggtacgaatgtgcgtctggcacaatacatattcgcctgcatctacttgctccaaatgtgcctcgtattgcgcctttatacgaagagccgcaaggtgccgccctatgtgctggtgcttagcgccttcacatcctaccgcatccactcgatctatgtgctccgactgttcaatgatcctgtggccattctactactatatgccgcgctaaatctgttcctggatcagcgttggacgctgggaagtatttgctatagccttgctgttggtgtcaagatgaacattttactgtttgctcccgcgttgttgctgttctatttggctaatctgggcgtgctcaggactctggtacagctcaccatttgcgcagtgctacagctgtttattggcgcgccctttctgcgtacccatcctatggaatatctgcgcggcagcttcgacctgggtcgcatctttgagcataagtggactgtcaactatagattcctgagcaaggaactcttcgagcagcgtgagttccacttggtcctgctggcgctgcatctgctgctgctcttatgctttgcaaagcctacctggacgttcttcagaagctacctgagactacgcgaggtgcagcaacagatagtgccacaaatactacacaaaaatcgcgagcagcagaaccaagcaaagattcaggcgaagaagtccaagcaattggtagagcagcagcaggaggaggaggacgagcaactgagtgccgagcaaaaatccttcctcaaggcattcgagaggagtctgcagcaaagcacgggtcagaaatctttagagccacatttgaaccaaaagcaagaacaatacgacatttattttgagccatgcacacagctggcgctgctacccttcttcctgtgcaacttcatcggtgtcgcctgcgcccggtcgctgcattatcagttctacatttggtacttccactctctcccgtatttggtatggtccacgccgtattcgcttggcgtgcgctatttaattctgggaattatcgagtactgctggaacacctatcccagcacaatggagtccagcatagcccttcacttgtgtcatctaattctgcttgtgggtgtggcacgccacgtttaccgcatcctgaggctcaacgctacggtaaagcaacagcagcggcaggaacaatctactttacaaaatggtcaaccaaagacgtccaaaaaatcgcaatga

SEQ ID NO: 5022 - protein, 526 aa, Drosophila virilis
MAPPRTNNRPVTRRKKPSNLLLLLKEKYVNWNFIKYLAFEPAALPIVSVLIVLAEAVINVLVIQRVPYTEIDWKAYMQECEGFLNGTTNYSLLRGDTGPLVYPAAFVYIYSGLYYLTGQGTNVRLAQYIFACIYLLQMCLVLRLYTKSRKVPPYVLVLSAFTSYRIHSIYVLRLFNDPVAILLLYAALNLFLDQRWTLGSICYSLAVGVKMNILLFAPALLLFYLANLGVLRTLVQLTICAVLQLFIGAPFLRTHPMEYLRGSFDLGRIFEHKWTVNYRFLSKELFEQREFHLVLLALHLLLLLCFAKPTWTFFRSYLRLREVQQQIVPQILHKNREQQNQAKIQAKKSKQLVEQQQEEEDEQLSAEQKSFLKAFERSLQQSTGQKSLEPHLNQKQEQYDIYFEPCTQLALLPFFLCNFIGVACARSLHYQFYIWYFHSLPYLVWSTPYSLGVRYLILGIIEYCWNTYPSTMESSIALHLCHLILLVGVARHVYRILRLNATVKQQQRQEQSTLQNGQPKTSKKSQ

SEQ ID NO: 5023 - DNA, 23 bp, Artificial sequence
  Primer sequence
atggaaggtgaacagtctccgca

SEQ ID NO: 5024 - DNA, 25 bp, Artificial sequence
  Primer sequence
tcagttgagctttttttccatagag

SEQ ID NO: 5025 - DNA, 1008 bp, Saccharomyces cerevisiae
  CDS (1)..(1008)
atgttgaggttatctttactgagatcaacagctactttgccagtgaaatgccaacgtcgtgggctaatattacctgcggcggcaatgtacaccttaggctcattaatatttggtaaggaagcaaggttggcggatgccatggaacgtggtgagttacataacaagaacgttgattatgcgaaagaagctgaagagcgtaccgagttacgtattagggccctggctaatactcggccaatggaacctcggtacaacggccatgttccccttcatcggtacgagaaattgctgctgtttgcaatttccggttggaattcatttttccatcctgaagatggttataatattgtacaattgggtgaggcaactgcattgccggtcttcttggagaatttgaagcaaacaatgttaagtgattcctctgggaggcgcattttgaaggaacaacccaatatcacaacagagattttgcatatggacaaactagctaaattgccacataacacgtttgggtatgtatattaccaatggttgaaaagagaaaacgtttctccggacactagagcacctgtcaaatttatcgacgatcctatgcatgcatatatctttaagaggtatagacaatgccacgatttctatcacgctataaccaacatgcctattatcattgagggggagatcaccataaaggctcttgaaggtgccaacctgggcgtcccaatggccattctcggtggtatccttgcacctttacgtttgaaaaaggtgcaaagaaaaagattatataatatatatctcccttgggctgtcagaacaggtttaagctgcaagccattgatcaacgtgtattgggaggaaatgctggagaaggatgttactgctttgaggaaagagctaaagataacactccctccggatctaaggacaatgaggaaggagcgtgcagcccttaggaaggagattgacgcaaaatacaactcacagaaacgagccacgactccagcatga

SEQ ID NO: 5026 - protein, 335 aa, Saccharomyces cerevisiae
MLRLSLLRSTATLPVKCQRRGLILPAAAMYTLGSLIFGKEARLADAMERGELHNKNVDYAKEAEERTELRIRALANTRPMEPRYNGHVPLHRYEKLLLFAISGWNSFFHPEDGYNIVQLGEATALPVFLENLKQTMLSDSSGRRILKEQPNITTEILHMDKLAKLPHNTFGYVYYQWLKRENVSPDTRAPVKFIDDPMHAYIFKRYRQCHDFYHAITNMPIIIEGEITIKALEGANLGVPMAILGGILAPLRLKKVQRKRLYNIYLPWAVRTGLSCKPLINVYWEEMLEKDVTALRKELKITLPPDLRTMRKERAALRKEIDAKYNSQKRATTPA

SEQ ID NO: 5027 - DNA, 699 bp, Nostoc sp. PCC 7120
  CDS (1)..(699)
atgcaaacgataaatactcacccagttcagccgttaaaacttgactcggaagtgcaacggcagatgaatttccagtttttgacggcgatgaaagcttttttcacgttactaacaacagaagacaacatagatgcggtggatgaacttagtagcatcttaattcacagccgggcctttgaattggcggcggaaagtatgcagactgatcctgaggtagcgcatttgatcaaagagcgatattatgcgccagtccacgacgtagagcagctattgcaatatccggctgattctttgggttatctctatgcctcgactctcaaagaatctggctttgaacgcatagatcctgaaattattgtcaattcagatacagcttacattgagcatcgctggcagcaaacccatgatatttggcatcttgttacgggattcagcgccagtggtattgacgaaataggattacaagccttttatctagcacaatttcgtctacccttagccagtatgctaattgccaatgccttgatgagtgccactttactcgctccagaagacttaccgcaacttctccagactattgaacgaggttggacaatgggtttgcaagccaaaccgttattcgcacaaaagtgggaagaagcttgggaaaaacctttatcccagtggcgggatgaattaaatattcaagcttttagttag

SEQ ID NO: 5028 - protein, 232 aa, Nostoc sp. PCC 7120
MQTINTHPVQPLKLDSEVQRQMNFQFLTAMKAFFTLLTTEDNIDAVDELSSILIHSRAFELAAESMQTDPEVAHLIKERYYAPVHDVEQLLQYPADSLGYLYASTLKESGFERIDPEIIVNSDTAYIEHRWQQTHDIWHLVTGFSASGIDEIGLQAFYLAQFRLPLASMLIANALMSATLLAPEDLPQLLQTIERGWTMGLQAKPLFAQKWEEAWEKPLSQWRDELNIQAFS

SEQ ID NO: 5029 - DNA, 663 bp, Nostoc sp. PCC 7120
  CDS (1)..(663)
atgcaatctccagagaaaatagatccaacatgggaagatagcgtcattgatagctttattagctttgtcagatcatacgatggcgatttcacctgcatttacaaactggctgataccgtaagtgatgagtacagtttgcaaaagataattgactttctctctagcacccctcagggaaaacaagctttccaaaaacgtccacaattaggtgtggtggatttaccaaaactccatcaattgccaactgacactttgggatatgtctatgctgaccagatgctgcaaaataatttgcagcctttacagtcccacgaaatagacaatgattatcaatttttcaaaacgcatattaccgagacacacgacctctggcatatagttactggagccgataccagcattttgggagaaatccaattagaagctttttatgtgtcgcaattgtacgctagtcgtttttggttggcattactagcaaaaaacttgctcaaagccgtaatttacgatatagagctttccacgccatacatggatgcgatctccacaggctgggtaatggcaaagcaagccaagcctttgtttggtctggaatggaatctattgtgggaaaagcctctagcagatgtgcgtacttctttaaatattattctccctgtaaattaa

SEQ ID NO: 5030 - protein, 220 aa, Nostoc sp. PCC 7120
MQSPEKIDPTWEDSVIDSFISFVRSYDGDFTCIYKLADTVSDEYSLQKIIDFLSSTPQGKQAFQKRPQLGVVDLPKLHQLPTDTLGYVYADQMLQNNLQPLQSHEIDNDYQFFKTHITETHDLWHIVTGADTSILGEIQLEAFYVSQLYASRFWLALLAKNLLKAVIYDIELSTPYMDAISTGWVMAKQAKPLFGLEWNLLWEKPLADVRTSLNIILPVN

SEQ ID NO: 5031 - DNA, 681 bp, Arabidopsis thaliana (mouse-ear cress)
  CDS (1)..(681)
atgattattgaaagagctcgagttccgttgagccgatggcaacaagcggccgtggcgatgggatctgctctcggtgcgttggttgatcctcgtagagcggatctaatcgctgctctcggcgaaactaccggtaaaccagcttttgaaatggttcttgagagaatgaagaagagcgaagaaggaagagctatattattggagcgtcctcgagttgtgtcagagcaagtaggtcatgcttgggatctaccagaaaacacatttggagctgcatatgctaaattcatgggatctagaaacttctctcccgatgatcgtccgcccgtaagattcatggagacggatgaattggcttacgtagcgacacgggcacgcgaagttcacgacttatggcacactctgtttggccttcctacgaatcttatcggcgagtcgtctttgaaagttatcgagtttgagcaaatgtatcttccgatgtgtatgctctctgtgattggaggtactgtgaggttcaacgagaagcaaagatcaatgttcttgaagcattaccttccttgggctgttcgtgctggaagacaatgcactgacctcatgtgtgtgtactatgagcgtcactttagtgaagacttggagcaagttcgtagaaaatggggaatcatccctgctcctcaacatcctaaatag

SEQ ID NO: 5032 - protein, 226 aa, Arabidopsis thaliana (mouse-ear cress)
MIIERARVPLSRWQQAAVAMGSALGALVDPRRADLIAALGETTGKPAFEMVLERMKKSEEGRAILLERPRVVSEQVGHAWDLPENTFGAAYAKFMGSRNFSPDDRPPVRFMETDELAYVATRAREVHDLWHTLFGLPTNLIGESSLKVIEFEQMYLPMCMLSVIGGTVRFNEKQRSMFLKHYLPWAVRAGRQCTDLMCVYYERHFSEDLEQVRRKWGIIPAPQHPK

SEQ ID NO: 5033 - DNA, 792 bp, Caenorhabditis elegans
  CDS (1)..(792)
atgtctgctcaaaagctatacgcatcgcatgttcccttggcaccgctgtctcggatgcttctcgggattggatcagcagtaacagcgatctcggatccaaaaagaggagatatggtggcagcgatgggcgaaactactgcaattggaccagttttagaaaatattcgaaaaagaatggaatctgatgttgttggaaagcgacttcttctcgaaaaaccaagaatttcaaatggaacaattgatagaaagtggctaagacagttaccggatggaacattaggaaaattgtattcaaactttctcgatcgtttgaacacatctccagatgctcggcccactgtcaagtatatcgataatttggagcatctttatgttatgcaaaggtatcgcgaaacacacgacttcacccacatcgcattggagcagaaaacgaacatgctcggcgaggtaacagtcaaatatttcgaaggaattcaatatgggcttccaatgtgtgtcactggtggaatatttggaggtgccaggcttttaacaaaaaatcgccaagaacttgtcgaccggaacctcccttgggttgtggagcaggccacgaatgcacgattcttcatggctttcgactgggaaaatcactttgaaaagcagctcagcgaggtgcagaaggagctaaatataacgccattatctgagcttctggacctcccggaaatggaaccggatgtccctgatattctcttcagtaaaggacatccgggattttggagagtcctccaggcggttgatatgatgatttaa

SEQ ID NO: 5034 - protein, 263 aa, Caenorhabditis elegans
MSAQKLYASHVPLAPLSRMLLGIGSAVTAISDPKRGDMVAAMGETTAIGPVLENIRKRMESDVVGKRLLLEKPRISNGTIDRKWLRQLPDGTLGKLYSNFLDRLNTSPDARPTVKYIDNLEHLYVMQRYRETHDFTHIALEQKTNMLGEVTVKYFEGIQYGLPMCVTGGIFGGARLLTKNRQELVDRNLPWVVEQATNARFFMAFDWENHFEKQLSEVQKELNITPLSELLDLPEMEPDVPDILFSKGHPGFWRVLQAVDMMI

SEQ ID NO: 5035 - DNA, 819 bp, Schizosaccharomyces pombe
  CDS (1)..(819)
atgttttatcttaatgctcatcttgaaattaataaggtcgtagacgttgtaatgtcactttcaaagaagtttttaaagccttcagttgcttccaaccaacttcgtttgctttttacagcagctgagaggaaggttaattatccaggacatgttcctttatcaccgctgcaacgtatttttttggttgcaggatcagcaatcatgggattgaaggcaccatggagaggcggagatatgatatctgtcctaggagatgcatctggtcaaccattcttccttcatcgattactgaataaaatgctcgttgataaaacaggtcgtgaaattttgaaagataaacctagaatgacatcgaagtctttaaacttaccatttttgcggacccttccgccaaataccctaggtaaaatttatgttgactggatagacaaagagcatgttggacccgatactcgaagccctacccgttttgtagatgacccagaggaggcatatgttatgcaaagatatcgtgaatctcacgatttttaccatgctatatgtaacatgcctacaaacattgaaggagaattagctattaaatggctggaatttgttaacatgggtttaccagttggagctctctctgctttatttggtcctctacgcttaaattgtgaacaggcttcaaggtttcgtcgggtatacattccatggtcgattcgtaatggtttgaatgcaaaaacattgatcaatgtctattgggaaaaggaactgacgaacgacattgaggacgtccgtagacgaatacgaattgaggctgctcctccgctggtttag

SEQ ID NO: 5036 - protein, 272 aa, Schizosaccharomyces pombe
MFYLNAHLEINKVVDVVMSLSKKFLKPSVASNQLRLLFTAAERKVNYPGHVPLSPLQRIFLVAGSAIMGLKAPWRGGDMISVLGDASGQPFFLHRLLNKMLVDKTGREILKDKPRMTSKSLNLPFLRTLPPNTLGKIYVDWIDKEHVGPDTRSPTRFVDDPEEAYVMQRYRESHDFYHAICNMPTNIEGELAIKWLEFVNMGLPVGALSALFGPLRLNCEQASRFRRVYIPWSIRNGLNAKTLINVYWEKELTNDIEDVRRRIRIEAAPPLV

SEQ ID NO: 5037 - DNA, 972 bp, Debaryomyces hansenii CBS767
  CDS (1)..(972)
atgcatatattgcaagcatgtaaagggatggagcatcgctctatttcatcgcttattgtaaaccaaaaaagacaatttttacttacagcaacagctactctagtggggtcaatgataatgaacgaaaataatcgtttagcaaataagatggagaagggacaattacattacaaagatgccaatgccatatttaacaaggcattagaagctcaggaaagtaaatacttttcaagaagtaaactgaattatcccgggcatgtaccattatttaccttcgaaaaattattgatgattgctggctcctcgcttggtgcatatttacatcctgaaagaaatgaatttatagtcgctctaggtgaatctacggcaataacacccgttttaaccaagttacaaacgcaaatgttgtcagacccagttggccgacaaatattaagagaaagaccgagaatcacatccacgtcattagatctagataagctcagagagctaccagataatacaattggtaagacgtatgtcaattggttggatagggaaggtgttagtcctgatacaagagttcctgtaaaatatatcgatgacgaagaattagcatacatttatcaaagatacagagaatgtcatgatttttaccattctataacaggattaccgataataatagaaggggagattgcagttaaaatattagaatttatgaatattggaatccctatgtctggattaggggctttgtttgctcctttgagattaaaacctagtcaaaaagaacgcttgtataatatttattatccttggggattcaagagtggtcttaattcaaaacctttgattaatgtgtactgggaaaatattttagaggaagatataaacgagtttagacataaaatgggaattgaacaacctccagacttgagaaatttaaggaaaaagtacttcgaagaattaaaaaagaaaaagaaggtctaa

SEQ ID NO: 5038 - protein, 323 aa, Debaryomyces hansenii CBS767
MHILQACKGMEHRSISSLIVNQKRQFLLTATATLVGSMIMNENNRLANKMEKGQLHYKDANAIFNKALEAQESKYFSRSKLNYPGHVPLFTFEKLLMIAGSSLGAYLHPERNEFIVALGESTAITPVLTKLQTQMLSDPVGRQILRERPRITSTSLDLDKLRELPDNTIGKTYVNWLDREGVSPDTRVPVKYIDDEELAYIYQRYRECHDFYHSITGLPIIIEGEIAVKILEFMNIGIPMSGLGALFAPLRLKPSQKERLYNIYYPWGFKSGLNSKPLINVYWENILEEDINEFRHKMGIEQPPDLRNLRKKYFEELKKKKKV

SEQ ID NO: 5039 - DNA, 789 bp, Yarrowia lipolytica CLIB99
  CDS (1)..(789)
atgttccgaacggtgcccaaaaccacactattggcgccaattcagcgccgaacgctcttaaacggcaactaccccaaggcataccccgaacacgtgcctctcacgtgtctgggacgagccgtgcttgctgtaggcagtgggttcggcacctttttcgactctcgacgaggcgatctggttgccactcttggagaagcaaccgcccagccttacttcatctacaagctgcgagagcagatgctcaaagacccgaccggtcgacgtctgctgcgcgaacagccccgaatgaccagcaagagtctggatctcgacaaactgcgaaacatgaaggtcggaagcattggacgaacatacgtggagtggctggacaaggagggggtctcacctgatacccgagctcaggtgcgatacattgacgatcccgagtgcgcttatgtcatgcagcgataccgtgagtcccatgacttctaccatgccctgacgggtttgcctatcatcatggagggtgagctggctctcaaggcgttcgaatgggccaatacaggtctgcccatgagtggtctgggcatggtcctcactcctcttaagttcaagcccaagcagcgcaagcggtactttgacgtctaccttccctgggctctctacaatggcttccgatccaaacctgtcattaatgtgtattgggaagaggttctggagaaggacgccgaggagctgagacgagatcttggaatcgaacagcctccggatctccgacagatgaagaaggatatggccaagaagaagtga

SEQ ID NO: 5040 - protein, 262 aa, Yarrowia lipolytica CLIB99
MFRTVPKTTLLAPIQRRTLLNGNYPKAYPEHVPLTCLGRAVLAVGSGFGTFFDSRRGDLVATLGEATAQPYFIYKLREQMLKDPTGRRLLREQPRMTSKSLDLDKLRNMKVGSIGRTYVEWLDKEGVSPDTRAQVRYIDDPECAYVMQRYRESHDFYHALTGLPIIMEGELALKAFEWANTGLPMSGLGMVLTPLKFKPKQRKRYFDVYLPWALYNGFRSKPVINVYWEEVLEKDAEELRRDLGIEQPPDLRQMKKDMAKKK

SEQ ID NO: 5041 - DNA, 999 bp, Kluyveromyces lactis NRRL Y
  CDS (1)..(999)
atgtttactgtaagtaagaaatccttacaagcaagtcgtaacgctttcagtccattgaataatagcaagagaacaatcgtatttactgcaatagcagcttttggagacctattgattgggaaagatgttagactagcagatgctatggagaaagggaatctgcataataaaaatggagagtatgagcataagatggaacaaaggactcaagaaaggttaaatgcattacgaaacacaagaccgatagaacctaattatgagggtcatgttccactttggtggtatgagcgaatgatgctcttcggtatcagtggtttaaaatcttatttccacccggagaacggtgagaacatcgttcaattaggagaagctactgctctaccttgctttcttgaaagtttaaaacggacaatgttgttagataagactggtagaaggattctacaagacagaccaaacatcacatcggaaagccttgacatggaacgattgtcaaagatggataaaaattcagttggctatacgtactacaaatggttgatgaaagagggggtctctccagacacaagggcaccagttacttatatcgatgatcctgtccatgctttcatatttaagagatatagacaatgccatgacttttatcatgcaataaatgacctaccaatcataatcgaaggtgagattgcagttaaagcatttgaggcatcaaacattggtgtcccaatggctgcacttggtgctctattagcaccattgagattaaagaaagtgcaaaaggaaagactttactccatctacctcccatgggcagtcaaagcagggctgaattgcaaacctctcatcaatgtctattgggaagaaatcttggataaggacatagacgaactaagaagagaattaaacgtcacaccacctccagatttgagaaaaattagaaaggaaagagcgaaacaaagaaaacagttcaagcttaagtatgagacctacgagaaatga

SEQ ID NO: 5042 - protein, 332 aa, Kluyveromyces lactis NRRL Y
MFTVSKKSLQASRNAFSPLNNSKRTIVFTAIAAFGDLLIGKDVRLADAMEKGNLHNKNGEYEHKMEQRTQERLNALRNTRPIEPNYEGHVPLWWYERMMLFGISGLKSYFHPENGENIVQLGEATALPCFLESLKRTMLLDKTGRRILQDRPNITSESLDMERLSKMDKNSVGYTYYKWLMKEGVSPDTRAPVTYIDDPVHAFIFKRYRQCHDFYHAINDLPIIIEGEIAVKAFEASNIGVPMAALGALLAPLRLKKVQKERLYSIYLPWAVKAGLNCKPLINVYWEEILDKDIDELRRELNVTPPPDLRKIRKERAKQRKQFKLKYETYEK

SEQ ID NO: 5043 - DNA, 993 bp, Candida glabrata CBS138
  CDS (1)..(993)
atgttacaatcaactaaggttacgaagtcggtgctgacaaatgtgttaagagtggagcaaagacgtggatttttattaagtggtgctgctgtagctctgggtagcacatacatctttggaagagatgctaagctagctgatgctatggatcgtggtgagttgcataacaagaacgaagattatgcgaaattaagggcagagcgtactgagcaacgtattaaggccttgagcaacaacagacctatggagccacgatatgaagggcatgtgcctctgtaccttcatgaaaagatgctactttttgctatttctggtattagggcctttttccacccagagaacggtattaacattgtccagttaggtgaggcaactgcattcccaatattcttggaaaatctaaagcaaacgatgcttgccgatgaaactggaaggcgcatccttagggatcagccaaacgtccgaactgatattttagatatggataagctatcaaagttaccaaagaacacttttggttacactttttataaatggctagagaaggaaaaggtctcgcctgatactagagcaccagtcacatatattgacgacccaatccatgcttttgtgttcaagagatataggcaatgtcacgatttttaccatgccttgaatgatttgccaattatcattgagggggaaattattgtaaaggcattagaatctgcaaacatgggtatcccaatggctactttaggttggatgttggctccactaagattgaaaaaagcacaaagagacagattatatggaacttatttaccttgggcgatcaaaacaggtttgacttgcaagccacttattaatgtctattgggaagagcttcttgaaaaggatgtggaagaattgagacaagaacttggtatcaagatgccacctgatctaagagctatgagagctaagcgtaaagcaatgataaagcgtctcaatgagaaatatcaaaaaaactag

SEQ ID NO: 5044 - protein, 330 aa, Candida glabrata CBS138
MLQSTKVTKSVLTNVLRVEQRRGFLLSGAAVALGSTYIFGRDAKLADAMDRGELHNKNEDYAKLRAERTEQRIKALSNNRPMEPRYEGHVPLYLHEKMLLFAISGIRAFFHPENGINIVQLGEATAFPIFLENLKQTMLADETGRRILRDQPNVRTDILDMDKLSKLPKNTFGYTFYKWLEKEKVSPDTRAPVTYIDDPIHAFVFKRYRQCHDFYHALNDLPIIIEGEIIVKALESANMGIPMATLGWMLAPLRLKKAQRDRLYGTYLPWAIKTGLTCKPLINVYWEELLEKDVEELRQELGIKMPPDLRAMRAKRKAMIKRLNEKYQKN

SEQ ID NO: 5045 - DNA, 972 bp, Ashbya gossypii
  CDS (1)..(972)
atgttacgaggaaaggcgacggtagcagctgctcagcccaggcggacttttgtcctagccggtatgctttccttggggcagcttgtgatcggaagggaggcgcggcttgcggatgccatggccagaggagacctgcacaacaagaatgaggactaccaggcaaagcagctgcaggagctggaggcgcggttgcagggcctgcggaacacgcggccgtcggcgccgcggtacgagggccacgtgccgctgtggtggcacgagaaggcgctgctgttcggtatctcgggcctgcggtcgttctttcaccccgagaacgggatgaacatcgtgcagctgggcgaggctgcggcgatcccgtgcttcttggagtccctgcggcgcaccatgctgtcggacgctaccgggcggcgcatcctgagggagcagccgaacattagcgagccagacctggacatggacaagctcgcgcagctgcccacgaacacgctgggtcacacgttctaccgctggctgcgcaaggagggcgtgacgccggacacgcgcgcgccggtaacctacattgacgaccccgtgcacgcctacatcttcaagcgctatcgccaatgccatgacttctaccacgcgatcaccgggctgccgatcatcatcgagggcgagattgctgtcaaggcgctggaagcggctaatatcggcgttcccatggccgcgctaggcgccctgctggcgccgttgcgcctgcgggcggcgcaacgcgagcgcttgcgcaacatctaccttccctgggccattgaaacgggcctgagcgctaagccgcttatcaacgtgtactgggaggagctgctggagcacgatgtggaccagctgcgcgcagagctgggcatccgcgtgccgccagatctccgcctcattagacaggagcagctccagcgccgcagaagcttcaagatgaagtacgagtcctttgaaaattga

SEQ ID NO: 5046 - protein, 323 aa, Ashbya gossypii
MLRGKATVAAAQPRRTFVLAGMLSLGQLVIGREARLADAMARGDLHNKNEDYQAKQLQELEARLQGLRNTRPSAPRYEGHVPLWWHEKALLFGISGLRSFFHPENGMNIVQLGEAAAIPCFLESLRRTMLSDATGRRILREQPNISEPDLDMDKLAQLPTNTLGHTFYRWLRKEGVTPDTRAPVTYIDDPVHAYIFKRYRQCHDFYHAITGLPIIIEGEIAVKALEAANIGVPMAALGALLAPLRLRAAQRERLRNIYLPWAIETGLSAKPLINVYWEELLEHDVDQLRAELGIRVPPDLRLIRQEQLQRRRSFKMKYESFEN

SEQ ID NO: 5047 - DNA, 1068 bp, Plasmodium yoelii yoelii
  CDS (1)..(1068): Xaa of translated CDS can stand for any naturally occuring amino acid which can be translated from respective CDS-codon
atgagcaactttgcaaaaatattccaatcaaattggatagatctaaataagttgggaaagcttgaaatatttttaaaaacaatattaggaatttataaagcaccaaataggacacatttattagcacatgcagcagatatatcatctttttatgcagttaaaaatatttatgaatatatgaaaaatgatgatgaaggaaaagagatattaaaaaataaaccattattaataagacaagatatccaatttaatgaattaaaaaaattgcctaaaaatactttgggttataaatatatggaatttttagaaacatataaacttcatgcacatgatagagaagtagctcatttttttgataatattaattattcatatatattaacaagatatagacaaatacatgatataggccatgtagtttataatttaaatatatcaattgaatcagaagctgcattaaagatgattgaattaatacatacaaaattgcctataacattactagctattttagtagcaccttttatgtcacctttatatcggtttcaatacatatttaaagataaaattcctccaaattttcttaatcccaattttgattatacatataragatgattataattatatagatgaattatcattaaaacaatatgtatataatttaacagaatattttcatattgataaaataaataataatttattttttcaaaaattatataaatattattttgacaatttaaataattctaatcatattcgaggtactattatttatggatataataatgaaaataataatgatataatttttgatgatataaataatgaatatatttttttaaagaatccggaaaaaaattattttctttttaaatataaacctagacaaacattattaaatcaattatatccttgggcatatatggctggaatggctgcaaaaaaacctcttcattctattcatattgaaaattggctagacaaagatattgatatttttagaaaaacatataacataattccccttcctgaccacttgaatttaatgtctggtattaactaa

SEQ ID NO: 5048 - protein, 355 aa, Plasmodium yoelii yoelii
  misc_feature (204)..(204): Xaa can be any naturally occuring amino acid
MSNFAKIFQSNWIDLNKLGKLEIFLKTILGIYKAPNRTHLLAHAADISSFYAVKNIYEYMKNDDEGKEILKNKPLLIRQDIQFNELKKLPKNTLGYKYMEFLETYKLHAHDREVAHFFDNINYSYILTRYRQIHDIGHVVYNLNISIESEAALKMIELIHTKLPITLLAILVAPFMSPLYRFQYIFKDKIPPNFLNPNFDYTYXDDYNYIDELSLKQYVYNLTEYFHIDKINNNLFFQKLYKYYFDNLNNSNHIRGTIIYGYNNENNNDIIFDDINNEYIFLKNPEKNYFLFKYKPRQTLLNQLYPWAYMAGMAAKKPLHSIHIENWLDKDIDIFRKTYNIIPLPDHLNLMSGIN

SEQ ID NO: 5049 - DNA, 1044 bp, Neurospora crassa
  CDS (1)..(1044)
atggaagtgacggccctcagacgatccgcggctctagtagctcgcgccagcagccagaatgcaatccggcctgccgtatgcgccgccatcagcagcacatcaccaacaccaccgacccagatccagacacagcaaacaagacaattctcggcccttaaccgcccaccaccaaactaccctggccatgtccctctcacccgcctcgagcgcttcggcctcttcgtcggctcaggcctcatctccctcgccgaccccctgcgcggcgacctaatagcctccttcgccgaagccaccgcaacgccctacttcatctaccgcctgcgcgacgccatgctgtcccaccccacgggacgtcgcatcctgcgccaacgaccgcgcatcacctcccaatctctcaacatcccttacctgcgttccctgccgcccaacaccgtcggacgaacctacattgactggctcgaccgcgaaggggtatctcccgatacgcgctcggcggtgcggtacatcgacgacgaggagtgcgcatacgtgatgcagcggtaccgcgagtgccacgatttctaccacgctttgacgggcttgccgatcgtccgggagggcgaggtggcgctgaaggcgtttgagtttgcgaataccctgttgccgatgacggggttcagcgttttcgcggcgttcacgatgaagaagagcgagcagaagcggtttaggaagatttacttcccctgggcagttaagaatggactgcgggccaaggaggtgattaacgtcttttgggaggaggagttggagcgggatgtaaatgatttgaggagggagttgggcgtggaaccgccgccggatctgagggagatcaggaagcgggagagggaagagaagaggaggagaaaggagatggaacggatgctgagcgggcgcgggacagaggacgtcatccagaaggcggagaaggaagctgaagtggtggcggaacgggtgaaggagatgaggaatgaggtggttgagaaggttggcgaggttgtcgggtcttcggctatgagaggatag

SEQ ID NO: 5050 - protein, 347 aa, Neurospora crassa
MEVTALRRSAALVARASSQNAIRPAVCAAISSTSPTPPTQIQTQQTRQFSALNRPPPNYPGHVPLTRLERFGLFVGSGLISLADPLRGDLIASFAEATATPYFIYRLRDAMLSHPTGRRILRQRPRITSQSLNIPYLRSLPPNTVGRTYIDWLDREGVSPDTRSAVRYIDDEECAYVMQRYRECHDFYHALTGLPIVREGEVALKAFEFANTLLPMTGFSVFAAFTMKKSEQKRFRKIYFPWAVKNGLRAKEVINVFWEEELERDVNDLRRELGVEPPPDLREIRKREREEKRRRKEMERMLSGRGTEDVIQKAEKEAEVVAERVKEMRNEVVEKVGEVVGSSAMRG

SEQ ID NO: 5051 - DNA, 684 bp, Oryza sativa
  CDS (1)..(684)
atgcagggggcgcgtgttaatctgaaggggtggcaacaggctgctgttgcattcggttctgcatttggggccttgcttgaccctagaagagctgatctgatagctgctcttggggagactactgggaagccagcatttcagcgtgtgcttcagcggatgaggaacagtgctgaaggcagggatgttctcctggagcgtcctcgagttatatccacacaagtttctcatgcctgggacatgcctcagaacacatttggtgcagcatatgctcagttcatgggatcaaggaacttctcaccggatgaccgcccacctgtccgtttcatggatacagatgagcttgcgtatgttgcgacccgcgcccgtgaagtccatgacttttggcatgtgctgttcggccttcctacgaacctgattggagagactgcccttaaggtcattgagtttgaacagatgttccttccaatgtgcatgctttcagtcgttgggggctctgcgaggttcaatgagaaacaaaggacactgttttttcagcattatttcccatgggcttcaaaagcaggtcttaagtgcacagatcttatgtctgtgtactatgagaagcattttcatgaagatttggatgaagtgaggaggaactggggaattataccatgccctgatcccaaaaggagcagtgtttag

SEQ ID NO: 5052 - protein, 227 aa, Oryza sativa
MQGARVNLKGWQQAAVAFGSAFGALLDPRRADLIAALGETTGKPAFQRVLQRMRNSAEGRDVLLERPRVISTQVSHAWDMPQNTFGAAYAQFMGSRNFSPDDRPPVRFMDTDELAYVATRAREVHDFWHVLFGLPTNLIGETALKVIEFEQMFLPMCMLSVVGGSARFNEKQRTLFFQHYFPWASKAGLKCTDLMSVYYEKHFHEDLDEVRRNWGIIPCPDPKRSSV

SEQ ID NO: 5053 - DNA, 801 bp, Mus musculus
  CDS (1)..(801)
atggcgaccctgctgctgcttcgctccctgcgcctccaccgcagtcttcggccccgtacgcggccagctgtagatgtacccctcagggccgggagccatggcgcccgcctgctgtacccggaccacatcccaaccaccccgctgcaaaagatgctgctggctgcgggcgcggcgggaatggctctctacaacccctatcgccacgacatggttgcagttctaggggagaccacaggatgccacaccctgaaattcctcagggaccagatgaagaaggatccagagggtgcccagattctacaagagcgtcccaggatctccctgtctaccctcgacctgagcaagcttcagagcctgcctgaaggctcactgggccgtgagtatcttcgcttcctggatgtgaataaggtctctccagacacacgagcacctacacgctttgtggacgatgaagagctagcctatgtgatccagaggtaccgtgaagtgcacgacatgctccacaccctgctgggcatgcccaccaacatgctcggagaggttgtggtaaagtggtttgaggctgtgcagaccggcctaccaatgtgcatcctgggagcactcttcggacccatccgcctccgtactcagagcctccaagtgctgttctcggagctgatcccttgggcgattcagaacgggcgcagggccccatgtgtcctcaacatctactatgagcagcgttgggagcagcccctgacagccctgcgggaggagctgggcatcagtcctcccccaaaacatatccagggcctggcctag

SEQ ID NO: 5054 - protein, 266 aa, Mus musculus
MATLLLLRSLRLHRSLRPRTRPAVDVPLRAGSHGARLLYPDHIPTTPLQKMLLAAGAAGMALYNPYRHDMVAVLGETTGCHTLKFLRDQMKKDPEGAQILQERPRISLSTLDLSKLQSLPEGSLGREYLRFLDVNKVSPDTRAPTRFVDDEELAYVIQRYREVHDMLHTLLGMPTNMLGEVVVKWFEAVQTGLPMCILGALFGPIRLRTQSLQVLFSELIPWAIQNGRRAPCVLNIYYEQRWEQPLTALREELGISPPPKHIQGLA

SEQ ID NO: 5055 - DNA, 1068 bp, Plasmodium falciparum
  CDS (1)..(1068)
atgtacaattttgtaaaaatatttcaatctaattttattgatataaataaattgagcaaatttgaaatatttttaaagacaatatttcgaatttatagttctcctggaagaacacatttattagctcatgctgctgatatatcagctaaatatgcagtgaggaaaatatatgaatatatgagaactgacgaagaagggattaggatattaaaagaaaagcctttattaatacgtcaagatatatgttttaatgaattaaagaagttaccaaaaaatacattaggttataaatatatggaatttttagaaacttataaattacatgcacatgatagagaagtttcacattttataaaagatataaacgaatcttatatattaacaagatatagacaaattcatgatatagctcatgtagtatataatttaaatatatcaatagaagcagaagcagcattaaaattaatcgaattaatacaaacaaaattacctataacattacttgcaattttaatagcaccatttatgacacctttatataggttccaatatatatttgagcataatattccttctaattttttatgtcctaattttgattatacatataatgatgattataattatattgatgaaatgtctttaaaacaatatgaatattatttaactgattattttcatgtagaaaaaagagaaagccaatccttttattacaaattatataaatattatttcgataatttaaataattcttcacatgttagaggttctattatatacggatatcaaaataagaattataatgatatacattatgacaaattaaataatgaatatttatacttaaaaaataatattaaaaattattttcatttccaatataaaccaagaaaactactattaacaaatttatatccatgggcttataaaactgcaatacaaacaaacaaaccattacattcaatatatgtagaaaaatggtttgataaagatattgatctgtttagaaagaaatataacataactcctctaccatccaacttaaacttgatggccggcattaattaa

SEQ ID NO: 5056 - protein, 355 aa, Plasmodium falciparum
MYNFVKIFQSNFIDINKLSKFEIFLKTIFRIYSSPGRTHLLAHAADISAKYAVRKIYEYMRTDEEGIRILKEKPLLIRQDICFNELKKLPKNTLGYKYMEFLETYKLHAHDREVSHFIKDINESYILTRYRQIHDIAHVVYNLNISIEAEAALKLIELIQTKLPITLLAILIAPFMTPLYRFQYIFEHNIPSNFLCPNFDYTYNDDYNYIDEMSLKQYEYYLTDYFHVEKRESQSFYYKLYKYYFDNLNNSSHVRGSIIYGYQNKNYNDIHYDKLNNEYLYLKNNIKNYFHFQYKPRKLLLTNLYPWAYKTAIQTNKPLHSIYVEKWFDKDIDLFRKKYNITPLPSNLNLMAGIN

SEQ ID NO: 5057 - DNA, 827 bp, Drosophila melanogaster
  CDS (21)..(827)
ttctttgtcttaaaagtaaaatgatgcaacgctgtttgcgtctccaaaagccgctggccctacgacgaggccttcgcttggcccaggctaatagccaagcggtggccacagaagcacccgaggcggaacctctggatgccttcgagcgtcagtacctcaaggagcgaatcgagatatcgcccttccagcggctgttcctgggggcaggatcctccattgccgcgctcttgaatccaagacgtcatgacatgatcgcctgtttgggtgagacgactggagaggatgctctatggacaattttggacaccatgcaagccagcgaggagggtcagcgcatcatggctgataagccccgcatccacaccagcaccattgacttcaagtatctggaaactttgccaccggatacctttggagccgcttacgtaaagtttctgaaagataatcaagtcacgccggacagtcgcatggccgtgcggtttttggaggacccgaagttggcctacttgatgacgcgatatcgcgaatgccacgacctaatccacacggtgctggacatgcccaccaatatgctgggcgaggtggctgtcaagtgggtggaggctctgaacacgggcctgcccatgtgctacggtggtgcggtattcggagcagttcgcctacgtcccaagcagcggcgtgcgtacttgaagcattacttgccgtgggccctggagaacggcaagcggaccaagcccttgatgcccgtctactgggagaagcgctgggagcagaacatccacgagctgcgctccgaattgggcattactgtgctgaataaagcttga

SEQ ID NO: 5058 - protein, 268 aa, Drosophila melanogaster
MMQRCLRLQKPLALRRGLRLAQANSQAVATEAPEAEPLDAFERQYLKERIEISPFQRLFLGAGSSIAALLNPRRHDMIACLGETTGEDALWTILDTMQASEEGQRIMADKPRIHTSTIDFKYLETLPPDTFGAAYVKFLKDNQVTPDSRMAVRFLEDPKLAYLMTRYRECHDLIHTVLDMPTNMLGEVAVKWVEALNTGLPMCYGGAVFGAVRLRPKQRRAYLKHYLPWALENGKRTKPLMPVYWEKRWEQNIHELRSELGITVLNKA

SEQ ID NO: 5059 - DNA, 1271 bp, Homo sapiens
  CDS (22)..(819)
cctccgcggacgcccgctgccatggcgactctgctgcgccctgtcctccgtcggctctgcgggctcccgggcctacagcggcctgcggcagaaatgcccctccgggctaggagcgacggcgccggcccgctatactcgcaccacctccccacctccccgctgcagaaagcgctgttggccgccggctccgcggcgatggcgctctataacccctaccgccacgacatggtcgcagttctaggggagaccacaggacaccgcaccctgaaggtcctcagggaccagatgaggagggatccagagggtgcccagatcctgcaggagcgtccccggatttcgacatccaccctcgacctgggcaagctccagagcctgccggaaggctccctcggtcgcgagtatctccgtttcctggatgtgaacagggtctccccagacacccgagcacccacccgcttcgtggatgatgaggagctagcgtatgtgattcagcggtaccgggaggtgcacgacatgcttcacaccctgctggggatgcccaccaacatcctgggggagatcgtggtgaaatggtttgaggctgtccagactggcctgcccatgtgcatcctgggtgcattctttggaccgatccgacttggcgctcagagcctgcaagtgctggtctcggagttgatcccatgggccgttcagaacgggcgcagagccccatgtgtcctcaacctgtactatgagcggcgctgggagcagtccctgagggctctgcgggaggagctgggcattacagcaccacccatgcacgtccagggcttggcctgagctcctgagccagcggggcctggcctacctcccccatcccctgcttcccttggaggcagagggctcccttgactacctttgttcctcttctttgaacactgacccttggacaacatttatcataatttgtcataaccactgctgagtggccttgaggacgaaccccgcagggagcaagcagtacagtggcattcccagggggaccagcagctacccaaggagaaccatgcatgaacagtatcagtcgtctgggctcatgctgggatgtcgcagtgctcctgttgcaactcctcccagccagccaggtttgctgggggccaggctgggtgtcctcacaggagtgagggctacacccaattccaaaagcctgagaagagagaagtggagggggaggcgagtgtgtgaataaaggctcccatcaggtcaaaaaaaaaaaaaaaaaaaaaaaaaaa

SEQ ID NO: 5060 - protein, 265 aa, Homo sapiens
MATLLRPVLRRLCGLPGLQRPAAEMPLRARSDGAGPLYSHHLPTSPLQKALLAAGSAAMALYNPYRHDMVAVLGETTGHRTLKVLRDQMRRDPEGAQILQERPRISTSTLDLGKLQSLPEGSLGREYLRFLDVNRVSPDTRAPTRFVDDEELAYVIQRYREVHDMLHTLLGMPTNILGEIVVKWFEAVQTGLPMCILGAFFGPIRLGAQSLQVLVSELIPWAVQNGRRAPCVLNLYYERRWEQSLRALREELGITAPPMHVQGLA

SEQ ID NO: 5061 - DNA, 26 bp, Artificial sequence
  Primer sequence
atgttgaggttatctttactgagatc

SEQ ID NO: 5062 - DNA, 22 bp, Artificial sequence
  Primer sequence
tcatgctggagtcgtggctcgt

SEQ ID NO: 5063 - DNA, 1390 bp, Saccharomyces cerevisiae; identical to SEQ ID NO: 531
  CDS (303)..(1118)

SEQ ID NO: 5064 - protein, 271 aa, Saccharomyces cerevisiae; identical to SEQ ID NO: 532

SEQ ID NO: 5065 - DNA, 714 bp, Deinococcus radiodurans; identical to SEQ ID NO: 533
  CDS (1)..(714)

SEQ ID NO: 5066 - protein, 237 aa, Deinococcus radiodurans; identical to SEQ ID NO: 534

SEQ ID NO: 5067 - DNA, 1350 bp, Nostoc sp. PCC 7120; identical to SEQ ID NO: 535
  CDS (1)..(1350)

SEQ ID NO: 5068 - protein, 449 aa, Nostoc sp. PCC 7120; identical to SEQ ID NO: 536

SEQ ID NO: 5069 - DNA, 636 bp, Listeria monocytogenes; identical to SEQ ID NO: 537
  CDS (1)..(636)

SEQ ID NO: 5070 - protein, 211 aa, Listeria monocytogenes; identical to SEQ ID NO: 538

SEQ ID NO: 5071 - DNA, 636 bp, Listeria innocua; identical to SEQ ID NO: 539
  CDS (1)..(636)

SEQ ID NO: 5072 - protein, 211 aa, Listeria innocua; identical to SEQ ID NO: 540

SEQ ID NO: 5073 - DNA, 654 bp, Brucella melitensis; identical to SEQ ID NO: 541
  CDS (1)..(654)

SEQ ID NO: 5074 - protein, 217 aa, Brucella melitensis; identical to SEQ ID NO: 542

SEQ ID NO: 5075 - DNA, 813 bp, Nostoc sp. PCC 7120; identical to SEQ ID NO: 543
  CDS (1)..(813)

SEQ ID NO: 5076 - protein, 270 aa, Nostoc sp. PCC 7120; identical to SEQ ID NO: 544

SEQ ID NO: 5077 - DNA, 615 bp, Deinococcus radiodurans; identical to SEQ ID NO: 545
  CDS (1)..(615)

SEQ ID NO: 5078 - protein, 204 aa, Deinococcus radiodurans; identical to SEQ ID NO: 546

SEQ ID NO: 5079 - DNA, 714 bp, Caulobacter crescentus; identical to SEQ ID NO: 547
  CDS (1)..(714)

SEQ ID NO: 5080 - protein, 237 aa, Caulobacter crescentus; identical to SEQ ID NO: 548

SEQ ID NO: 5081 - DNA, 756 bp, Treponema pallidum subsp. pallidum (syphilis spirochete); identical to SEQ ID NO: 549
  CDS (1)..(756)

SEQ ID NO: 5082 - protein, 251 aa, Treponema pallidum subsp. pallidum (syphilis spirochete); identical to SEQ ID NO: 550

SEQ ID NO: 5083 - DNA, 645 bp, Xylella fastidiosa; identical to SEQ ID NO: 551
  CDS (1)..(645)

SEQ ID NO: 5084 - protein, 214 aa, Xylella fastidiosa; identical to SEQ ID NO: 552

SEQ ID NO: 5085 - DNA, 2034 bp, Arabidopsis thaliana (mouse-ear cress); identical to SEQ ID NO: 553
  CDS (1)..(2034)

SEQ ID NO: 5086 - protein, 677 aa, Arabidopsis thaliana (mouse-ear cress); identical to SEQ ID NO: 554

SEQ ID NO: 5087 - DNA, 582 bp, Bacillus subtilis; identical to SEQ ID NO: 555
  CDS (1)..(582)

SEQ ID NO: 5088 - protein, 193 aa, Bacillus subtilis; identical to SEQ ID NO: 556

SEQ ID NO: 5089 - DNA, 606 bp, Thermotoga maritima; identical to SEQ ID NO: 557
  CDS (1)..(606)

SEQ ID NO: 5090 - protein, 201 aa, Thermotoga maritima; identical to SEQ ID NO: 558

SEQ ID NO: 5091 - DNA, 660 bp, Clostridium acetobutylicum; identical to SEQ ID NO: 559
  CDS (1)..(660)

SEQ ID NO: 5092 - protein, 219 aa, Clostridium acetobutylicum; identical to SEQ ID NO: 560

SEQ ID NO: 5093 - DNA, 744 bp, Saccharomyces cerevisiae; identical to SEQ ID NO: 561
  CDS (1)..(744)

SEQ ID NO: 5094 - protein, 247 aa, Saccharomyces cerevisiae; identical to SEQ ID NO: 562

SEQ ID NO: 5095 - DNA, 1050 bp, Synechocystis sp; identical to SEQ ID NO: 563
  CDS (1)..(1050)

SEQ ID NO: 5096 - protein, 349 aa, Synechocystis sp; identical to SEQ ID NO: 564

SEQ ID NO: 5097 - DNA, 875 bp, Arabidopsis thaliana (mouse-ear cress); identical to SEQ ID NO: 565
  CDS (30)..(722)

SEQ ID NO: 5098 - protein, 230 aa, Arabidopsis thaliana (mouse-ear cress); identical to SEQ ID NO: 566

SEQ ID NO: 5099 - DNA, 741 bp, Debaryomyces hansenii; identical to SEQ ID NO: 567
  CDS (1)..(741)

SEQ ID NO: 5100 - protein, 246 aa, Debaryomyces hansenii; identical to SEQ ID NO: 568

SEQ ID NO: 5101 - DNA, 741 bp, Yarrowia lipolytica; identical to SEQ ID NO: 569
  CDS (1)..(741)

SEQ ID NO: 5102 - protein, 246 aa, Yarrowia lipolytica; identical to SEQ ID NO: 570

SEQ ID NO: 5103 - DNA, 816 bp, Kluyveromyces lactis; identical to SEQ ID NO: 571
  CDS (1)..(816)

SEQ ID NO: 5104 - protein, 271 aa, Kluyveromyces lactis; identical to SEQ ID NO: 572

SEQ ID NO: 5105 - DNA, 687 bp, Kluyveromyces lactis; identical to SEQ ID NO: 573
  CDS (1)..(687)

SEQ ID NO: 5106 - protein, 228 aa, Kluyveromyces lactis; identical to SEQ ID NO: 574

SEQ ID NO: 5107 - DNA, 651 bp, Erwinia carotovora subsp; identical to SEQ ID NO: 575
  CDS (1)..(651)

SEQ ID NO: 5108 - protein, 216 aa, Erwinia carotovora subsp; identical to SEQ ID NO: 576

SEQ ID NO: 5109 - DNA, 840 bp, Candida glabrata; identical to SEQ ID NO: 577
  CDS (1)..(840)

SEQ ID NO: 5110 - protein, 279 aa, Candida glabrata; identical to SEQ ID NO: 578

SEQ ID NO: 5111 - DNA, 744 bp, Candida glabrata; identical to SEQ ID NO: 579
  CDS (1)..(744)

SEQ ID NO: 5112 - protein, 247 aa, Candida glabrata; identical to SEQ ID NO: 580

SEQ ID NO: 5113 - DNA, 621 bp, Bartonella quintana; identical to SEQ ID NO: 581
  CDS (1)..(621)

SEQ ID NO: 5114 - protein, 206 aa, Bartonella quintana; identical to SEQ ID NO: 582

SEQ ID NO: 5115 - DNA, 648 bp, Parachlamydia sp; identical to SEQ ID NO: 583
  CDS (1)..(648)

SEQ ID NO: 5116 - protein, 215 aa, Parachlamydia sp; identical to SEQ ID NO: 584

SEQ ID NO: 5117 - DNA, 636 bp, Listeria monocytogenes; identical to SEQ ID NO: 585
  CDS (1)..(636)

SEQ ID NO: 5118 - protein, 211 aa, Listeria monocytogenes; identical to SEQ ID NO: 586

SEQ ID NO: 5119 - DNA, 633 bp, Thermus thermophilus; identical to SEQ ID NO: 587
  CDS (1)..(633)

SEQ ID NO: 5120 - protein, 210 aa, Thermus thermophilus; identical to SEQ ID NO: 588

SEQ ID NO: 5121 - DNA, 654 bp, Mycobacterium paratuberculosis; identical to SEQ ID NO: 589
  CDS (1)..(654)

SEQ ID NO: 5122 - protein, 217 aa, Mycobacterium paratuberculosis; identical to SEQ ID NO: 590

SEQ ID NO: 5123 - DNA, 1134 bp, Mycobacterium paratuberculosis; identical to SEQ ID NO: 591
  CDS (1)..(1134)

SEQ ID NO: 5124 - protein, 377 aa, Mycobacterium paratuberculosis; identical to SEQ ID NO: 592

SEQ ID NO: 5125 - DNA, 627 bp, Lactobacillus johnsonii; identical to SEQ ID NO: 593
  CDS (1)..(627)

SEQ ID NO: 5126 - protein, 208 aa, Lactobacillus johnsonii; identical to SEQ ID NO: 594

SEQ ID NO: 5127 - DNA, 807 bp, Ashbya gossypii; identical to SEQ ID NO: 595
  CDS (1)..(807)

SEQ ID NO: 5128 - protein, 268 aa, Ashbya gossypii; identical to SEQ ID NO: 596

SEQ ID NO: 5129 - DNA, 687 bp, Mycobacterium tuberculosis; identical to SEQ ID NO: 597
  CDS (1)..(687)

SEQ ID NO: 5130 - protein, 228 aa, Mycobacterium tuberculosis; identical to SEQ ID NO: 598

SEQ ID NO: 5131 - DNA, 618 bp, Photorhabdus luminescens; identical to SEQ ID NO: 599
  CDS (1)..(618)

SEQ ID NO: 5132 - protein, 205 aa, Photorhabdus luminescens; identical to SEQ ID NO: 600

SEQ ID NO: 5133 - DNA, 588 bp, Anopheles gambiae str; identical to SEQ ID NO: 601
  CDS (1)..(588)

SEQ ID NO: 5134 - protein, 195 aa, Anopheles gambiae str; identical to SEQ ID NO: 602

SEQ ID NO: 5135 - DNA, 3762 bp, Neurospora crassa; identical to SEQ ID NO: 603
  CDS (1)..(3762)

SEQ ID NO: 5136 - protein, 1253 aa, Neurospora crassa; identical to SEQ ID NO: 604

SEQ ID NO: 5137 - DNA, 567 bp, Synechococcus sp; identical to SEQ ID NO: 605
  CDS (1)..(567)

SEQ ID NO: 5138 - protein, 188 aa, Synechococcus sp; identical to SEQ ID NO: 606

SEQ ID NO: 5139 - DNA, 612 bp, Rhodopirellula baltica; identical to SEQ ID NO: 607
  CDS (1)..(612)

SEQ ID NO: 5140 - protein, 203 aa, Rhodopirellula baltica; identical to SEQ ID NO: 608

SEQ ID NO: 5141 - DNA, 1329 bp, Prochlorococcus marinus subsp; identical to SEQ ID NO: 609
  CDS (1)..(1329)

SEQ ID NO: 5142 - protein, 442 aa, Prochlorococcus marinus subsp; identical to SEQ ID NO: 610

SEQ ID NO: 5143 - DNA, 1332 bp, Prochlorococcus marinus; identical to SEQ ID NO: 611
  CDS (1)..(1332)

SEQ ID NO: 5144 - protein, 443 aa, Prochlorococcus marinus; identical to SEQ ID NO: 612

SEQ ID NO: 5145 - DNA, 591 bp, Prochlorococcus marinus; identical to SEQ ID NO: 613
  CDS (1)..(591)

SEQ ID NO: 5146 - protein, 196 aa, Prochlorococcus marinus; identical to SEQ ID NO: 614

SEQ ID NO: 5147 - DNA, 618 bp, Streptomyces avermitilis; identical to SEQ ID NO: 615
  CDS (1)..(618)

SEQ ID NO: 5148 - protein, 205 aa, Streptomyces avermitilis; identical to SEQ ID NO: 616

SEQ ID NO: 5149 - DNA, 600 bp, Streptomyces avermitilis; identical to SEQ ID NO: 617
  CDS (1)..(600)

SEQ ID NO: 5150 - protein, 199 aa, Streptomyces avermitilis; identical to SEQ ID NO: 618

SEQ ID NO: 5151 - DNA, 612 bp, Streptomyces avermitilis; identical to SEQ ID NO: 619
  CDS (1)..(612)

SEQ ID NO: 5152 - protein, 203 aa, Streptomyces avermitilis; identical to SEQ ID NO: 620

SEQ ID NO: 5153 - DNA, 645 bp, Enterococcus faecalis; identical to SEQ ID NO: 621
  CDS (1)..(645)

SEQ ID NO: 5154 - protein, 214 aa, Enterococcus faecalis; identical to SEQ ID NO: 622

SEQ ID NO: 5155 - DNA, 666 bp, Lactobacillus plantarum; identical to SEQ ID NO: 623
  CDS (1)..(666)

SEQ ID NO: 5156 - protein, 221 aa, Lactobacillus plantarum; identical to SEQ ID NO: 624

SEQ ID NO: 5157 - DNA, 642 bp, Clostridium tetani; identical to SEQ ID NO: 625
  CDS (1)..(642)

SEQ ID NO: 5158 - protein, 213 aa, Clostridium tetani; identical to SEQ ID NO: 626

SEQ ID NO: 5159 - DNA, 600 bp, Bradyrhizobium japonicum; identical to SEQ ID NO: 627
  CDS (1)..(600)

SEQ ID NO: 5160 - protein, 199 aa, Bradyrhizobium japonicum; identical to SEQ ID NO: 628

SEQ ID NO: 5161 - DNA, 1407 bp, Synechococcus elongatus; identical to SEQ ID NO: 629
  CDS (1)..(1407)

SEQ ID NO: 5162 - protein, 468 aa, Synechococcus elongatus; identical to SEQ ID NO: 630

SEQ ID NO: 5163 - DNA, 582 bp, Oceanobacillus iheyensis; identical to SEQ ID NO: 631
  CDS (1)..(582)

SEQ ID NO: 5164 - protein, 193 aa, Oceanobacillus iheyensis; identical to SEQ ID NO: 632

SEQ ID NO: 5165 - DNA, 648 bp, Bifidobacterium longum; identical to SEQ ID NO: 633
  CDS (1)..(648)

SEQ ID NO: 5166 - protein, 215 aa, Bifidobacterium longum; identical to SEQ ID NO: 634

SEQ ID NO: 5167 - DNA, 1005 bp, Arabidopsis thaliana; identical to SEQ ID NO: 635
  CDS (1)..(1005)

SEQ ID NO: 5168 - protein, 334 aa, Arabidopsis thaliana; identical to SEQ ID NO: 636

SEQ ID NO: 5169 - DNA, 645 bp, Xanthomonas campestris; identical to SEQ ID NO: 637
  CDS (1)..(645)

SEQ ID NO: 5170 - protein, 214 aa, Xanthomonas campestris; identical to SEQ ID NO: 638

SEQ ID NO: 5171 - DNA, 645 bp, Xanthomonas axonopodis; identical to SEQ ID NO: 639
  CDS (1)..(645)

SEQ ID NO: 5172 - protein, 214 aa, Xanthomonas axonopodis; identical to SEQ ID NO: 640

SEQ ID NO: 5173 - DNA, 621 bp, Thermoanaerobacter tengcongensis; identical to SEQ ID NO: 641
  CDS (1)..(621)

SEQ ID NO: 5174 - protein, 206 aa, Thermoanaerobacter tengcongensis; identical to SEQ ID NO: 642

SEQ ID NO: 5175 - DNA, 582 bp, Rhizobium loti; identical to SEQ ID NO: 643
  CDS (1)..(582)

SEQ ID NO: 5176 - protein, 193 aa, Rhizobium loti; identical to SEQ ID NO: 644

SEQ ID NO: 5177 - DNA, 651 bp, Pasteurella multocida; identical to SEQ ID NO: 645
  CDS (1)..(651)

SEQ ID NO: 5178 - protein, 216 aa, Pasteurella multocida; identical to SEQ ID NO: 646

SEQ ID NO: 5179 - DNA, 597 bp, Streptomyces coelicolor; identical to SEQ ID NO: 647
  CDS (1)..(597)

SEQ ID NO: 5180 - protein, 198 aa, Streptomyces coelicolor; identical to SEQ ID NO: 648

SEQ ID NO: 5181 - DNA, 600 bp, Streptomyces coelicolor; identical to SEQ ID NO: 649
  CDS (1)..(600)

SEQ ID NO: 5182 - protein, 199 aa, Streptomyces coelicolor; identical to SEQ ID NO: 650

SEQ ID NO: 5183 - DNA, 660 bp, Gloeobacter violaceus; identical to SEQ ID NO: 651
  CDS (1)..(660)

SEQ ID NO: 5184 - protein, 219 aa, Gloeobacter violaceus; identical to SEQ ID NO: 652

SEQ ID NO: 5185 - DNA, 621 bp, Bartonella henselae; identical to SEQ ID NO: 653
  CDS (1)..(621)

SEQ ID NO: 5186 - protein, 206 aa, Bartonella henselae; identical to SEQ ID NO: 654

SEQ ID NO: 5187 - DNA, 681 bp, Parachlamydia sp; identical to SEQ ID NO: 655
  CDS (1)..(681)

SEQ ID NO: 5188 - protein, 226 aa, Parachlamydia sp; identical to SEQ ID NO: 656

SEQ ID NO: 5189 - DNA, 636 bp, Rhizobium meliloti; identical to SEQ ID NO: 657
  CDS (1)..(636)

SEQ ID NO: 5190 - protein, 211 aa, Rhizobium meliloti; identical to SEQ ID NO: 658

SEQ ID NO: 5191 - DNA, 648 bp, Escherichia coli O6; identical to SEQ ID NO: 659
  CDS (1)..(648)

SEQ ID NO: 5192 - protein, 215 aa, Escherichia coli O6; identical to SEQ ID NO: 660

SEQ ID NO: 5193 - DNA, 648 bp, Photorhabdus luminescens; identical to SEQ ID NO: 661
  CDS (1)..(648)

SEQ ID NO: 5194 - protein, 215 aa, Photorhabdus luminescens; identical to SEQ ID NO: 662

SEQ ID NO: 5195 - DNA, 648 bp, Salmonella typhimurium; identical to SEQ ID NO: 663
  CDS (1)..(648)

SEQ ID NO: 5196 - protein, 215 aa, Salmonella typhimurium; identical to SEQ ID NO: 664

SEQ ID NO: 5197 - DNA, 22 bp, Artificial sequence
  Primer sequence
atgccttcgctaacccccagat

SEQ ID NO: 5198 - DNA, 23 bp, Artificial sequence
  Primer sequence
ttacacatcgccatgctgggatt

SEQ ID NO: 5199 - DNA, 3844 bp, Saccharomyces cerevisiae; identical to SEQ ID NO: 667
  CDS (1218)..(3269)

SEQ ID NO: 5200 - protein, 683 aa, Saccharomyces cerevisiae; identical to SEQ ID NO: 668

SEQ ID NO: 5201 - DNA, 1713 bp, Glycine max; identical to SEQ ID NO: 669
  CDS (1)..(1713)

SEQ ID NO: 5202 - protein, 570 aa, Glycine max; identical to SEQ ID NO: 670

SEQ ID NO: 5203 - DNA, 1644 bp, Glycine max; identical to SEQ ID NO: 671
  CDS (1)..(1644)

SEQ ID NO: 5204 - protein, 547 aa, Glycine max; identical to SEQ ID NO: 672

SEQ ID NO: 5205 - DNA, 1641 bp, Glycine max; identical to SEQ ID NO: 673
  CDS (1)..(1641)

SEQ ID NO: 5206 - protein, 546 aa, Glycine max; identical to SEQ ID NO: 674

SEQ ID NO: 5207 - DNA, 1668 bp, Zea mays; identical to SEQ ID NO: 675
  misc_feature (603)..(603): n is a, c, g, or t
  CDS (1)..(1668)

SEQ ID NO: 5208 - protein, 555 aa, Zea mays; identical to SEQ ID NO: 676

SEQ ID NO: 5209 - DNA, 1659 bp, Brassica napus; identical to SEQ ID NO: 677
  CDS (1)..(1659)

SEQ ID NO: 5210 - protein, 552 aa, Brassica napus; identical to SEQ ID NO: 678

SEQ ID NO: 5211 - DNA, 1689 bp, Glycine max; identical to SEQ ID NO: 679
  CDS (1)..(1689)

SEQ ID NO: 5212 - protein, 562 aa, Glycine max; identical to SEQ ID NO: 680

SEQ ID NO: 5213 - DNA, 3359 bp, Methanothrix soehngenii; identical to SEQ ID NO: 681
  CDS (310)..(2328)

SEQ ID NO: 5214 - protein, 672 aa, Methanothrix soehngenii [sequence omitted]

SEQ ID NO: 5215 - DNA, 3802 bp, Alcaligenes eutrophus; identical to SEQ ID NO: 683
  CDS (722)..(2704)

SEQ ID NO: 5216 - protein, 660 aa, Alcaligenes eutrophus [sequence omitted]

SEQ ID NO: 5217 - DNA, 1845 bp, Phanerochaete chrysosporium; identical to SEQ ID NO: 685
  CDS (1)..(1845)

SEQ ID NO: 5218 - protein, 614 aa, Phanerochaete chrysosporium; identical to SEQ ID NO: 686

SEQ ID NO: 5219 - DNA, 1938 bp, Pseudomonas aeruginosa; identical to SEQ ID NO: 687
  CDS (1)..(1938)

SEQ ID NO: 5220 - protein, 645 aa, Pseudomonas aeruginosa [sequence omitted]

SEQ ID NO: 5221 - DNA, 1668 bp, Pseudomonas aeruginosa; identical to SEQ ID NO: 689
  CDS (1)..(1668)

SEQ ID NO: 5222 - protein, 555 aa, Pseudomonas aeruginosa; identical to SEQ ID NO: 690

SEQ ID NO: 5223 - DNA, 1947 bp, Bacillus halodurans; identical to SEQ ID NO: 691
  CDS (1)..(1947)

SEQ ID NO: 5224 - protein, 648 aa, Bacillus halodurans; identical to SEQ ID NO: 692

SEQ ID NO: 5225 - DNA, 1707 bp, Staphylococcus aureus; identical to SEQ ID NO: 693
  CDS (1)..(1707)

SEQ ID NO: 5226 - protein, 568 aa, Staphylococcus aureus; identical to SEQ ID NO: 694

SEQ ID NO: 5227 - DNA, 1887 bp, Salmonella enterica subsp. enterica serovar Typhi; identical to SEQ ID NO: 695
  CDS (1)..(1887)

SEQ ID NO: 5228 - protein, 628 aa, Salmonella enterica subsp. enterica serovar Typhi; identical to SEQ ID NO: 696

SEQ ID NO: 5229 - DNA, 1575 bp, Nostoc sp. PCC 7120; identical to SEQ ID NO: 697
  CDS (1)..(1575)

SEQ ID NO: 5230 - protein, 524 aa, Nostoc sp. PCC 7120; identical to SEQ ID NO: 698

SEQ ID NO: 5231 - DNA, 1992 bp, Brucella melitensis; identical to SEQ ID NO: 699
  CDS (1)..(1992)

SEQ ID NO: 5232 - protein, 663 aa, Brucella melitensis; identical to SEQ ID NO: 700

SEQ ID NO: 5233 - DNA, 1707 bp, Brucella melitensis; identical to SEQ ID NO: 701
  CDS (1)..(1707)

SEQ ID NO: 5234 - protein, 568 aa, Brucella melitensis; identical to SEQ ID NO: 702

SEQ ID NO: 5235 - DNA, 1959 bp, Yersinia pestis; identical to SEQ ID NO: 703
  CDS (1)..(1959)

SEQ ID NO: 5236 - protein, 652 aa, Yersinia pestis; identical to SEQ ID NO: 704

SEQ ID NO: 5237 - DNA, 1716 bp, Bacillus halodurans; identical to SEQ ID NO: 705
  CDS (1)..(1716)

SEQ ID NO: 5238 - protein, 571 aa, Bacillus halodurans; identical to SEQ ID NO: 706

SEQ ID NO: 5239 - DNA, 2004 bp, Halobacterium sp. NRC-1; identical to SEQ ID NO: 707
  CDS (1)..(2004)

SEQ ID NO: 5240 - protein, 667 aa, Halobacterium sp. NRC-1; identical to SEQ ID NO: 708

SEQ ID NO: 5241 - DNA, 1944 bp, Caulobacter crescentus; identical to SEQ ID NO: 709
  CDS (1)..(1944)

SEQ ID NO: 5242 - protein, 647 aa, Caulobacter crescentus [sequence omitted]

SEQ ID NO: 5243 - DNA, 1716 bp, Sulfolobus solfataricus; identical to SEQ ID NO: 711
  CDS (1)..(1716)

SEQ ID NO: 5244 - protein, 571 aa, Sulfolobus solfataricus; identical to SEQ ID NO: 712

SEQ ID NO: 5245 - DNA, 2001 bp, Sulfolobus solfataricus; identical to SEQ ID NO: 713
  CDS (1)..(2001)

SEQ ID NO: 5246 - protein, 666 aa, Sulfolobus solfataricus; identical to SEQ ID NO: 714

SEQ ID NO: 5247 - DNA, 1959 bp, Escherichia coli; identical to SEQ ID NO: 715
  CDS (1)..(1959)

SEQ ID NO: 5248 - protein, 652 aa, Escherichia coli; identical to SEQ ID NO: 716

SEQ ID NO: 5249 - DNA, 1533 bp, Aquifex aeolicus; identical to SEQ ID NO: 717
  CDS (1)..(1533)

SEQ ID NO: 5250 - protein, 510 aa, Aquifex aeolicus; identical to SEQ ID NO: 718

SEQ ID NO: 5251 - DNA, 1950 bp, Deinococcus radiodurans; identical to SEQ ID NO: 719
  CDS (1)..(1950)

SEQ ID NO: 5252 - protein, 649 aa, Deinococcus radiodurans [sequence omitted]

SEQ ID NO: 5253 - DNA, 1929 bp, Deinococcus radiodurans; identical to SEQ ID NO: 721
  CDS (1)..(1929)

SEQ ID NO: 5254 - protein, 642 aa, Deinococcus radiodurans; identical to SEQ ID NO: 722

SEQ ID NO: 5255 - DNA, 1899 bp, Vibrio cholerae; identical to SEQ ID NO: 723
  CDS (1)..(1899)

SEQ ID NO: 5256 - protein, 632 aa, Vibrio cholerae; identical to SEQ ID NO: 724

SEQ ID NO: 5257 - DNA, 1956 bp, Pseudomonas aeruginosa; identical to SEQ ID NO: 725
  CDS (1)..(1956)

SEQ ID NO: 5258 - protein, 651 aa, Pseudomonas aeruginosa [sequence omitted]

SEQ ID NO: 5259 - DNA, 1497 bp, Sulfolobus solfataricus; identical to SEQ ID NO: 727
  CDS (1)..(1497)

SEQ ID NO: 5260 - protein, 498 aa, Sulfolobus solfataricus; identical to SEQ ID NO: 728

SEQ ID NO: 5261 - DNA, 1869 bp, Sulfolobus solfataricus; identical to SEQ ID NO: 729
  CDS (1)..(1869)

SEQ ID NO: 5262 - protein, 622 aa, Sulfolobus solfataricus; identical to SEQ ID NO: 730

SEQ ID NO: 5263 - DNA, 1989 bp, Helicobacter pylori; identical to SEQ ID NO: 731
  CDS (1)..(1989)

SEQ ID NO: 5264 - protein, 662 aa, Helicobacter pylori [sequence omitted]

SEQ ID NO: 5265 - DNA, 1989 bp, Archaeoglobus fulgidus; identical to SEQ ID NO: 733
  CDS (1)..(1989)

SEQ ID NO: 5266 - protein, 662 aa, Archaeoglobus fulgidus; identical to SEQ ID NO: 734

SEQ ID NO: 5267 - DNA, 1932 bp, Archaeoglobus fulgidus; identical to SEQ ID NO: 735
  CDS (1)..(1932)

SEQ ID NO: 5268 - protein, 643 aa, Archaeoglobus fulgidus; identical to SEQ ID NO: 736

SEQ ID NO: 5269 - DNA, 1542 bp, Aeropyrum pernix; identical to SEQ ID NO: 737
  CDS (1)..(1542)

SEQ ID NO: 5270 - protein, 513 aa, Aeropyrum pernix; identical to SEQ ID NO: 738

SEQ ID NO: 5271 - DNA, 1944 bp, Xylella fastidiosa; identical to SEQ ID NO: 739
  CDS (1)..(1944)

SEQ ID NO: 5272 - protein, 647 aa, Xylella fastidiosa [sequence omitted]

SEQ ID NO: 5273 - DNA, 1827 bp, Sulfolobus solfataricus; identical to SEQ ID NO: 741
  CDS (1)..(1827)

SEQ ID NO: 5274 - protein, 608 aa, Sulfolobus solfataricus; identical to SEQ ID NO: 742

SEQ ID NO: 5275 - DNA, 1959 bp, Sulfolobus solfataricus; identical to SEQ ID NO: 743
  CDS (1)..(1959)

SEQ ID NO: 5276 - protein, 652 aa, Sulfolobus solfataricus; identical to SEQ ID NO: 744

SEQ ID NO: 5277 - DNA, 2046 bp, Archaeoglobus fulgidus; identical to SEQ ID NO: 745
  CDS (1)..(2046)

SEQ ID NO: 5278 - protein, 681 aa, Archaeoglobus fulgidus; identical to SEQ ID NO: 746

SEQ ID NO: 5279 - DNA, 1761 bp, Archaeoglobus fulgidus; identical to SEQ ID NO: 747
  CDS (1)..(1761)

SEQ ID NO: 5280 - protein, 586 aa, Archaeoglobus fulgidus; identical to SEQ ID NO: 748

SEQ ID NO: 5281 - DNA, 1983 bp, Aeropyrum pernix; identical to SEQ ID NO: 749
  CDS (1)..(1983)

SEQ ID NO: 5282 - protein, 660 aa, Aeropyrum pernix; identical to SEQ ID NO: 750

SEQ ID NO: 5283 - DNA, 1677 bp, Methanobacterium thermoautotrophicum; identical to SEQ ID NO: 751
  CDS (1)..(1677)

SEQ ID NO: 5284 - protein, 558 aa, Methanobacterium thermoautotrophicum; identical to SEQ ID NO: 752

SEQ ID NO: 5285 - DNA, 1929 bp, Archaeoglobus fulgidus; identical to SEQ ID NO: 753
  CDS (1)..(1929)

SEQ ID NO: 5286 - protein, 642 aa, Archaeoglobus fulgidus; identical to SEQ ID NO: 754

SEQ ID NO: 5287 - DNA, 1974 bp, Campylobacter jejuni; identical to SEQ ID NO: 755
  CDS (1)..(1974)

SEQ ID NO: 5288 - protein, 657 aa, Campylobacter jejuni [sequence omitted]

SEQ ID NO: 5289 - DNA, 1956 bp, Pseudomonas aeruginosa; identical to SEQ ID NO: 757
  CDS (1)..(1956)

SEQ ID NO: 5290 - protein, 651 aa, Pseudomonas aeruginosa; identical to SEQ ID NO: 758

SEQ ID NO: 5291 - DNA, 1887 bp, Pseudomonas aeruginosa; identical to SEQ ID NO: 759
  CDS (1)..(1887)

SEQ ID NO: 5292 - protein, 628 aa, Pseudomonas aeruginosa [sequence omitted]

SEQ ID NO: 5293 - DNA, 1971 bp, Halobacterium sp. NRC-1; identical to SEQ ID NO: 761
  CDS (1)..(1971)

SEQ ID NO: 5294 - protein, 656 aa, Halobacterium sp. NRC-1; identical to SEQ ID NO: 762

SEQ ID NO: 5295 - DNA, 1719 bp, Bacillus subtilis; identical to SEQ ID NO: 763
  CDS (1)..(1719)

SEQ ID NO: 5296 - protein, 572 aa, Bacillus subtilis; identical to SEQ ID NO: 764

SEQ ID NO: 5297 - DNA, 2019 bp, Phycomyces blakesleeanus; identical to SEQ ID NO: 765
  CDS (1)..(2019)

SEQ ID NO: 5298 - protein, 672 aa, Phycomyces blakesleeanus [sequence omitted]

SEQ ID NO: 5299 - DNA, 2674 bp, Drosophila melanogaster; identical to SEQ ID NO: 767
  CDS (419)..(2164)

SEQ ID NO: 5300 - protein, 581 aa, Drosophila melanogaster; identical to SEQ ID NO: 768

SEQ ID NO: 5301 - DNA, 1962 bp, Synechocystis sp; identical to SEQ ID NO: 769
  CDS (1)..(1962)

SEQ ID NO: 5302 - protein, 653 aa, Synechocystis sp [sequence omitted]

SEQ ID NO: 5303 - DNA, 2013 bp, Emericella nidulans, Aspergillus nidulans; identical to SEQ ID NO: 771
  CDS (1)..(2013)

SEQ ID NO: 5304 - protein, 670 aa, Emericella nidulans, Aspergillus nidulans [sequence omitted]

SEQ ID NO: 5305 - DNA, 1881 bp, Neurospora crassa; identical to SEQ ID NO: 773
  CDS (1)..(1881)

SEQ ID NO: 5306 - protein, 626 aa, Neurospora crassa [sequence omitted]

SEQ ID NO: 5307 - DNA, 1971 bp, Rhodobacter capsulatus; identical to SEQ ID NO: 775
  CDS (1)..(1971)

SEQ ID NO: 5308 - protein, 656 aa, Rhodobacter capsulatus [sequence omitted]

SEQ ID NO: 5309 - DNA, 2043 bp, Caenorhabditis elegans; identical to SEQ ID NO: 777
  CDS (1)..(2043)

SEQ ID NO: 5310 - protein, 680 aa, Caenorhabditis elegans; identical to SEQ ID NO: 778

SEQ ID NO: 5311 - DNA, 1956 bp, Streptomyces coelicolor; identical to SEQ ID NO: 779
  CDS (1)..(1956)

SEQ ID NO: 5312 - protein, 651 aa, Streptomyces coelicolor; identical to SEQ ID NO: 780

SEQ ID NO: 5313 - DNA, 1989 bp, Schizosaccharomyces pombe; identical to SEQ ID NO: 781
  CDS (1)..(1989)

SEQ ID NO: 5314 - protein, 662 aa, Schizosaccharomyces pombe [sequence omitted]

SEQ ID NO: 5315 - DNA, 2013 bp, Pyrobaculum aerophilum; identical to SEQ ID NO: 783
  CDS (1)..(2013)

SEQ ID NO: 5316 - protein, 670 aa, Pyrobaculum aerophilum [sequence omitted]

SEQ ID NO: 5317 - DNA, 2010 bp, Penicillium chrysogenum; identical to SEQ ID NO: 785
  CDS (1)..(2010)

SEQ ID NO: 5318 - protein, 669 aa, Penicillium chrysogenum; identical to SEQ ID NO: 786

SEQ ID NO: 5319 - DNA, 2323 bp, Homo sapiens; identical to SEQ ID NO: 787
  CDS (92)..(2152)

SEQ ID NO: 5320 - protein, 686 aa, Homo sapiens; identical to SEQ ID NO: 788

SEQ ID NO: 5321 - DNA, 1950 bp, Pseudomonas putida; identical to SEQ ID NO: 789
  CDS (1)..(1950)

SEQ ID NO: 5322 - protein, 649 aa, Pseudomonas putida; identical to SEQ ID NO: 790

SEQ ID NO: 5323 - DNA, 2444 bp, Lysobacter; identical to SEQ ID NO: 791
  CDS (337)..(2232)

SEQ ID NO: 5324 - protein, 631 aa, Lysobacter; identical to SEQ ID NO: 792

SEQ ID NO: 5325 - DNA, 2016 bp, Debaryomyces hansenii; identical to SEQ ID NO: 793
  CDS (1)..(2016)

SEQ ID NO: 5326 - protein, 671 aa, Debaryomyces hansenii; identical to SEQ ID NO: 794

SEQ ID NO: 5327 - DNA, 2040 bp, Debaryomyces hansenii; identical to SEQ ID NO: 795
  CDS (1)..(2040)

SEQ ID NO: 5328 - protein, 679 aa, Debaryomyces hansenii; identical to SEQ ID NO: 796

SEQ ID NO: 5329 - DNA, 1974 bp, Yarrowia lipolytica; identical to SEQ ID NO: 797
  CDS (1)..(1974)

SEQ ID NO: 5330 - protein, 657 aa, Yarrowia lipolytica; identical to SEQ ID NO: 798

SEQ ID NO: 5331 - DNA, 2124 bp, Kluyveromyces lactis; identical to SEQ ID NO: 799
  CDS (1)..(2124)

SEQ ID NO: 5332 - protein, 707 aa, Kluyveromyces lactis; identical to SEQ ID NO: 800

SEQ ID NO: 5333 - DNA, 1962 bp, Pseudomonas putida; identical to SEQ ID NO: 801
  CDS (1)..(1962)

SEQ ID NO: 5334 - protein, 653 aa, Pseudomonas putida; identical to SEQ ID NO: 802

SEQ ID NO: 5335 - DNA, 1644 bp, Acinetobacter sp; identical to SEQ ID NO: 803
  CDS (1)..(1644)

SEQ ID NO: 5336 - protein, 547 aa, Acinetobacter sp; identical to SEQ ID NO: 804

SEQ ID NO: 5337 - DNA, 1644 bp, Acinetobacter sp; identical to SEQ ID NO: 805
  CDS (1)..(1644)

SEQ ID NO: 5338 - protein, 547 aa, Acinetobacter sp; identical to SEQ ID NO: 806

SEQ ID NO: 5339 - DNA, 2115 bp, Candida glabrata; identical to SEQ ID NO: 807
  CDS (1)..(2115)

SEQ ID NO: 5340 - protein, 704 aa, Candida glabrata; identical to SEQ ID NO: 808

SEQ ID NO: 5341 - DNA, 2052 bp, Candida glabrata; identical to SEQ ID NO: 809
  CDS (1)..(2052)

SEQ ID NO: 5342 - protein, 683 aa, Candida glabrata; identical to SEQ ID NO: 810

SEQ ID NO: 5343 - DNA, 1959 bp, Bartonella quintana; identical to SEQ ID NO: 811
  CDS (1)..(1959)

SEQ ID NO: 5344 - protein, 652 aa, Bartonella quintana; identical to SEQ ID NO: 812

SEQ ID NO: 5345 - DNA, 1959 bp, Bartonella henselae; identical to SEQ ID NO: 813
  CDS (1)..(1959)

SEQ ID NO: 5346 - protein, 652 aa, Bartonella henselae; identical to SEQ ID NO: 814

SEQ ID NO: 5347 - DNA, 2763 bp, Oryza sativa; identical to SEQ ID NO: 815
  CDS (355)..(2472)

SEQ ID NO: 5348 - protein, 705 aa, Oryza sativa; identical to SEQ ID NO: 816

SEQ ID NO: 5349 - DNA, 1941 bp, Bacillus thuringiensis serovar konkukian str; identical to SEQ ID NO: 817
  CDS (1)..(1941)

SEQ ID NO: 5350 - protein, 646 aa, Bacillus thuringiensis serovar konkukian str; identical to SEQ ID NO: 818

SEQ ID NO: 5351 - DNA, 1953 bp, Picrophilus torridus; identical to SEQ ID NO: 819
  CDS (1)..(1953)

SEQ ID NO: 5352 - protein, 650 aa, Picrophilus torridus; identical to SEQ ID NO: 820

SEQ ID NO: 5353 - DNA, 2994 bp, Plasmodium falciparum; identical to SEQ ID NO: 821
  CDS (1)..(2994)

SEQ ID NO: 5354 - protein, 997 aa, Plasmodium falciparum; identical to SEQ ID NO: 822

SEQ ID NO: 5355 - DNA, 2007 bp, Photobacterium profundum; identical to SEQ ID NO: 823
  CDS (1)..(2007)

SEQ ID NO: 5356 - protein, 668 aa, Photobacterium profundum; identical to SEQ ID NO: 824

SEQ ID NO: 5357 - DNA, 1899 bp, Photobacterium profundum; identical to SEQ ID NO: 825
  CDS (1)..(1899)

SEQ ID NO: 5358 - protein, 632 aa, Photobacterium profundum; identical to SEQ ID NO: 826

SEQ ID NO: 5359 - DNA, 1950 bp, Photobacterium profundum; identical to SEQ ID NO: 827
  CDS (1)..(1950)

SEQ ID NO: 5360 - protein, 649 aa, Photobacterium profundum; identical to SEQ ID NO: 828

SEQ ID NO: 5361 - DNA, 1674 bp, Methanococcus maripaludis; identical to SEQ ID NO: 829
  CDS (1)..(1674)

SEQ ID NO: 5362 - protein, 557 aa, Methanococcus maripaludis; identical to SEQ ID NO: 830

SEQ ID NO: 5363 - DNA, 1911 bp, Methanococcus maripaludis; identical to SEQ ID NO: 831
  CDS (1)..(1911)

SEQ ID NO: 5364 - protein, 636 aa, Methanococcus maripaludis; identical to SEQ ID NO: 832

SEQ ID NO: 5365 - DNA, 1938 bp, Bdellovibrio bacteriovorus; identical to SEQ ID NO: 833
  CDS (1)..(1938)

SEQ ID NO: 5366 - protein, 645 aa, Bdellovibrio bacteriovorus; identical to SEQ ID NO: 834

SEQ ID NO: 5367 - DNA, 1911 bp, Rhodopseudomonas palustris; identical to SEQ ID NO: 835
  CDS (1)..(1911)

SEQ ID NO: 5368 - protein, 636 aa, Rhodopseudomonas palustris; identical to SEQ ID NO: 836

SEQ ID NO: 5369 - DNA, 1692 bp, Rhodopseudomonas palustris; identical to SEQ ID NO: 837
  CDS (1)..(1692)

SEQ ID NO: 5370 - protein, 563 aa, Rhodopseudomonas palustris; identical to SEQ ID NO: 838

SEQ ID NO: 5371 - DNA, 1953 bp, Rhodopseudomonas palustris; identical to SEQ ID NO: 839
  CDS (1)..(1953)

SEQ ID NO: 5372 - protein, 650 aa, Rhodopseudomonas palustris; identical to SEQ ID NO: 840

SEQ ID NO: 5373 - DNA, 1959 bp, uncultured bacterium 314; identical to SEQ ID NO: 841
  CDS (1)..(1959)

SEQ ID NO: 5374 - protein, 652 aa, uncultured bacterium 314; identical to SEQ ID NO: 842

SEQ ID NO: 5375 - DNA, 1938 bp, uncultured bacterium 311; identical to SEQ ID NO: 843
  CDS (1)..(1938)

SEQ ID NO: 5376 - protein, 645 aa, uncultured bacterium 311; identical to SEQ ID NO: 844

SEQ ID NO: 5377 - DNA, 1743 bp, Rattus norvegicus; identical to SEQ ID NO: 845
  CDS (1)..(1743)

SEQ ID NO: 5378 - protein, 580 aa, Rattus norvegicus; identical to SEQ ID NO: 846

SEQ ID NO: 5379 - DNA, 1740 bp, Klebsiella pneumoniae; identical to SEQ ID NO: 847
  CDS (1)..(1740)

SEQ ID NO: 5380 - protein, 579 aa, Klebsiella pneumoniae; identical to SEQ ID NO: 848

SEQ ID NO: 5381 - DNA, 1821 bp, Homo sapiens; identical to SEQ ID NO: 849
  CDS (1)..(1821)

SEQ ID NO: 5382 - protein, 606 aa, Homo sapiens; identical to SEQ ID NO: 850

SEQ ID NO: 5383 - DNA, 1716 bp, Thermoproteus tenax; identical to SEQ ID NO: 851
  CDS (1)..(1716)

SEQ ID NO: 5384 - protein, 571 aa, Thermoproteus tenax; identical to SEQ ID NO: 852

SEQ ID NO: 5385 - DNA, 2118 bp, Agrobacterium vitis; identical to SEQ ID NO: 853
  CDS (1)..(2118)

SEQ ID NO: 5386 - protein, 705 aa, Agrobacterium vitis; identical to SEQ ID NO: 854

SEQ ID NO: 5387 - DNA, 1578 bp, Listeria monocytogenes; identical to SEQ ID NO: 855
  CDS (1)..(1578)

SEQ ID NO: 5388 - protein, 525 aa, Listeria monocytogenes; identical to SEQ ID NO: 856

SEQ ID NO: 5389 - DNA, 1986 bp, Desulfovibrio vulgaris; identical to SEQ ID NO: 857
  CDS (1)..(1986)

SEQ ID NO: 5390 - protein, 661 aa, Desulfovibrio vulgaris; identical to SEQ ID NO: 858

SEQ ID NO: 5391 - DNA, 1656 bp, Desulfovibrio vulgaris; identical to SEQ ID NO: 859
  CDS (1)..(1656)

SEQ ID NO: 5392 - protein, 551 aa, Desulfovibrio vulgaris; identical to SEQ ID NO: 860

SEQ ID NO: 5393 - DNA, 1947 bp, Desulfovibrio vulgaris; identical to SEQ ID NO: 861
  CDS (1)..(1947)

SEQ ID NO: 5394 - protein, 648 aa, Desulfovibrio vulgaris; identical to SEQ ID NO: 862

SEQ ID NO: 5395 - DNA, 1890 bp, Thermus thermophilus; identical to SEQ ID NO: 863
  CDS (1)..(1890)

SEQ ID NO: 5396 - protein, 629 aa, Thermus thermophilus; identical to SEQ ID NO: 864

SEQ ID NO: 5397 - DNA, 1884 bp, Thermus thermophilus; identical to SEQ ID NO: 865
  CDS (1)..(1884)

SEQ ID NO: 5398 - protein, 627 aa, Thermus thermophilus; identical to SEQ ID NO: 866

SEQ ID NO: 5399 - DNA, 2538 bp, Thermus thermophilus; identical to SEQ ID NO: 867
  CDS (1)..(2538)

SEQ ID NO: 5400 - protein, 845 aa, Thermus thermophilus; identical to SEQ ID NO: 868

SEQ ID NO: 5401 - DNA, 1947 bp, Thermus thermophilus; identical to SEQ ID NO: 869
  CDS (1)..(1947)

SEQ ID NO: 5402 - protein, 648 aa, Thermus thermophilus; identical to SEQ ID NO: 870

SEQ ID NO: 5403 - DNA, 1719 bp, Bacillus cereus; identical to SEQ ID NO: 871
  CDS (1)..(1719)

SEQ ID NO: 5404 - protein, 572 aa, Bacillus cereus; identical to SEQ ID NO: 872

SEQ ID NO: 5405 - DNA, 1653 bp, Treponema denticola; identical to SEQ ID NO: 873
  CDS (1)..(1653)

SEQ ID NO: 5406 - protein, 550 aa, Treponema denticola; identical to SEQ ID NO: 874

SEQ ID NO: 5407 - DNA, 1953 bp, Mycobacterium paratuberculosis; identical to SEQ ID NO: 875
  CDS (1)..(1953)

SEQ ID NO: 5408 - protein, 650 aa, Mycobacterium paratuberculosis; identical to SEQ ID NO: 876

SEQ ID NO: 5409 - DNA, 2064 bp, Ashbya gossypii; identical to SEQ ID NO: 877
  CDS (1)..(2064)

SEQ ID NO: 5410 - protein, 687 aa, Ashbya gossypii; identical to SEQ ID NO: 878

SEQ ID NO: 5411 - DNA, 2085 bp, Ashbya gossypii; identical to SEQ ID NO: 879
  CDS (1)..(2085)

SEQ ID NO: 5412 - protein, 694 aa, Ashbya gossypii; identical to SEQ ID NO: 880

SEQ ID NO: 5413 - DNA, 1977 bp, Dictyostelium discoideum; identical to SEQ ID NO: 881
  CDS (1)..(1977)

SEQ ID NO: 5414 - protein, 658 aa, Dictyostelium discoideum; identical to SEQ ID NO: 882

SEQ ID NO: 5415 - DNA, 2046 bp, Dictyostelium discoideum; identical to SEQ ID NO: 883
  CDS (1)..(2046)

SEQ ID NO: 5416 - protein, 681 aa, Dictyostelium discoideum; identical to SEQ ID NO: 884

SEQ ID NO: 5417 - DNA, 2316 bp, Oryza sativa; identical to SEQ ID NO: 885
  CDS (1)..(2316)

SEQ ID NO: 5418 - protein, 771 aa, Oryza sativa; identical to SEQ ID NO: 886

SEQ ID NO: 5419 - DNA, 1965 bp, Wolinella succinogenes; identical to SEQ ID NO: 887
  CDS (1)..(1965)

SEQ ID NO: 5420 - protein, 654 aa, Wolinella succinogenes; identical to SEQ ID NO: 888

SEQ ID NO: 5421 - DNA, 1956 bp, Photorhabdus luminescens; identical to SEQ ID NO: 889
  CDS (1)..(1956)

SEQ ID NO: 5422 - protein, 651 aa, Photorhabdus luminescens; identical to SEQ ID NO: 890

SEQ ID NO: 5423 - DNA, 2043 bp, Vibrio vulnificus; identical to SEQ ID NO: 891
  CDS (1)..(2043)

SEQ ID NO: 5424 - protein, 680 aa, Vibrio vulnificus; identical to SEQ ID NO: 892

SEQ ID NO: 5425 - DNA, 2013 bp, Vibrio vulnificus; identical to SEQ ID NO: 893
  CDS (1)..(2013)

SEQ ID NO: 5426 - protein, 670 aa, Vibrio vulnificus; identical to SEQ ID NO: 894

SEQ ID NO: 5427 - DNA, 1887 bp, Photorhabdus luminescens; identical to SEQ ID NO: 895
  CDS (1)..(1887)

SEQ ID NO: 5428 - protein, 628 aa, Photorhabdus luminescens; identical to SEQ ID NO: 896

SEQ ID NO: 5429 - DNA, 1944 bp, Gloeobacter violaceus; identical to SEQ ID NO: 897
  CDS (1)..(1944)

SEQ ID NO: 5430 - protein, 647 aa, Gloeobacter violaceus; identical to SEQ ID NO: 898

SEQ ID NO: 5431 - DNA, 1965 bp, Chromobacterium violaceum; identical to SEQ ID NO: 899
  CDS (1)..(1965)

SEQ ID NO: 5432 - protein, 654 aa, Chromobacterium violaceum; identical to SEQ ID NO: 900

SEQ ID NO: 5433 - DNA, 1962 bp, Chromobacterium violaceum; identical to SEQ ID NO: 901
  CDS (1)..(1962)

SEQ ID NO: 5434 - protein, 653 aa, Chromobacterium violaceum; identical to SEQ ID NO: 902

SEQ ID NO: 5435 - DNA, 1713 bp, Anopheles gambiae str; identical to SEQ ID NO: 903
  CDS (1)..(1713)

SEQ ID NO: 5436 - protein, 570 aa, Anopheles gambiae str; identical to SEQ ID NO: 904

SEQ ID NO: 5437 - DNA, 2856 bp, Plasmodium yoelii yoelii; identical to SEQ ID NO: 905
  CDS (1)..(2856)

SEQ ID NO: 5438 - protein, 951 aa, Plasmodium yoelii yoelii; identical to SEQ ID NO: 906

SEQ ID NO: 5439 - DNA, 2130 bp, Neurospora crassa; identical to SEQ ID NO: 907
  CDS (1)..(2130)

SEQ ID NO: 5440 - protein, 709 aa, Neurospora crassa; identical to SEQ ID NO: 908

SEQ ID NO: 5441 - DNA, 2070 bp, Synechococcus sp; identical to SEQ ID NO: 909
  CDS (1)..(2070)

SEQ ID NO: 5442 - protein, 689 aa, Synechococcus sp; identical to SEQ ID NO: 910

SEQ ID NO: 5443 - DNA, 1983 bp, Prochlorococcus marinus subsp; identical to SEQ ID NO: 911
  CDS (1)..(1983)

SEQ ID NO: 5444 - protein, 660 aa, Prochlorococcus marinus subsp; identical to SEQ ID NO: 912

SEQ ID NO: 5445 - DNA, 1977 bp, Prochlorococcus marinus; identical to SEQ ID NO: 913
  CDS (1)..(1977)

SEQ ID NO: 5446 - protein, 658 aa, Prochlorococcus marinus; identical to SEQ ID NO: 914

SEQ ID NO: 5447 - DNA, 1977 bp, Prochlorococcus marinus; identical to SEQ ID NO: 915
  CDS (1)..(1977)

SEQ ID NO: 5448 - protein, 658 aa, Prochlorococcus marinus; identical to SEQ ID NO: 916

SEQ ID NO: 5449 - DNA, 1902 bp, Helicobacter hepaticus; identical to SEQ ID NO: 917
  CDS (1)..(1902)

SEQ ID NO: 5450 - protein, 633 aa, Helicobacter hepaticus; identical to SEQ ID NO: 918

SEQ ID NO: 5451 - DNA, 1890 bp, Bordetella parapertussis; identical to SEQ ID NO: 919
  CDS (1)..(1890)

SEQ ID NO: 5452 - protein, 629 aa, Bordetella parapertussis; identical to SEQ ID NO: 920

SEQ ID NO: 5453 - DNA, 2046 bp, Bordetella parapertussis; identical to SEQ ID NO: 921
  CDS (1)..(2046)

SEQ ID NO: 5454 - protein, 681 aa, Bordetella parapertussis; identical to SEQ ID NO: 922

SEQ ID NO: 5455 - DNA, 1950 bp, Bordetella bronchiseptica; identical to SEQ ID NO: 923
  CDS (1)..(1950)

SEQ ID NO: 5456 - protein, 649 aa, Bordetella bronchiseptica; identical to SEQ ID NO: 924

SEQ ID NO: 5457 - DNA, 3626 bp, Homo sapiens; identical to SEQ ID NO: 925
  CDS (6)..(2069)

SEQ ID NO: 5458 - protein, 687 aa, Homo sapiens [sequence omitted]

SEQ ID NO: 5459 - DNA, 1941 bp, Bacillus cereus; identical to SEQ ID NO: 927
  CDS (1)..(1941)

SEQ ID NO: 5460 - protein, 646 aa, Bacillus cereus; identical to SEQ ID NO: 928

SEQ ID NO: 5461 - DNA, 1968 bp, Streptomyces avermitilis; identical to SEQ ID NO: 929
  CDS (1)..(1968)

SEQ ID NO: 5462 - protein, 655 aa, Streptomyces avermitilis; identical to SEQ ID NO: 930

SEQ ID NO: 5463 - DNA, 2019 bp, Streptomyces avermitilis; identical to SEQ ID NO: 931
  CDS (1)..(2019)

SEQ ID NO: 5464 - protein, 672 aa, Streptomyces avermitilis; identical to SEQ ID NO: 932

SEQ ID NO: 5465 - DNA, 1953 bp, Coxiella burnetii; identical to SEQ ID NO: 933
  CDS (1)..(1953)

SEQ ID NO: 5466 - protein, 650 aa, Coxiella burnetii; identical to SEQ ID NO: 934

SEQ ID NO: 5467 - DNA, 1968 bp, Dictyostelium discoideum; identical to SEQ ID NO: 935
  CDS (1)..(1968)

SEQ ID NO: 5468 - protein, 655 aa, Dictyostelium discoideum; identical to SEQ ID NO: 936

SEQ ID NO: 5469 - DNA, 1956 bp, Dictyostelium discoideum; identical to SEQ ID NO: 937
  CDS (1)..(1956)

SEQ ID NO: 5470 - protein, 651 aa, Dictyostelium discoideum; identical to SEQ ID NO: 938

SEQ ID NO: 5471 - DNA, 1968 bp, Dictyostelium discoideum; identical to SEQ ID NO: 939
  CDS (1)..(1968)

SEQ ID NO: 5472 - protein, 655 aa, Dictyostelium discoideum; identical to SEQ ID NO: 940

SEQ ID NO: 5473 - DNA, 1944 bp, Dictyostelium discoideum; identical to SEQ ID NO: 941
  CDS (1)..(1944)

SEQ ID NO: 5474 - protein, 647 aa, Dictyostelium discoideum; identical to SEQ ID NO: 942

SEQ ID NO: 5475 - DNA, 1941 bp, Dictyostelium discoideum; identical to SEQ ID NO: 943
  CDS (1)..(1941)

SEQ ID NO: 5476 - protein, 646 aa, Dictyostelium discoideum; identical to SEQ ID NO: 944

SEQ ID NO: 5477 - DNA, 2085 bp, Neurospora crassa; identical to SEQ ID NO: 945
  CDS (1)..(2085)

SEQ ID NO: 5478 - protein, 694 aa, Neurospora crassa; identical to SEQ ID NO: 946

SEQ ID NO: 5479 - DNA, 2034 bp, Vibrio parahaemolyticus; identical to SEQ ID NO: 947
  CDS (1)..(2034)

SEQ ID NO: 5480 - protein, 677 aa, Vibrio parahaemolyticus; identical to SEQ ID NO: 948

SEQ ID NO: 5481 - DNA, 1971 bp, Vibrio parahaemolyticus; identical to SEQ ID NO: 949
  CDS (1)..(1971)

SEQ ID NO: 5482 - protein, 656 aa, Vibrio parahaemolyticus; identical to SEQ ID NO: 950

SEQ ID NO: 5483 - DNA, 1905 bp, Vibrio parahaemolyticus; identical to SEQ ID NO: 951
  CDS (1)..(1905)

SEQ ID NO: 5484 - protein, 634 aa, Vibrio parahaemolyticus; identical to SEQ ID NO: 952

SEQ ID NO: 5485 - DNA, 1953 bp, Pseudomonas putida; identical to SEQ ID NO: 953
  CDS (1)..(1953)

SEQ ID NO: 5486 - protein, 650 aa, Pseudomonas putida; identical to SEQ ID NO: 954

SEQ ID NO: 5487 - DNA, 1890 bp, Pseudomonas putida; identical to SEQ ID NO: 955
  CDS (1)..(1890)

SEQ ID NO: 5488 - protein, 629 aa, Pseudomonas putida; identical to SEQ ID NO: 956

SEQ ID NO: 5489 - DNA, 1686 bp, Pseudomonas putida; identical to SEQ ID NO: 957
  CDS (1)..(1686)

SEQ ID NO: 5490 - protein, 561 aa, Pseudomonas putida; identical to SEQ ID NO: 958

SEQ ID NO: 5491 - DNA, 1689 bp, Bradyrhizobium japonicum; identical to SEQ ID NO: 959
  CDS (1)..(1689)

SEQ ID NO: 5492 - protein, 562 aa, Bradyrhizobium japonicum; identical to SEQ ID NO: 960

SEQ ID NO: 5493 - DNA, 2049 bp, Bradyrhizobium japonicum; identical to SEQ ID NO: 961
  CDS (1)..(2049)

SEQ ID NO: 5494 - protein, 682 aa, Bradyrhizobium japonicum; identical to SEQ ID NO: 962

SEQ ID NO: 5495 - DNA, 1911 bp, Bradyrhizobium japonicum; identical to SEQ ID NO: 963
  CDS (1)..(1911)

SEQ ID NO: 5496 - protein, 636 aa, Bradyrhizobium japonicum; identical to SEQ ID NO: 964

SEQ ID NO: 5497 - DNA, 1656 bp, Bacteroides thetaiotaomicron; identical to SEQ ID NO: 965
  CDS (1)..(1656)

SEQ ID NO: 5498 - protein, 551 aa, Bacteroides thetaiotaomicron; identical to SEQ ID NO: 966

SEQ ID NO: 5499 - DNA, 2495 bp, Mus musculus; identical to SEQ ID NO: 967
  CDS (87)..(1580)

SEQ ID NO: 5500 - protein, 497 aa, Mus musculus; identical to SEQ ID NO: 968

SEQ ID NO: 5501 - DNA, 1881 bp, Vibrio vulnificus; identical to SEQ ID NO: 969
  CDS (1)..(1881)

SEQ ID NO: 5502 - protein, 626 aa, Vibrio vulnificus; identical to SEQ ID NO: 970

SEQ ID NO: 5503 - DNA, 1986 bp, Oceanobacillus iheyensis; identical to SEQ ID NO: 971
  CDS (1)..(1986)

SEQ ID NO: 5504 - protein, 661 aa, Oceanobacillus iheyensis; identical to SEQ ID NO: 972

SEQ ID NO: 5505 - DNA, 1716 bp, Oceanobacillus iheyensis; identical to SEQ ID NO: 973
  CDS (1)..(1716)

SEQ ID NO: 5506 - protein, 571 aa, Oceanobacillus iheyensis; identical to SEQ ID NO: 974

SEQ ID NO: 5507 - DNA, 1887 bp, Escherichia coli O6; identical to SEQ ID NO: 975
  CDS (1)..(1887)

SEQ ID NO: 5508 - protein, 628 aa, Escherichia coli O6; identical to SEQ ID NO: 976

SEQ ID NO: 5509 - DNA, 1671 bp, Brucella suis; identical to SEQ ID NO: 977
  CDS (1)..(1671)

SEQ ID NO: 5510 - protein, 556 aa, Brucella suis; identical to SEQ ID NO: 978

SEQ ID NO: 5511 - DNA, 1989 bp, Brucella suis; identical to SEQ ID NO: 979
  CDS (1)..(1989)

SEQ ID NO: 5512 - protein, 662 aa, Brucella suis; identical to SEQ ID NO: 980

SEQ ID NO: 5513 - DNA, 2924 bp, Homo sapiens; identical to SEQ ID NO: 981
  CDS (34)..(2178)

SEQ ID NO: 5514 - protein, 714 aa, Homo sapiens [sequence omitted]

SEQ ID NO: 5515 - DNA, 1899 bp, Encephalitozoon cuniculi; identical to SEQ ID NO: 983
  CDS (1)..(1899)

SEQ ID NO: 5516 - protein, 632 aa, Encephalitozoon cuniculi; identical to SEQ ID NO: 984

SEQ ID NO: 5517 - DNA, 2004 bp, Neurospora crassa; identical to SEQ ID NO: 985
  CDS (1)..(2004)

SEQ ID NO: 5518 - protein, 667 aa, Neurospora crassa; identical to SEQ ID NO: 986

SEQ ID NO: 5519 - DNA, 1899 bp, Ralstonia solanacearum; identical to SEQ ID NO: 987
  CDS (1)..(1899)

SEQ ID NO: 5520 - protein, 632 aa, Ralstonia solanacearum; identical to SEQ ID NO: 988

SEQ ID NO: 5521 - DNA, 1956 bp, Pyrobaculum aerophilum; identical to SEQ ID NO: 989
  CDS (1)..(1956)

SEQ ID NO: 5522 - protein, 651 aa, Pyrobaculum aerophilum; identical to SEQ ID NO: 990

SEQ ID NO: 5523 - DNA, 1881 bp, Pyrobaculum aerophilum; identical to SEQ ID NO: 991
  CDS (1)..(1881)

SEQ ID NO: 5524 - protein, 626 aa, Pyrobaculum aerophilum; identical to SEQ ID NO: 992

SEQ ID NO: 5525 - DNA, 1848 bp, Pyrobaculum aerophilum; identical to SEQ ID NO: 993
  CDS (1)..(1848)

SEQ ID NO: 5526 - protein, 615 aa, Pyrobaculum aerophilum; identical to SEQ ID NO: 994

SEQ ID NO: 5527 - DNA, 1908 bp, Rhizobium meliloti; identical to SEQ ID NO: 995
  CDS (1)..(1908)

SEQ ID NO: 5528 - protein, 635 aa, Rhizobium meliloti; identical to SEQ ID NO: 996

SEQ ID NO: 5529 - DNA, 1647 bp, Rhizobium meliloti; identical to SEQ ID NO: 997
  CDS (1)..(1647)

SEQ ID NO: 5530 - protein, 548 aa, Rhizobium meliloti; identical to SEQ ID NO: 998

SEQ ID NO: 5531 - DNA, 2028 bp, Zygosaccharomyces bailii; identical to SEQ ID NO: 999
  CDS (1)..(2028)

SEQ ID NO: 5532 - protein, 675 aa, Zygosaccharomyces bailii; identical to SEQ ID NO: 1000

SEQ ID NO: 5533 - DNA, 1635 bp, Sulfolobus tokodaii; identical to SEQ ID NO: 1001
  CDS (1)..(1635)

SEQ ID NO: 5534 - protein, 544 aa, Sulfolobus tokodaii; identical to SEQ ID NO: 1002

SEQ ID NO: 5535 - DNA, 1731 bp, Sulfolobus tokodaii; identical to SEQ ID NO: 1003
  CDS (1)..(1731)

SEQ ID NO: 5536 - protein, 576 aa, Sulfolobus tokodaii; identical to SEQ ID NO: 1004

SEQ ID NO: 5537 - DNA, 1986 bp, Sulfolobus tokodaii; identical to SEQ ID NO: 1005
  CDS (1)..(1986)

SEQ ID NO: 5538 - protein, 661 aa, Sulfolobus tokodaii; identical to SEQ ID NO: 1006

SEQ ID NO: 5539 - DNA, 1866 bp, Sulfolobus tokodaii; identical to SEQ ID NO: 1007
  CDS (1)..(1866)

SEQ ID NO: 5540 - protein, 621 aa, Sulfolobus tokodaii; identical to SEQ ID NO: 1008

SEQ ID NO: 5541 - DNA, 1494 bp, Sulfolobus tokodaii; identical to SEQ ID NO: 1009
  CDS (1)..(1494)

SEQ ID NO: 5542 - protein, 497 aa, Sulfolobus tokodaii; identical to SEQ ID NO: 1010

SEQ ID NO: 5543 - DNA, 1980 bp, Sulfolobus tokodaii; identical to SEQ ID NO: 1011
  CDS (1)..(1980)

SEQ ID NO: 5544 - protein, 659 aa, Sulfolobus tokodaii; identical to SEQ ID NO: 1012

SEQ ID NO: 5545 - DNA, 1989 bp, Sulfolobus tokodaii; identical to SEQ ID NO: 1013
  CDS (1)..(1989)

SEQ ID NO: 5546 - protein, 662 aa, Sulfolobus tokodaii; identical to SEQ ID NO: 1014

SEQ ID NO: 5547 - DNA, 1689 bp, Sulfolobus tokodaii; identical to SEQ ID NO: 1015
  CDS (1)..(1689)

SEQ ID NO: 5548 - protein, 562 aa, Sulfolobus tokodaii; identical to SEQ ID NO: 1016

SEQ ID NO: 5549 - DNA, 1860 bp, Thermoplasma volcanium; identical to SEQ ID NO: 1017
  CDS (1)..(1860)

SEQ ID NO: 5550 - protein, 619 aa, Thermoplasma volcanium; identical to SEQ ID NO: 1018

SEQ ID NO: 5551 - DNA, 1926 bp, Thermoplasma volcanium; identical to SEQ ID NO: 1019
  CDS (1)..(1926)

SEQ ID NO: 5552 - protein, 641 aa, Thermoplasma volcanium; identical to SEQ ID NO: 1020

SEQ ID NO: 5553 - DNA, 1953 bp, Thermoplasma volcanium; identical to SEQ ID NO: 1021
  CDS (1)..(1953)

SEQ ID NO: 5554 - protein, 650 aa, Thermoplasma volcanium; identical to SEQ ID NO: 1022

SEQ ID NO: 5555 - DNA, 1959 bp, Rhizobium loti; identical to SEQ ID NO: 1023
  CDS (1)..(1959)

SEQ ID NO: 5556 - protein, 652 aa, Rhizobium loti; identical to SEQ ID NO: 1024

SEQ ID NO: 5557 - DNA, 1689 bp, Rhizobium loti; identical to SEQ ID NO: 1025
  CDS (1)..(1689)

SEQ ID NO: 5558 - protein, 562 aa, Rhizobium loti; identical to SEQ ID NO: 1026

SEQ ID NO: 5559 - DNA, 1929 bp, Rhizobium loti; identical to SEQ ID NO: 1027
  CDS (1)..(1929)

SEQ ID NO: 5560 - protein, 642 aa, Rhizobium loti; identical to SEQ ID NO: 1028

SEQ ID NO: 5561 - DNA, 1680 bp, Rhizobium loti; identical to SEQ ID NO: 1029
  CDS (1)..(1680)

SEQ ID NO: 5562 - protein, 559 aa, Rhizobium loti; identical to SEQ ID NO: 1030

SEQ ID NO: 5563 - DNA, 1686 bp, Pseudomonas putida; identical to SEQ ID NO: 1031
  CDS (1)..(1686)

SEQ ID NO: 5564 - protein, 561 aa, Pseudomonas putida; identical to SEQ ID NO: 1032

SEQ ID NO: 5565 - DNA, 2582 bp, Bos taurus; identical to SEQ ID NO: 1033
  CDS (1)..(2028)

SEQ ID NO: 5566 - protein, 675 aa, Bos taurus; identical to SEQ ID NO: 1034

SEQ ID NO: 5567 - DNA, 1800 bp, Thermoplasma acidophilum; identical to SEQ ID NO: 1035
  CDS (1)..(1800)

SEQ ID NO: 5568 - protein, 599 aa, Thermoplasma acidophilum; identical to SEQ ID NO: 1036

SEQ ID NO: 5569 - DNA, 1944 bp, Thermoplasma acidophilum; identical to SEQ ID NO: 1037
  CDS (1)..(1944)

SEQ ID NO: 5570 - protein, 647 aa, Thermoplasma acidophilum; identical to SEQ ID NO: 1038

SEQ ID NO: 5571 - DNA, 1860 bp, Thermoplasma acidophilum; identical to SEQ ID NO: 1039
  CDS (1)..(1860)

SEQ ID NO: 5572 - protein, 619 aa, Thermoplasma acidophilum; identical to SEQ ID NO: 1040

SEQ ID NO: 5573 - DNA, 1977 bp, Streptomyces coelicolor; identical to SEQ ID NO: 1041
  CDS (1)..(1977)

SEQ ID NO: 5574 - protein, 658 aa, Streptomyces coelicolor; identical to SEQ ID NO: 1042

SEQ ID NO: 5575 - DNA, 2113 bp, Arabidopsis thaliana; identical to SEQ ID NO: 1043
  CDS (1)..(2082)

SEQ ID NO: 5576 - protein, 693 aa, Arabidopsis thaliana; identical to SEQ ID NO: 1044

SEQ ID NO: 5577 - DNA, 2088 bp, Leishmania major; identical to SEQ ID NO: 1045
  CDS (1)..(2088)

SEQ ID NO: 5578 - protein, 695 aa, Leishmania major; identical to SEQ ID NO: 1046

SEQ ID NO: 5579 - DNA, 1956 bp, Tetrahymena pyriformis; identical to SEQ ID NO: 1047
  CDS (1)..(978)

SEQ ID NO: 5580 - protein, 325 aa, Tetrahymena pyriformis; identical to SEQ ID NO: 1048

SEQ ID NO: 5581 - DNA, 2267 bp, Drosophila melanogaster; identical to SEQ ID NO: 1049
  CDS (113)..(2137)

SEQ ID NO: 5582 - protein, 674 aa, Drosophila melanogaster; identical to SEQ ID NO: 1050

SEQ ID NO: 5583 - DNA, 2383 bp, Solanum tuberosum; identical to SEQ ID NO: 1051
  CDS (271)..(2166)

SEQ ID NO: 5584 - protein, 631 aa, Solanum tuberosum; identical to SEQ ID NO: 1052

SEQ ID NO: 5585 - DNA, 3584 bp, Mus musculus; identical to SEQ ID NO: 1053
  CDS (33)..(2081)

SEQ ID NO: 5586 - protein, 682 aa, Mus musculus; identical to SEQ ID NO: 1054

SEQ ID NO: 5587 - DNA, 2052 bp, Kluyveromyces lactis; identical to SEQ ID NO: 1055
  CDS (1)..(2052)

SEQ ID NO: 5588 - protein, 683 aa, Kluyveromyces lactis [sequence omitted]

SEQ ID NO: 5589 - DNA, 2492 bp, Saccharomyces cerevisiae; identical to SEQ ID NO: 1057
  CDS (162)..(2303)

SEQ ID NO: 5590 - protein, 713 aa, Saccharomyces cerevisiae [sequence omitted]

SEQ ID NO: 5591 - DNA, 3543 bp, Kluyveromyces lactis; identical to SEQ ID NO: 1059
  CDS (817)..(2871)

SEQ ID NO: 5592 - protein, 684 aa, Kluyveromyces lactis; identical to SEQ ID NO: 1060

SEQ ID NO: 5593 - DNA, 1935 bp, Pseudomonas putida; identical to SEQ ID NO: 1061
  CDS (1)..(1935)

SEQ ID NO: 5594 - protein, 644 aa, Pseudomonas putida [sequence omitted]

SEQ ID NO: 5595 - DNA, 1950 bp, Rhizobium meliloti; identical to SEQ ID NO: 1063
  CDS (1)..(1950)

SEQ ID NO: 5596 - protein, 649 aa, Rhizobium meliloti [sequence omitted]

SEQ ID NO: 5597 - DNA, 1959 bp, Agrobacterium rhizogenes; identical to SEQ ID NO: 1065
  CDS (1)..(1959)

SEQ ID NO: 5598 - protein, 652 aa, Agrobacterium rhizogenes; identical to SEQ ID NO: 1066

SEQ ID NO: 5599 - DNA, 1956 bp, Agrobacterium tumefaciens; identical to SEQ ID NO: 1067
  CDS (1)..(1956)

SEQ ID NO: 5600 - protein, 651 aa, Agrobacterium tumefaciens; identical to SEQ ID NO: 1068

SEQ ID NO: 5601 - DNA, 1947 bp, Bradyrhizobium japonicum; identical to SEQ ID NO: 1069
  CDS (1)..(1947)

SEQ ID NO: 5602 - protein, 648 aa, Bradyrhizobium japonicum [sequence omitted]

SEQ ID NO: 5603 - DNA, 1956 bp, Brucella suis; identical to SEQ ID NO: 1071
  CDS (1)..(1956)

SEQ ID NO: 5604 - protein, 651 aa, Brucella suis; identical to SEQ ID NO: 1072

SEQ ID NO: 5605 - DNA, 2028 bp, Candida albicans; identical to SEQ ID NO: 1073
  CDS (1)..(2028)

SEQ ID NO: 5606 - protein, 675 aa, Candida albicans [sequence omitted]

SEQ ID NO: 5607 - DNA, 1980 bp, Chlorobium tepidum; identical to SEQ ID NO: 1075
  CDS (1)..(1980)

SEQ ID NO: 5608 - protein, 659 aa, Chlorobium tepidum [sequence omitted]

SEQ ID NO: 5609 - DNA, 2041 bp, Coprinus cinereus; identical to SEQ ID NO: 1077
  CDS (20)..(2005)

SEQ ID NO: 5610 - protein, 661 aa, Coprinus cinereus [sequence omitted]

SEQ ID NO: 5611 - DNA, 2222 bp, Cryptosporidium parvum; identical to SEQ ID NO: 1079
  CDS (70)..(2154)

SEQ ID NO: 5612 - protein, 694 aa, Cryptosporidium parvum [sequence omitted]

SEQ ID NO: 5613 - DNA, 2874 bp, Drosophila melanogaster; identical to SEQ ID NO: 1081
  CDS (451)..(2463)

SEQ ID NO: 5614 - protein, 670 aa, Drosophila melanogaster [sequence omitted]

SEQ ID NO: 5615 - DNA, 1986 bp, Leptospira interrogans; identical to SEQ ID NO: 1083
  CDS (1)..(1986)

SEQ ID NO: 5616 - protein, 661 aa, Leptospira interrogans [sequence omitted]

SEQ ID NO: 5617 - DNA, 2535 bp, Mus musculus; identical to SEQ ID NO: 1085
  CDS (15)..(2120)

SEQ ID NO: 5618 - protein, 701 aa, Mus musculus; identical to SEQ ID NO: 1086

SEQ ID NO: 5619 - DNA, 1956 bp, Mycobacterium bovis; identical to SEQ ID NO: 1087
  CDS (1)..(1956)

SEQ ID NO: 5620 - protein, 651 aa, Mycobacterium bovis [sequence omitted]

SEQ ID NO: 5621 - DNA, 1968 bp, Nitrosomonas europaea; identical to SEQ ID NO: 1089
  CDS (1)..(1968)

SEQ ID NO: 5622 - protein, 655 aa, Nitrosomonas europaea [sequence omitted]

SEQ ID NO: 5623 - DNA, 1962 bp, Pasteurella multocida; identical to SEQ ID NO: 1091
  CDS (1)..(1962)

SEQ ID NO: 5624 - protein, 653 aa, Pasteurella multocida [sequence omitted]

SEQ ID NO: 5625 - DNA, 1926 bp, Gamma; identical to SEQ ID NO: 1093
  CDS (1)..(1926)

SEQ ID NO: 5626 - protein, 641 aa, Gamma [sequence omitted]

SEQ ID NO: 5627 - DNA, 1983 bp, Ralstonia solanacearum; identical to SEQ ID NO: 1095
  CDS (1)..(1983)

SEQ ID NO: 5628 - protein, 660 aa, Ralstonia solanacearum; identical to SEQ ID NO: 1096

SEQ ID NO: 5629 - DNA, 1956 bp, Rhizobium loti; identical to SEQ ID NO: 1097
  CDS (1)..(1956)

SEQ ID NO: 5630 - protein, 651 aa, Rhizobium loti; identical to SEQ ID NO: 1098

SEQ ID NO: 5631 - DNA, 2016 bp, Rhodopirellula baltica; identical to SEQ ID NO: 1099
  CDS (1)..(2016)

SEQ ID NO: 5632 - protein, 671 aa, Rhodopirellula baltica [sequence omitted]

SEQ ID NO: 5633 - DNA, 1959 bp, Salmonella typhimurium; identical to SEQ ID NO: 1101
  CDS (1)..(1959)

SEQ ID NO: 5634 - protein, 652 aa, Salmonella typhimurium; identical to SEQ ID NO: 1102

SEQ ID NO: 5635 - DNA, 1953 bp, Shewanella oneidensis; identical to SEQ ID NO: 1103
  CDS (1)..(1953)

SEQ ID NO: 5636 - protein, 650 aa, Shewanella oneidensis [sequence omitted]

SEQ ID NO: 5637 - DNA, 1959 bp, Streptomyces avermitilis; identical to SEQ ID NO: 1105
  CDS (1)..(1959)

SEQ ID NO: 5638 - protein, 652 aa, Streptomyces avermitilis [sequence omitted]

SEQ ID NO: 5639 - DNA, 1971 bp, Synechococcus elongatus; identical to SEQ ID NO: 1107
  CDS (1)..(1971)

SEQ ID NO: 5640 - protein, 656 aa, Synechococcus elongatus [sequence omitted]

SEQ ID NO: 5641 - DNA, 1950 bp, Vibrio cholerae; identical to SEQ ID NO: 1109
  CDS (1)..(1950)

SEQ ID NO: 5642 - protein, 649 aa, Vibrio cholerae [sequence omitted]

SEQ ID NO: 5643 - DNA, 1953 bp, Vibrio parahaemolyticus; identical to SEQ ID NO: 1111
  CDS (1)..(1953)

SEQ ID NO: 5644 - protein, 650 aa, Vibrio parahaemolyticus; identical to SEQ ID NO: 1112

SEQ ID NO: 5645 - DNA, 1944 bp, Xanthomonas axonopodis; identical to SEQ ID NO: 1113
  CDS (1)..(1944)

SEQ ID NO: 5646 - protein, 647 aa, Xanthomonas axonopodis [sequence omitted]

SEQ ID NO: 5647 - DNA, 1944 bp, Xanthomonas campestris; identical to SEQ ID NO: 1115
  CDS (1)..(1944)

SEQ ID NO: 5648 - protein, 647 aa, Xanthomonas campestris; identical to SEQ ID NO: 1116

SEQ ID NO: 5649 - DNA, 1944 bp, Xylella fastidiosa; identical to SEQ ID NO: 1117
  CDS (1)..(1944)

SEQ ID NO: 5650 - protein, 647 aa, Xylella fastidiosa; identical to SEQ ID NO: 1118

SEQ ID NO: 5651 - DNA, 26 bp, Artificial sequence
  Primer sequence
atgacaatcaaggaacataaagtagt

SEQ ID NO: 5652 - DNA, 28 bp, Artificial sequence
  Primer sequence
ttatttctttttttgagagaaaaattgg

SEQ ID NO: 5653 - DNA, 1239 bp, Saccharomyces cerevisiae
  CDS (1)..(1239)
atgacaaagattaaggtagctaaccccattgtggaaatggacggcgatgagcaaacaagaataatctggcatttaatcagggacaagttagtcttgccctatcttgacgttgatttgaagtactacgatctttccgtggagtatcgtgaccagactaatgatcaagtaactgtggattctgccaccgcgactttaaagtatggagtagctgtcaaatgcgcgactattacacccgatgaggcaagggtcgaggaatttcatttgaaaaagatgtggaaatctccaaatggtactattagaaacattttgggtggtacagtgttcagagaacctattattatccctagaattccaaggctagttcctcaatgggagaagcccatcatcattgggagacacgcattcggcgatcagtacaaagctaccgatgtaatagtccctgaagaaggcgagttgaggcttgtttataaatccaagagcggaactcatgatgtagatctgaaggtatttgactacccagaacatggtggggttgccatgatgatgtacaacactacagattcgatcgaagggtttgcgaaggcctcctttgaattggccattgaaaggaagttaccattatattccactactaagaatactattttgaagaagtatgatggtaaattcaaagatgttttcgaagccatgtatgctagaagttataaagagaagtttgaatcccttggcatctggtacgagcaccgtttaattgatgatatggtggcccaaatgttgaaatctaaaggtggatacataattgccatgaaaaattacgacggtgacgtagaatcagatattgttgcacaaggatttggctccttggggttaatgacatctgtgttgattaccccggacggtaaaacctttgaaagcgaagccgcccacggtacagtaacaagacattttagacagcatcagcaaggaaaggagacgtcaacaaattccattgcatcaattttcgcgtggactagaggtattattcaaaggggtaaacttgataatactccagatgtagttaagttcggccaaatattggaaagcgctacggtaaatacagtgcaagaagatggaatcatgactaaagatttggcgctcattctcggtaagtctgaaagatccgcttatgtcactaccgaggagttcattgacgcggtggaatctagattgaaaaaagagttcgaggcagctgcattgtaa

SEQ ID NO: 5654 - protein, 412 aa, Saccharomyces cerevisiae
MTKIKVANPIVEMDGDEQTRIIWHLIRDKLVLPYLDVDLKYYDLSVEYRDQTNDQVTVDSATATLKYGVAVKCATITPDEARVEEFHLKKMWKSPNGTIRNILGGTVFREPIIIPRIPRLVPQWEKPIIIGRHAFGDQYKATDVIVPEEGELRLVYKSKSGTHDVDLKVFDYPEHGGVAMMMYNTTDSIEGFAKASFELAIERKLPLYSTTKNTILKKYDGKFKDVFEAMYARSYKEKFESLGIWYEHRLIDDMVAQMLKSKGGYIIAMKNYDGDVESDIVAQGFGSLGLMTSVLITPDGKTFESEAAHGTVTRHFRQHQQGKETSTNSIASIFAWTRGIIQRGKLDNTPDVVKFGQILESATVNTVQEDGIMTKDLALILGKSERSAYVTTEEFIDAVESRLKKEFEAAAL

SEQ ID NO: 5655 - DNA, 1719 bp, Rattus norvegicus (Norway rat)
  CDS (30)..(1274)
cgggtgtgagcggggttattgaagtaaaaatgtccagaaaaatccatggcggttctgtggtggaaatgcaaggagatgaaatgacacggatcatctgggaattgattaaagaaaagctcattcttccctacgtggaactggatctgcatagctatgacttaggcatagagaatcgggatgccaccaatgaccaggtcaccaaggatgctgcggaggctataaagaaatacaacgtcggcgtcaagtgtgctaccatcacccccgatgagaagagggttgaggagttcaagttgaaacaaatgtggaaatcacccaacggtaccatccggaacattctgggcggcactgtcttcagagaagctattatctgcaaaaatatcccccggctagtgacaggctgggtaaaacccatcatcattggccgacacgcctatggggaccaatacagagcaacagatttcgttgttcctgggcctggaaaagtagagataacctacacaccaaaagatgggtcgcagaaagtgacatacctggtgcatgactttgaagaaggtggtggtgttgccatgggtatgtacaaccaggataagtcaattgaagattttgcacacagttccttccaaatggctctgtcgaagggctggcctttgtatctaagcaccaagaacactattctgaagaagtatgatggacgcttcaaagacatcttccaggagatctatgacaagcaatacaagtccaagtttgaagctcagaagatctggtatgaacacaggctcatagatgacatggtggcccaggctatgaaatcagaaggaggcttcatctgggcctgtaagaactatgatggtgatgtgcagtcagactcagtagcccaaggttatggctcccttggcatgatgaccagtgtgctgatttgtccagatggtaagacggtagaagcagaggctgcccatggcactgtcacacgtcactaccgcatgtaccagaaaggacaggagacgtccaccaatcccattgcttccatttttgcctggtcccgagggttagcccacagagcaaagcttgacaacaatactgagctcagcttctttgcaaatgctttggaagaagtctgcattgagaccattgaggctggctttatgactaaggacttggctgcttgcattaaaggcttacccaatgtacagcgttctgactacttgaatacatttgagtttatggacaaacttggagaaaacttgaaggccaaactagctcaggccaaactttaaggtcaaacctgggcttagggcaaatctttgtggtaactaagtccacagtttacatatttcctttttgttttaataacactcaaggttaaaaacaagaatcattttgtaatttgtttagaagacgaagttgaacttttctatatgtttacagcctattttctttttcatacagttattgccaccttaatgaatgtggtggggaaggtttttttaattgtattttactgtgtaatagcagtctaggaattgtgttagtatctgttcacaattaactgtcactttttatttgctctaatgtaaatgaccaaaatcagaaatgctccaagggtgaacaatcactacactatgtttccccgtaaaggtgaaggagaggctcacctcccctactgtccatgagtgtgaacacagggagcaaaagtgtgcaaatgttgcactgtgtgtggaa

SEQ ID NO: 5656 - protein, 414 aa, Rattus norvegicus (Norway rat)
MSRKIHGGSVVEMQGDEMTRIIWELIKEKLILPYVELDLHSYDLGIENRDATNDQVTKDAAEAIKKYNVGVKCATITPDEKRVEEFKLKQMWKSPNGTIRNILGGTVFREAIICKNIPRLVTGWVKPIIIGRHAYGDQYRATDFVVPGPGKVEITYTPKDGSQKVTYLVHDFEEGGGVAMGMYNQDKSIEDFAHSSFQMALSKGWPLYLSTKNTILKKYDGRFKDIFQEIYDKQYKSKFEAQKIWYEHRLIDDMVAQAMKSEGGFIWACKNYDGDVQSDSVAQGYGSLGMMTSVLICPDGKTVEAEAAHGTVTRHYRMYQKGQETSTNPIASIFAWSRGLAHRAKLDNNTELSFFANALEEVCIETIEAGFMTKDLAACIKGLPNVQRSDYLNTFEFMDKLGENLKAKLAQAKL

SEQ ID NO: 5657 - DNA, 1212 bp, Caulobacter crescentus
  CDS (1)..(1212)
atggccaagatcaaagtcgccaatcccgtcgtcgacatggacggcgatgaaatgacccgcatcatctggaagctcatcaaggacaagctgatcttcccgtacttggacctggaactggactattacgacctctcggtcgagaaccgcgatgcgaccgacgaccaggtgaccatcgacgcggccaacgcgaccaagaagcacggcgtggccgtcaagtgcgcgaccatcacgcccgatgagcagcgcgtcgaagagttcaagctcaagaagatgtggaagtcgccgaacggcacgatccgcaacatcctgggcggcgtcatcttccgcgagccgatcatctgccagaacgtgccgcgcctggtgccgggctggacccagccgatcatcgtcggccgtcacgccttcggcgaccagtatcgcgcgaccgacttcaagttccccggcaagggcaccctgtcgatcaagttcgtcggcgaagacggccagaccatcgagcacgaagtgttcaaggctccggacgccggcgtcgccatggcgatgtacaatctcgacgagtcgatccgcgatttcgcccacgcctcgttcgcctacggtctgaaccgcggttacccggtctatctctccacgaagaacacgatcctcaaggcctatgacggccgcttcaaggacatcttccaggagatctacgacgccgaatacgccgagaagttcaaggcggccggcatccactacgagcaccgtctgatcgacgacatggtcgcctcggccctgaagtggtcgggcggctacgtctgggcctgtaagaactacgacggcgacgtccagtcggacatcgtcgcccagggcttcgggtcgctgggcctgatgacctcggtgctgatgacgccggacggcaagacggtggaagccgaagccgcccacggcacggtgacccgtcactatcgccagcatcagaagggcgagagcacctcgaccaactcgatcgcctcgatcttcgcctggacgcgtggcctggcccaccgcgccaagctggacgacaaccaggatctggccaacttcgccgccaccctggagaaggtctgcatcgataccgtcgagagcggctacatgaccaaggacctggctctgctggtcggcgacaagcaaggctggctgaccaccgaaggcttcctcgacaagatcgacgagaacctgaagaaggccatggcctaa

SEQ ID NO: 5658 - protein, 403 aa, Caulobacter crescentus
MAKIKVANPVVDMDGDEMTRIIWKLIKDKLIFPYLDLELDYYDLSVENRDATDDQVTIDAANATKKHGVAVKCATITPDEQRVEEFKLKKMWKSPNGTIRNILGGVIFREPIICQNVPRLVPGWTQPIIVGRHAFGDQYRATDFKFPGKGTLSIKFVGEDGQTIEHEVFKAPDAGVAMAMYNLDESIRDFAHASFAYGLNRGYPVYLSTKNTILKAYDGRFKDIFQEIYDAEYAEKFKAAGIHYEHRLIDDMVASALKWSGGYVWACKNYDGDVQSDIVAQGFGSLGLMTSVLMTPDGKTVEAEAAHGTVTRHYRQHQKGESTSTNSIASIFAWTRGLAHRAKLDDNQDLANFAATLEKVCIDTVESGYMTKDLALLVGDKQGWLTTEGFLDKIDENLKKAMA

SEQ ID NO: 5659 - DNA, 1551 bp, Arabidopsis thaliana (mouse-ear cress)
  CDS (21)..(1271)
accaacctctgcgggcaaagatggaattcgagaagatcaaggtgatcaatcccgttgttgaaatggatggagacgaaatgactcgagttatctggaaattcatcaaagacaagcttattttccctttcctggagctggatatcaaatactttgatcttggactgcctaaccgcgatttcactgatgataaggttactatagagactgctgaagctactttaaagtataatgtggctattaagtgtgcgacgattactccggatgaagctcgtgttagggagttcggcttaaagaaaatgtggaggagtcctaatggaactataaggaacattttaaacggcacagttttcagggaacctatcatttgcagaaacatccctcgtcttgttccaggatggacgaagccaatctgtattggaaggcatgcttttggtgatcagtatagagccactgatctcattgtcaatgaaccaggaaaactgaaactagtttttgagccaagtggatcttctcagaaaacagaattcgaagtcttcaatttcaccggtggaggtgttgctttagccatgtataacactgatgagtctattcgtgcatttgctgagtcctcgatgtacacagcttaccagaaaaagtggccactttacctctccacaaaaaacaccatcctcaaaatatatgatggaagattcaaggatatattccaagaagtttatgaagctaactggagatccaagtatgaagcagcagggatatggtatgagcatcgtttgatagatgatatggttgcatatgccatgaaaagtgaagggggttacgtctgggcatgcaagaattacgatggagatgtacagagcgatttcttagcccaaggatatggatctctgggaatgatgacttcggtgttggtttgtccagatggaaagaccattgaagcagaagcagctcatggcacagttacacgccactacagagttcaccagaaaggtggtgaaacaagcaccaacagcatagcctctatttttgcttggtccagaggccttgcccacagggcaaagctggacagcaatgccgcactcttgagctatactgagaaactagaagcagcttgcatggggacggtggagtctggcaaaatgaccaaggatctagctcttctgatccacggagccaaggttaggagggatcagtatgtgaatacggaagagttcattgatgcggtggcatgggagttaaaaagaagattgttaggcaacaactccaggttgtgagaagaaagaatggaaatctgaaaagcaaagagtctcagcagcgtgatgtttgatttgatgctctttcataggtgtagaacttaaagcctgaaaaggggctattgcatgaataaaaggagatagactaattgggtaatttattgaggaactcagatttcccaaagccgagactcactcctcattgattcgttaaaaattgaatctttttagcccttctttctctgtataatctctgttgtaaaagctaccaatcaacagaaatggctacgttctcgttgtc

SEQ ID NO: 5660 - protein, 416 aa, Arabidopsis thaliana (mouse-ear cress)
MEFEKIKVINPVVEMDGDEMTRVIWKFIKDKLIFPFLELDIKYFDLGLPNRDFTDDKVTIETAEATLKYNVAIKCATITPDEARVREFGLKKMWRSPNGTIRNILNGTVFREPIICRNIPRLVPGWTKPICIGRHAFGDQYRATDLIVNEPGKLKLVFEPSGSSQKTEFEVFNFTGGGVALAMYNTDESIRAFAESSMYTAYQKKWPLYLSTKNTILKIYDGRFKDIFQEVYEANWRSKYEAAGIWYEHRLIDDMVAYAMKSEGGYVWACKNYDGDVQSDFLAQGYGSLGMMTSVLVCPDGKTIEAEAAHGTVTRHYRVHQKGGETSTNSIASIFAWSRGLAHRAKLDSNAALLSYTEKLEAACMGTVESGKMTKDLALLIHGAKVRRDQYVNTEEFIDAVAWELKRRLLGNNSRL

SEQ ID NO: 5661 - DNA, 1368 bp, Agrobacterium tumefaciens
  CDS (1)..(1368)
atgtggtttggcaatgcgcaaagcgttattgcgctgcgccaaaaaagcgccccccatggctttgcctcagacgctcgcgatgctatagcccgaccggatatttttccgactattggcgtcaacaggcgccacagcttcgaaggtgaggaattcatggcaaagatcaaggtagccaatccagtcgtcgatctcgacggcgacgaaatgacccgtatcatctggcagctcatcaaggacaagctgatcctgccatacctcgatctcgacatcgaatattacgacctctcggttgaaaaccgcgatgccaccaacgaccaggtcaccgtcgatgcggcacacgccatcaagaagcatggcgtcggcatcaagtgcgcgacgatcacgccggacgagcagcgcgtcgaggaattcggcctgaagcagatgtggaagagcccgaacggcacgatccgcaacattctcggcggcgtcatcttccgcgagccgatcatctgcaagaacgttccgcgcctcgttcccggctggaccaagccgatcgtcgtcggccgtcacgcctttggcgaccagtacaaggcaaccgatttcaagttccccggcaagggcaagctgacgatcaagttcgtcggtgaagacggcacggtcatcgaaaaggacgtcttcgacgccccgagcgccggcgtggcactcgccatgtacaacctcgacgaatccatccgcgaattcgcccgcgcctcgatgatgtatggcctgatgcgcaagtggccggtttacctctccaccaagaacaccatcctcaaggcctatgacggccgcttcaaggatatcttcgaagaagtctaccagaccgagttcaaggcaaagttcgacgaagtcggcatcacctacgaacaccgcctgatcgacgacatggttgcctcggcgctgaagtggtccggcggctacgtctgggcctgcaagaactacgatggcgacgtgcagtccgacacggttgcccagggcttcggctcgctcggcctgatgacctcggttctgctgtcgccggatggccgcaccgtcgaagccgaagcggcgcacggcacggtgacgcgtcactaccgccagcaccagaagggtcaggaaacctcgaccaactcgatcgcctcgatcttcgcctggacccgtggcctcgcccaccgcgccaagctggatgacaatgcggaactggcaaagttcgcgacgacgctcgaaaccgtctgcgtcgacaccgtcgaaagcggcttcatgaccaaggatctggccctcctcatcggaccggaccagccctggctctccaccaccgccttcctcgacaagatcgacgaaaacctcaagacggcgatggcggcctga

SEQ ID NO: 5662 - protein, 455 aa, Agrobacterium tumefaciens
MWFGNAQSVIALRQKSAPHGFASDARDAIARPDIFPTIGVNRRHSFEGEEFMAKIKVANPVVDLDGDEMTRIIWQLIKDKLILPYLDLDIEYYDLSVENRDATNDQVTVDAAHAIKKHGVGIKCATITPDEQRVEEFGLKQMWKSPNGTIRNILGGVIFREPIICKNVPRLVPGWTKPIVVGRHAFGDQYKATDFKFPGKGKLTIKFVGEDGTVIEKDVFDAPSAGVALAMYNLDESIREFARASMMYGLMRKWPVYLSTKNTILKAYDGRFKDIFEEVYQTEFKAKFDEVGITYEHRLIDDMVASALKWSGGYVWACKNYDGDVQSDTVAQGFGSLGLMTSVLLSPDGRTVEAEAAHGTVTRHYRQHQKGQETSTNSIASIFAWTRGLAHRAKLDDNAELAKFATTLETVCVDTVESGFMTKDLALLIGPDQPWLSTTAFLDKIDENLKTAMAA

SEQ ID NO: 5663 - DNA, 1230 bp, Mycobacterium tuberculosis
  CDS (1)..(1230)
atgtccaacgcacccaagataaaagtcagcggtccggtcgtagagctcgacggtgacgagatgacccgtgtcatctggaagctcatcaaggacatgcttatccttccctatctcgacatccgcttggactattacgacttgggcatcgagcaccgcgacgccaccgacgaccaggtgacgatcgacgcggcgtatgcgatcaagaaacacggtgtgggcgtaaagtgcgcgacgatcacccccgacgaggcccgtgtcgaggaattcaacctgaagaagatgtggctgtcgcccaatgggacaatccggaacatcttgggcggcacaatctttcgcgaacctatcgtgatttctaatgtgccgcgactggttccggggtggaccaagccgatcgtcatcggccggcacgcttttggtgaccaatatcgggcgacgaacttcaaggtcgaccaaccgggcaccgtcacactgactttcacgcccgccgacggcagcgcgccgatcgtgcacgaaatggtgtccatccccgaggacggcggcgtcgtgctggggatgtacaacttcaaggaatccatccgggatttcgcgcgcgcgtcgttctcctacggcctcaacgcgaaatggccggtatatctgtccaccaagaacaccatcctcaaggcctacgacgggatgttcaaagacgagttcgagcgcgtctacgaagaggaattcaaggcgcagttcgaagcggcggggctgacctacgagcatcggttgatcgacgacatggtcgccgcctgcctgaaatgggaaggcggttacgtctgggcgtgcaagaactacgacggcgacgtgcagtcggacaccgtcgcacagggctacggctcgctgggcctgatgacgtcggtgctgatgacggccgacggcaagacagtcgaggccgaagccgcccacggcaccgtcacccggcattaccggcagtatcaggccggtaaaccgacctcaacaaacccgatcgcgtcgatctttgcctggacccgcggattacagcatcgcggcaagctggatggcactcccgaagtcatcgacttcgcccacaagctggagtccgtcgtcatcgccacggtggagagcgggaagatgaccaaggacctcgcgatcctcatcggtccggagcaggactggctgaatagcgaggaattcctcgatgcgatcgccgacaacctggaaaaggagctggccaattag

SEQ ID NO: 5664 - protein, 409 aa, Mycobacterium tuberculosis
MSNAPKIKVSGPVVELDGDEMTRVIWKLIKDMLILPYLDIRLDYYDLGIEHRDATDDQVTIDAAYAIKKHGVGVKCATITPDEARVEEFNLKKMWLSPNGTIRNILGGTIFREPIVISNVPRLVPGWTKPIVIGRHAFGDQYRATNFKVDQPGTVTLTFTPADGSAPIVHEMVSIPEDGGVVLGMYNFKESIRDFARASFSYGLNAKWPVYLSTKNTILKAYDGMFKDEFERVYEEEFKAQFEAAGLTYEHRLIDDMVAACLKWEGGYVWACKNYDGDVQSDTVAQGYGSLGLMTSVLMTADGKTVEAEAAHGTVTRHYRQYQAGKPTSTNPIASIFAWTRGLQHRGKLDGTPEVIDFAHKLESVVIATVESGKMTKDLAILIGPEQDWLNSEEFLDAIADNLEKELAN

SEQ ID NO: 5665 - DNA, 1608 bp, Saccharomyces cerevisiae
  CDS (111)..(1397)
tttgactcacataattccacttgcccatataaagagggactcatatgatcttatgaaatcttccttcaagcaattgtgagacaacagacgcacaaggaagatcgcccagcatgagtatgttatctagaagattattttccacctctcgccttgctgctttcagtaagattaaggtcaaacaacccgttgtcgagttggacggtgatgaaatgacccgtatcatttgggataagatcaagaagaaattgattctaccctacttggacgtagatttgaagtactacgacttatctgtcgaatctcgtgacgccacctccgacaagattactcaggatgctgctgaggcgatcaagaagtatggtgttggtatcaaatgtgccaccatcactcctgatgaagctcgtgtgaaggaattcaacctgcacaagatgtggaaatctcctaatggtaccatcagaaacattctcggcggtacagtgtttagagagcccattgtgattcctagaattcctagactggtcccacgttgggaaaaaccaatcattattggaagacacgcccacggtgatcaatataaagctacggacacactgatcccaggcccaggatctttggaactggtctacaagccatccgaccctacgactgctcaaccacaaactttgaaagtgtatgactacaagggcagtggtgtggccatggccatgtacaatactgacgaatccatcgaagggtttgctcattcgtctttcaagctggccattgacaaaaagctaaatcttttcttgtcaaccaagaacactattttgaagaaatatgacggtcggttcaaagacattttccaagaagtttatgaagctcaatataaatccaaattcgaacaactagggatccactatgaacaccgtttaattgatgatatggtcgctcaaatgataaaatctaaaggtggctttatcatggcgctaaagaactatgacggtgatgtccaatctgacatcgtcgctcaaggatttggctccttaggtttgatgacttctatcttagttacaccagacggtaaaactttcgaaagtgaagctgctcatggtaccgtgacaagacattatagaaagtaccaaaagggtgaagaaacttctacaaactccattgcatccattttcgcgtggtcgagaggtctattgaagagaggtgaattggacaatactcctgctttgtgtaaatttgccaatattttggaatccgccactttgaacacagttcagcaagacggtatcatgacgaaggacttggctttggcttgcggtaacaacgaaagatctgcttatgttaccacagaagaatttttggatgccgttgaaaaaagactacaaaaagaaatcaagtcgatcgagtaatcgaatttacgtagcccaatctaccacttttttttttcatttttagtgttatacttagttatgctctaggataatgaactacttttttttttttttttttactgttatcataaatatatataccttattgttgtttgcaaccgtcggttaattccttatcaaggttccccaagttcggatcattaccatcaatttccaacattttcatgag

SEQ ID NO: 5666 - protein, 428 aa, Saccharomyces cerevisiae
MSMLSRRLFSTSRLAAFSKIKVKQPVVELDGDEMTRIIWDKIKKKLILPYLDVDLKYYDLSVESRDATSDKITQDAAEAIKKYGVGIKCATITPDEARVKEFNLHKMWKSPNGTIRNILGGTVFREPIVIPRIPRLVPRWEKPIIIGRHAHGDQYKATDTLIPGPGSLELVYKPSDPTTAQPQTLKVYDYKGSGVAMAMYNTDESIEGFAHSSFKLAIDKKLNLFLSTKNTILKKYDGRFKDIFQEVYEAQYKSKFEQLGIHYEHRLIDDMVAQMIKSKGGFIMALKNYDGDVQSDIVAQGFGSLGLMTSILVTPDGKTFESEAAHGTVTRHYRKYQKGEETSTNSIASIFAWSRGLLKRGELDNTPALCKFANILESATLNTVQQDGIMTKDLALACGNNERSAYVTTEEFLDAVEKRLQKEIKSIE

SEQ ID NO: 5667 - DNA, 1242 bp, Sulfolobus solfataricus
  CDS (1)..(1242)
atgatgcaaaagataccagaagatggagaagtaattaaatttgaaaatgggaaatggattgtaccaaaaaagccaataattctgtatgttgaaggggatggaatagggcatgaaataacacatgctgctatgaaggttataaacaaagcagtggaaaaagcttatggatctgatagagaaattaagtgggtagaagttctagcaggagataaggcagaaaagctaaccggaaatagatttcctaaagagtcagaggaattgatagagaagtatagagtcttattaaaaggtcccctagaaacaccaataggcaaaggctggaaatccatcaatgtagcaattagattaatgttggatctttatgcaaatataagaccagtaaaatacattccaggtatagaaagtccaattaagaacgcagataagattgaccttataatatttagggaaaatactgatgatttgtacagaggaatagagtatccttatgacagtgaacaagcaaagaaaattagagattttctaagaaaggagctaggagtggaagtggaagatgatactggaattggtataaaacttatcagtagatttaagacgcaaaggattgcgagaatggctataaaatacgctatagaccataaacgaaagaaagttacaataatgcataaaggtaatgtgatgaaatataccgaaggagcatttagagaatggtcatatgaagttgcaacaaaagaatttagagattatatagttactgaggaagaggtaacaaagaattataatggagtacctccttctgggaaggtcataataaatgataggatagctgataacatgttccaacagataattatcagaccagacgagtacgatataatattagcacctaacgtaaatggggattacatatcggatgctgcgggcgcactggtaggaaatattggtatgttaggcggtgcaaatataggagatactggaggtatgttcgaggcaatacatggtaccgcacctaagtatgctggtaagaatgttgcaaaccccactggaataataaaaggtggtgagttaatgttaagatttatgggatgggataaggctgctgagttaatagattctgcaatcatggaatctataagacagaagaaggttactcaggatttagctagatttatgggtgtaagagccttatcaactactgaatatactgacgagctaattgcgataatcgatacactatcataa

SEQ ID NO: 5668 - protein, 413 aa, Sulfolobus solfataricus
MMQKIPEDGEVIKFENGKWIVPKKPIILYVEGDGIGHEITHAAMKVINKAVEKAYGSDREIKWVEVLAGDKAEKLTGNRFPKESEELIEKYRVLLKGPLETPIGKGWKSINVAIRLMLDLYANIRPVKYIPGIESPIKNADKIDLIIFRENTDDLYRGIEYPYDSEQAKKIRDFLRKELGVEVEDDTGIGIKLISRFKTQRIARMAIKYAIDHKRKKVTIMHKGNVMKYTEGAFREWSYEVATKEFRDYIVTEEEVTKNYNGVPPSGKVIINDRIADNMFQQIIIRPDEYDIILAPNVNGDYISDAAGALVGNIGMLGGANIGDTGGMFEAIHGTAPKYAGKNVANPTGIIKGGELMLRFMGWDKAAELIDSAIMESIRQKKVTQDLARFMGVRALSTTEYTDELIAIIDTLS

SEQ ID NO: 5669 - DNA, 1200 bp, Thermotoga maritima
  CDS (1)..(1200)
atggagaaagtcaaagtcaaaaatcctattgttgagcttgacggtgacgagatggcacgcgtgatgtggaagatgatcaaagaaaaactcatccttccctatctcgacatccagctggtttacttcgatctcggaataaagaagagagacgaaacagacgatcagatcacgatcgaagcggcaaaggccatcaaaaagtacggtgtcggtgtcaagtgcgcaacgatcaccccggatgcggaaagagtgaaggaatacaacctgaagaaagcctggaagagtccaaatgccaccatcagagcgtatctcgatggaacggttttcagaaagcccatcatggtgaagaacgtgccaccgcttgtgaagcgctggaagaaaccgatcatcataggaagacacgcctacggtgacatatacaacgctgtggaagcaaaagtagaaggcccagcagaagtggaacttgtggtgagaaacaaagaaaacaaaacactcctcgtacacaaattcgaaggaaacggtgttgtcatggcaatgcacaacctggagaaatcgatcagaagcttcgctcagtcgtgtataaactacgctatctctgaaaaggtcgacatctggtttgcgacgaaagacacgatctccaaggtgtaccatgcgtacttcaaagacatattccaggaagaggtcgacaaaagaaaagaagaactcgaaaaagctggagtgaactacagatacatgctcatagatgatgcggctgcgcagattttgagaagtgagggcggcatgctctgggcctgtatgaactacgaaggggatatcatgtccgatatgatcgcctcaggattcggcagtctcggcctcatgacgtcggttcttgtctctcccgatggggtctacgagttcgaggcagcccacggcacggtgagaagacactactacagatatttgaagggagaaaagacctcgacgaatccaaccgcatcgatcttcgcgtggacaggtgctataaggaaaaggggagaactcgacggaacaccggaggtgtgtgaattcgcagacaaactggagaaggctgtgataaacaccatagaatccggtgtgatcacaaaggaccttcagcctttcacagaaccaccgatcgacaagtatgtcactctcgaagagttcatagacgaagtgaagaagaatctcgaaaaattactgtga

SEQ ID NO: 5670 - protein, 399 aa, Thermotoga maritima
MEKVKVKNPIVELDGDEMARVMWKMIKEKLILPYLDIQLVYFDLGIKKRDETDDQITIEAAKAIKKYGVGVKCATITPDAERVKEYNLKKAWKSPNATIRAYLDGTVFRKPIMVKNVPPLVKRWKKPIIIGRHAYGDIYNAVEAKVEGPAEVELVVRNKENKTLLVHKFEGNGVVMAMHNLEKSIRSFAQSCINYAISEKVDIWFATKDTISKVYHAYFKDIFQEEVDKRKEELEKAGVNYRYMLIDDAAAQILRSEGGMLWACMNYEGDIMSDMIASGFGSLGLMTSVLVSPDGVYEFEAAHGTVRRHYYRYLKGEKTSTNPTASIFAWTGAIRKRGELDGTPEVCEFADKLEKAVINTIESGVITKDLQPFTEPPIDKYVTLEEFIDEVKKNLEKLL

SEQ ID NO: 5671 - DNA, 1221 bp, Sphingomonas yanoikuyae
  CDS (1)..(1221)
atggcgaagatcaaggtgaaaaaccccgtcgtggaaatcgacggcgacgaaatgacccgcatcatctgggaatggatccgtgagcgcctcattctcccctatctcgacgtcgacctgaaatattatgacctgtcggtcgagaagcgcgacgagaccagcgaccagatcacgatcgacgcggccaacgcgatcaaggaatatggcgtcggcgtgaagtgcgccaccatcaccccggacgaagcgcgcgtcgaggaattcggcctcaagaagatgtggaagtcgcccaacggcaccatccgcaacatcctgggcggcgtcgtgttccgcgaaccgatcgtcatcaagaatgtcccccgcctggttccgggctggaccgacccgatcgtcgtcggccgtcacgcctttggcgaccagtataaggccaccgatttcaaggtgcccggcgccggcacgctgaccatgaagtgggtcggcaccaatggcgaggaactcgaatatgaagtgttcgaattccccagcgccggcgttgccatgggcatgtacaatctcgacgaatcgatccgcgatttcgccaaggccagcttcaactatggcctgaaccgcggctggcccgtctatctgtcgaccaagaacaccatcctcaaggcctatgacggccgcttcaaggatctgttccaggaagtgttcgacgccgaattcgccgacaagttcaaggcggccggcatcgtctacgaacaccgcctgatcgacgacatggtcgcttcggcgctgaagtggagcggcaagttcgtctgggcctgcaagaattatgacggcgacgtccagtcggacaccgtggcccagggcttcggctcgctcggcctgatgacctccgtcctgctgtcgcccgacggcaagaccgtggaagccgaagccgcgcacggcaccgtcacccgtcactatcgccagcaccagcagggcaaggcgacctcgaccaacccgatcgcctcgatcttcgcctggacccagggcctgtcgttccgcggcaagttcgacgacacgccggacgtcgtgaagttcgccgagacgctggagcaggtctgcatcaagaccgtcgaaggcggcgcgatgaccaaggatctggccctgctgatcggcccggatcaggcctggatgaccacggagcagttcttcgaggcgatccgcgtcaatctggaagccgaaatggccaagtgggcctga

SEQ ID NO: 5672 - protein, 406 aa, Sphingomonas yanoikuyae
MAKIKVKNPVVEIDGDEMTRIIWEWIRERLILPYLDVDLKYYDLSVEKRDETSDQITIDAANAIKEYGVGVKCATITPDEARVEEFGLKKMWKSPNGTIRNILGGVVFREPIVIKNVPRLVPGWTDPIVVGRHAFGDQYKATDFKVPGAGTLTMKWVGTNGEELEYEVFEFPSAGVAMGMYNLDESIRDFAKASFNYGLNRGWPVYLSTKNTILKAYDGRFKDLFQEVFDAEFADKFKAAGIVYEHRLIDDMVASALKWSGKFVWACKNYDGDVQSDTVAQGFGSLGLMTSVLLSPDGKTVEAEAAHGTVTRHYRQHQQGKATSTNPIASIFAWTQGLSFRGKFDDTPDVVKFAETLEQVCIKTVEGGAMTKDLALLIGPDQAWMTTEQFFEAIRVNLEAEMAKWA

SEQ ID NO: 5673 - DNA, 1740 bp, Bos primigenius taurus (cattle)
  CDS (67)..(1425)
ctcggatctcgcctaccgggttccttcgttcgctcatccgccagtccgaccgcccacccgctcgggatggctggttacctgcgagtcgtacgctcgctctgcagagcctctggctccgggtcggcctgggcgccacgagccttgacagcccccaacttgcaagagcagccgcggcgccactatgccgacaagaggatcaaggtggcgaagccagtggtggagatggacggcgatgagatgacccgtattatctggcagttcatcaaagagaagctcatcctgccccacgtggacgtccagctcaagtatttcgacctggggctcccgaaccgtgaccagaccaatgatcaggtcaccatcgactccgcgttggccacccagaagtacagtgtggctgtgaagtgtgccaccatcacccccgacgaggcccgtgtggaagagttcaagctgaagaagatgtggaagagccccaatggaaccatccggaacatcctcgggggaacggtcttccgggagcccatcatctgtaagaacatcccgcgtctcgtccctggctggaccaagcccatcaccattggcaggcatgcccacggcgaccagtacaaagccacagactttgtggttgaccgggctggcacattcaaggtggtcttcaccccgaaggatggcagcggccctaaggaatgggaggtgtacaactttcctgctggtggcgtgggcatgggcatgtataacacggatgagtccatctcaggttttgcacacagctgcttccagtatgccatccagaagaagtggccactctacatgagcaccaagaacaccatcctgaaagcttacgacgggcgcttcaaggacatcttccaggccatctttgagaagcactacaagactgagttcgacaaacataagatctggtacgagcaccggctcattgatgacatggtggctcaggtcctcaagtcctcaggcggctttgtgtgggcctgcaagaactacgatggagacgtgcagtcggacatcctggcccagggctttggctcccttggtctgatgacgtccgtgctggtctgcccggatgggaagaccattgaggctgaggctgctcatggcacagtcacccgccactatcgggagcaccagaagggccggccgaccagcaccaaccccatcgccagcatctttgcctggacgcgtggcctagaacaccggggcaagttggatgggaaccaggacctcatcaggttcgcccagaccctggagaaggtgtgcgtcgagacggtggagagcggagccatgaccaaggacctggcgggctgcatccacggcctcagcaatgtgaagctgaacgaacacttcctgaacacctcggacttcctggacaccatcaagagcaacctggacagagctctgggccagcagtagcgggccagggttgctgccagctgccgagctggccgggctggaggcgagcgggcagccaggggtccccctgcccccccgaccgacacgccccgcggcggagggtgagcctcttagcccctgttaggaggcctttctaggggacgttttttttttttataagcaagaagtttttaaaagtatctgtgtgtttcccctcatggtgacgtgaggcagaaacagtgtgttttacctcagccggtggtatcttttgcatactgtaatttatattgccctcgggacacatggtgccatatttagctactaaaaagttcttcc

SEQ ID NO: 5674 - protein, 452 aa, Bos primigenius taurus (cattle)
MAGYLRVVRSLCRASGSGSAWAPRALTAPNLQEQPRRHYADKRIKVAKPVVEMDGDEMTRIIWQFIKEKLILPHVDVQLKYFDLGLPNRDQTNDQVTIDSALATQKYSVAVKCATITPDEARVEEFKLKKMWKSPNGTIRNILGGTVFREPIICKNIPRLVPGWTKPITIGRHAHGDQYKATDFVVDRAGTFKVVFTPKDGSGPKEWEVYNFPAGGVGMGMYNTDESISGFAHSCFQYAIQKKWPLYMSTKNTILKAYDGRFKDIFQAIFEKHYKTEFDKHKIWYEHRLIDDMVAQVLKSSGGFVWACKNYDGDVQSDILAQGFGSLGLMTSVLVCPDGKTIEAEAAHGTVTRHYREHQKGRPTSTNPIASIFAWTRGLEHRGKLDGNQDLIRFAQTLEKVCVETVESGAMTKDLAGCIHGLSNVKLNEHFLNTSDFLDTIKSNLDRALGQQ

SEQ ID NO: 5675 - DNA, 1569 bp, Solanum tuberosum (potato)
  CDS (69)..(1319)
ttttcttccaccaacttttcttcattcggctgagatttctctgcttaatttttctctcaatctgcaaaatggcgtttcagaaaatcactgtgcaaaaccccatcgttgagatggacggagatgaaatgacacgagttatttggaaatctatcaaggataagctcatccttccctttctggaattggacataaaatactttagccttggccttccccaccgtgatgccacagatgataaggttacagttgaaagtgcggaagccactcagaagtacaacgtagctatcaagtgtgcaaccatcaccccagatgaggcccgtgtaaaggagtttaacttgaaatccatgtggaggagcccaaatgggacaatcagaaacatcttaaatggaactgtctttagagaaccaattatgtgcaaaaatatccccagacttgtcccaggttggactaaaccaatttgcattggtagacatgcttttggagatcaataccgagctactgatacagttattaaaggagcgggaaaactcaaattggtgtttgtgccagaaggatcagacgagaagactgagtttgaagtttacaactttactggtgctggtggagtagctttatccatgtacaacacagacgagtctgttcgttcatttgctgaggcttcaatgaacatggcattccaaaagaaatggccactctatcttagtacaaagaataccattcttaagaaatatgatgggaggttcaaggatatcttccaagaagtttatgaagcaaattggaagtccaagtacgaggaagccggaatctggtacgaacaccgtcttatcgacgatatggttgcttatgctttaaagagtgaaggtggttacgtatgggcttgcaagaactacgatggggatgttcagagtgatttcttagcacaaggttttggatcccttgggttgatgacttctgtcctggtgtgtcctgatggcaagaccattgaggctgaagcagcccatggaactgttacccgccactacagggttcaccagaaaggaggtgaaaccagcacaaacagcattgcctctatctttgcctggactcgtggacttgcacacagggcaacattggacaacaacgaaaggctcttggattttactgagaaactagaggcagcatgcattggtgcagtggaatctggaaagatgacgaaagatcttgcactcatcatcatccatggatccaagctttcacgagagcattatctgaacacggaagagttcattgacgctgttgccgatgagctcaaagcaagacttctgaaagcaaaggcctaaatgtgtgaaggcaagtctttcttcctcaggcagtttgaggcatattgaattgaagagaaataaaaggagtaagcctgttggatatcaaattcaagaggtttttatcttttggttgaggattattctgcagacattatatttgaaccatttaaatctgaattcctattgctgatgttgctgcaagttatttgccaatttgtagttgtacacatagcttattgttgcctttttatatcaatttgcttaaaaa

SEQ ID NO: 5676 - protein, 416 aa, Solanum tuberosum (potato)
MAFQKITVQNPIVEMDGDEMTRVIWKSIKDKLILPFLELDIKYFSLGLPHRDATDDKVTVESAEATQKYNVAIKCATITPDEARVKEFNLKSMWRSPNGTIRNILNGTVFREPIMCKNIPRLVPGWTKPICIGRHAFGDQYRATDTVIKGAGKLKLVFVPEGSDEKTEFEVYNFTGAGGVALSMYNTDESVRSFAEASMNMAFQKKWPLYLSTKNTILKKYDGRFKDIFQEVYEANWKSKYEEAGIWYEHRLIDDMVAYALKSEGGYVWACKNYDGDVQSDFLAQGFGSLGLMTSVLVCPDGKTIEAEAAHGTVTRHYRVHQKGGETSTNSIASIFAWTRGLAHRATLDNNERLLDFTEKLEAACIGAVESGKMTKDLALIIIHGSKLSREHYLNTEEFIDAVADELKARLLKAKA

SEQ ID NO: 5677 - DNA, 1850 bp, Saccharomyces cerevisiae
  CDS (461)..(1723)
tgcaagactcttacgaaatattaaagtttaataccgtgtaactgcctcttacatatgtatgcatatatacgtacgtactatatttttcttgtatatcttttttattgtctgagagaaagaacatcaaaaaataaaggaagatcctcctcggatttagcatgcttaatgccgaatctttaatacaaaacgaatgatatttcaagtatactaattagaaatcaatcaaacataccaaaagggacagtaaagagaaaagcaggagctctcttttaggggaaaagtaaaatgtgattagtatttcgttgcgtgtactagtcaactcttcttgtcattcttaaatttacattaattaccccaattttgcatcttcgtatataagagtgttccccttataagctttctcctgcacatacctgcagtaaacacaagcaacactttagagatagttgtccaagttaaaatgagtaaaattaaagttgttcatcccatcgtggaaatggacggtgatgagcagacaagagttatttggaaacttatcaaagaaaaattgatattgccatatttagatgtggatttaaaatactatgacctttcaatccaagagcgtgataggactaatgatcaagtaacaaaggattcttcttatgctaccctaaaatatggggttgctgtcaaatgtgccactataacacccgatgaggcaagaatgaaagaatttaaccttaaagaaatgtggaaatctccaaatggaacaatcagaaacatcctaggtggaactgtatttagagaacccatcattattccaaaaatacctcgtctagtccctcactgggagaaacctataattataggccgtcatgcttttggtgaccaatatagggctactgacatcaagattaaaaaagcaggcaaactaaggttacagtttagctcagatgacggtaaagaaaacatcgatttaaaggtttatgaatttcctaaaagtggtgggatcgcaatggcaatgtttaatacaaatgattccattaaagggttcgcaaaggcatccttcgaattagctctcaaaagaaaactaccgttattctttacaaccaaaaacactattctgaaaaattatgataatcagttcaaacaaattttcgataatttgttcgataaagaatataaggaaaagtttcaggctttaaaaataacgtacgagcatcgtttgattgatgatatggtagcacagatgctaaaatcaaagggcgggtttataatcgccatgaagaattatgatggcgatgtccagtctgacattgtggcacaaggatttgggtctcttggtttaatgacgtccatattgattacacctgatggtaaaacgtttgaaagcgaggctgcccatggtacggtgaccagacattttagaaaacatcaaagaggcgaagaaacatcaacaaattcaatagcctcaatatttgcctggacaagggcaattatacaaagaggaaaattagacaatacagatgatgttataaaatttggaaacttactagaaaaggctactttggacacagttcaagtgggcggaaaaatgaccaaggatttagcattgatgcttggaaagactaatagatcatcatatgtaaccacagaagagtttattgatgaagttgccaagaggcttcaaaacatgatgctcagctccaatgaagacaagaaaggtatgtgcaaactataaaccaatccgccattcatttgaaaagacaagtctggcctagggttatagtgttcagacttgaggttgaacatatccaaaaaaaaaaattcctatgatgtcttaaatacgtatacctaataaaataatt

SEQ ID NO: 5678 - protein, 420 aa, Saccharomyces cerevisiae
MSKIKVVHPIVEMDGDEQTRVIWKLIKEKLILPYLDVDLKYYDLSIQERDRTNDQVTKDSSYATLKYGVAVKCATITPDEARMKEFNLKEMWKSPNGTIRNILGGTVFREPIIIPKIPRLVPHWEKPIIIGRHAFGDQYRATDIKIKKAGKLRLQFSSDDGKENIDLKVYEFPKSGGIAMAMFNTNDSIKGFAKASFELALKRKLPLFFTTKNTILKNYDNQFKQIFDNLFDKEYKEKFQALKITYEHRLIDDMVAQMLKSKGGFIIAMKNYDGDVQSDIVAQGFGSLGLMTSILITPDGKTFESEAAHGTVTRHFRKHQRGEETSTNSIASIFAWTRAIIQRGKLDNTDDVIKFGNLLEKATLDTVQVGGKMTKDLALMLGKTNRSSYVTTEEFIDEVAKRLQNMMLSSNEDKKGMCKL

SEQ ID NO: 5679 - DNA, 1584 bp, Nicotiana tabacum (common tobacco)
  CDS (85)..(1332)
cttctttcaccaacttcccccttcactgtttctctcttcggcggagatttttctgttctatcttcacccctttcatctgcaaacatgactttcgacaaaatcaaggttgaaaaccctatcgttgagatggacggagatgaaatgactcgtgttatttggaaatcgatcaaggataagctcatctgtccttttctggagttggatataaaatactttgaccttggccttccgcaccgtgatgccacagacgataaggttacagttgaaagtgcggaagccactcagaaatacaatgtagctattaagtgtgcaaccattactccagatgaggcccgtgtaaaagagtttaacttgaaatccatgtggaggagcccaaatgggacaattagaaacatcctaaatggaacggtcttcagagaaccaattatgtgcaaaaatattccccgacttgtcccaggttggactaaaccaatatgcattggtagacatgcttttggagatcaataccgggctactgatacagttattcaaggagctggaaaactcaaattggtgtttgtgccagagggaacagacgagaagactgaattcgaagtttacaactttactggtgctggtggagtagctttatccatgtacaacacagatgagtccgtccgctcatttgctgaggcttcaatgaacatggcataccaaaagaaatggccactctatcttagtacaaagaatactattcttaagaaatatgatgggaggtttaaggacatcttccaagaagtttatgaagcaaattggaagtccaagtatgaggaagcaggaatttggtatgaacaccgtcttatcgacgatatggctgcttatgctttaaagagtgaaggtggttatgtatgggcctgcaagaactatgatggggatgtacagagtgatttcttagcacaaggttttggatccttgggcttgatgacatctgtcctggtgtgtcctgatggcaagaccattgaggctgaagcagcccatggaactgtcacccgccactacagggttcaccagaaaggaggtgaaaccagcacaaacagtattgcgtcaatctttgcctggactcgtggacttgcacacagggcaacgttagacaacaacgaaaggctcttggattttactgagaaactagaggcagcatgcattggtgcagttgaatctggaaagatgaccaaagatcttgcacttatcatccatggatccaagctctcgagagatcattatctcaacactgaagagttcattgacgccgtggccgatgagctcaaagcaagacttctgaaagcaaaggcctaaatgtctgggcagacaagaggacagtcttttttctggggcagttgagggatattgaagtgaaataaaaggattagggcctgatggtatactaaatctcaagaggttttattttataggttggggttactctccaggcattaatgtttgaaccatttaaatctgaatttctttttgctgaaactgctgcaagttatttcctgatttgcaaattggaccacgtgactgtgttacagtgctaaagaagccctctca

SEQ ID NO: 5680 - protein, 415 aa, Nicotiana tabacum (common tobacco)
MTFDKIKVENPIVEMDGDEMTRVIWKSIKDKLICPFLELDIKYFDLGLPHRDATDDKVTVESAEATQKYNVAIKCATITPDEARVKEFNLKSMWRSPNGTIRNILNGTVFREPIMCKNIPRLVPGWTKPICIGRHAFGDQYRATDTVIQGAGKLKLVFVPEGTDEKTEFEVYNFTGAGGVALSMYNTDESVRSFAEASMNMAYQKKWPLYLSTKNTILKKYDGRFKDIFQEVYEANWKSKYEEAGIWYEHRLIDDMAAYALKSEGGYVWACKNYDGDVQSDFLAQGFGSLGLMTSVLVCPDGKTIEAEAAHGTVTRHYRVHQKGGETSTNSIASIFAWTRGLAHRATLDNNERLLDFTEKLEAACIGAVESGKMTKDLALIIHGSKLSRDHYLNTEEFIDAVADELKARLLKAKA

SEQ ID NO: 5681 - DNA, 1722 bp, Nicotiana tabacum (common tobacco)
  CDS (76)..(1524)
gcacggcgacaaagacaatagagagttgctcagagcagcaaaaactagcaactgattaaagcctacaaaagtgttatgcttaccacccgactcagactccggtgttccgccatggctagtgttgcttcttttatctcatcttcatcggcttcaacatcatccgcagttaccaaaaaccttcccttttccatcatttccaatcggcaactgttcaagaaccgtgtttatctcctccaccgaatccccaatgcttcaattcgatcgttcgcttccactacagcttcgtctaaaatccgcgttgaaaatcctattgtcgaaatggacggtgatgaaatgacgagggttatatggacaatgatcaaagagaagctaatatatccttatctagagttggatacgaagtattacgatttggggatattgaaccgtgatgccactgacgatcaagttactgttgaaagtgctgaggctactcttaagtataatgttgctgtgaaatgcgctactataacacctgatgagaccagagttaaggaatttgggctgaagtctatgtggagaagtcccaatgccacaatcagaaacattttaaatggtactgttttccgggagcctatactatgcaagaacgtccccagaattgttcctggttggaagaaacccatttgtattggtaggcatgcctttggtgaccagtatcgtgccacagatgcagttattaatggaccaggaaagctcaaaatggtttttgagccagaaaatggggaagcccctacggaactggatgtttatgattttaaaggtccaggtgttgcacttgccatgtacaatgttgaccagtcaattcgagcgtttgctgaatcatcaatgtcaatggcattttcgaagaaatggcctctttatttgagtacaaaaaatacaatactaaagaaatacgatggcaggtttaaggacatttttgaagaggtatatgaagagaagtggaagcaacagtttgaggaacactcgatatggtatgagcatagattgatagatgacatggtagcttatgcattaaaaagcgggggtggatatgtttgggcatgcaagaactatgatggagatgtccagagtgatctgctcgctcaaggatttggttctctgggcctcatgacctctgtattgttatcttctgatggcaagacattagaagctgaagcagctcatggcacagtaaccagacattttcggctgcatcaaaagggtcaagaaactagtacaaatagtgttgcttctatttttgcatgggcaaggggacttggacatagggcccagcttgatgggaaccaaaagttatctgaatttgttcacgccctggaagctgcttgcgttggcacaatagagtccgggaagatgactaaggatttagctatattggttcatggacccaaggtatcaagggaacactacttgaatactgaagaatttattgatcctgtagcacagaaacttcaagagaagctcggtgcctgcgcagttgtatgagctgaagcagatcatgagctgcaagtcatcacatatttttcgcttcctactcatacccttcacagtgaacataaatctatatgctgccaatggagattcgtttagacaagtttctgtaatcgcatagataggagataacatctctttgagtggttcatgctcgtgcgacttaagatctcaataaaatgccatttcgcc

SEQ ID NO: 5682 - protein, 482 aa, Nicotiana tabacum (common tobacco)
MLTTRLRLRCSAMASVASFISSSSASTSSAVTKNLPFSIISNRQLFKNRVYLLHRIPNASIRSFASTTASSKIRVENPIVEMDGDEMTRVIWTMIKEKLIYPYLELDTKYYDLGILNRDATDDQVTVESAEATLKYNVAVKCATITPDETRVKEFGLKSMWRSPNATIRNILNGTVFREPILCKNVPRIVPGWKKPICIGRHAFGDQYRATDAVINGPGKLKMVFEPENGEAPTELDVYDFKGPGVALAMYNVDQSIRAFAESSMSMAFSKKWPLYLSTKNTILKKYDGRFKDIFEEVYEEKWKQQFEEHSIWYEHRLIDDMVAYALKSGGGYVWACKNYDGDVQSDLLAQGFGSLGLMTSVLLSSDGKTLEAEAAHGTVTRHFRLHQKGQETSTNSVASIFAWARGLGHRAQLDGNQKLSEFVHALEAACVGTIESGKMTKDLAILVHGPKVSREHYLNTEEFIDPVAQKLQEKLGACAVV

SEQ ID NO: 5683 - DNA, 1308 bp, Caenorhabditis elegans
  CDS (1)..(1308)
atgttaagccgtctgacatcacgcaacgtacttcttgctcgcaatgtggctactgcagcaactcaggaacggcagaaaattaaagtggataacccagttgtcgatttggatggagatgagatgacgagaatcatctggaaagaaattaagaataagttaattcttccatacctggatctcgacatcaaatattatgaccttggtcttgaatacagagacgagacaaatgatcaggtcaccattgacgcagcccatgcaattcttgagcacagtgttggaatcaaatgcgccacaatcactccggacgaggctcgcatcaaagagtttaatcttaagaagatgtggctctcaccaaacggaacaatcagaaatattctaggaggaactgtatttcgtgagccaattctttgcaagaacattccacgactagtgcctggatggactcagccgatcacaattggccgccacgcttttggagatcagtataaatgcacagatttagttattccaagtggatcgacccttcagcttttagttaacaagccagacggatccaaagatgtgcataacgtgtatgacttcaaaaagtcgggaggtgttggattggctatgtataatactgatgagagcattaaaggatttgctcattcttgtttccaatacgcattgatgaagcaatggccactgtatctttccacaaagaacacgattctgaagaaatatgatggacgattcaaggatattttccaagatatatatgaaaagaaatatgaagcggatttcaagaacaataaaatttggtacgagcatcgattaattgatgatcaagttgcacaggcattgaagagctctggaggatttgtgtgggcttgcaagaactacgacggagatgtgcaaagtgacattgttgctcaaggatacggatcgctcggtctcatgtcttcagttttgatgtgtcccgacggaaagacaattgaagcagaagctgcgcatggaacagtcactcgacattatcgtgaacatcagaagggtaactcgacgtctacaaacccaattgcgtctatctttgcttggacaagaggtcttcatcacagaggcgtacttgacaataatgaagcattgaagacgttctcccttactttggaaaaggcatgcattgacactgtcgaggagggaaaaatgacgaaagatctttcaatttgcattcatggaaccaagaagggaaccgagaaaggagcttatcttattactgaagattttctgtccgctattgacaccaagatggcagagctcatgcgccaggattaa

SEQ ID NO: 5684 - protein, 435 aa, Caenorhabditis elegans
MLSRLTSRNVLLARNVATAATQERQKIKVDNPVVDLDGDEMTRIIWKEIKNKLILPYLDLDIKYYDLGLEYRDETNDQVTIDAAHAILEHSVGIKCATITPDEARIKEFNLKKMWLSPNGTIRNILGGTVFREPILCKNIPRLVPGWTQPITIGRHAFGDQYKCTDLVIPSGSTLQLLVNKPDGSKDVHNVYDFKKSGGVGLAMYNTDESIKGFAHSCFQYALMKQWPLYLSTKNTILKKYDGRFKDIFQDIYEKKYEADFKNNKIWYEHRLIDDQVAQALKSSGGFVWACKNYDGDVQSDIVAQGYGSLGLMSSVLMCPDGKTIEAEAAHGTVTRHYREHQKGNSTSTNPIASIFAWTRGLHHRGVLDNNEALKTFSLTLEKACIDTVEEGKMTKDLSICIHGTKKGTEKGAYLITEDFLSAIDTKMAELMRQD

SEQ ID NO: 5685 - DNA, 1239 bp, Caenorhabditis elegans
  CDS (1)..(1239)
atggcggctcaaaagatccaaggaggagacatcgtcgagatgcaaggagacgagatgaccagaatcatctgggatctgatcaaggagaagctcatccttccttacgtcgatctcaacgtacacttcttcgatctcggtattgagcatcgtgatgccaccgatgatcaagtcactatcgatgccgccaacgcgaccctcaagtacaatgttgctgttaagtgtgccaccatcactccagatgaggctcgtgtcgaggagttcaagctcaagaaaatgtggaagtcaccaaacggaactatccgtaacattcttggaggaacagtcttccgtgagccaattattgtcaagaacgtaccacgccttgtcaacacctggtcgaagccaatcatcattggacgtcacgctcatgctgatcaatacaaggccaccgactttgttgttccaggagctggaaagctcgaaatcaagttcgtttctgctgatggtacccagaccattcaggagaccgtcttcgacttcaaaggtccaggagtctccctctcaatgtacaataccgatgattctatccgggatttcgctcatgcatccttcaagtatgctcttcaacgtaaattcccactttacctatccaccaagaacactatcctgaagaagtacgatggacgtttcaaggatatctttgctgagatctacccagaatatgaggctgaattcaaggccgccggaatctggtacgaacatcgtcttatcgatgacatggttgctcaagccatgaagagcgatggaggattcgtgtgggcctgcaagaactatgacggagatgttcaatcagactctgttgctcaaggatatggatccctcggattgatgacatctgtgcttgtgtgcccagatggaaagaccgtcgaagctgaagctgctcacggaactgtcactcgtcattacagaatgcaccaaaagggacaagaaacctccacgaatccaattgcctccatcttcgcttggtctcgtggattggctcaccgtgccactctcgacaagaactctgcccttgagacattcgccaataatttggaagctgtgtgcattgagacaatggaggctggattcctcaccaaggatcttgccatttgcgtgaagggaggaaatgcttcagctgtcactcgtaccgactacctcaacacctttgaattcctcgacaaattggctgagaacctcgccaagaagcaagcccattaa

SEQ ID NO: 5686 - protein, 412 aa, Caenorhabditis elegans
MAAQKIQGGDIVEMQGDEMTRIIWDLIKEKLILPYVDLNVHFFDLGIEHRDATDDQVTIDAANATLKYNVAVKCATITPDEARVEEFKLKKMWKSPNGTIRNILGGTVFREPIIVKNVPRLVNTWSKPIIIGRHAHADQYKATDFVVPGAGKLEIKFVSADGTQTIQETVFDFKGPGVSLSMYNTDDSIRDFAHASFKYALQRKFPLYLSTKNTILKKYDGRFKDIFAEIYPEYEAEFKAAGIWYEHRLIDDMVAQAMKSDGGFVWACKNYDGDVQSDSVAQGYGSLGLMTSVLVCPDGKTVEAEAAHGTVTRHYRMHQKGQETSTNPIASIFAWSRGLAHRATLDKNSALETFANNLEAVCIETMEAGFLTKDLAICVKGGNASAVTRTDYLNTFEFLDKLAENLAKKQAH

SEQ ID NO: 5687 - DNA, 1257 bp, Schizosaccharomyces pombe
  CDS (1)..(1257)
atgaatatgcgtatggcttcaagcaaatcttttcaaaagatcactgttaaaaacccagtcgttgaaatggatggtgatgagatgacgagagtgatttggaagatcattcgtgaaaagttggttctcccatatatggacattaaattggattattatgaccttggaatcgaagctcgcgataagacaaacgaccaaattactgtggatgcagccaaagctatcctcaaaaatgatgtcggtatcaaatgtgccaccattactcctgatgaggctcgtgtgaaagagtataacctcaagaagatgtggaagtctcccaatggtaccattcgtaacattttgaatggtacagtatttcgggagcccattttaatcaaaaacattcccaagtatattcctggatggacgaaccctatttgtatcgggcgtcatgcctttggagatcaatacaagtcaacggacttggtagcttcaggccccggtaagttggaactttcattcacccctaaaggtaatccttctgctaaagaaacatacaatgtttacgagttcaacggtagtggtgtagctatgtctatgtacaacactgacgactctattcgtggatttgctcacagttctttccaaatggctttgcaaaagaaaatgccactttatctttccactaagaatacaattttgaaaaaatatgatggtagatttaaggatacattccaagaagtatatgaatctgattacaagcaaaagtttgaggaactaggtttatggtatcaacatcgtctaattgatgacatggtagcccaagctattaagtccaatggtggttttgtttgggcatgcaaaaattacgatggtgatgttatgtcggatgtggttgcccaagcttatggatccttaggcctaatgacttctgtcctcattcatcccaacggtcgcacttttgagagtgaggctgctcatggtactgtacagcgtcactacatgcaatacttgaaaggtaagaagacttcaaccaacagtattgcctctatctttgcctggactcgtggtcttgcccatcgtggtcgtttagatggcaacgaacgtttagttaagtttgccaacgccctcgagcatgcttgtgttcgatgcgttgagaagggtattatgacaaaggatctttaccttctcagcaagtctcccaatggttatgttgatacattcgagtttttggatgccgtcaagtccgagctcgattcggaattggtcaacattgcctaa

SEQ ID NO: 5688 - protein, 418 aa, Schizosaccharomyces pombe
MNMRMASSKSFQKITVKNPVVEMDGDEMTRVIWKIIREKLVLPYMDIKLDYYDLGIEARDKTNDQITVDAAKAILKNDVGIKCATITPDEARVKEYNLKKMWKSPNGTIRNILNGTVFREPILIKNIPKYIPGWTNPICIGRHAFGDQYKSTDLVASGPGKLELSFTPKGNPSAKETYNVYEFNGSGVAMSMYNTDDSIRGFAHSSFQMALQKKMPLYLSTKNTILKKYDGRFKDTFQEVYESDYKQKFEELGLWYQHRLIDDMVAQAIKSNGGFVWACKNYDGDVMSDVVAQAYGSLGLMTSVLIHPNGRTFESEAAHGTVQRHYMQYLKGKKTSTNSIASIFAWTRGLAHRGRLDGNERLVKFANALEHACVRCVEKGIMTKDLYLLSKSPNGYVDTFEFLDAVKSELDSELVNIA

SEQ ID NO: 5689 - DNA, 1827 bp, Glycine max
  CDS (289)..(1539)
ggcacgagctagcattattgatcgtttgtgtgggtgtgtctgttttcgttgtttcccactttccaaatcacatccaacgtgaatccgtcattcaacttgattgaagtatccaacgaaaattcaaacacacactaaccttactgagtgtgttcattgggaactggttcattccacacattttatttaagccaaaaaaacccacaatttctcttagtgtgtgctttttggttgaaattgttgtttcttcctctgagttccaactttcacctcagccaaagacacaacaaaatggggtttcagaagataagggtgggcaaccccatcgtcgaaatggatggggatgaaatgacccgagtgatttggaaactgataaaagataagcttattttcccttatttggagctggatattaagtattttgaccttggccttcctcatcgcgatgccactaatgatagagttactattgaaagcgctgaagctacactcaagtataatgtagctatcaaatgtgctactataactccagatgaagctcgtgtcaaggagtttaacttaaaacaaatgtggagaagtccaaatgggacgatccgaaacattttaaatggtacagtttttagagagccaattatctgtaagaacattcctcgtcttgtttcaggatggacaaagccaatatgcattggaagacatgcttttggagaccaatatcgggcaactgatacagttataaaaggcccaggaaagctaaaattggtttttgcacccagtggaaatgaaggcattaaagagctagaggtctataactttactggtgctggaggcatagctttgtccatgtataatactgatgagtccattcgagcttttgctgaggcttcaatgaactttgcttaccagaagaaatggcctctctatcttagcactaaaaataccattttaaagaaatatgatggaagattcaaggacattttccaggaagtttttgacacccaatggaatcacaagttcaaagctgcagggatatggtatgaacaccgtcttatagatgatatggttgcttatgctctcaaaagtgatggaggttatgtatgggcctgcaagaattatgatggtgatgtgcagagtgatttcttagctcaaggatttggttcacttggcttgatgacgtcagtactggtttgcccagatgggaaaaccattgaagcagaggcagcccatggcactgttacccgtcattatcgggttcatcagaagggaggtgaaaccagcacaaacagtattgcttcaatttttgcctggtcgcgaggtcttgcacataggccaaaattggatggaaatgctagattgttggacttcacagagaaactggaagcagcttgcattggaacagttgaattgggaaagatgacaaaggatcttgcacttcttgttcatggacctaaggtttctagatcccagtatttgaatactgaagagttcattgatgccgtagccgaggagctgcgaacaagattatcttcacaatcgaagctgtaatgttcaaaatgagtgtgcccaataaatgttctccatttccttcatttttcctttttctttcttgaaggagggaaattctattgcttgagttaaacattttagagcaataaggtccccctaaattcagatgcatcacttattgcaggttgcttccttcagccataagaactcaacatttgaagaactcataccatgtaccacaaaatcaatactatcttttcattgccaaaacaacagtgctactttggaagtccttacaacaatattaaagacatgtaaaaaaaaaaa

SEQ ID NO: 5690 - protein, 416 aa, Glycine max
MGFQKIRVGNPIVEMDGDEMTRVIWKLIKDKLIFPYLELDIKYFDLGLPHRDATNDRVTIESAEATLKYNVAIKCATITPDEARVKEFNLKQMWRSPNGTIRNILNGTVFREPIICKNIPRLVSGWTKPICIGRHAFGDQYRATDTVIKGPGKLKLVFAPSGNEGIKELEVYNFTGAGGIALSMYNTDESIRAFAEASMNFAYQKKWPLYLSTKNTILKKYDGRFKDIFQEVFDTQWNHKFKAAGIWYEHRLIDDMVAYALKSDGGYVWACKNYDGDVQSDFLAQGFGSLGLMTSVLVCPDGKTIEAEAAHGTVTRHYRVHQKGGETSTNSIASIFAWSRGLAHRPKLDGNARLLDFTEKLEAACIGTVELGKMTKDLALLVHGPKVSRSQYLNTEEFIDAVAEELRTRLSSQSKL

SEQ ID NO: 5691 - DNA, 1645 bp, Eucalyptus globulus
  CDS (161)..(1411)
ccgcgttgacacggctgcgagaagacgacagaagggggcagcactgttcaccgctgagctctcgtttcgccctgtccctatctccgtctcgctctctctctgcaaaagagctccctcgaatcgacctgcttcgacccttcctcgagcgcgggagagagcaatgggtttcgagaagatcaaggtcgagaaccccatcgtcgagatggacggggatgaaatgacccgagtgttctggaaatcaatcaaggataagcttatttttcccttcttggagttggatatcaagtacttcgaccttggtcttcctcatcgtgatgccactgatgacaaggttacaattgaaagcgcagaagcaactcttaaatacaatgtggccatcaaatgtgcaactattacaccagatgaagctcggatgaaggagtttactttgaagcaaatgtggaaaagtcccaatgggacgattaggaacatcttgaatggcactgtcttcagagagccaataatgtgcaaaaatattccccggcttgtcccagggtggtccaagccaatatgcattggaagacatgcttttggtgatcaatacaaagctactgatactgtcattaaaggagctgggaaacttaaacttgtctttgtgccagaaggcacagatgagaagactgagctagaagtgtataacttcacgggcgctggtggagttgcattgtccatgtacaacacagatgagtcaatccgttcttttgctgaggcttcaatgaacactgcttatcagaagaagtggccgctctatcttagcacaaagaataccatccttaaaaaatatgatggaagattcaaggatatattccaagaagtttatgaagccaactggaagtcaaagtttgaggctgctggaatctggtatgaacaccgtcttattgatgatatggtggcttatgcgctaaagagcgacggaggttatgtgtgggcatgcaagaactatgatggagatgtccagagtgatttcttagcccaagggtttggatcgcttggcttgatgacatctgtcttggtctgcccagacggaaaaactattgaagcagaagccgctcatggtacggttacccgccattatcgggtccatcagaaaggaggcgaaaccagcactaatagcattgcttctatatttgcttggtcacgagggcttgctcatagggccaagttggataacaatgccaaactccttgattttgccgagaaactagaagcagcttgtattggaactgttgagtctggcaagatgaccaaggatcttgcactcctcattcatggtcctaagtttactagggatcaatacctgaacaccgaagagtttattgatgctgtggcagttgaactcaaggcaaggctttcatgccaaagtctgctgtaggtgactggcggacaacatggggaaagcacttccgcctgtgattgtgatccggaagaagaaataaagggggatcgattcgggggagaatgaggtgaatcctgaatgagattgtttgttggggaggaattaaatgaaagtagttcgtatcattcatgtactcagatggatttgtgtttcaaatttgaattgccttgatcccccattaaaggagttttgagccccgtactgtttaac

SEQ ID NO: 5692 - protein, 416 aa, Eucalyptus globulus
MGFEKIKVENPIVEMDGDEMTRVFWKSIKDKLIFPFLELDIKYFDLGLPHRDATDDKVTIESAEATLKYNVAIKCATITPDEARMKEFTLKQMWKSPNGTIRNILNGTVFREPIMCKNIPRLVPGWSKPICIGRHAFGDQYKATDTVIKGAGKLKLVFVPEGTDEKTELEVYNFTGAGGVALSMYNTDESIRSFAEASMNTAYQKKWPLYLSTKNTILKKYDGRFKDIFQEVYEANWKSKFEAAGIWYEHRLIDDMVAYALKSDGGYVWACKNYDGDVQSDFLAQGFGSLGLMTSVLVCPDGKTIEAEAAHGTVTRHYRVHQKGGETSTNSIASIFAWSRGLAHRAKLDNNAKLLDFAEKLEAACIGTVESGKMTKDLALLIHGPKFTRDQYLNTEEFIDAVAVELKARLSCQSLL

SEQ ID NO: 5693 - DNA, 1596 bp, Homo sapiens
  CDS (44)..(1303)
gggaatgagaaaataactttatttcattgtggggagcgggccgatgtccagcctcagaacttctggaactgcttcttggtccggcagccttggtgaccttgagcacgttgaagcgcactgtcttgctcagaggccggcactcgcccactgtgacgatgtcaccgatctggacgtccagctaaagtattttgacctcgggctcccaaaccgtgaccagactgatgaccaggtcaccattgactctgcactggccacccagaagtacagtgtggctgtcaagtgtgccaccatcacccctgatgaggcccgtgtggaagagttcaagctgaagaagatgtggaaaagtcccaatggaactatccggaacatccatggggggactgtcttccgggagcccatcatctgcaaaaacatcccacgcctagtccctggctggaccaagcccatcaccattggcaggcacgcccatggcgaccagtacaaggccacagactttgtggcagaccgggccggcactttcaaaatggtcttcaccccaaaagatggcagtggtgtcaaggagtgggaagtgtacaacttccccgcaggcggcgtgggcatgggcatgtacaacaccgacgagtccatctcaggttttgcgcacagctgcttccagtatgccatccagaagaaatggccgctgtacatgagcaccaagaacaccatactgaaagcctacgatgggcgtttcaaggacatcttccaggagatctttgacaagcactataagaccgacttcgacaagaataagatctggtatgagcaccggctcattgatgacatggtggctcaggtcctcaagtcttcgggcggctttgtgtgggcctgcaagaactatgacggagatgtgcagtcagacatcctggcccagggctttggctcccttggcctgatgacgtccgtcctggtctgccctgatgggaagacgattgaggctgaggccgctcatgggaccgtcacccgccactatcgggagcaccagaagggccggcccaccagcaccaaccccatcgccagcatctttgcctggacacgtggcctggagcaccgggggaagctggatgggaaccaagacctcatcaggtttgcccagatgctggagaaggtgtgcgtggagacggtggagagtggagccatgaccaaggacctggcgggctgcattcacggcctcagcaatgtgaagctgaacgagcacttcctgaacaccacggacttcctcgacaccatcaagagcaacctggacagagccctgggcaggcagtagggggaggcgccacccatggctgcagtggaggggccagggctgagccggcgggtcctcctgagcgcggcagagggtgagcctcacagcccctctctggaggcctttctaggggatgtttttttataagccagatgtttttaaaagcatatgtgtgtttcccctcatggtgacgtgaggcaggagcagtgcgttttacctcagccagtcagtatgttttgcatactgtaatttatattgcccttggaacacatggtgccatatttagctactaaaaagctcttcgcaaaaaaaaa

SEQ ID NO: 5694 - protein, 419 aa, Homo sapiens [sequence omitted]

SEQ ID NO: 5695 - DNA, 1233 bp, Debaryomyces hansenii
  CDS (1)..(1233)
atgggattcaataagattaaggttgaccaaccaattgttgaaatggatggtgatgaaatgaccagaatcatctggaaatttatcaaagataagttgatcttcccatacttggacgtagatttgaaatactacgatttaggtattgaatacagaaatcagactgacgacaaggttaccaccgatgctgctgaagcaattttgaagtaccaagtcggagtcaaatgtgcaaccattaccccagacgaagccagagtcgaagaattcaagttgaagaagatgtggttatctccaaacggtacattgagaaatatcttgggtggaactgttttcagagaaccaattgtcattgataacatcccaagaatcgttccacaatgggaaagcccaattatcattggtagacatgcattcggtgatcaatacaaggccaccgatgttgttattccaaaggccggtcaattagaattagttttcaagccagctgatggctcagcaaccgaagtttatccagtgtacaactatgacgcgccaggtgttgcgttagccatgtacaacactgagaagtcaatcactgatttcgccgaatcatccttcaaaatggccttggatagaaaattaatattgttctcctctaccaagaacaccatcttgaagaagtacgatggtagattcaaagacatcttcgaagatttatacgaaaagaaatataagaagcaattcgaagaagccggtatctggtatgaacatagattaattgacgatatggtcgcccaaatgttgaaatccaagggcggttatatcattgccatgaagaactacgatggtgatgtgcaatcagatattgttgcgcaaggttttggttcattaggtttaatgacctctgtcttgatgaccccagatggaaaggcgttcgaagctgaagccgctcatggtacagttaccagacactataggcagcatcaacaaggtaaggagacctccactaactctatcgcttctatctttgcatggaccagaggtataattcaaagaggtaagttagataacaatgctgatgtcgttaaattcggtgaaagcttggaaaaagctactatcgataccgttgctttagacaacgtcatgactaaggatttagctttagctcaaggtaagactgaaagatcatcgtatgtcactaccgaagaattcatcgatgctgttgcaaagagattaaacaagaacttaggagcttaa

SEQ ID NO: 5696 - protein, 410 aa, Debaryomyces hansenii
MGFNKIKVDQPIVEMDGDEMTRIIWKFIKDKLIFPYLDVDLKYYDLGIEYRNQTDDKVTTDAAEAILKYQVGVKCATITPDEARVEEFKLKKMWLSPNGTLRNILGGTVFREPIVIDNIPRIVPQWESPIIIGRHAFGDQYKATDVVIPKAGQLELVFKPADGSATEVYPVYNYDAPGVALAMYNTEKSITDFAESSFKMALDRKLILFSSTKNTILKKYDGRFKDIFEDLYEKKYKKQFEEAGIWYEHRLIDDMVAQMLKSKGGYIIAMKNYDGDVQSDIVAQGFGSLGLMTSVLMTPDGKAFEAEAAHGTVTRHYRQHQQGKETSTNSIASIFAWTRGIIQRGKLDNNADVVKFGESLEKATIDTVALDNVMTKDLALAQGKTERSSYVTTEEFIDAVAKRLNKNLGA

SEQ ID NO: 5697 - DNA, 1296 bp, Debaryomyces hansenii
  CDS (1)..(1296)
atgagaaacccagctatgtctgggtacagcaaatattcaatgcgttcattttcgtcgagtttaatcaacttggacaaaattaaagtgaaaaatccgattgtcgaattagatggtgatgaaatgaccagaatcatctggcaaagaatcaaggacaaattaattaacccatacttggatgttgatttgaaatattacgatttaggtattgaaagtagagataaaacagacgatcagatcaccattgatgcggccaacgccattaaggaatacggggttggtgtcaagtgtgctacgatcacacctgatgaatccagagttgaagaatttaacttgaagaagatgtggttgtcgccaaatggtaccattagaaatattttaggaggtaccgttttcagggaagccattattattcctagaattccaagattggtaccaggatggaaggaacctattgtcattggtagacatgcacatggtgaccaatataaggctactgacttggtcattaacgaaccgggtaaattggaaatgacttttaccccagaaaacggtggagctccagaaactagaactgtgtacgattacaagggacctggtgtcggtttagctatgtataataccgatgagtccatcattggttttgcccattcttccttcaagatggcattaactaagaaattaccattatacttgtcaaccaaaaacactattttgaagaaatacgatggaagattcaaagacattttccatgaaatttatgaatccacctacaaaaaagaatttgaaaccaataacatctggtacgaacatagattaattgatgatatggttgcacaaatgattaaatctaagggtggttttgtcatggccttgaagaactatgatggtgatgtgcaatctgatattgttgcccaaggatttggttcattgggtttaatgacttctgttttgatgaccccagatggtaagaccttcgaaagtgaagctgcacacggtactgtcacaagacatttcagacaacatcaacaaggtaaggaaacttcaaccaactcgattgcctccatttttgcctggactagaggtattgctcaaagaggtagattagatgacaccccagatgtcgtaaaattcgccgaaattgtggaaaaggctacctttgatactgttcaagaagatggtattatgactaaggatttggctttagctcttggcagaaccgatagagaatcctacgtaaccacaactgaatttttggatgcagtttctgacaagttacagaaacaagtccaagtttag

SEQ ID NO: 5698 - protein, 431 aa, Debaryomyces hansenii
MRNPAMSGYSKYSMRSFSSSLINLDKIKVKNPIVELDGDEMTRIIWQRIKDKLINPYLDVDLKYYDLGIESRDKTDDQITIDAANAIKEYGVGVKCATITPDESRVEEFNLKKMWLSPNGTIRNILGGTVFREAIIIPRIPRLVPGWKEPIVIGRHAHGDQYKATDLVINEPGKLEMTFTPENGGAPETRTVYDYKGPGVGLAMYNTDESIIGFAHSSFKMALTKKLPLYLSTKNTILKKYDGRFKDIFHEIYESTYKKEFETNNIWYEHRLIDDMVAQMIKSKGGFVMALKNYDGDVQSDIVAQGFGSLGLMTSVLMTPDGKTFESEAAHGTVTRHFRQHQQGKETSTNSIASIFAWTRGIAQRGRLDDTPDVVKFAEIVEKATFDTVQEDGIMTKDLALALGRTDRESYVTTTEFLDAVSDKLQKQVQV

SEQ ID NO: 5699 - DNA, 1326 bp, Yarrowia lipolytica
  CDS (1)..(1326)
atgacccccacagaccctcccttgccagccatgctaactccagctaccacccggctgctagccctttctaaaaccatgtccaccaccgctactcgaggcctgtccaccaagatcaaggtcaagaaccccattgtcgagctcgatggtgatgagatgacccgaatcatctggaagtccatcaaggacaagctcattctgccctatctcgacattgatcttaagtactacgatctgggcatcgagtaccgagaccagactaacgaccaggtgaccattgacgccgccgaggccatcaagaagtaccaggtcggtgtcaagtgcgccaccatcacccccgacgaggcccgagtcaaggagtttggcctcaagaagatgtggctgtcgcccaacggtaccatccgaaacattctcggcggtactgttttccgagagcccattgtcattcccgccgtcccccggcttgtgcccggatggaaggagcctatcatcattggtcgacacgcccacggcgaccagtacaaggcccaggatgccgtcatccccggcgccggtgagctgactcttaacttcaagcccgctaacggaggcgacgagcaggtcatcaaggtgtacacctacgacgcccctggtgtcgccatggccatgtacaacactgacgagtccatcaccggctttgcctactcttcattcaacctggctctgcagaagaagctgcccctgtacatgtctaccaagaacaccatccttaagaagtacgacggccgattcaaggacattttccaggagatttacgacaaggagtacaaggataagtttgatgctgccggcatttggtacgagcaccgactcattgatgacatggtcgcccagatgatcaagtctaagggaggcttcatcatggccctcaagaactacgacggagacgtgcagtccgacattgttgcccagggctttggctctctcggtctcatgacctctgttctcgtcacccccgacggaaagacctttgagtccgaggccgcccacggcaccgtgactcgacactaccgacagcaccagcagggcaaggagacctctaccaactccattgcctccatcttcgcctggacccgaggcctcatccagcgaggcattctcgacgagacccctgaggtgaccaagtttgccgaggctctcgagaaggccaccgtcgacactgttgacaaggacggcattatgaccaaggatctggctctggccggtggcaagaccgaccgatcctcgtatgtgctgaccgaggagtttatcgacgctgtggccaacagactgaagaaggacctggcttag

SEQ ID NO: 5700 - protein, 441 aa, Yarrowia lipolytica
MTPTDPPLPAMLTPATTRLLALSKTMSTTATRGLSTKIKVKNPIVELDGDEMTRIIWKSIKDKLILPYLDIDLKYYDLGIEYRDQTNDQVTIDAAEAIKKYQVGVKCATITPDEARVKEFGLKKMWLSPNGTIRNILGGTVFREPIVIPAVPRLVPGWKEPIIIGRHAHGDQYKAQDAVIPGAGELTLNFKPANGGDEQVIKVYTYDAPGVAMAMYNTDESITGFAYSSFNLALQKKLPLYMSTKNTILKKYDGRFKDIFQEIYDKEYKDKFDAAGIWYEHRLIDDMVAQMIKSKGGFIMALKNYDGDVQSDIVAQGFGSLGLMTSVLVTPDGKTFESEAAHGTVTRHYRQHQQGKETSTNSIASIFAWTRGLIQRGILDETPEVTKFAEALEKATVDTVDKDGIMTKDLALAGGKTDRSSYVLTEEFIDAVANRLKKDLA

SEQ ID NO: 5701 - DNA, 1248 bp, Kluyveromyces lactis
  CDS (1)..(1248)
atgtcaaagattagtgtcaagactcccattgtggagatggatggtgatgaacaaacaagaatcatttggaaattaatcaaagaccacttgattcacccatatttggacattgatttgaaatactacgatctttccatcgaaaaccgtgatttgactgatgataaagtcactgaacaatccgctcaagcgactttgaaatacggtgttgctgtgaaatgtgctacgattacaccggatgaggctcgtgtcgaggaattcaaattgaaaaagatgtggaaatctccaaacggtaccattagaaatatcctaggtggtaccgtgttccgtgaaccaattgtgattccaagaattccaaagttggtgaccaactgggaaaaaccaatcattattggtagacacgctttcggtgaccaatacagggccactgacgtagttattccaggagcaggtaagttgaagttggtgttcgagagcgatgactcgaatacggaaaatatcgaactgagcgtttacgatttcgatgaagagagtaaaggtggtgttgccatggccatgtacaacactttggaatctatcactgggtttgctcatgcttctttcaagatggctttggaaagaggtttgcctctttactccaccaccaagaataccatcttgaagaaatacgacggtaagttcaaggacgtgttcgaatcgctatacgaaagtcagtacaaatcggcgttcgaagctaaggggatctggtacgaacatcgtttgatcgacgatatggttgctcagatgttgaaatcgaagggtggctacatcatcgcaatgaagaattacgatggtgatgtggaatccgatattgtcgctcaagggttcggttctcttggtctaatgacttctgtgttgattactccagatggtaaggccttcgaaagtgaagctgctcatggtaccgtcactagacattacagacaacaccaacagggtaaagaaacctcgacaaactcgatcgcctcgattttcgcttggaccagaggcttgatccaaaggggtaagttggatagcaccccagatgtggtgaaattcgccgaattggtggaatctgctaccgtcaacacggttcaagaagatgaaattatgactaaagatttggcattgatcttgggtaagaccgacagatcctcatacgtcactaccgaagagttcattgaagctgttcacaagagattggactccgaatttaaatcatcattcaactag

SEQ ID NO: 5702 - protein, 415 aa, Kluyveromyces lactis
MSKISVKTPIVEMDGDEQTRIIWKLIKDHLIHPYLDIDLKYYDLSIENRDLTDDKVTEQSAQATLKYGVAVKCATITPDEARVEEFKLKKMWKSPNGTIRNILGGTVFREPIVIPRIPKLVTNWEKPIIIGRHAFGDQYRATDVVIPGAGKLKLVFESDDSNTENIELSVYDFDEESKGGVAMAMYNTLESITGFAHASFKMALERGLPLYSTTKNTILKKYDGKFKDVFESLYESQYKSAFEAKGIWYEHRLIDDMVAQMLKSKGGYIIAMKNYDGDVESDIVAQGFGSLGLMTSVLITPDGKAFESEAAHGTVTRHYRQHQQGKETSTNSIASIFAWTRGLIQRGKLDSTPDVVKFAELVESATVNTVQEDEIMTKDLALILGKTDRSSYVTTEEFIEAVHKRLDSEFKSSFN

SEQ ID NO: 5703 - DNA, 1290 bp, Kluyveromyces lactis
  CDS (1)..(1290)
atgaaggccgcagtgatgagtattaatcgtcagttttccagctctgctgcaactgggttgcgcaagattaaagttcagactcccgttgtggagttggacggtgatgagatgactagaattatctgggataagattaagagtaaacttatcttaccatatttggatgtggatttgaagtattacgatctttccgtgacgaaccgtgatgccactaacgatcaagttactgtggattctgctaatgccatcaagaaatacggtgttggtgtgaaatgtgccactattacaccggacgagggtcgtgttaaagagttcaatttgaaaaagatgtggaaatcaccaaatggtaccatcagaaacatccttggtggtactgttttccgtgaaccaattgtcattcctagaatcccaagattagtgcctggatgggaaaaacctattgtcatcggtagacatgcccatggtgatcaatataaggccaccgatcttgtcgttccaggtcctggtaagttggaattggtttacaagccaactgatggatccgagaccaagactttggaagtttacgactacaagggtcctggtatcgctttggccatgtacaacacagacgaatccatccgtggattcgctcatgcctctttcaaattggctatcaccaagaaattgaacctttatctttccaccaagaacactatcttgaagaaatacgatggtagattcaaggatatcttccaggaaatttacgattccgagtataaatccgaatttgaaaagttgggtatctggtacgaacaccgtttaattgacgatatggttgcccaaatgatcaaatctaagggtggattcatccttgcgtttaagaactatgatggtgatgtccaatccgatatcgttgctcaagggttcgggtcccttggtttgatgacctctgttctagtgaccccagacggtaaggccttcgaaagtgaagctgctcacggtaccgtcactagacactacagacaataccaacagggtaaagaaacctcaacaaactccatcgcttccatcttcgcttggactagaggtttggccaagagaggtgaactagacaacactccagaagtcgtcgaatttgccaacttgttggaaaaatccactttgaacactgtccaagaagacggtatcatgaccaaagatttggcccttgcctgtggtaacactgacagatcaagttatgtgaacaccgacgaattcttggatgctgttgaaaagagattcagaaatgacgttaaatctctgcagtga

SEQ ID NO: 5704 - protein, 429 aa, Kluyveromyces lactis
MKAAVMSINRQFSSSAATGLRKIKVQTPVVELDGDEMTRIIWDKIKSKLILPYLDVDLKYYDLSVTNRDATNDQVTVDSANAIKKYGVGVKCATITPDEGRVKEFNLKKMWKSPNGTIRNILGGTVFREPIVIPRIPRLVPGWEKPIVIGRHAHGDQYKATDLVVPGPGKLELVYKPTDGSETKTLEVYDYKGPGIALAMYNTDESIRGFAHASFKLAITKKLNLYLSTKNTILKKYDGRFKDIFQEIYDSEYKSEFEKLGIWYEHRLIDDMVAQMIKSKGGFILAFKNYDGDVQSDIVAQGFGSLGLMTSVLVTPDGKAFESEAAHGTVTRHYRQYQQGKETSTNSIASIFAWTRGLAKRGELDNTPEVVEFANLLEKSTLNTVQEDGIMTKDLALACGNTDRSSYVNTDEFLDAVEKRFRNDVKSLQ

SEQ ID NO: 5705 - DNA, 1257 bp, Candida glabrata
  CDS (1)..(1257)
atggcagggaagatcaaagttaagaatcccattgtggagatggatggggatgagatgacgagggttatctgggggatggtgaaggataaattgatatatccatatttagatgttgatttgaagtactacgatctgtctattcagcacagagatgaaactgaggatagagttactgtagatgctgcagaggccaccttgaagcatggggtagcaattaaatgtgccactataacgccggatgaagcaaggatgaaggaattccatttaaagaagatgtggaaatctccaaatggtaccataagaaatatcctaggtggtacagtttttagggaaccgataattatcccacgtatacctagaattgttcctacatggaataagcccataattattggaaggcatgcgtttggggatcaatataaagcatcagatgcagtcatcaaagagccagggaaattagagctagtcttcactcctgcatcaggtcagggcaatcccaagacaattaaagtctatgattataaatcccccggcgtagcgctagcgatgtacaacactgacgaatcaataacaggatttgcaagagcttcgtttgagctagccataaagaggaaattaccattgtttttcactactaaaaatactatactgaagaaatatgacggtaggtttaaagatatcttccaaaagatgtacgatgaagattacaagggtaaattcaaggaactaggtataagttatgagcacaggcttattgatgatatggttgcgcaaatgattaaatccaaaggtgggtttatcattgccatgaaaaactatgacggggatgttcaatctgatatagtagcccaaggtttcggatcacttggcttaatgacatcgacattattgactccagatggtaagatcttcgaaagcgaagctgcacatggcacagtaactaggcattacaggcagtatcaaaagggcaaagagacctcgacaaactcaattgctacaatctttgcttggtcccaaggtataatccacagaggcaaagtggaccagacacctgatgttagactatttggagagatcctagagaggtctacaattgacactgtccagatagacggtatcatgactaaagacctagctctaattctcggaaagactgagagaaaggactacgcaagcacagaagagttcatagacgctgttgcaagaagactcaagcgtgagttcaattcccatttcaacaagccatcgaaactataa

SEQ ID NO: 5706 - protein, 418 aa, Candida glabrata
MAGKIKVKNPIVEMDGDEMTRVIWGMVKDKLIYPYLDVDLKYYDLSIQHRDETEDRVTVDAAEATLKHGVAIKCATITPDEARMKEFHLKKMWKSPNGTIRNILGGTVFREPIIIPRIPRIVPTWNKPIIIGRHAFGDQYKASDAVIKEPGKLELVFTPASGQGNPKTIKVYDYKSPGVALAMYNTDESITGFARASFELAIKRKLPLFFTTKNTILKKYDGRFKDIFQKMYDEDYKGKFKELGISYEHRLIDDMVAQMIKSKGGFIIAMKNYDGDVQSDIVAQGFGSLGLMTSTLLTPDGKIFESEAAHGTVTRHYRQYQKGKETSTNSIATIFAWSQGIIHRGKVDQTPDVRLFGEILERSTIDTVQIDGIMTKDLALILGKTERKDYASTEEFIDAVARRLKREFNSHFNKPSKL

SEQ ID NO: 5707 - DNA, 1272 bp, Candida glabrata
  CDS (1)..(1272)
atgctcggaagaagatgttttgcttcctctgcgaagcttgccaagatcaaagtgaagaccccagttgtagagctggatggtgatgagatgaccagaattatctgggacaagataaagaagcaactgatcctaccattccttgatgtcgatttgaagtactacgacttgtctatccagtcccgtgacaaaaccaaggaccagatcacacatgactctgctgaggctatcaagaaatatggtgtcggtgtcaagtgtgctaccatcaccccagatgaggcccgtgttaaggagttcaatttgaccaagatgtggaagtctcctaacggtacaattagaaacatactcggtggtaccgtcttcagagaaccaattgtcatcccaagagtccccagactggttccaggttgggaaaagccaatcatcataggtagacacgcccatggtgaccagtacaaggctactgatgccgttatacctggtcaaggtaagctagaacttgtctacaagccaaacggcgacgcctccaaggccgaagttatggaagtttatgactataagggcccaggtgttgcactagcaatgtataataccgacgaatccatccgtggttttgcccattcgtctttcaaactagcactacaaaagaaattgaacttgtttttgtccactaaaaacactattctaaagaaatacgatggtagattcaaggacatcttccaagaggtctacgattcagagtacaaacagaagtttgctgaattgaacatcacatatgagcaccgtctaatagatgacatggttgctcagatgatcaaatctaagggtggttttatcatggctttgaagaattacgatggtgatgtgcaatccgacattgttgctcaaggttttggttctctaggtttgatgacttctattttaatcactccagatggtaagaccttcgaaagtgaagctgctcacggtacggtcacaagacactacagaaagcaccaacaaggtgaagaaacttctactaactccattgcctctatttttgcttggaccagaggtctagctaagagaggtgaattggatggtactccagacgttgttagatttgccaacattttagaatctgcaactttgaacactgtccaacaagatggcattatgaccaaggaccttgctttagcatgtggtaagactgatagagcttcttatgtcactaccactgagtttttagatgcagtagaaaagagactacaaactgaaattaaatctattgactaa

SEQ ID NO: 5708 - protein, 423 aa, Candida glabrata
MLGRRCFASSAKLAKIKVKTPVVELDGDEMTRIIWDKIKKQLILPFLDVDLKYYDLSIQSRDKTKDQITHDSAEAIKKYGVGVKCATITPDEARVKEFNLTKMWKSPNGTIRNILGGTVFREPIVIPRVPRLVPGWEKPIIIGRHAHGDQYKATDAVIPGQGKLELVYKPNGDASKAEVMEVYDYKGPGVALAMYNTDESIRGFAHSSFKLALQKKLNLFLSTKNTILKKYDGRFKDIFQEVYDSEYKQKFAELNITYEHRLIDDMVAQMIKSKGGFIMALKNYDGDVQSDIVAQGFGSLGLMTSILITPDGKTFESEAAHGTVTRHYRKHQQGEETSTNSIASIFAWTRGLAKRGELDGTPDVVRFANILESATLNTVQQDGIMTKDLALACGKTDRASYVTTTEFLDAVEKRLQTEIKSID

SEQ ID NO: 5709 - DNA, 1236 bp, Candida glabrata
  CDS (1)..(1236)
atgagtaaagttaaggtagttaatcccatcgttgagatggatggtgatgaacagacaagaattatctggcatttaattcgtgagaaactaattttaccattcttggatgttgatttgaagtattacgacttgtctatcgaatacagagatgagaccaatgataaggtcaccgaagatagtgccttggctactttgaagtatggtgttgcggttaaatgtgctacaatcacccctgatgaggctcgtgttgaggaattcaacttgaaggagatgtggaaatcgccaaatggtactattagaaacattttgggtggtactgtgttcagagaacccattgttattcctagaatcccaaaattggtcccacaatggaaggaacctataatcattggtaggcacgccttcggcgaccagtatagggccaccgatgtcgttatcccagatgaaggtgaagttcgactagtgtacaaatcaaaggatggtaaaactgatatcgatattcctgtttataatttccctaaagaaggcggtgttgctatgatgatgtataatactactgaatctatccgtgggtttgctagagcttcttttaatatggctttggaacatgaaatgccactatattctactactaaaaacaccatcttaaagaaatacgatggtaaattcaaggacacatttgagtctatgtatgaagccgagtataaagaacaatttgaggccaaaggtatctggtatgagcatcgtttaatcgatgatatggtcgcgcaaatgttgaaatctaaaggtggttttattattgccatgaagaattacgacggtgacgttgaatctgatattgttgcccaaggctttggttccctaggtctaatgacttctgtactaatcagtccagacggtaaaacttttgagagtgaagctgctcatggtactgtcactaggcattacagacaacatcaacagggtaaagaaacttccactaactcgattgcatccatctttgcttggactagaggtattatccaaagaggtaagttagatgagaccgcagatgtagtcaaatttggtgaattgctagaaagagcaacagttgacactgttcaagaggatggcatcatgacgaaggatttagctttaattctaggtaaaaccgacaggtcggcttatgttactactgaggaatttattgatgcagtggaaaatcggataaaatcagagttccaaaagaacttttaa

SEQ ID NO: 5710 - protein, 411 aa, Candida glabrata
MSKVKVVNPIVEMDGDEQTRIIWHLIREKLILPFLDVDLKYYDLSIEYRDETNDKVTEDSALATLKYGVAVKCATITPDEARVEEFNLKEMWKSPNGTIRNILGGTVFREPIVIPRIPKLVPQWKEPIIIGRHAFGDQYRATDVVIPDEGEVRLVYKSKDGKTDIDIPVYNFPKEGGVAMMMYNTTESIRGFARASFNMALEHEMPLYSTTKNTILKKYDGKFKDTFESMYEAEYKEQFEAKGIWYEHRLIDDMVAQMLKSKGGFIIAMKNYDGDVESDIVAQGFGSLGLMTSVLISPDGKTFESEAAHGTVTRHYRQHQQGKETSTNSIASIFAWTRGIIQRGKLDETADVVKFGELLERATVDTVQEDGIMTKDLALILGKTDRSAYVTTEEFIDAVENRIKSEFQKNF

SEQ ID NO: 5711 - DNA, 1215 bp, Bartonella quintana
  CDS (1)..(1215)
atggtaaagatcaaagtgcaaaaccccattgttgaaattgatggggatgagatgacccgtatcatctggaaatatatcaaagacaaactgatccatccttatctcgacattgaccttaaatattacgatctttctgtcgaaaatcgagatacaaccaatgatcaagtaactatcgattctgcgaatgctatcaaaaaatatggggttggtataaaatgtgcaaccatcacgcctgatgaagcacgagtcaaagagtttaacctaaaaaaaatgtggaaatcacccaatggcacgatccgcaatattttagggggagtcatttttcgcgaaccgattatctgcaaaaatgtcccacgtctcgttcctaactggaccaaaccaattattatcggacgtcatgcttttggtgatcagtataaggcaactgatttcaaatttcctggcaagggaaagttaagtattaaatttgtcggcgatgacaatcaagttatcgaacatgatgtttttgacgccccaagtgcaggggtcgccatggctatgtataaccttgatgaatcaatttgtgattttgctcgagcatcttttaattatggactacagcggaatgttccagtctatctttcaacaaaaaacaccatactgaaatcttacgatggccgttttaaagatatctttcaagaaatattcgatgctgaatttaaagctgaatttgaaaatcgtaaattacattacgaacaccgcctcattgatgacatggttgcttctgcacttaaatggtcaggtggctacgtgtgggcatgtaaaaattatgatggtgatgttcagtccgatatcgttgctcaaggctttggttcccttggtcttatgacttctgttctcatgacaccagacggtaaaattgttgaagcagaagctgcacacggtacagtgacacgccattaccgtcagtatcaaaaaaatgaagaaacatcaacaaattctattgcatctatttttgcatggacacgtggcctgacgcatcgtgccaaacttgataacaatgagaaattaaaaaactttgccacaacattggaagaagtttgtattaagactgttgaagaaggttttatgaccaaagatctcgcacttttgattggacctaaacaaaaatggctttctacaacaggcttcctcgataaaattcatgaaaatctcaaaaaagcaatgggtaattaa

SEQ ID NO: 5712 - protein, 404 aa, Bartonella quintana
MVKIKVQNPIVEIDGDEMTRIIWKYIKDKLIHPYLDIDLKYYDLSVENRDTTNDQVTIDSANAIKKYGVGIKCATITPDEARVKEFNLKKMWKSPNGTIRNILGGVIFREPIICKNVPRLVPNWTKPIIIGRHAFGDQYKATDFKFPGKGKLSIKFVGDDNQVIEHDVFDAPSAGVAMAMYNLDESICDFARASFNYGLQRNVPVYLSTKNTILKSYDGRFKDIFQEIFDAEFKAEFENRKLHYEHRLIDDMVASALKWSGGYVWACKNYDGDVQSDIVAQGFGSLGLMTSVLMTPDGKIVEAEAAHGTVTRHYRQYQKNEETSTNSIASIFAWTRGLTHRAKLDNNEKLKNFATTLEEVCIKTVEEGFMTKDLALLIGPKQKWLSTTGFLDKIHENLKKAMGN

SEQ ID NO: 5713 - DNA, 1215 bp, Bartonella henselae
  CDS (1)..(1215)
atgataaagatcaaagtggaaaaccccattgttgaaatcgatggggatgaaatgacccgtataatctggaaatatatcaaagacaaattaatccacccgtatctggatattgaactcaaatattacgatctttccgtggaaaatcgagacgcaaccaatgatcaggtaactatcgattctgccaatgctattaaaaaatatggtgttggtataaaatgtgcaactataacaccagatgaatcgcgtgttaaagaattcaatttaaaaaaaatgtggaaatcacccaatggcacgatccgtaatattttaggaggcgttatttttcgcgaacctattatctgtaaaaatgtcccccgcctcgttcctaactggacaaagccaattattatcggacgtcatgcttttggtgatcaatataaggcaacagatttcaaatttcctggcaaaggaaagttaagtattaaatttgttggcgatgacaatcaagttatcgaacatgatgtttttgacgctccaagtgcaggtattgcaatggctatgtataacctcgatgaatcaattcgtgattttgcccgcgcatcttttaattatggactacagcgaaatcttccagtttatctttcaacaaaaaacaccattctgaaaacttacgatggtcgttttaaagacatctttcaagaaatatttgatgcagaatttaaggctgaatttgaaaatcgtaaattatattatgaacatcgcctaattgatgacatggttgcttctgcactgaaatggtcagggggctacgtgtgggcatgtaaaaactacgatggtgatgttcaatcagatatcgttgctcaaggttttggttcccttgggcttatgacttctgttctcatgacaccagacggtaaaattgttgaagcagaagctgcacatggtacagtaacacgccattatcgtcagtatcaaaaaaatgaagaaacatcaacaaattctattgcctctattttcgcatggacacgtggactgacgcaccgtgccaaacttgataacaatgaaaaattaaaaaatttcgccacaacactggaaagcgtttgtattaaaaccgttgaagaaggttttatgaccaaagatctcgcacttttaattggatctaaacaaaaatggctttctacaacaggttttctcgataaaattgatgaaaatctcaaaaaagcaatgggaaactaa

SEQ ID NO: 5714 - protein, 404 aa, Bartonella henselae
MIKIKVENPIVEIDGDEMTRIIWKYIKDKLIHPYLDIELKYYDLSVENRDATNDQVTIDSANAIKKYGVGIKCATITPDESRVKEFNLKKMWKSPNGTIRNILGGVIFREPIICKNVPRLVPNWTKPIIIGRHAFGDQYKATDFKFPGKGKLSIKFVGDDNQVIEHDVFDAPSAGIAMAMYNLDESIRDFARASFNYGLQRNLPVYLSTKNTILKTYDGRFKDIFQEIFDAEFKAEFENRKLYYEHRLIDDMVASALKWSGGYVWACKNYDGDVQSDIVAQGFGSLGLMTSVLMTPDGKIVEAEAAHGTVTRHYRQYQKNEETSTNSIASIFAWTRGLTHRAKLDNNEKLKNFATTLESVCIKTVEEGFMTKDLALLIGSKQKWLSTTGFLDKIDENLKKAMGN

SEQ ID NO: 5715 - DNA, 1212 bp, Rhizobium leguminosarum
  CDS (1)..(1212)
atgaacaagatcaaggtcgccaatcccgtcgccgatctcgacggcgatgaaatgacgcgcatcatctggcagctcatcaaggataagctgatccatccgtatctcgacctcgacatcgactatttcgacctctccgtcgaaaaccgcgacgccaccaacgaccaggtcaccgtcgatgccgccaacgccatcaagaagtatggcgtcggcatcaagtgcgcgacgatcacgccggatgaagcccgcgtcaaggaattcaacctcaaggaaatgtggaagagcccgaacggcacgatccgcaacattctcggcggcgtcatctttcgcgagccgatcatctgcaagaacgtgccgcgcctggttcccggctggaccaagccgatcgtcgtcggccgccacgccttcggcgaccagtaccgcgccaccgatttcaagttccccggcaagggcaagctgacgatcaagttcgtcggcgaggacggcaccgtcatcgagaaggaagtcttcaacgcaccgggcgccggcgtcgccatggccatgtacaacctcgacgaatcgatccgcgaattcgcccgcgcctcgatgatgtacggcctgatgcgcaagtggccggtctatctgtcgaccaagaacaccatcctcaaggcctatgacggccgcttcaaggacatcttcgaggaagtctacgagaccgaattcaaggatcagttcaaggaagccggcatcacctacgaacaccgcctgatcgacgacatggttgcttcggcgctcaagtggtccggcgggtacgtctgggcctgcaagaactacgacggcgacgtccagtccgacacggtcgcccaaggcttcggctcgctcggcctgatgacctcggttctgctgacgcccgacggcaagacggtcgaagccgaagccgctcacggcacggtcacccgtcactaccgccagcatcagaagggccaggaaacctcgacgaactcgatcgcctcgatcttcgcctggacccgcggcctggcgcaccgcgccaagctcgacgacaatgccgagctcgcccgcttcgcctcgacgctcgaaaaagtctgcgtcgacactgtcgaatccggtttcatgaccaaggacctggcgctgctgatcggccccgaccagccgtggctctcgaccaccgccttcctcgacaagatcgaccagaacctgcagaaggccatggcgtaa

SEQ ID NO: 5716 - protein, 403 aa, Rhizobium leguminosarum
MNKIKVANPVADLDGDEMTRIIWQLIKDKLIHPYLDLDIDYFDLSVENRDATNDQVTVDAANAIKKYGVGIKCATITPDEARVKEFNLKEMWKSPNGTIRNILGGVIFREPIICKNVPRLVPGWTKPIVVGRHAFGDQYRATDFKFPGKGKLTIKFVGEDGTVIEKEVFNAPGAGVAMAMYNLDESIREFARASMMYGLMRKWPVYLSTKNTILKAYDGRFKDIFEEVYETEFKDQFKEAGITYEHRLIDDMVASALKWSGGYVWACKNYDGDVQSDTVAQGFGSLGLMTSVLLTPDGKTVEAEAAHGTVTRHYRQHQKGQETSTNSIASIFAWTRGLAHRAKLDDNAELARFASTLEKVCVDTVESGFMTKDLALLIGPDQPWLSTTAFLDKIDQNLQKAMA

SEQ ID NO: 5717 - DNA, 1230 bp, Bdellovibrio bacteriovorus
  CDS (1)..(1230)
atgaaaaaaatcaaagttgccaatcccgtcgttgaactcgacggcgatgaaatgacaagaatcatctggaaattcatcaaacaacaattgatccttccataccttgatatcgacattaagtactatgacctgggcatggagcatcgtgatgctaccaacgaccaagtaactgttgacgctgcggaagcgatcaaaaagtacaacgtgggtatcaaatgcgcgacgatcactcctgacgaagctcgcgtaaaagaattcaacctgaaacaaatgtggaagtccccgaacggcactatccgtaacattttggatggtactgtattccgtgaacccatcatctgcaaaaacgttccacgtctggttcctaactggacagctcccatctgcatcggtcgtcacgctttcggcgaccagtaccgtgcaactgatttcgtaaccaaaggcaaaggcaagctgactgtgactttccagcctgagaacggtggagaaacgatcactcacgaagtttacaacttcaaaggcgatggcgttgctttgactatgtacaacactgacgaatccatcaccggtttcgcacgttcttgcttcaaccaggcgttgaccaagaaatggccgttgtacctttccactaaaaataccatcctgaaaaaatacgatggtcgcttcaaagacatcttcgaagagatctatcaaaaagaattcaaagcgaagttcgatgctgctggcatcacttacgagcaccgcctgatcgacgacatggttgcttccgctttgaaatggaatggtaacttcgtatgggcatgtaagaactacgacggcgacgttcagtccgatacagtagctcaaggcttcggttctttgggtctgatgacttccgtattggtcactccagacggtaagactatggaatctgaagcagctcacggcacagtgactcgtcactaccgtcagcaccagcaaggcaaaccaacttccacgaacccaatcgcttccatctttgcatggactcgcggtcttgagcaccgtggtaacctggataacaaccaggagcttgtgaagttcgctcagactttggaaaaagtctgcgttgagactgttgaagctggcttcatgaccaaagaccttgccgtttgcatctatggcgacaaagttccagctgacaagtacatgaacacggagccgttcctggcgaagttggatgagaacttgaaaaaagctctttccatgtaa

SEQ ID NO: 5718 - protein, 409 aa, Bdellovibrio bacteriovorus
MKKIKVANPVVELDGDEMTRIIWKFIKQQLILPYLDIDIKYYDLGMEHRDATNDQVTVDAAEAIKKYNVGIKCATITPDEARVKEFNLKQMWKSPNGTIRNILDGTVFREPIICKNVPRLVPNWTAPICIGRHAFGDQYRATDFVTKGKGKLTVTFQPENGGETITHEVYNFKGDGVALTMYNTDESITGFARSCFNQALTKKWPLYLSTKNTILKKYDGRFKDIFEEIYQKEFKAKFDAAGITYEHRLIDDMVASALKWNGNFVWACKNYDGDVQSDTVAQGFGSLGLMTSVLVTPDGKTMESEAAHGTVTRHYRQHQQGKPTSTNPIASIFAWTRGLEHRGNLDNNQELVKFAQTLEKVCVETVEAGFMTKDLAVCIYGDKVPADKYMNTEPFLAKLDENLKKALSM

SEQ ID NO: 5719 - DNA, 1227 bp, Rhodopseudomonas palustris
  CDS (1)..(1227)
atggcgaaaatcaaggtgaagaaccccgtcgtggaactcgacggtgacgagatgaccaggatcatatggcagatgatcaaggacaagctcatcaccccgttccttgatgtcgagctgatgtatttcgacctcgggatggagcaccgcgacaagaccgacgatcaggtcacgatcgatgcggccaacgccatcaagcaggtcggcgtcggcgtgaagtgcgccaccatcaccccggacgaagcgcgggtgaaggagttcggcctcaagagcatgtggaagtcgccgaacggcaccatccgcaacatcctcggcggcgtgatcttccgcgagccgatcatctgcaagaacgtgccgcggctggtgccgggctggaccaagccgatcgtgatcggccgccacgcctacggcgaccagtatcgtgcgaccgacatcaagttccccggcccgggcacgctgacgatgaagttcgtcggcgaggacggctcggtgatcgagcgcgaagtgttcaaggcgcccggcgccggcgtcgcgatgtcgatgtacaacctcgacgagtcgatcaaggacttcgcccgcgcctcgctgaactacggcctgatgcgcaactacccggtctatttgtcgaccaaaaacaccatcatgaaggtgtacgatggccgcttcaaagacatcttccaggagatcttcgacgccgagttcaagaaggaatacgacgccaagggcctgacctacgagcaccgcctgatcgacgacatggtcgcctcggcgctgaagtggtcgggcggctacgtctgggcctgtaagaactacgacggcgacgtgcagtccgacaccgtggcgcagggttacggctcgctcggcctgatgacctcggtgctgatgacgccggacggcaagacggtggaagccgaagccgcccacggcaccgtcacccgtcactaccgcgaacaccagaagggcaaggcgacctcgaccaactcgatcgcctcgatcttcgcctggacccgcggcctcgcgcatcgcgccaagctcgacagcaacgaagagctcgctcgcttcgccgacctgctcgagaaggtctgcgtcgacaccgtcgaagccggcgcgatgaccaaggacctcgcgctcctggtcggcgccgaccagcgctggctgtcgaccgagggcttcctcgacaaggtcgcgcagaacctcaacaaggcgatggaagacgccaaggccgcctga

SEQ ID NO: 5720 - protein, 408 aa, Rhodopseudomonas palustris
MAKIKVKNPVVELDGDEMTRIIWQMIKDKLITPFLDVELMYFDLGMEHRDKTDDQVTIDAANAIKQVGVGVKCATITPDEARVKEFGLKSMWKSPNGTIRNILGGVIFREPIICKNVPRLVPGWTKPIVIGRHAYGDQYRATDIKFPGPGTLTMKFVGEDGSVIEREVFKAPGAGVAMSMYNLDESIKDFARASLNYGLMRNYPVYLSTKNTIMKVYDGRFKDIFQEIFDAEFKKEYDAKGLTYEHRLIDDMVASALKWSGGYVWACKNYDGDVQSDTVAQGYGSLGLMTSVLMTPDGKTVEAEAAHGTVTRHYREHQKGKATSTNSIASIFAWTRGLAHRAKLDSNEELARFADLLEKVCVDTVEAGAMTKDLALLVGADQRWLSTEGFLDKVAQNLNKAMEDAKAA

SEQ ID NO: 5721 - DNA, 1564 bp, Pisum sativum
  CDS (79)..(1317)
aggatccgggtaccatggttctcacctaacatctcgttctccgcatcttcatcctcttctcttcttccgatcaccaccatggcattccagaaaatcaaagtcgccagtcccatcgttgagatggacggagatgaaatgacccgagttatctggaagtcaatcaaggataagctcatttttcctttcttggagttggacatcaagtactttgacctaggccttcctcatcgtgatcagactgatgataaagttacagttgaaagtgccgaagcaactctcaagtataatgttgcaatcaagtgtgcaactatcactccagatgaagctcgtgtcgaggagttcggcctgaagagcatgtggaggagtccaaatgggacaattagaaacattttgaatggaactgtcttcagagaaccaattatttgcaaaaatgtccctcgccttattcctggttggacaaagccaatatgtattggaaggcatgcttttggtgatcaatatagggccactgatgcagttattaaaggacctggaaagctgaagatggtgtttgttccagaaggcaaaggtgagaccactgatttggaggtttataacttcactggtgaaggaggtgttgcattggctatgtacaacactgatgagtctattcgttcttttgctgaggcatctatggcaactgctttagagaaaaaatggccactttatcttagcaccaaaaatacaattcttaagaaatatgatggaagattcaaggacatatttcaagaagtttacgaggcaagctggaaatcaaagtacgaggctgctggtatatggtatgagcatcgactcattgatgatatggtggcatatgcactcaagagtgaaggaggttatgtatgggcatgcaagaactatgatggagatgtccagagtgatttcttagctcaaggttttggatcgttgggtttgatgacatctgtattggtttgccctgatgggaagactattgaagcagaagcagcccatgggacagttacccgtcatttcagggttcatcaaaagggcggagaaaccagcacaaacggcatagcatccatctttgcttggacaagaggtctagcccatagggcaaagctagatgacaatgctaaactcttggaactcactgaaaagctagaggcagcttgtattggagcagtagaatctgggaagatgaccaaggatttggcacttattcttcatggatcccagcttaagagggagcattatttgaacacagaggaattcatcgatgctgtggcagccgagcttaaatcgaagatctctgcgtagatttgtgattttagatattagaaaagtgatgagattggagaggttcgcatgcactttcaaaagaaataagaaagaggattgaagcattggacttggctatttttctttccttcatttgtgtgttgggtcggatagcatgggttgtgcttccccccgtttagtttgaaattttgaattgggtacctttgaattttgacttacaaatttaaatggattttgttttgctatctctgctgaaaaaaaaaaa

SEQ ID NO: 5722 - protein, 412 aa, Pisum sativum
MAFQKIKVASPIVEMDGDEMTRVIWKSIKDKLIFPFLELDIKYFDLGLPHRDQTDDKVTVESAEATLKYNVAIKCATITPDEARVEEFGLKSMWRSPNGTIRNILNGTVFREPIICKNVPRLIPGWTKPICIGRHAFGDQYRATDAVIKGPGKLKMVFVPEGKGETTDLEVYNFTGEGGVALAMYNTDESIRSFAEASMATALEKKWPLYLSTKNTILKKYDGRFKDIFQEVYEASWKSKYEAAGIWYEHRLIDDMVAYALKSEGGYVWACKNYDGDVQSDFLAQGFGSLGLMTSVLVCPDGKTIEAEAAHGTVTRHFRVHQKGGETSTNGIASIFAWTRGLAHRAKLDDNAKLLELTEKLEAACIGAVESGKMTKDLALILHGSQLKREHYLNTEEFIDAVAAELKSKISA

SEQ ID NO: 5723 - DNA, 2254 bp, Ovis aries
  CDS (167)..(1411)
tgccggaacagctgtggtctagccgggattgccagagtagacactgagtgactgtgtgctcccgagtcatcgccaacgtaccttccccgcaggaggtaagctgagtctgcgagactgagaggagttggggtgattagaaattgtaaagaggtttattgaagtcaacatgtctcacaaaatccaaggcggatctgtggtagagatgcaaggagatgaaatgacacgaatcatttgggagttgattaaagagaaactcatttttccctacgtggacctggacctgcacagctacgatttaagcatagagaatcgcgatgccaccaatgaccaggtcaccaaggacgctgcagaagctataaagaagtacaacgttggtgtcaagtgtgccaccatcacccccgatgagaagagagtggaggagttcaagctgaaacagatgtggaagtctccgaatggcaccatccgaaatatcctgggtggcactgtcttcagggaagctattatctgcaaaaatattccccggctcgtgagcggatgggtaaaacccattatcataggtcgtcatgcttatggggatcaatatagagcaactgattttgttgtgccggggcctggaaaagtagagatatgctataccccaagcgatggatcccccaaaacggtatacctagtacataacttcacagagagtggtggtgttgccatggggatgttcaatcaagataagtcaatcgaagattttgcacacagttctttccagatggctttgtctaagaattggcctttgtatctgagcaccaaaaacactattctgaagaaatacgatggacgttttaaagacatctttcaggagatatatgacaagcagtacaaatctcagtttgaagctcaaaatatctggtatgagcacaggcttattgatgacatggtggcccaagctatgaaatcggaggggggcttcatttgggcctgtaagaactatgatggggacgtgcagtcggactccgtggcccaaggttatggctctctcggcatgatgaccagtgtgctggtttgtccagatggcaagacagtagaagcagaggctgcccatgggactgtcacccgtcactaccgaatgtaccagaaaggacaggagacgtccaccaatcccattgcttccatttttgcctggaccagaggcttagcccacagagctaagcttgataacaataaagagctcagcttttttgcaaaggctttggaagaagtctgtattgagaccattgaggctggcttcatgaccaaggacttagctgcatgtattaaaggtttacccaacgtgcaacgttctgactacttgaatacgtttgagttcatggataaactcggagagaacctgcagttgaaactagcccaggccaaactttaaggtcatttcttgtctttggaggatgtttttttttctggtaactagggtctactggtttacatttttctctataactctcaagggtaaaggcaaatcaattttgtaatttgtttagaagccagagtttatcttttctataagtttacagcctttttcttatgcatacagttatgccacctttgtgaacgtggccggggacttttttttaattttattttctactaatagcctaggaattatttttaatgtccacttgtactcactgtcactttttcttatgtgctgagatcaatgaccaaaatcaacagtgctcaaaaggataaactgtagccacggtgttattccctgaaattgtatagagattcattccctttctcgattttcatggcctggggcgctgggtcattctaatgtaacaggtatctcattatttgcagtagaagctgcatgttagacttgcttatgatttgaaatgaagagcatggctgtaactaaatcgtattgaagactcatctttgttaagagctctagttgaatcttttaaaaatactaaatatttttgagctccttggagaatccagaagaaatactacctgagggggcgggggttgtcctctgtgtttgtctcctcctcctggccttgtgtggcctaagtattttgcgaccttgaacagcacgtttcatccaagtgcaataatacaagctgcaccttttttttggacctctgctggcctcttttatttcctttatgtaaatgtgatttttcagaagttgattgtaaacactatcctagtcctgttcttcatctaaactatcgattttaattaaaattcagtgctaatg

SEQ ID NO: 5724 - protein, 414 aa, Ovis aries
MSHKIQGGSVVEMQGDEMTRIIWELIKEKLIFPYVDLDLHSYDLSIENRDATNDQVTKDAAEAIKKYNVGVKCATITPDEKRVEEFKLKQMWKSPNGTIRNILGGTVFREAIICKNIPRLVSGWVKPIIIGRHAYGDQYRATDFVVPGPGKVEICYTPSDGSPKTVYLVHNFTESGGVAMGMFNQDKSIEDFAHSSFQMALSKNWPLYLSTKNTILKKYDGRFKDIFQEIYDKQYKSQFEAQNIWYEHRLIDDMVAQAMKSEGGFIWACKNYDGDVQSDSVAQGYGSLGMMTSVLVCPDGKTVEAEAAHGTVTRHYRMYQKGQETSTNPIASIFAWTRGLAHRAKLDNNKELSFFAKALEEVCIETIEAGFMTKDLAACIKGLPNVQRSDYLNTFEFMDKLGENLQLKLAQAKL

SEQ ID NO: 5725 - DNA, 1197 bp, Leptospira interrogans
  CDS (1)..(1197)
atggcaaagatcaaggtaaaaaccccgctcgtggagcttgacggggacgagatgaccaggatcatctggaaggagattaaggatagattcattcatccgtatctcgatatagaactggattattatgatttaggcgtggagtacagggacaaaacggatgataaagtaaccgtggattctgctcacgcgattcaaaaatatggagtaggcgtaaaatgtgcgacgattactcctaaccaagatagagttaaagaatacaatctcaaacaagaatggaaatctccgaacggaaccattcgttctattttagacggaaccgtttttcgtaaaccgatcatcgtaaaaaatattcctcctgcggttcgttcttggaaaaaaccgattacagtaggacgtcacgcttacggagatctttataaggacacagaactttatattcccgaagccggaaaggtggaactcgtttataccggaaaggacggaaaagaaaaacaaagagctttgattcacgactttgaaggagccggtgtgatcatggggcaacataacttggataagtcgatcttaagttttgcccaggcttgttttaactacgctatttccgaaaagattgatctttggttcgctacaaaggacacaatctccaaaaaatatcacgccagattccgcgccatctttgacgaacttgcaaaggctaaagctgcggatctcaaaaaagcgggaattgaatattcgtattatctaatcgatgacgcagtcgctcagctgatgaaaaatgaaggtggaatgctctgggccctgatgaattacgacggagatgttatgagcgacatggtcgcctccggatttggatctttaggacttatgacttctgtgctcgtttctcctgatggaaaatttgaatacgaagcagcacacggtactgtgaccagacattatcgtaaataccaacagggtgaaactacttctacaaattcggtagcttctatttttgcttggacgggtgcgttgattaaaaggggagagttggacggaactcccgatgtggtcgcatttggtcataagctggaaaaagcggtgattgatacaatcgaaagcggagagatgacaaaagatttaactcttctttgcaccgattcgaatgcaaaagctttagacacttttcaatttatggaagcaattcaaaaacgactttaa

SEQ ID NO: 5726 - protein, 398 aa, Leptospira interrogans
MAKIKVKTPLVELDGDEMTRIIWKEIKDRFIHPYLDIELDYYDLGVEYRDKTDDKVTVDSAHAIQKYGVGVKCATITPNQDRVKEYNLKQEWKSPNGTIRSILDGTVFRKPIIVKNIPPAVRSWKKPITVGRHAYGDLYKDTELYIPEAGKVELVYTGKDGKEKQRALIHDFEGAGVIMGQHNLDKSILSFAQACFNYAISEKIDLWFATKDTISKKYHARFRAIFDELAKAKAADLKKAGIEYSYYLIDDAVAQLMKNEGGMLWALMNYDGDVMSDMVASGFGSLGLMTSVLVSPDGKFEYEAAHGTVTRHYRKYQQGETTSTNSVASIFAWTGALIKRGELDGTPDVVAFGHKLEKAVIDTIESGEMTKDLTLLCTDSNAKALDTFQFMEAIQKRL

SEQ ID NO: 5727 - DNA, 1239 bp, Mycobacterium paratuberculosis
  CDS (1)..(1239)
atgtccaaccccgccaacacgtccaagatcaaggtcaagggccgcgtcgtcgagctcgacggtgacgagatgacccgggtcatctggaagatgatcaaggagaacttgatccttccctacctcgacatcgacctggactactacgacctgggcatcgagcaccgcgaccgcaccgacgaccaggtgacgatcgacgcggcgtatgccatcaagaagcacggcgtgggcgtcaagtgcgcgacgatcacccccgacgaggcgagggtccgggagttcaacctcaagaggatgtggctgtccccgaacgggacgatccggaacatcttgggcggcaccatcttccgcgagccgatcgtgatatccaatgtgccccggctggttccgggctggaccaagccgatcgtcatcggccgccacgcattcggtgaccagtaccggtcgaccaacttcaaggtggacaagccgggcaccgtcgcgatcaccttcactcccgccgacggcagcgagccgatcgtgcacgagatggtgtccatccccgaggacggcggggtggtgatggggatgtacaacttccgggagtcgatccgcgacttcgcccgcgcgtcgttcaagtacggcctgaacgccaaatggccggtgtacctgtcgaccaagaacaccatcctcaaggcctacgacggcatgttcaaggacgagttccagcgcatctacgacgaggaattcaaggagcagttcgaagccgagggactgacctacgaacaccggctgatcgacgacatggtggcggcctgcctcaaatgggagggcggctacgtgtgggcctgcaagaactacgacggcgacgtccaatccgacgcgatagcacagggttacggctcgctggggctgatgacctcggtgctgatgaccgccgacggcaagacggtcgaggccgaggccgcgcacggcaccgtcacccggcacttccgtcagtaccaggccggcaagccgacctcgaccaacccgatcgcctcgatcttcgcctggacgcgcgggctggcgcaccgcggcaagctggacgacacccccgaggtggtcgagttcgcgcagaccctggaacgcgtcgtcgtctccaccgtggagagcggcaagatgaccaaggacctcgccatcctgatcggccccgaccaaaagtggcagcagagcgaggaattcctcaactcgatcgccgagaacctgcggcgggagctgactaactag

SEQ ID NO: 5728 - protein, 412 aa, Mycobacterium paratuberculosis
MSNPANTSKIKVKGRVVELDGDEMTRVIWKMIKENLILPYLDIDLDYYDLGIEHRDRTDDQVTIDAAYAIKKHGVGVKCATITPDEARVREFNLKRMWLSPNGTIRNILGGTIFREPIVISNVPRLVPGWTKPIVIGRHAFGDQYRSTNFKVDKPGTVAITFTPADGSEPIVHEMVSIPEDGGVVMGMYNFRESIRDFARASFKYGLNAKWPVYLSTKNTILKAYDGMFKDEFQRIYDEEFKEQFEAEGLTYEHRLIDDMVAACLKWEGGYVWACKNYDGDVQSDAIAQGYGSLGLMTSVLMTADGKTVEAEAAHGTVTRHFRQYQAGKPTSTNPIASIFAWTRGLAHRGKLDDTPEVVEFAQTLERVVVSTVESGKMTKDLAILIGPDQKWQQSEEFLNSIAENLRRELTN

SEQ ID NO: 5729 - DNA, 1278 bp, Ashbya gossypii
  CDS (1)..(1278)
atgctcggcagaggcaggatgctcggcagaaggttgttttcaggtagcagggcggcggcgcggatccgggtgaagacgccggtggtggagttggacggggatgagatgacgcggatcatctgggagcgcatcaagcagcagctggtgctgccgcacgtggacgtggagctgaagtactacgacctgtcgatcacgtcgcgggacgcgacgtcggaccaggtgacggtggacgcggcccacgcgatcaagcagtacggggtgggcgtgaagtgcgcgacgatcacgcccgatgaggcgcgcgtgcgggagttcgggctgaagaagatgtggcggtcgcccaacggcacgatccgcaacattctgggcgggacggtgttccgcgagccgattgtgattccacggatccccaggctggtgccggggtgggaaaagccgatcatcatcggcaggcacgcgcacggggaccagtacaaggccacggacgcggtggtccctggcgcgggcacgctcgacctggtgttccggccggcggacggatctgcacccacttcgctgcatgtgtacgacttcgcggggcctggcgttgccctggcgatgtacaacaccgaggagtccatacgcggcttcgcgcacgcgtcgttccgcctggcgctggccaagcagctgaacctgttcctgtcgacgaagaacacgatcctcaagcagtacgacggccgcttcaaggacgtgttcgaggagctgtaccaggcgcagtacaaggccgagttcgagcgcctgggcatctactacgagcaccgcctcatcgacgacatggttgcgcagatggtcaagtccaagggcggcttcatcatggcactcaagaactacgacggcgacgtccagtcggacatcgttgcgcagggcttcggctcgctcggcctgatgacctcggtcctggtgacgccggacggcaagaccttcgagagcgaggctgcccacggcaccgtcacgcgccacttccgccagcaccaggcgggtaaggagacgtccaccaactccatcgcgtccatctttgcctggacccgcggcctcgccaagcgcggggagctcgacaacacgccggacgtggtcaacttcgcccacgcgctcgaggcggccaccacgaacacggtccagctcgacgggatcatgaccaaggacctcgcgctggcctgcggcaggtcggaccgctcggcctacgtgaacacgaacgagttcatcgatgccgtcgaggcacggctcaagaaggagcttgcttag

SEQ ID NO: 5730 - protein, 425 aa, Ashbya gossypii
MLGRGRMLGRRLFSGSRAAARIRVKTPVVELDGDEMTRIIWERIKQQLVLPHVDVELKYYDLSITSRDATSDQVTVDAAHAIKQYGVGVKCATITPDEARVREFGLKKMWRSPNGTIRNILGGTVFREPIVIPRIPRLVPGWEKPIIIGRHAHGDQYKATDAVVPGAGTLDLVFRPADGSAPTSLHVYDFAGPGVALAMYNTEESIRGFAHASFRLALAKQLNLFLSTKNTILKQYDGRFKDVFEELYQAQYKAEFERLGIYYEHRLIDDMVAQMVKSKGGFIMALKNYDGDVQSDIVAQGFGSLGLMTSVLVTPDGKTFESEAAHGTVTRHFRQHQAGKETSTNSIASIFAWTRGLAKRGELDNTPDVVNFAHALEAATTNTVQLDGIMTKDLALACGRSDRSAYVNTNEFIDAVEARLKKELA

SEQ ID NO: 5731 - DNA, 1248 bp, Ashbya gossypii
  CDS (1)..(1248)
atgggcaaggtgaaggtacaacaacccatcgtcgagatggacggcgacgaacagacgcggatcatctggcacttgatcaaggatcagctcatcttcccctacttggacgtggacttgaagtactacgatctttccattgagaacagggatgccaccgaggaccgcgtgactgtggagtctgcggaggcgaccctcaagtacggcgttgccgtcaagtgtgcgaccattaccccggacgaggcgcgtgtcgaggagttcgggctcaaggagatgtggaagtctcccaacgggaccatccggaacatcctcggcgggaccgtcttcagagagcccattattatcccaaggatccccagactggtgcccggctggaacgagccgatcattgtcggcagacacgcgtttggggaccagtacaaggcgaccgacgttgtcattccaggcgagggcacgttgaagctggtctttgaaagcaaggacggggacaagtccaagaatcttgacctggaggtctttgaataccccaaggatggcggtgttgccatgaccatgtacaacaccaccgactcgatcaccggctttgccaagtcgagcttcgagttggcgttgcaaagaaagatgccgctatattcgacaacgaagaacacgatcttgaagaagtacgacggcaagtttaaggatattttcgagggcatgtacgcagcggagtacaaggagaagtttgaggctgctggcatctggtatgaacacagactgattgacgatatggttgcgcagatgttgaagtccaagggcggcttcatcattgccatgaagaactacgatggtgatgtgcagtcggacatcgtcgcccagggcttcgggtctttgggtctcatgacttctgttcttgtgtctccagatggaaagaccttcgagagtgaggccgcacatggcactgtcacccggcactacagacagcaccagcagggcaaggaaacatccaccaactcaattgcctctatttttgcctggacgcgcggtattatacacagaggtaaggtcgacggtaccccagatgtcgtgaagttcggcgagttgttggagaagtccaccctggacacggtgcaggaggacaacatcatgaccaaggacctagcgttgattttgggcaagaccgacagagccagctatgttaccacggaagagtttatcacagcagtagcgaaccgcttagcggatggctacaagcgtcttttttgtgaataa

SEQ ID NO: 5732 - protein, 415 aa, Ashbya gossypii
MGKVKVQQPIVEMDGDEQTRIIWHLIKDQLIFPYLDVDLKYYDLSIENRDATEDRVTVESAEATLKYGVAVKCATITPDEARVEEFGLKEMWKSPNGTIRNILGGTVFREPIIIPRIPRLVPGWNEPIIVGRHAFGDQYKATDVVIPGEGTLKLVFESKDGDKSKNLDLEVFEYPKDGGVAMTMYNTTDSITGFAKSSFELALQRKMPLYSTTKNTILKKYDGKFKDIFEGMYAAEYKEKFEAAGIWYEHRLIDDMVAQMLKSKGGFIIAMKNYDGDVQSDIVAQGFGSLGLMTSVLVSPDGKTFESEAAHGTVTRHYRQHQQGKETSTNSIASIFAWTRGIIHRGKVDGTPDVVKFGELLEKSTLDTVQEDNIMTKDLALILGKTDRASYVTTEEFITAVANRLADGYKRLFCE

SEQ ID NO: 5733 - DNA, 1287 bp, Dictyostelium discoideum
  CDS (1)..(1287)
atgatttcaaatattagtaaaaaaatcctttcaaattcatcaaaattcattcaacaacaatcttattccacaaaaagaattaaagtaacaggaccagttgttgaaatggatggtgatgaacaaactagaattatgtgggaatcaattaaatcaaaattaattttcccatatgttgatattacaccagaatattatgatttaggtttaccaaatcgtgatgcaaccaatgatcaagttacaattgatgcagccaatgcaattaagagagcaaagattggtgttaaatgtgcaaccatcacaccggatgaagcacgtgtaaaagagtttggattaaaggagatgtggaaatcaccaaacggtaccattcgtaatattttggatggtacagtattcagaggaccaatcatttgtaagaatttaccattgttagtaccaggttggaagaaaccaatcatcattggtcgtcatgctcatggtgatcaatacaaagccaccgatttcgttgttaacggtccaggtaaattagagatgattttcacaccaagtcaaggcgagccaattaaaaaggtgatctatgatttcaaaggttcaggtgttgcaatgggtatgtataatacaactagctcaatcactgctttcgctcatagttgtttccaatacgctatcgataaaaagtatccattatatctctccacaaagaacacaattctcaagaaatacgacggtcaattcaaagacattttccaagagatctacgaaagagaatacagcactaaatttggtgaattgggtatttggtatgaacatagactcattgatgatatggttgcttttgcactcaagagtgagggtggtttcgtttgggcttgtaaaaactatgatggtgatgttcaatcagatatcgtcgcccaaggttatggtagtttaggtcttatgacttcagtattaaccaatgctgatggagttttcgcaagtgaagcctcccatggtactgtcactagacatttccgtgaacatcaaaaaggtaatgaaactagtaccaattctgttgcttccattttcgcttggacaagtgcacttggtcaacgtggtaaattagataacaataaagatctcgttaaattcgctcaagatatggaaaaagcatgtgttgaatcaattgaatctggtttcatgactaaagatttagcaatttgtatcaaaggaaaccaagttaaaagatcaaattacttaaatactgaagaatatattaacaaagttgctgaattttataataaaattaaataa

SEQ ID NO: 5734 - protein, 428 aa, Dictyostelium discoideum
MISNISKKILSNSSKFIQQQSYSTKRIKVTGPVVEMDGDEQTRIMWESIKSKLIFPYVDITPEYYDLGLPNRDATNDQVTIDAANAIKRAKIGVKCATITPDEARVKEFGLKEMWKSPNGTIRNILDGTVFRGPIICKNLPLLVPGWKKPIIIGRHAHGDQYKATDFVVNGPGKLEMIFTPSQGEPIKKVIYDFKGSGVAMGMYNTTSSITAFAHSCFQYAIDKKYPLYLSTKNTILKKYDGQFKDIFQEIYEREYSTKFGELGIWYEHRLIDDMVAFALKSEGGFVWACKNYDGDVQSDIVAQGYGSLGLMTSVLTNADGVFASEASHGTVTRHFREHQKGNETSTNSVASIFAWTSALGQRGKLDNNKDLVKFAQDMEKACVESIESGFMTKDLAICIKGNQVKRSNYLNTEEYINKVAEFYNKIK

SEQ ID NO: 5735 - DNA, 1594 bp, Oryza sativa
  CDS (66)..(1304)
tgcttcccaccggctcccgatctccgaggcaagcagcgccgcacccggccgctgccgccgccgccatggcgttcgagaagatcaaggtcgccaaccccatcgtcgagatggacggtgatgagatgaccaggatattctggcagtctatcaaggacaagcttatctttccatttttggatctggacattaagtactatgacttgggagttctccaccgtgatgcaactgatgacaaggtcaccgtggaggctgcagaggctactctcaagtacaatgtggctattaagtgtgcgacgattactccagatgaggctcgggttaaggagttcaacctaaagcaaatgtggaagagccccaatggcacaattaggaatattatcaatggcactgtattcagagagccaattatatgcaaaaatgtcccaaggcttgttccaggatggactaagcccatttgcattggaaggcatgcttttggtgatcagtaccgagcaactgatgcagttctgaaggggcctggcaagctcaagctggtttttgagggaaaggatgagcagattgatctggaggtgttcaacttcactggtgctggaggagttgctttgtctatgtacaacactgatgagtcaatccgagcttttgctgaagcttctatgacaactgcttatgagaagaaatggccgctttatcttagcaccaaaaacacaatcctgaagaaatatgatggaaggttcaaggatattttccaggaggtctatgaagctgggtggaaatccaagtttgaggctgccggaatatggtatgagcatcgtctcatcgatgacatggttgcttatgcacttaagagtgaagggggctatgtgtgggcttgcaagaattacgatggagatgtgcagagtgatttcttagctcaaggctttggttcattgggtttgatgacatcagtattggtgtgccctgatggaaaaacaattgaagctgaagctgcccatggcacggttacccgtcatttccgtgttcaccagaagggaggtgaaaccagcacaaacagcattgcttcaatctttgcttggaccagaggacttgcacacagggcaaagcttgacgacaatgctagacttcttgactttgcactaaaacttgaagctgcttgcgttggaaccgtggaatctgggaagatgaccaaagaccttgctcttcttattcacgggtcttcaaacgtcacaagaagccattacctgaacactgaagagttcattgatgcggttgctgcggagctccggtcaagactggcagccaactgagctttttacaagatactcttgccaacttcagtgcttcatttcccttcttttaaagtcattttggctgtatcaccattaccattcgagttctcattctggactgaatgaacatttacagcatcggtacaaattgttgtcgatccaagcagtccatagatgctgatatcacgtagacgggacctcccaaataaaggatatatagaacaatctgtcattgctgatagttgttttatccctatcagttagcgtccgactggaaaattatctatgttcctcatttggatggtttg

SEQ ID NO: 5736 - protein, 412 aa, Oryza sativa
MAFEKIKVANPIVEMDGDEMTRIFWQSIKDKLIFPFLDLDIKYYDLGVLHRDATDDKVTVEAAEATLKYNVAIKCATITPDEARVKEFNLKQMWKSPNGTIRNIINGTVFREPIICKNVPRLVPGWTKPICIGRHAFGDQYRATDAVLKGPGKLKLVFEGKDEQIDLEVFNFTGAGGVALSMYNTDESIRAFAEASMTTAYEKKWPLYLSTKNTILKKYDGRFKDIFQEVYEAGWKSKFEAAGIWYEHRLIDDMVAYALKSEGGYVWACKNYDGDVQSDFLAQGFGSLGLMTSVLVCPDGKTIEAEAAHGTVTRHFRVHQKGGETSTNSIASIFAWTRGLAHRAKLDDNARLLDFALKLEAACVGTVESGKMTKDLALLIHGSSNVTRSHYLNTEEFIDAVAAELRSRLAAN

SEQ ID NO: 5737 - DNA, 1230 bp, Gloeobacter violaceus
  CDS (1)..(1230)
atgtccaaattgacggtgaagacgaccgtggttgatatcgacggcgatgagatgacccggattatctgggagatgatccagcagaagctgctcaggccgtatctggagatgacgatcgagcgctacgacctcggcatcgaaaaccgtgacgccaccgacgatcgggtgacggtggaggcggccgaggccgttatgcgccacggcgtgggtgtcaagtgcgccacgatcacccccgacgaagcacgcgtcaaagagttcggcctcaaaaaaatgtggaagtcccccaacggcaccatccgcaacatcctcggggggacggtctttcgcgagccgatcatctgtcgcaacatcccgcgattggtgcccggctggacacggcctatcgtcgtcgcccgccacgccttcggcgatcagtaccgggccaccgagtaccgcgtgccggggccgggaaaactcaaactcgtctttgagccgacccaagggggcgagccggtcgagcagacggttttcgatttcgcggacaaaggcgtcgccctgggcatgtacaacctcgatgtgtcgatcgccgggtttgccagggcctgcttcaactttgccctgacccgcaactggccggtgtacctgtcgaccaaaaacacgatcctcaaagtctacgacggcaactttaaagacatcttccagagcgtctacgacagcgaattcaaggccgccttcgcggagcgcggtttgagttacgaacaccgcctgatcgacgacatggtggccgccgccctcaaatggtcgggcgggtttgtctgggcctgcaagaactacgacggcgacgtgcaatcggacgtggtggcgcagggcttcggctccctcggcttgatgacttcgattttgctcactcccgacggcaagtcggtcgagaccgaggccgcccacggcacagttacccgccactaccgcctgcaccagcagggcaagcagacttccaccaacccgatcgcttcgatttttgcctggagccggggactttggtaccgcggccagttcgacggtaccccggagatttgcgcttttgccgaattgctggagcacgtctgcgtcgagacggtcgaggcgggcgagatgaccagggatctggcgctgctggtgagccccgagcagccgtacctcaccaccggcgcatttatcgacgccgtcgcccgcaggctcgacgccgcttacgcagaacgcttcgccgcctga

SEQ ID NO: 5738 - protein, 409 aa, Gloeobacter violaceus
MSKLTVKTTVVDIDGDEMTRIIWEMIQQKLLRPYLEMTIERYDLGIENRDATDDRVTVEAAEAVMRHGVGVKCATITPDEARVKEFGLKKMWKSPNGTIRNILGGTVFREPIICRNIPRLVPGWTRPIVVARHAFGDQYRATEYRVPGPGKLKLVFEPTQGGEPVEQTVFDFADKGVALGMYNLDVSIAGFARACFNFALTRNWPVYLSTKNTILKVYDGNFKDIFQSVYDSEFKAAFAERGLSYEHRLIDDMVAAALKWSGGFVWACKNYDGDVQSDVVAQGFGSLGLMTSILLTPDGKSVETEAAHGTVTRHYRLHQQGKQTSTNPIASIFAWSRGLWYRGQFDGTPEICAFAELLEHVCVETVEAGEMTRDLALLVSPEQPYLTTGAFIDAVARRLDAAYAERFAA

SEQ ID NO: 5739 - DNA, 1410 bp, Plasmodium yoelii yoelii
  CDS (1)..(1410)
atggaacgcagcatccattctctaaaaaaacatataacctaccgtattacaaagagatatgtaagcaatggacaatccgctttcaatcttagtgggaaagtaaaggtggaaaatccaatagttgaattagatggagatgaaatgactaaagttatatggaaagatatcaaagaaaaattgatattaccatatttagatcttaatataaaatattttgatttatctatagaaaacagagataaaacaaatgaccaaataacattagacgcagcacaagaaataaaaaaatatagtgttgggataaaatgcgcaactataactccagattctgcaagagtaaaagaatttaatttaaaagaaatgtggaaaagtccaaatggtacaattagaaatatattagatggaactgtatttagagctcctatattaattaaaaatattcctaaacttatatctaattggaaaaaaccaatagtaataggaagacatgcatatgccgatcaatataaacaaaaatcattaaaagtaacaaaaagtggtaaattcgaaattgtttttacccctgatgataattcaccagttgttagagaaacaatattcaattttaaatctccaggtgtatgtttaggtatgtataatactgaagaatccattaaaaattttgcattatcatgttttcaatatgcattagatttaaaaatgcctgtatattttagtaccaaatcaactatacttaagatatatgatggactatttaaagatatatttcaagatatttatgaacaaaaatttaaaaaaatttttgaacaaaataatttatggtatgagcacaaattaattgatgatatggttgctcaagtattaaaatctgaaggagggtttgtttgggcgtgtaaaaattatgatggtgatatacaatcagatgcagttgcacaaggatatggaagtctaggtttaatgagttctatattaatgtgccccgatggggttacttgcatatctgaagctgcacatggtactgtaactaaacattatagggcctatcaaagaggagaaaaaacctcaactaatcctattgcatctatttttgcatggactagaggtttacaacatagagcaaaattagatcaaaataaaaatttacaacaattttgttatgctcttgaaaaagcatgtatagaaacagtggaaaatggactcatgcctaaagatctagctatttgtattaaaggtattaaaaatgttactgaaaaagattatctatgtactgacgattttatagatgccataaacgaaaaccttaaattgaaacttttgatgaatcaaaaaaaaaacgatgttcaagcaactgataccaaattacacaacgaaaattgggtcaactatgccccccaagaacattctacataa

SEQ ID NO: 5740 - protein, 469 aa, Plasmodium yoelii yoelii
MERSIHSLKKHITYRITKRYVSNGQSAFNLSGKVKVENPIVELDGDEMTKVIWKDIKEKLILPYLDLNIKYFDLSIENRDKTNDQITLDAAQEIKKYSVGIKCATITPDSARVKEFNLKEMWKSPNGTIRNILDGTVFRAPILIKNIPKLISNWKKPIVIGRHAYADQYKQKSLKVTKSGKFEIVFTPDDNSPVVRETIFNFKSPGVCLGMYNTEESIKNFALSCFQYALDLKMPVYFSTKSTILKIYDGLFKDIFQDIYEQKFKKIFEQNNLWYEHKLIDDMVAQVLKSEGGFVWACKNYDGDIQSDAVAQGYGSLGLMSSILMCPDGVTCISEAAHGTVTKHYRAYQRGEKTSTNPIASIFAWTRGLQHRAKLDQNKNLQQFCYALEKACIETVENGLMPKDLAICIKGIKNVTEKDYLCTDDFIDAINENLKLKLLMNQKKNDVQATDTKLHNENWVNYAPQEHST

SEQ ID NO: 5741 - DNA, 1389 bp, Neurospora crassa
  CDS (1)..(1389)
atgtcgcccgtcaccgcaaacctcatccgctcctccctccgtcaggcttctgtctactcccgtctcaacatcgccactgctcctgcctttactcgccctgctgccccttccctcttcgtctccaataacagattccgcacaatggcttccgaggctttccagaagatcaaggtcaagaaccccgtcgtcgagctcgatggcgatgagatgacccgcatcatctggcaggacatcaaggagaagttcatctaccccttccttgacatcgacctcaagtactatgacttgggtctcgagtaccgtgaccagaccaacgaccaggtcactattgatgccgccgaggccatcaagaagtactccgtcggtgttaagtgtgctaccatcactcccgatgagtctcgtgtagaggagttcaagctcaagcagatgtggctgtcccccaacggcaccatccgcaatgctctcggtggcactgttttccgtgagcccatcgtcattccccgcgtccctcgcctggtgcccggctggaagaagcccatcattattggccgccacgcctttggtgaccagtaccgcgccaaggacctcgtcgctcccggccccggtaagctccagatggtttacacccctgagggtggtgagccccaggtcatcgacgtcttcgactacaagaacggcggcggtgttgcccagacccagtacaacactgatgagtccatcgagggcttcgcccacgcttccttcaagctcgctcttgacaagggtcttcccctctacatgagcaccaagaacaccatcctcaagaagtacgatggccgcttcaaggatatcttccaacagatctacgatacccagtacaaggaggctttcgaggccaagaagatctggtacgagcaccgtctcatcgacgacatggtcgcccagatgatcaagagctccggtggctacatcatggccctcaagaactatgatggtgatgtccagtccgatatcgttgctcagggcttcggctccctcggtctcatgacctccgtcctcatcacccccgatggtaagaccttcgagtccgaggctgcccacggtaccgtcactcgccactaccgcgagcaccagaagggtaaccagacctccaccaaccccatcgcctccatctttgcctggacccgtggtcttgtccagcgtggcaagctcgacaacactcccgagctcattgctttcgctgaggctctcgagaaggcctgcattgacaccgtcgatatcgatggcatcatgaccaaggatctcgcgcttgcctgcggcaagaccggccgtgaggattgggtcaccacctccgagtacatggctgccgtcgagcgccgcctcaagagcactctcaaggagaagctctaa

SEQ ID NO: 5742 - protein, 462 aa, Neurospora crassa
MSPVTANLIRSSLRQASVYSRLNIATAPAFTRPAAPSLFVSNNRFRTMASEAFQKIKVKNPVVELDGDEMTRIIWQDIKEKFIYPFLDIDLKYYDLGLEYRDQTNDQVTIDAAEAIKKYSVGVKCATITPDESRVEEFKLKQMWLSPNGTIRNALGGTVFREPIVIPRVPRLVPGWKKPIIIGRHAFGDQYRAKDLVAPGPGKLQMVYTPEGGEPQVIDVFDYKNGGGVAQTQYNTDESIEGFAHASFKLALDKGLPLYMSTKNTILKKYDGRFKDIFQQIYDTQYKEAFEAKKIWYEHRLIDDMVAQMIKSSGGYIMALKNYDGDVQSDIVAQGFGSLGLMTSVLITPDGKTFESEAAHGTVTRHYREHQKGNQTSTNPIASIFAWTRGLVQRGKLDNTPELIAFAEALEKACIDTVDIDGIMTKDLALACGKTGREDWVTTSEYMAAVERRLKSTLKEKL

SEQ ID NO: 5743 - DNA, 1765 bp, Oryza sativa
  CDS (83)..(1489)
gtggcgcctcttcgacctcgtgggtgggtgtgcgggtgcgggactcggtgggatgcgccacctgctgctcctgcgctgcggcatggctcctctctacggctcctcctcctccgccgccgcgaccaaagccctcctcttaaaccccgccgccgcgcacgccttcgtcccttcttcccccggaccccgcgcgctccgccgcggcggcgcctccctccgctgctatgccgccgccgccgcggcggtggccgagcagcaccgcatcaaggtccacaaccccatcgtcgagatggacggtgacgagatgacgcgggtcatttggaagatgataaaggataagctcatcttcccttacctggagctggatgtcaagtatttcgaccttgggctgctcaaccgggatgccaccgatgataaggtcactgttgagagtgccgaggctacgttggagtataatgttgctgttaagtgtgctaccattacacctgatgaaacaagagttaaagagttcaaactcaagtcaatgtggaggagcccaaatggcaccatcaggaatattctaaatggaactgttttccgggagcccatcttgtgtaaaaatgtaccacggatactttctggctggaagaagcccatttgcattggaaggcatgcatttggagaccagtatcgagctactgatacaataattaatggtccaggaaagcttaaaatggtttttgtcccagatggtgctgaacctgtggagttaaatgtttataattttaaagggcctggtgtggctttatcaatgtataatgtggatgagtctattagagcttttgctgagtcatcaatggcaatggcactttccaaaaaatggcctctttatctcagcaccaagaacacaatattgaagaaatatgatggcaggttcaaggacatcttccaggaggtatatgaagagaaatggaaggagaagttcgaggaaaactcgatatggtatgagcaccggttgattgatgacatggtggcatatgctgtgaaaagtgaaggtggatatgtttgggcttgcaaaaactatgatggagatgttcagagtgacttccttgcccaaggttttggttccttgggtttgatgtcatctgttttgttatcttctgatgggaaaacgttagaagctgaggcagctcatgggactgtcactagacatttcaggctacatcagaagggacaggagacaagtacaaatagcattgcttctatatttgcttggactcgtggactagaacatagagcaaagctggataaaaatgataggctgctggatttcacaaagaaacttgaatctgcatgtattgaaacagttgaatcggggaagatgacaaaggatcttgcactccttatccatggccccaaggtaacaagggagttctaccttaacaccgaagaattcattgacgctgtggctcagcaactgcgagaaaagattcaaataccagctgtggtttaatcctcaatatgcaaattctatgtctggttggaagcctatcattgggtgcagcaggttcactcgctgtgcattcgcgcgcattttgattggggtgatgagacggatgatcccatttaatagtttgcctcgaagcgatttttgtttcagcctaccattttatcatgttaaactgttaataatctgctagtgctaagtgaattggtgatttcgctactcaattcacaacctcgcatggttgggtaaattaccttgaggtcaatacataagcgtagtctc

SEQ ID NO: 5744 - protein, 468 aa, Oryza sativa
MAPLYGSSSSAAATKALLLNPAAAHAFVPSSPGPRALRRGGASLRCYAAAAAAVAEQHRIKVHNPIVEMDGDEMTRVIWKMIKDKLIFPYLELDVKYFDLGLLNRDATDDKVTVESAEATLEYNVAVKCATITPDETRVKEFKLKSMWRSPNGTIRNILNGTVFREPILCKNVPRILSGWKKPICIGRHAFGDQYRATDTIINGPGKLKMVFVPDGAEPVELNVYNFKGPGVALSMYNVDESIRAFAESSMAMALSKKWPLYLSTKNTILKKYDGRFKDIFQEVYEEKWKEKFEENSIWYEHRLIDDMVAYAVKSEGGYVWACKNYDGDVQSDFLAQGFGSLGLMSSVLLSSDGKTLEAEAAHGTVTRHFRLHQKGQETSTNSIASIFAWTRGLEHRAKLDKNDRLLDFTKKLESACIETVESGKMTKDLALLIHGPKVTREFYLNTEEFIDAVAQQLREKIQIPAVV

SEQ ID NO: 5745 - DNA, 1794 bp, Lupinus albus
  CDS (58)..(1515)
acatagtaggcatcgatattgttgagctccctccactcgcaaccaaattaagttttgatgataagagcagcttttcgatcaagtgctatctccggcggcgcaaccaccaccactacgatgttttattcttgttcaaactttgtcattaaaaacccttatttcctctttacttcttcaacaactccgtcatccttgaaacacaaccttctttctttctccactgctccctttcatcgggtttcacttcgctgctatgcaacccaccctaacttccataggcttcaagtccttaatccaattgttgaaatggacggtgatgaaatgaccaggattatatggaagatgataaaggataaacttatatttccgtacctggatttaaacataaagtattttgatttgggggttgagaaccgcgatgctaccgatgacagagttactgtcgaaagtgctgaagccactctcaagtacaatgttgctgtgaaatgtgcaacaataactcctgatgagacccgagtcaaagaatttggattgaagtctatgtggagaagccccaatgggacaatcaggaatattttaaatggtactgttttccgtgaacccataatatgccgcaacatacccagaattgttcctgggtggaaaaaacccatatgtattggcagacatgcttttggtgatcagtatcgtgccactgatgcaataattaaaggaccagggaagctgaagttggtatttgtcccagaagatggtgaggctccaacggagcttgatgtttatgatttcaaaggcccaggtgtagcgcttgctatgtataatattgacgagtcaattcgagcttttgcggaatcatcaatgtcattggcatttgcaaagaaatggccactttacttgagcaccaaaaacacaattctcaagaaatatgacggcagatttaaagacatattccaggaggtatatgaagaaaggtggaggcaaaattttgaagaacactcaatatggtatgagcataggctaattgatgacatggtggcatatgcggtcaagagtgaaggtggatatgtttgggcttgcaagaattatgatggtgatgtccaaagtgatttactagctcaaggatttggctcattgggtctcatgacttctgtactgttatcttctgatggtaagacattagaagctgaagcagctcatggaaccgtaactcgacattttcggcttcatcaaaaggggcaggaaactagtacaaacagtattgcttccatatttgcatggacgcgaggactggaacatagggccaagctggataataatgaaaaactaagggatttcacatataagttggaggctgcatgtgttgagacagtggagtctggaaagatgaccaaagatcttgcacttctcattcacggacctaaggtatcaagggaatattacttgaacactgaggaatttattgatgctgtggctcataatcttaagagaaagctccaagagactcctgcattggtctgagtagtagcttttgataagtttgaaaaggttgacactggttttgatagatgcccctattatttaaccattcataatgatgctattttgggatgatataaaatagttttgatgtgttgaacaaaatgtaggtgtgggaatatgaatttatgaatttggttttttatgaataattcgttgatagtgactgtaacatggagatatgcaacaatggcattaacaataagcatgttaacaaatacctactagccctcaagcaaattgaatagaattggtgcatgt

SEQ ID NO: 5746 - protein, 485 aa, Lupinus albus
MIRAAFRSSAISGGATTTTTMFYSCSNFVIKNPYFLFTSSTTPSSLKHNLLSFSTAPFHRVSLRCYATHPNFHRLQVLNPIVEMDGDEMTRIIWKMIKDKLIFPYLDLNIKYFDLGVENRDATDDRVTVESAEATLKYNVAVKCATITPDETRVKEFGLKSMWRSPNGTIRNILNGTVFREPIICRNIPRIVPGWKKPICIGRHAFGDQYRATDAIIKGPGKLKLVFVPEDGEAPTELDVYDFKGPGVALAMYNIDESIRAFAESSMSLAFAKKWPLYLSTKNTILKKYDGRFKDIFQEVYEERWRQNFEEHSIWYEHRLIDDMVAYAVKSEGGYVWACKNYDGDVQSDLLAQGFGSLGLMTSVLLSSDGKTLEAEAAHGTVTRHFRLHQKGQETSTNSIASIFAWTRGLEHRAKLDNNEKLRDFTYKLEAACVETVESGKMTKDLALLIHGPKVSREYYLNTEEFIDAVAHNLKRKLQETPALV

SEQ ID NO: 5747 - DNA, 1583 bp, Lupinus albus
  CDS (43)..(1281)
cctcatatcatttctgtgttctcatcatctccgatcgaaaccatggcattccagaagatcaacgtcgccaaccccatcgtcgaaatggacggagatgaaatgactcgagttatctggaaatcaatcaaggacaagctcattttgcccttcttggagttggacatcaagtattatgaccttggccttccttaccgtgatgagacagatgacaaagtcacagttgaaagtgctgaagcaactctgaagtacaatgtagcaatcaagtgtgcaactattactccagatgaagcccgtgtgaaggagtttggcctgaagcaaatgtggaagagtccaaatgggacaatcaggaatattttgaacggaactgttttcagagaaccaattctttgcaaaaacatcccccgccttgttcctggttggaacaagccaatatgtattggaagacatgcttttggtgatcaatataaggctactgatgcagtgattaaaggagctggaaaactgaaactggtgtttgtcccagaaggccaaagtgaggcgactgaattagaggtttataatttcactggtgaaggaggtgttgcacaggcgatgtataacactgatgagtctatccgtgcttttgccgatgcttctatgacaactgcttatgagaaaaaatggccactttatcttagcaccaagaatacaattcttaagaaatatgatggaagattcaaggacatctttcaagaagtttatgaagcaagctggaaatcaaactttgaggctgctggtatatggtatgagcatcggctcattgatgatatggtggcatacgcagtcaagagtgatggaggttatgtatgggcatgcaaaaactatgatggagatgttcagagtgatttcttagctcaaggttttggatcactgggcttgatgacatctgtattggtttgccctgatggaaagaccatagaagcagaagcagcccatggcacagttacccgtcattttagggttcatcagaagggaggggaaaccagcacaaacagcatagcatccatctttgcttggagtagggggctagcccacagggcaaaacttgatgacaatgctaaactcttggacttcactaaaaaactagaggaagcttgcattggagcagtagagtctggaaagatgaccaaggatttggcactcattattcatggatccaaactttcaagggagcattatctgaacacagaggagttcattgatgccgtggcaaacgagctcaaagcaaagatttctgcttgattttagatagatgagaaaagattagaatgaaaagagatgtttcatgtggtcgtaaactatcttctgaagaaataagaaagcattggtggttggagccttttccttctttgctggttgggtctaagaatgcttcgccattttatttcaactgatttgtcttatgtaattttgaacgatttactttggagtttaattgggcttttcattgtttttgctgattttactttgcatgtttcacttattgttctcaagagttttttattaactcttacctaattacttctaagctttaatttgttact

SEQ ID NO: 5748 - protein, 412 aa, Lupinus albus
MAFQKINVANPIVEMDGDEMTRVIWKSIKDKLILPFLELDIKYYDLGLPYRDETDDKVTVESAEATLKYNVAIKCATITPDEARVKEFGLKQMWKSPNGTIRNILNGTVFREPILCKNIPRLVPGWNKPICIGRHAFGDQYKATDAVIKGAGKLKLVFVPEGQSEATELEVYNFTGEGGVAQAMYNTDESIRAFADASMTTAYEKKWPLYLSTKNTILKKYDGRFKDIFQEVYEASWKSNFEAAGIWYEHRLIDDMVAYAVKSDGGYVWACKNYDGDVQSDFLAQGFGSLGLMTSVLVCPDGKTIEAEAAHGTVTRHFRVHQKGGETSTNSIASIFAWSRGLAHRAKLDDNAKLLDFTKKLEEACIGAVESGKMTKDLALIIHGSKLSREHYLNTEEFIDAVANELKAKISA

SEQ ID NO: 5749 - DNA, 1627 bp, Lupinus albus
  CDS (79)..(1317)
aagtgtcgcggcgcctctacatacgtgtttgtctcatttctcaggtctcacctaacttcctcatttctcatcggagccatggcattccagaagatcaacgtcgccaatcccatcgttgagatggacggagatgaaatgactcgagttatctggaaatcaatcaaggataagctcatttttcccttcttggagttggacatcaagtattatgaccttggccttccttaccgtgacgagacagatgataaagtcactgttgaaagtgctgaagcaactctgaagtataatgtagcaatcaagtgtgcaactattactccagatgagggccgtgtgaaggaatttggcctgaagcaaatgtggaggagtccaaatgggacaattaggaacattttgaatggaactgttttcagagaaccaattctttgcaaaaacatcccccgccttcttcctggctggaacaagccaatatgtattggaagacatgcttttggtgatcaatatcgggcgactgactcagtgattaaaggagctggaaaactaaaactggtgtttgtcccagaaggccaaagtgaggcgactgaattagaagtttataatttcactggtgaaggaggtgttgcattggctatgtataacaccgacgagtctatccgtgcttttgctgaggcttctatgacaactgcttatgagaaaaaatggccactttatcttagcaccaaaaatacaattctgaagaaatatgatggaagattcaaggacatctttcaagaagtttatgaagcaagctggaaatcgaagtttgaggctgctggtatatggtatgaacatcggctcatcgatgatatggtggcatacgcagtcaaaagtgatggaggttatgtatgggcatgcaaaaactatgatggagatgtccagagtgatttcttagcacaaggttttggttcactgggcttgatgacatctgtattggtttgccctgatgggaaaactatagaatcagaagcagcccatggcacagttacccgtcattttagggttcatcagaagggaggggaaaccagcacaaacagcatagcatccatctttgcttggagtaggggtctagcccacagggcaaaacttgatgacaatgctaaactcttggatttcactcaaaaactagaggcagcttgcattggagcagtagagtctgggaagatgaccaaggatctggcactcattcttcatggatccaagctttcaagggagcactatctgaacacagaggagttcattgatgctgtggcaaacgagctcaaagcaaggctttctgcttaggcttgattttagataaatgagaaaggattagagtgaaaggagatctctccagtgttgttatactctcttctgaagaaataagaaagcattggttggcgcatttttcttgtttgttgagttagtctgggaatgcagcggttggctgcttggctattttgcttgaactgatttgtcttgtaattttgagttgaattacttcagagtttaattgggctttgctatgtgttttttgctgattttactttgcatgcttgacatattattctgcaaataacacatgcgtacttaattttggggatttttctccgac

SEQ ID NO: 5750 - protein, 412 aa, Lupinus albus
MAFQKINVANPIVEMDGDEMTRVIWKSIKDKLIFPFLELDIKYYDLGLPYRDETDDKVTVESAEATLKYNVAIKCATITPDEGRVKEFGLKQMWRSPNGTIRNILNGTVFREPILCKNIPRLLPGWNKPICIGRHAFGDQYRATDSVIKGAGKLKLVFVPEGQSEATELEVYNFTGEGGVALAMYNTDESIRAFAEASMTTAYEKKWPLYLSTKNTILKKYDGRFKDIFQEVYEASWKSKFEAAGIWYEHRLIDDMVAYAVKSDGGYVWACKNYDGDVQSDFLAQGFGSLGLMTSVLVCPDGKTIESEAAHGTVTRHFRVHQKGGETSTNSIASIFAWSRGLAHRAKLDDNAKLLDFTQKLEAACIGAVESGKMTKDLALILHGSKLSREHYLNTEEFIDAVANELKARLSA

SEQ ID NO: 5751 - DNA, 2305 bp, Homo sapiens
  CDS (196)..(1440)
gggggcggagctccagcggccttcagaggggtcgctaggccacacggggcgagagggggctgggggaaacacccccgccagttccgggtgcctggagtttaaaaggcgataaactacattcagttgagtctgcaagactgggaggaactggggtgataagaaatctattcactgtcaaggtttattgaagtcaaaatgtccaaaaaaatcagtggcggttctgtggtagagatgcaaggagatgaaatgacacgaatcatttgggaattgattaaagagaaactcatttttccctacgtggaattggatctacatagctatgatttaggcatagagaaccgtgatgccaccaacgaccaagtcaccaaggatgctgcagaagctataaagaagcataatgttggcgtcaaatgtgccactatcactcctgatgagaagagggttgaggagttcaagttgaaacaaatgtggaaatcaccaaatggcaccatacgaaatattctgggtggcacggtcttcagagaagccattatctgcaaaaatatcccccggcttgtgagtggatgggtaaaacctatcatcataggtcgtcatgcttatggggatcaatacagagcaactgattttgttgttcctgggcctggaaaagtagagataacctacacaccaagtgacggaacccaaaaggtgacatacctggtacataactctgaaggaggtggtggtgttgccatggggatgtataatcaagataagtcaattgaagattttgcacacagttccttccaaatggctctgtctaagggttggcctttgtatctgagcaccaaaaacactattctgaagaaatatgatgggcgttttaaagacatctttcaggagatatatgacaagcagtacaagtcccagtttgaagctcaaaagatctggtatgagcataggctcatcgacgacatggtggcccaagctatgaaatcagagggaggcttcatctgggcctgtaaaaactatgatggtgacgtgcagtcggactccgtggcccaagggtatggctctctcggcatgatgaccagcgtgctggtttgtccagatggcaagacagtagaagcagaggctgcccacgggactgtaacccgtcactaccgcatgtaccagaaaggacaggagacgtccaccaatcccattgcttccatttttgcctggaccagagggttagcccacagagcaaagcttgataacaataaagagcttgccttctttgcaaatgctttggaagaagtctctattgagacaattgaggctggcttcatgaccaaggacttggctgcttgcattaaaggtttacccaatgtgcaacgttctgactacttgaatacatttgagttcatggataaacttggagaaaacttgaagatcaaactagctcaggccaaactttaagttcatacctgagctaagaaggataattgtcttttggtaactaggtctacaggtttacatttttctgtgttacactcaaggataaaggcaaaatcaattttgtaatttgtttagaagccagagtttatcttttctataagtttacagcctttttcttatatatacagttattgccacctttgtgaacatggcaagggacttttttacaatttttattttattttctagtaccagcctaggaattcggttagtactcatttgtattcactgtcactttttctcatgttctaattataaatgaccaaaatcaagattgctcaaaagggtaaatgatagccacagtattgctccctaaaatatgcataaagtagaaattcactgccttcccctcctgtccatgaccttgggcacagggaagttctggtgtcatagatatcccgttttgtgaggtagagctgtgcattaaacttgcacatgactggaacgaagtatgagtgcaactcaaatgtgttgaggatactgcagtcatttttgtaaagaccttgctgaatgtttccaatagactaaatactgtttaggccgcaggagagtttggaatccggaataaataccacctggaggtttgtcctctccatttttctctttctcctcctggcctggcctgaatattatactactctaaatagcatatttcatccaagtgcaataatgtaagctgaatcttttttggacttctgctggcctgttttatttcttttatataaatgtgatttctcagaaattgatattaaacactatcttatcttctcctgaactgttgattttaattaaaattaagtgctaattaaaaaaaaaaaaaaaaaaa

SEQ ID NO: 5752 - protein, 414 aa, Homo sapiens [sequence omitted]

SEQ ID NO: 5753 - DNA, 1215 bp, Bradyrhizobium japonicum
  CDS (1)..(1215)
atggcaaaaatcaaggtatccaatcccgtcgtcgaactcgatggcgacgagatgacccggatcatctggcagtacatcaaggacaagctgatcaccccgttcctggatgtcgagctgatgtatttcgacctggggatggaataccgcgaccacaccaacgatcaggtcaccatcgacgccgccgaagcgatcaagaaggtcggcgtcggcgtcaagtgcgccaccatcacccctgatgaagcccgggtgaaggagttcaacctcaagcagatgtggaagtcgccgaacggcaccatccgcaacatcctcggcggcgtgatcttccgcgagccgatcatctgcaagaacgtgccgcgcctggttcccggctggaccaagccgatcatcatcggccgccacgcctatggcgaccagtaccgcgccaccgatttcaagttcccgggcaagggcaccctgtcgatgaagttcgtcggcgaggacggcaccgtgatcgagaaggaagtgttcaaggcccccggcgccggcgtcgccatggagatgtacaatctcgacgactccatcatcgacttcgcccgcgcctcgctgaactacggcctgctgcgcaactacccggtctatctgtcgaccaagaacaccatcctcaaggtctatgacggccgcttcaaggacatcttccaggacatctacgaccgcgagttcaagaaggaattcgaggccaagggcctgacctacgagcaccgcctgatcgacgacatggtggcctcggcgctgaaatggtccggcggctatgtctgggcctgcaagaactacgacggcgacgtgcagtccgacacggtcgcgcagggctacggctcgctcggcctgatgacctcggtgctgctcaccccggacggcaagaccgtggaagcggaagccgcccacggcacggtgacccgccactaccgcgagcaccagaagggcaaggagacctcgaccaactcgatcgcgtcgatcttcgcctggacccgtggcctcgcccaccgcgccaagctcgacaacaacgccgagctcgccaagttcgcgaacaccctcgagaaggtctgcgtcgacaccgtcgaggccggctacatgaccaaggacctcgcgctgctggtcggcgccgaccagcgctggctctcgaccaccggcttcctcgacaaagtcgcggagaacctcaccaaggcgatggcggcgtaa

SEQ ID NO: 5754 - protein, 404 aa, Bradyrhizobium japonicum
MAKIKVSNPVVELDGDEMTRIIWQYIKDKLITPFLDVELMYFDLGMEYRDHTNDQVTIDAAEAIKKVGVGVKCATITPDEARVKEFNLKQMWKSPNGTIRNILGGVIFREPIICKNVPRLVPGWTKPIIIGRHAYGDQYRATDFKFPGKGTLSMKFVGEDGTVIEKEVFKAPGAGVAMEMYNLDDSIIDFARASLNYGLLRNYPVYLSTKNTILKVYDGRFKDIFQDIYDREFKKEFEAKGLTYEHRLIDDMVASALKWSGGYVWACKNYDGDVQSDTVAQGYGSLGLMTSVLLTPDGKTVEAEAAHGTVTRHYREHQKGKETSTNSIASIFAWTRGLAHRAKLDNNAELAKFANTLEKVCVDTVEAGYMTKDLALLVGADQRWLSTTGFLDKVAENLTKAMAA

SEQ ID NO: 5755 - DNA, 1215 bp, Brucella suis
  CDS (1)..(1215)
atggcaaaaatcaaggttgcaaacccggtcgtcgagctcgacggcgacgagatgacccgcattatctggcagttcatcaaggacaagcttatccatccctatctcgacatcgacctgaaatactacgatctttcggtcgagaaccgcgatgcgaccaatgatcaggtcacgatcgatgcagccaatgccatcaaggaatatggcgtgggcgtaaaatgcgcgaccatcacgcccgacgaagcgcgcgtggaagaattcaagctgaagaaaatgtggaagtcgcccaacggcaccatccgcaatatcctcggcggcgtgatcttccgcgagccgatcatctgcaagaacgtgccgcgcctcgtgccgggctggacccagccgatcatcgtcggccgccatgctttcggcgaccagtaccgcgcgactgacttcaagttccccggcaagggcacactgacgatcaagttcgtcggtgaagatggccagaccatcgaacatgaagtctatcaggccccttcggctggcgtggccatggccatgtataatctggacgaatcgatccgcgaattcgcacgcgcttccttcaattacggcttgcagcgcggctatccggtctatctctccacgaagaacaccatcctcaaggcctatgatggccgcttcaaggacatcttccaggaagtcttcgacgccgaattcaagtcgaagtttgaagaaaagaagatctggtacgaacaccgcctcatcgacgacatggtcgcctcggcgctcaagtggtcgggcggctatgtctgggcctgtaagaactatgatggcgacgtgcagtcggatatcgtcgcgcagggcttcggctcgctcggcctgatgacctcggttctgatgacgccggatggcaagacggtggaagcggaagccgcccacggcaccgtaacccgccactatcgccagtatcagaagggcgaggaaacctcgaccaactccatcgcttcgatcttcgcatggacccgcggtctggcgcatcgcgccaagctcgacaacaatgccgatctgaagaagttcgccgaaacgctggaaaaggtctgcgtggacaccgttgaaagcggcttcatgaccaaggatctggcgctcctcatcggcccggatcagccttggctctcgaccaccggcttcctcgacaagatcgacgaaaatcttcagaaagccatggctgcctga

SEQ ID NO: 5756 - protein, 404 aa, Brucella suis
MAKIKVANPVVELDGDEMTRIIWQFIKDKLIHPYLDIDLKYYDLSVENRDATNDQVTIDAANAIKEYGVGVKCATITPDEARVEEFKLKKMWKSPNGTIRNILGGVIFREPIICKNVPRLVPGWTQPIIVGRHAFGDQYRATDFKFPGKGTLTIKFVGEDGQTIEHEVYQAPSAGVAMAMYNLDESIREFARASFNYGLQRGYPVYLSTKNTILKAYDGRFKDIFQEVFDAEFKSKFEEKKIWYEHRLIDDMVASALKWSGGYVWACKNYDGDVQSDIVAQGFGSLGLMTSVLMTPDGKTVEAEAAHGTVTRHYRQYQKGEETSTNSIASIFAWTRGLAHRAKLDNNADLKKFAETLEKVCVDTVESGFMTKDLALLIGPDQPWLSTTGFLDKIDENLQKAMAA

SEQ ID NO: 5757 - DNA, 1221 bp, Bifidobacterium longum
  CDS (1)..(1221)
atggccaaaatcaaggtcgaaggcactgtcgtcgaactcgacggcgacgagatgacccgcgtgatctggaaggacatcaaggatcgtctgatcctgccgtacctcgacgtgaacctcgactactacgatctgggcatcgagcaccgcgacgagaccgatgaccaggtgaccatcgacgccgcccacgccatccagaagcaccatgtcggtgtcaagtgcgccaccatcacccccgatgaggcccgagtcaaggaattcggtctcaagaagatgtggaagtcccccaacggcaccatccgcaacatcctgggcggcacgatcttccgcgagccgattgtgatgagcaacgtgcctcgtctggtgcccggctggaccaagccgatcgtcgtagcccgtcacgcattcggcgaccagtacaaggccaccgatttcaaggttccgggagccggccagctgaccgtcaccttcactccggacgatggctccgagccgattcagcacgtggtctacaactacggcgaagacggcggcgtggcccaggtgcagtacaacgtcaacgattcgatccgcggtttcgctcgcgcctgcttcaactacggcctgatgcgtcattacccggtgtacttgtccaccaagaacacgattttgaaggcctacgacggccagttcaaggacatctttgccgaggtgttcgagaccgaatacaaggacaggtacgccgaggccggcctgacttacgagcaccgcctgatcgacgacatggtggccagctccctgaagtggcacggcggttacatctgggcctgcaagaactacgatggcgatgtgcagtccgactccgtggcccagggcttcggttcgctgggcctcatgacctccgtgctcatgaccccggacggccagaccgtcgaggccgaagcggcgcacggcaccgtgacccgtcactaccgccgctggcagaagggcgagaagacctccaccaacccaatcgcatccatcttcgcgtggaccggcggccttaagcaccgcgccgatctggacggcacgcccgaagtccgtcacttcgccaagacgctggagaaggtcatcgtcgacaccgttgaaggcggtcagatgaccaaggatctggccatgctcatcggcccggacgaaccgtggctcgacaccgacggcttcatgaacgcgctggacgagaacctggccaaggctctggccgagtaa

SEQ ID NO: 5758 - protein, 406 aa, Bifidobacterium longum
MAKIKVEGTVVELDGDEMTRVIWKDIKDRLILPYLDVNLDYYDLGIEHRDETDDQVTIDAAHAIQKHHVGVKCATITPDEARVKEFGLKKMWKSPNGTIRNILGGTIFREPIVMSNVPRLVPGWTKPIVVARHAFGDQYKATDFKVPGAGQLTVTFTPDDGSEPIQHVVYNYGEDGGVAQVQYNVNDSIRGFARACFNYGLMRHYPVYLSTKNTILKAYDGQFKDIFAEVFETEYKDRYAEAGLTYEHRLIDDMVASSLKWHGGYIWACKNYDGDVQSDSVAQGFGSLGLMTSVLMTPDGQTVEAEAAHGTVTRHYRRWQKGEKTSTNPIASIFAWTGGLKHRADLDGTPEVRHFAKTLEKVIVDTVEGGQMTKDLAMLIGPDEPWLDTDGFMNALDENLAKALAE

SEQ ID NO: 5759 - DNA, 1407 bp, Plasmodium falciparum
  CDS (1)..(1407)
atgggaaagcatatacgaattttaaaaaatcaatacctacaatttatgtcgaagagatgtattcaaagcaaggcggcttttaacatatgcggtaaaattaacgtagaaaaccctattgtagagttagatggagatgaaatgactagaataatttggaaagatataaaagaaaaattaatcttaccatatgttaacttaaagataaaatattttgatttatctattgaaaatcgagataagactaatgatcaagttaccatagaagctgctgaagaaataaaaaaaacttcagtaggtataaaatgtgcaactataacacctgatgctgcaagagttaaagaatttaatttaaaggaaatgtggaaaagtccaaacggtactataagaaatatattagatggtactgtttttagaacacctatacttattaaaaatatacctaaactagtacctaattggaagaaaccaattgttataggaagacatgcatatgctgatcaatataaacagaaatctttaaaaatcgaaaaaagtgggaaatttgaaattgtatttactccagatgataattcacaagtacttagagaaactgtgtttcattttaaatctcctggtgtatgtttaggtatgtataatacagaagaatctatacgaaattttgcattgtcttgttttcaatatgctttagatcttaaaatgccagtttatatgagtactaaaagtactatactaaaaatatatgatggtttatttaaagatatttttgatgaaatttatgaaaaacaatttaaaaaatcttttgaacaacataatttatggtatgaacataaactaattgatgatatggttgctcaagtattaaaatcagaaggtggatttttatgggcatgtaaaaattatgatggtgatatccaatctgatgctgttgctcaaggttatggaagtttaggattaatgtcatctgtgttattatgtccagacggtgttacgtgtgtttcagaagctgcccatggtaccgtcactagacattatagagcttatcaaaagggagaaaaaacatcaacaaatcctatagcctctatttttgcatggaccaaaggattagaacacagagcaaaattagataaaaatgataatttaaaacaattttgttatgctttagaaaaggcatgtatcgaaacggtagaagatggattgatgtctaaagatctagcaggatgtattaaaggtattaaaaatgttactgagaaggattatatctttactcaagatttaatcaatgctattaatgaaaaactaaaattaaagatacttcaaaatcaatccaaaaatgatccacaagctacttcatataaattgaaaaacgataactggaatttttatgctccccaagaacattcaacataa

SEQ ID NO: 5760 - protein, 468 aa, Plasmodium falciparum
MGKHIRILKNQYLQFMSKRCIQSKAAFNICGKINVENPIVELDGDEMTRIIWKDIKEKLILPYVNLKIKYFDLSIENRDKTNDQVTIEAAEEIKKTSVGIKCATITPDAARVKEFNLKEMWKSPNGTIRNILDGTVFRTPILIKNIPKLVPNWKKPIVIGRHAYADQYKQKSLKIEKSGKFEIVFTPDDNSQVLRETVFHFKSPGVCLGMYNTEESIRNFALSCFQYALDLKMPVYMSTKSTILKIYDGLFKDIFDEIYEKQFKKSFEQHNLWYEHKLIDDMVAQVLKSEGGFLWACKNYDGDIQSDAVAQGYGSLGLMSSVLLCPDGVTCVSEAAHGTVTRHYRAYQKGEKTSTNPIASIFAWTKGLEHRAKLDKNDNLKQFCYALEKACIETVEDGLMSKDLAGCIKGIKNVTEKDYIFTQDLINAINEKLKLKILQNQSKNDPQATSYKLKNDNWNFYAPQEHST

SEQ ID NO: 5761 - DNA, 1514 bp, Arabidopsis thaliana
  CDS (1)..(1458)
atgctgaataagctcacgcacggcgttttcacgtaccgtgccagcctcaccgccatgttatcttcttcaacctctgctggtttatcgtcttcgttcgtttcttcgagatttcttagttccggtatattctctagtggcgcttcgaggaatcgcgtgacttttcccgttcagtttcatcgcgcatcagctgttcgatgttttgcttcttcaggcggttctgatagaattcaggttcagaatcctatcgttgaaatggatggcgatgaaatgacgagggtgatatggagtatgataaaggagaaacttattcttccttatctggatttggacattaagtacttcgacttggggattctgaatcgcgatgctactgatgacaaggttacagttgaaagtgcagaagcagctcttaagtacaatgttgctatcaaatgtgccactataactcctgatgagggtagagtgaaggagtttggactgaaatcaatgtggaggagtcctaatgggacgatcagaaacattctagatggaaccgtattccgtgaacctattatgtgcagcaatatcccccggcttgttcctggttgggaaaagcctatatgcattggtagacatgcctttggtgaccagtatcgtgccactgatacagtaattaaagggccaggaaagttgaaaatggtttttgtcccagaagatggaaacgcacctgtggagctagatgtatatgatttcaagggcccaggtgtcgcacttgctatgtacaacgtagatgagtcaattagagcttttgctgagtcatctatggcgatggcattaactaagaaatggccattatacttgagcaccaagaacacaattctcaagaaatatgatggcagatttaaggacatatttcaagaagtttatgaggcgaattggaagcaaaagtttgaagagcactcaatctggtacgagcaccggttgattgatgacatggtggcttacgcagtcaaaagtgaaggtggctatgtctgggcttgcaaaaactacgacggtgatgttcaaagcgatcttcttgcccaagggtttggctcattaggcctcatgacctccgttttgctgtccgctgatgggaaaacactcgagtcggaagcggctcatggaacagtaactcggcatttccgactgcaccaaaagggacaagaaaccagtactaacagcatagcctcaatatttgcatggacacgcggcttagaacacagggcgaaactggataagaacgagaaattaatggatttcgtgaagaagctcgagtcgtcatgtgtaaacactgttgagacagggaaaatgaccaaggatcttgcccttttaatccatggtcccaaggtgagtagggatttgtttttgaacacggaagagttcattgatgcagtagcctccaagctcaaaacacagttcaaagagcttcctcttgtctgaccattcctgggaattgggaacaatacaaaaataatgctcgcaataattcataaccc

SEQ ID NO: 5762 - protein, 485 aa, Arabidopsis thaliana
MLNKLTHGVFTYRASLTAMLSSSTSAGLSSSFVSSRFLSSGIFSSGASRNRVTFPVQFHRASAVRCFASSGGSDRIQVQNPIVEMDGDEMTRVIWSMIKEKLILPYLDLDIKYFDLGILNRDATDDKVTVESAEAALKYNVAIKCATITPDEGRVKEFGLKSMWRSPNGTIRNILDGTVFREPIMCSNIPRLVPGWEKPICIGRHAFGDQYRATDTVIKGPGKLKMVFVPEDGNAPVELDVYDFKGPGVALAMYNVDESIRAFAESSMAMALTKKWPLYLSTKNTILKKYDGRFKDIFQEVYEANWKQKFEEHSIWYEHRLIDDMVAYAVKSEGGYVWACKNYDGDVQSDLLAQGFGSLGLMTSVLLSADGKTLESEAAHGTVTRHFRLHQKGQETSTNSIASIFAWTRGLEHRAKLDKNEKLMDFVKKLESSCVNTVETGKMTKDLALLIHGPKVSRDLFLNTEEFIDAVASKLKTQFKELPLV

SEQ ID NO: 5763 - DNA, 1212 bp, Thermoanaerobacter tengcongensis
  CDS (1)..(1212)
atggcacaaaaaattgagatgaaggttcctattgtggaaatggacggagatgaaatgacaagaattatatggaaattgataaaagaaatgcttataaagccctatgtagatttaaagacagagtactatgatttgggcattaaaaacagagatgaaacagaagaccaggtcacagttgatgcagcatacgcaataaaaaaatacggagtcggggtaaaatgcgcaacaatcaccccaaatgctgaaagagtaaaagaatacaatttgaaaaatatgtggaaaagccctaacgctactatacgatccatactcgatgggacagtatttcgcacacctattctggttgaaggaataaagccgcttgtaaggacatggaaaaaacctattacaattgcaaggcatgcttatggggatatttataaaggggtagaatacagaatccctgaaaaaggtaaggctgagcttgtctttacttctgaaaaaggagaagagataaggtatgcaatacacgagtttgaaactcctggtgtcatattaggtatgcacaacactgatgagtcaataaaaagttttgcgagagcatgttttaattatgctttagatacgaagcaggatttgtggtttgcgactaaagacaccatttcaaaaatatacgaccacagatttaaagacatattccaggaaatatatgaaaatgaatataaagaaaaatttgaagaagcaggtattgaatatttttacacccttattgacgatgccgtagctcgaattgtaaggtctgaaggcggaatgatttgggcatgcaaaaattatgacggcgatgtaatgtcagatatggtagcaacagcatttggcagccttgccatgatgacttctgtactggtatctcctgatggtaaatacgaatttgaagcggctcatgggacagttacaaggcattattataaataccttaaaggtgaagaaacttctactaatcctattgctacaattttcgcgtggacaggtgctttgaaaaagagaggagaacttgacggaataaaagaccttgttgattttgcagataagcttgaaaaagcctcacttaaaacggttgaaaaaggaataatgacaaaagacttagccgctttatctgaattgccaaataaaactgttgtaaacacggaaactttcctcattgaaattaaaaaaactttagaagagatgctgtaa

SEQ ID NO: 5764 - protein, 403 aa, Thermoanaerobacter tengcongensis
MAQKIEMKVPIVEMDGDEMTRIIWKLIKEMLIKPYVDLKTEYYDLGIKNRDETEDQVTVDAAYAIKKYGVGVKCATITPNAERVKEYNLKNMWKSPNATIRSILDGTVFRTPILVEGIKPLVRTWKKPITIARHAYGDIYKGVEYRIPEKGKAELVFTSEKGEEIRYAIHEFETPGVILGMHNTDESIKSFARACFNYALDTKQDLWFATKDTISKIYDHRFKDIFQEIYENEYKEKFEEAGIEYFYTLIDDAVARIVRSEGGMIWACKNYDGDVMSDMVATAFGSLAMMTSVLVSPDGKYEFEAAHGTVTRHYYKYLKGEETSTNPIATIFAWTGALKKRGELDGIKDLVDFADKLEKASLKTVEKGIMTKDLAALSELPNKTVVNTETFLIEIKKTLEEML

SEQ ID NO: 5765 - DNA, 1551 bp, Cucumis sativus
  CDS (62)..(1294)
ctgtactctccattttcgatcttctctctgagtgtttccatcaggagcaagaccacgaaccatggctttccagaagatcaaggtcgccaatcccatcgttgagatggacggagatgaaatgactcgagttatctgggagtcaattaagaataagcttattttcccatttttggaattggacatcaagtattttgaccttggccttccacaccgtgatgccacagatgataaagttacaattgaaagtgcagaagctactttaaagtacaatgtagcaatcaaatgtgcaacaattactccagatgaggcacgtgttaaggaatttggcttgaagcagatgtggagaagtccaaatggaacaatcaggaatattctgaatggaactgtcttcagagaaccgattctttgcaaaaatgttcctcgccttgtaccaggttggacgaagcctatctgtattggaagacatgcttttggtgatcaatacagagctactgatacagtcatcagaggacctgggaaattgaaattagtttttgaggggcaggagacgcaagagatagaggttttcaatttcactggtgctggaggagttgcgttagccatgtataacactgatgagtccatccgatcttttgctgaggcatcaatggccactgcttatgagaagaaatggcccctttaccttagcacaaaaaatactattctaaagaaatacgatggaagattcaaggatatattccaagaagtctacgaatctcagtggaaatcaaagtttgaggctgctggcatatggtatgaacaccgtctcatcgatgatatggtggcttatgcccttaagagtgaaggaggttatgtctgggcatgcaagaactatgatggagatgttcagagtgatttcttagctcaaggatttggatctcttggcttgatgacttctgtattggtttgtcctgatggaaaaacaattgaagcagaagcagctcatggcactgttacacgacattttagggttcatcaaaaaggtggtgaaaccagcacaaacagcatagcatccatctttgcttggtctcgtggccttgctcacagggctaaactagatgacaatgctagtctcttagagttcaccgagaaactagaattggcttatatcgatactgtggaatctggaaagatgaccaaggatcttgctcttatccttcatggatccaagctttctcgtgaccaatatctgaatactgaggagttcattgatgctgttgctgaggaactaaaatccagactcctcaaggcatagtggtattttaaatgttcaatggtcaataattgttaagaatatctttctcatttcatcttctttcctaaggtacatagtttggtgggatattgttaatgcatttggcttctaactatcaactcaactaggctatagtcatcttgaggttgtttaacagttacttcttttacaatcatttatccaatctcttgtgcactgtattcggccattttaggtaattgcactaccattttgttggtaaaaaaaaaaaaaaaaaa

SEQ ID NO: 5766 - protein, 410 aa, Cucumis sativus
MAFQKIKVANPIVEMDGDEMTRVIWESIKNKLIFPFLELDIKYFDLGLPHRDATDDKVTIESAEATLKYNVAIKCATITPDEARVKEFGLKQMWRSPNGTIRNILNGTVFREPILCKNVPRLVPGWTKPICIGRHAFGDQYRATDTVIRGPGKLKLVFEGQETQEIEVFNFTGAGGVALAMYNTDESIRSFAEASMATAYEKKWPLYLSTKNTILKKYDGRFKDIFQEVYESQWKSKFEAAGIWYEHRLIDDMVAYALKSEGGYVWACKNYDGDVQSDFLAQGFGSLGLMTSVLVCPDGKTIEAEAAHGTVTRHFRVHQKGGETSTNSIASIFAWSRGLAHRAKLDDNASLLEFTEKLELAYIDTVESGKMTKDLALILHGSKLSRDQYLNTEEFIDAVAEELKSRLLKA

SEQ ID NO: 5767 - DNA, 1610 bp, Arabidopsis thaliana
  CDS (165)..(1397)
ggcacgagtttttcacctacttcatcactcatcaccagcttcgcatcttcttctccggcttgatcttctctcgtttctagatctccgacgatcggaatatcaaatccgatcgattaattctgtcaatcacacaaaaaccgaaaaccgaaaacccaaaaaaaaccatggcgtttgagaagatcaaggtggcaaatcccatcgtcgagatggatggtgatgaaatgaccagggttatttggaagtctatcaaggataagcttattactccttttgtggagttggatatcaagtacttcgaccttggtcttcctcaccgtgatgctacggatgacaaagttactattgaaagtgctgaagctactaagaagtacaatgtggcgatcaagtgtgccaccatcactccagatgaaggccgtgtcacggaatttggcttgaagcagatgtggagaagtccaaatgggaccatcaggaatatcctgaatggaactgtatttagagagccaattatctgcaaaaatgttcccaagcttgtcccaggctggacaaagcccatctgcattggaaggcatgcttttggtgatcagtaccgtgccactgatgctgtaatcaagggaccaggaaaactgactatgacctttgagggaaaagatgggaaaactgaaaccgaagtctttacatttactggtgaaggtggtgttgctatggtaatgtacaacactgatgagtccatccgtgcttttgctgatgcatcgatgaacactgcttatgagaaaaagtggccactttaccttagcacaaagaataccattcttaagaaatacgatggcagattcaaagacatcttccaagaagtctatgaagccagctggaagtcgaagtatgatgctgctggaatctggtatgaacaccgtctcattgatgatatggtggcctacgctcttaagagtgagggaggctatgtttgggcatgcaaaaactatgatggtgatgtccaaagtgatttgttggcacaaggattcgggtcacttggattgatgacatctgttctggtctgcccagatggaaagtcgattgaagctgaagcggcccatggaactgtcacccgtcacttcagggttcatcagaaaggtggtgagaccagcacaaacagcatagcctctatttttgcttggactcgtggacttgcacacagggctaagttagatgacaacgcaaaactcttggatttcactgagaagctggaagccgcttgtgttgggacagtggagtcagggaaaatgaccaaagatcttgcactcatcattcacggctcaaagctttcgagggacacgtacctgaacacagaggagttcatcgatgcagtcgctgctgagctcaaagaaagactcaatgcttaagaaactgaagaaattgggtaaaattcgaacgtctcagttcctaagtgtcttatctggttggtggggttggttgggatcgggaggaataaacttttgtggagaggagtgttgagaacgatttgtttcctctcttataatatttccaaaatattgcgacatttttccatttttattcagatctcgaattttatgtttaaaaaaaaaaaaaaaaaa

SEQ ID NO: 5768 - protein, 410 aa, Arabidopsis thaliana
MAFEKIKVANPIVEMDGDEMTRVIWKSIKDKLITPFVELDIKYFDLGLPHRDATDDKVTIESAEATKKYNVAIKCATITPDEGRVTEFGLKQMWRSPNGTIRNILNGTVFREPIICKNVPKLVPGWTKPICIGRHAFGDQYRATDAVIKGPGKLTMTFEGKDGKTETEVFTFTGEGGVAMVMYNTDESIRAFADASMNTAYEKKWPLYLSTKNTILKKYDGRFKDIFQEVYEASWKSKYDAAGIWYEHRLIDDMVAYALKSEGGYVWACKNYDGDVQSDLLAQGFGSLGLMTSVLVCPDGKSIEAEAAHGTVTRHFRVHQKGGETSTNSIASIFAWTRGLAHRAKLDDNAKLLDFTEKLEAACVGTVESGKMTKDLALIIHGSKLSRDTYLNTEEFIDAVAAELKERLNA

SEQ ID NO: 5769 - DNA, 1215 bp, Rhizobium meliloti
  CDS (1)..(1215)
atggcaaagatcaaggtcgccaatccggtcgtcgaactcgacggcgacgagatgacccgcatcatctggcagttcatcaaggacaagctgatccacccttatctcgacctcgatctcgaatattacgacctgggcgtcgaaaaccgtgatgcaactgacgaccaggtgacgatcgacgccgcaaacgccatcaagaagcacggcgtcggcgtaaaatgcgccacgatcacgccggacgagggtcgcgtcgaggagttcaagctgaagaagatgtggaagtcgccgaacggcacgatccgcaacatcctcggcggcgtcatcttccgcgagccgatcatctgcaagaacgtgccgcgcctggtccccggctggaccaagccgatcatcgtcggccgccacgccttcggcgaccagtaccgcgcgaccgatttcaagttcccgggcaagggcaagctctcgatcaaattcgtcggcgaagacggccagacgatcgagcatgacgtttacgacgcgccgggcgccggcgtggcactcgccatgtacaacctggacgaatcgatcaccgaattcgcgcgcgcctcgttcaactacggcctgcagcgcaaggttccggtctatctctcgaccaagaacacgatcctgaaggcctatgacggccgcttcaaagacatcttccagaaggtgttcgacgaggaattcgccgcccagttcaaggccgagaagctctggtacgaacaccgcctgatcgacgacatggtcgcctcggcgctgaagtggtccggcggctatgtctgggcctgcaagaactacgacggcgacgtgcagtccgacatcgtcgcgcagggcttcggctcgctcggcctgatgacctcggtgctgatgacgccggacggcaagacggtcgaggcggaagccgcccacggcacggtgacgcgccactaccgccagcatcagaagggcgaggaaacctcgaccaactcgatcgcatcgatcttcgcctggacccgcggcctcgcccaccgcgccaagctcgacggcaacgccgaactcgcgaagttctccgagaccctggagcgcgtctgcgtggatacggtcgagtccggcttcatgaccaaggatctggcacttctcatcggtcccgaccagccctggctgtcgaccaccggtttcctcgacaagatcgacgagaacctcaggaaggcaatggcggcgtaa

SEQ ID NO: 5770 - protein, 404 aa, Rhizobium meliloti
MAKIKVANPVVELDGDEMTRIIWQFIKDKLIHPYLDLDLEYYDLGVENRDATDDQVTIDAANAIKKHGVGVKCATITPDEGRVEEFKLKKMWKSPNGTIRNILGGVIFREPIICKNVPRLVPGWTKPIIVGRHAFGDQYRATDFKFPGKGKLSIKFVGEDGQTIEHDVYDAPGAGVALAMYNLDESITEFARASFNYGLQRKVPVYLSTKNTILKAYDGRFKDIFQKVFDEEFAAQFKAEKLWYEHRLIDDMVASALKWSGGYVWACKNYDGDVQSDIVAQGFGSLGLMTSVLMTPDGKTVEAEAAHGTVTRHYRQHQKGEETSTNSIASIFAWTRGLAHRAKLDGNAELAKFSETLERVCVDTVESGFMTKDLALLIGPDQPWLSTTGFLDKIDENLRKAMAA

SEQ ID NO: 5771 - DNA, 1561 bp, Prunus persica
  CDS (1)..(1245)
atggctttccagaagatcaaggtggccaaccccatcgtggagatggacggagatgaaatgacgcgagttttctggaaatccataaaggataagcttattttaccctttttggaattggacatcaagtactttgaccttggtcttcctcatcgtgatgccactgatgataaagttactgttgaaagtgcagaggctactcttaagtacaatgtagcaatcaaatgtgcaactatcactccagatgaaggtcgtgttaaggagtttaacttgaagagtatgtggaggagtcccaatggcactattaggaatattttgaatggtactgttttcagagaaccaattctttgcaaaaacatccctcgccttatcccaggctggacaaagccaatatgcattggaagacatgctttcggtgatcagtatcgagcaactgatgctgtcattaaaggacctgggaaactgaaattggtgtttgtgccagacggaaaggatgagaaaacagaactagaggtgtacaacttcacaggtgaggggggagtagcattggccatgtacaacactgatgagtccatccgtgcttttgcagaggcttccatgaccactgcttatgagaaaaagtggcctctttatcttagcacaaagaacactattcttaagaagtatgatggaagattcaaggacatatttcaagaagtttatgaagccaagtggaagtcacagtatgaggctgctggcatatggtacgagcaccgtctcattgatgatatggtggcttatgcacttaaaagtgatggtgggtatgtttgggcatgcaagaattatgatggagatgtgcagagtgatttcttagctcaagggtttggctctcttggattgatgacatcagtactggtgtgcccagatggaaagactatagaagcagaagctgcccacggtacagttactcggcattacagggttcaccagaaaggaggtgaaaccagtacaaacagcatagcttctatctttgcttggacaagagggcttgcacacagggcaaagttggatgacaatgcaaagcttttggatttcactcagaaactggaagaagcttgcattggaactgtggaatctgggaaaatgaccaaggatcttgcactcattattcatggacctaagcttgctaggaaccactacttgaatacggaagagttcattgaagctgtggcagaggaactcagagcaaggctttctttgaaagaatagttgtacgtgaggggtttgcagacttgactctatgcattgggatagacaactgtggacttgtccttttgtactcccgaaagaaataatggaaggcggaatctttcccctctggtggttagagatgttgactcatctgtttttagtgtattagtttcttgtgcacaatttaattgctcgactcttactgatttgaatgttctttcttcatcagtttgcttccgcaagcaagtttgacctttttcatggctaagccaattttagtgatttccagcaagaaatcaagttttagaaaaaaaaaaaaaaagggggggcccgg

SEQ ID NO: 5772 - protein, 414 aa, Prunus persica
MAFQKIKVANPIVEMDGDEMTRVFWKSIKDKLILPFLELDIKYFDLGLPHRDATDDKVTVESAEATLKYNVAIKCATITPDEGRVKEFNLKSMWRSPNGTIRNILNGTVFREPILCKNIPRLIPGWTKPICIGRHAFGDQYRATDAVIKGPGKLKLVFVPDGKDEKTELEVYNFTGEGGVALAMYNTDESIRAFAEASMTTAYEKKWPLYLSTKNTILKKYDGRFKDIFQEVYEAKWKSQYEAAGIWYEHRLIDDMVAYALKSDGGYVWACKNYDGDVQSDFLAQGFGSLGLMTSVLVCPDGKTIEAEAAHGTVTRHYRVHQKGGETSTNSIASIFAWTRGLAHRAKLDDNAKLLDFTQKLEEACIGTVESGKMTKDLALIIHGPKLARNHYLNTEEFIEAVAEELRARLSLKE

SEQ ID NO: 5773 - DNA, 1242 bp, Emericella nidulans
  CDS (1)..(1242)
atggcgactgaagtacagaagatcaaggtcaagaaccccgtcgtggagttggacggtgatgagatgacccgcattatctggaaggagatcagggaaaagttgatcttgcctttcctcgatattgacctcaagtactacgacctgggtcttgagtaccgtgaccagaccgatgacaaggtcaccaccgagtccgctgaggccatcaagaagtatggtgtcggtgtcaagtgcgccaccatcactcctgatgaggcccgtgttgaggagttcaagctgaagaagatgtggctgtctcctaacggtactatccgtaacatccttggcggtactgtcttccgtgagcccattgtcattcctcgcattcctcgcctcgtccccggatggactaagcccatcatcatcggtcgtcatgctttcggtgaccagtaccgtgctaccgaccgtgtgatccctgggcctggcaagcttgagctcgtctacacccccgagggcggccagcctgaggctatcaaggtctttgatttccctggcggtggtgttacccagactcagtacaacaccgatgagtcgattcgcggcttcgcccacgccagtttcaagcttgccttgactaagggccttcctctctacatgagcaccaagaacactattctgaagaagtacgatggccgcttcaaggacatcttccaagagatcttcgagtccgactacaagaaggaatttgatgccaagggcatctggtacgagcaccgtctcattgatgacatggtcgctcaaatgatcaagagcgagggtggtttcatcatggctttgaagaactacgatggtgacgttcagtccgacattgttgcccagggcttcggctccctgggtctgatgacctccacactcatcacccctgacggccaggcctttgagtctgaagctgcccacggcaccgtcacccgtcactaccgcgagcaccagaagggccgcgagacctccaccaaccccattgcctccatcttcgcctggacccgtggtcttatccagcgtggtaagctcgacgaaacccccgacgttgtcaagttcgccgaggagctcgagcgcgcttgtatcgatgttgtcaacgaggagggtatcatgaccaaggaccttgctctgtcctgcggccgcaaggagcgcgacgcgtgggttaccacccgcgagtacatggctgccgtcgagcgccgactcagggcaaacttgaaggcccgtctatag

SEQ ID NO: 5774 - protein, 413 aa, Emericella nidulans
MATEVQKIKVKNPVVELDGDEMTRIIWKEIREKLILPFLDIDLKYYDLGLEYRDQTDDKVTTESAEAIKKYGVGVKCATITPDEARVEEFKLKKMWLSPNGTIRNILGGTVFREPIVIPRIPRLVPGWTKPIIIGRHAFGDQYRATDRVIPGPGKLELVYTPEGGQPEAIKVFDFPGGGVTQTQYNTDESIRGFAHASFKLALTKGLPLYMSTKNTILKKYDGRFKDIFQEIFESDYKKEFDAKGIWYEHRLIDDMVAQMIKSEGGFIMALKNYDGDVQSDIVAQGFGSLGLMTSTLITPDGQAFESEAAHGTVTRHYREHQKGRETSTNPIASIFAWTRGLIQRGKLDETPDVVKFAEELERACIDVVNEEGIMTKDLALSCGRKERDAWVTTREYMAAVERRLRANLKARL

SEQ ID NO: 5775 - DNA, 1212 bp, Rhizobium loti
  CDS (1)..(1212)
atggcgaagatcaaggtggcgaacccggtcgtcgagctcgacggcgacgagatgacccgcatcatctggcagttcatcaaggacaagctgatccacccttatctcgacctgaagctcgaatattacgatctcggcatcgagcatcgtgacgccaccaacgaccaggtgaccatcgattcggccaacgccatcaagaaatacggcgtcggcgtgaagtgcgcgacgatcacccccgacgaacagcgcgtcgaggagttcaagctgaagaagatgtggaagtcgccgaatggcaccatccgcaacatccttggcggcaccatcttccgcgagccgatcatcatgaagaacgtgccgcgcctggtgcccggctggaccaagccgatcatcgtcggccgccacgccttcggcgaccagtaccgcgccaccgatttccgcttccccggcaagggcaagctgacgatcaagttcgtcggtgaagacggaaaggtcatcgagcatgacgtgttcgacgcacccggcgccggcgtcgccatggccatgtacaatctcgacgagtcgatccgcgagtttgcccgcgcctcgctgaattacggcctgctgcgcaactatccggtctatctgtcgaccaagaacaccatcctgaaagcctatgacggccgcttcaaggacattttccaggaagtctacgaggctgaattcgaggccgacttcaagtcgaagaagctgtggtacgaacaccgcctgatcgacgacatggtggcgtccagtctgaaatggtcgggcggctatgtctgggcctgcaagaactatgacggcgacgtccagtccgataccgtggcgcaaggtttcggctcgctcggccttatgacttcggtgctgatgacgccggacggcaagacggtggaagccgaagccgcgcacggcaccgtaacccgccactaccgccagcaccagaagggcgaggaaacctcgaccaattcgatcgcctcgatcttcgcctggacgcgcgggctggcccaccgcgccaagctcgacgacaatgcggagctgaagcgctttgccgagacgctggaaaaggtctgtatccagaccgtcgagtccggcttcatgaccaaggacctgtcgctgttgatcggtcccgatcagccctggctctcgaccaccggcttcctcgacaagatcgacgaaaacttgcagaaggcgatggcgtaa

SEQ ID NO: 5776 - protein, 403 aa, Rhizobium loti
MAKIKVANPVVELDGDEMTRIIWQFIKDKLIHPYLDLKLEYYDLGIEHRDATNDQVTIDSANAIKKYGVGVKCATITPDEQRVEEFKLKKMWKSPNGTIRNILGGTIFREPIIMKNVPRLVPGWTKPIIVGRHAFGDQYRATDFRFPGKGKLTIKFVGEDGKVIEHDVFDAPGAGVAMAMYNLDESIREFARASLNYGLLRNYPVYLSTKNTILKAYDGRFKDIFQEVYEAEFEADFKSKKLWYEHRLIDDMVASSLKWSGGYVWACKNYDGDVQSDTVAQGFGSLGLMTSVLMTPDGKTVEAEAAHGTVTRHYRQHQKGEETSTNSIASIFAWTRGLAHRAKLDDNAELKRFAETLEKVCIQTVESGFMTKDLSLLIGPDQPWLSTTGFLDKIDENLQKAMA

SEQ ID NO: 5777 - DNA, 1679 bp, Mus musculus
  CDS (46)..(1404)
cgcacagcccggtgcagcggcgtgctcggacctcgcgtgctcgggatggccggctacctgcgggctgtgagctcgctctgcagagcctcgggctcagcgcggacctgggcaccggcagcactgactgtccccagctggccggagcagccgcggcgccactatgctgagaagaggatcaaggtggagaagccggtagtggagatggacggtgacgagatgacccggatcatctggcagttcatcaaggagaagctcatcctgcctcacgtggatgttcagctcaagtattttgaccttgggcttccaaaccgtgaccagaccaatgaccaggtcaccattgactctgctctggccacccagaagtacagtgtggctgtcaagtgtgccacaatcacccctgatgaggcccgtgtggaagagttcaagctgaagaaaatgtggaagagccctaacggaacgatccggaacatccttgggggaaccgtcttcagagagccaatcatctgcaaaaacatcccccgccttgtccctggctggaccaagcccatcaccattggcaggcacgcccatggcgaccagtacaaggccacagattttgtggtagatcgagctggcacgttcaagttggtcttcaccccaaaggatggcagcagtgccaaggagtgggaggtgtataacttccctgccggaggcgttgggatggggatgtacaacaccgacgagtccatttcgggcttcgcgcacagctgcttccagtactctatccagaagaaatggccgctctacttgagcaccaagaacaccattctgaaggcctatgacgggcgtttcaaggacatcttccaggagatctttgacaagcactataagactgacttcgacaggaataagatctggtatgaacatcggctcatcgacgacatggtggcccaggtgctcaagtcttccggtggctttgtgtgggcttgcaaaaactatgatggagacgtgcagtctgacatcctggctcaaggctttggctccctcggcctgatgacatctgtgctggtctgccctgatgggaagacaattgaggctgaggctgctcatgggacagtcacccgccattaccgagaacaccagaagggccggcccaccagtaccaaccctattgccagcatctttgcctggacacggggtctggagcatcgtgggaagctggatgggaaccaggaccttatcaggtttgcacagacgctggagaaggtgtgcgtgcagactgtggagagcggagcgatgaccaaggacctggctggctgtatccatggcctcagcaatgtgaagctgaacgagcacttcctgaacaccacagacttcctggacaccattaagagcaacctggacagagctctgggcaagcagtaggggtggacactactcagctccagtgggtactctgtacatggcagagggtgggcctcacagccctctctggtggcctttctagggacatttttttacatatatatatgatggagatgttttttaaagtatatgagcattttcctcacggtggacatgaggcaggaacgtgtgctttacctcagacagtcagtgttctgcatactgtaatttatattgctctggaatcacatggtgccatatttagctactaaaaagctcttcgcaaaaaaaaaaaa

SEQ ID NO: 5778 - protein, 452 aa, Mus musculus
MAGYLRAVSSLCRASGSARTWAPAALTVPSWPEQPRRHYAEKRIKVEKPVVEMDGDEMTRIIWQFIKEKLILPHVDVQLKYFDLGLPNRDQTNDQVTIDSALATQKYSVAVKCATITPDEARVEEFKLKKMWKSPNGTIRNILGGTVFREPIICKNIPRLVPGWTKPITIGRHAHGDQYKATDFVVDRAGTFKLVFTPKDGSSAKEWEVYNFPAGGVGMGMYNTDESISGFAHSCFQYSIQKKWPLYLSTKNTILKAYDGRFKDIFQEIFDKHYKTDFDRNKIWYEHRLIDDMVAQVLKSSGGFVWACKNYDGDVQSDILAQGFGSLGLMTSVLVCPDGKTIEAEAAHGTVTRHYREHQKGRPTSTNPIASIFAWTRGLEHRGKLDGNQDLIRFAQTLEKVCVQTVESGAMTKDLAGCIHGLSNVKLNEHFLNTTDFLDTIKSNLDRALGKQ

SEQ ID NO: 5779 - DNA, 1227 bp, Oryza sativa
  CDS (1)..(1227)
atggcgttcgagaagatcgtcgtggccaaccccgtcgtcgagatggacggtgatgagatgactcgagttatttggaaatggatcaaagataagcttatattccctttcttggacttggacataaaatactatgacttaggtctacctaatcgtgacgctactggggacaaagttacaatagagagtgcagaagcgaccctaaagtataatgtagccatcaaatgtgcaactataactccagatgaaggacgcgtgaaagagtttaatttaagtgcaatgtggaagagtccaaatgggacaataaggaacattttgaatggaactgttttccgagaaccaatcatctgcaagaatattcctcggcttgtacctgggtggataaagcccatatgcattggacgacatgcatttggtgatcaataccgagcaacagatacagttattaaaggtcctgggaagttgaagttagtatttgatggcagagaggaacaaatagagttggatgtgttcaactttactggtgctggtggagtagccttgtctatgtataatactgacgagtctatttgggcattcgctgaagcttccatgaacatggcttaccagaaaagatggccactttatcttagcaccaaaaacacgatcctcaaaaaatacgatggaaggtttaaagatatatttcaggagaactatgaaacaaaatggagagccaagtttgatgatgcaggaatatggtacgaacatcggctgattgatgatatggtggcctatgcccttaagagtgaaggtggctatgtttgggcttgcaagaactatgatggagatgtgcagagcgatctaattgctcaaggtttttgcttattatatgtgtgccctgatggtagaaccattgaagctgaagctgctcatggtacagtcacacgccattacagagttcaccaaaaaggaggcgaaactagtacaaatagcattgcttcaatatttgcttggacaaccggactaggacatagggcaaagctcgatgacaataaaagactgttagattttgtacaaaaacttgaagctgcttgtgtgggaacagtggaatctggaaagatgacaaaggatctagctcttcttgtacatgggccaaatgttagccgagataagtatcttaacactgttgagttcatcgatgctgttgctgaggatttaagaacaagattgtcagtaacatccaagttatga

SEQ ID NO: 5780 - protein, 408 aa, Oryza sativa
MAFEKIVVANPVVEMDGDEMTRVIWKWIKDKLIFPFLDLDIKYYDLGLPNRDATGDKVTIESAEATLKYNVAIKCATITPDEGRVKEFNLSAMWKSPNGTIRNILNGTVFREPIICKNIPRLVPGWIKPICIGRHAFGDQYRATDTVIKGPGKLKLVFDGREEQIELDVFNFTGAGGVALSMYNTDESIWAFAEASMNMAYQKRWPLYLSTKNTILKKYDGRFKDIFQENYETKWRAKFDDAGIWYEHRLIDDMVAYALKSEGGYVWACKNYDGDVQSDLIAQGFCLLYVCPDGRTIEAEAAHGTVTRHYRVHQKGGETSTNSIASIFAWTTGLGHRAKLDDNKRLLDFVQKLEAACVGTVESGKMTKDLALLVHGPNVSRDKYLNTVEFIDAVAEDLRTRLSVTSKL

SEQ ID NO: 5781 - DNA, 1554 bp, Solanum tuberosum
  CDS (61)..(1473)
cttttttaagccatctaaagtggtatgctggccgtccgactcagactccggtgttcctccatggccggcgttgcttcttttgtctcatcttcatcggcttctgcatcatctatagctagtaaaaaactctattttcaagtcaattccaatcggcagctcttcaatagcagagtatctctcactacgcgaatccctaatgcctcaattcggtgcttcgcttcttcctctggtccgactagcaaaattcgcgttcaaaatcccatcgtcgaaatggacggtgatgaaatgacgagggttatatggaaaatgatcaaagacaagctaatatatccttatctagagttggatacaaagtattatgatttaggtatattgaaccgtgatgccactgatgaccaagttactgttgaaagtgctgaggcaaccctgaagtacaatgttgctgtgaaatgcgctactataacacctgatgagaccagagtcaaggaatttgggctgaagtctatgtggaaaagtcccaatggcacaatcagaaacattttaaacggtactgttttccgggagcctatactatgcacgaacattcccaggattgttcctggttggaagaaacccatttgtattggtaggcatgcttttggtgatcagtatcgtgccacagatcgaattattaatgggcccggaaagctcaaaatggtttttgtgccagaaaatggggaatcccctatggagctggatgtttatgattttaaaggtccgggtattgcacttgccatgtacaatgttgaccagtcaattcgagcgtttgctgaatcatcaatgtcaatggcattttcaaagaaatggcctctttacttgagtacaaaaaacacaattttaaagaaatacgatggaaggtttaaggacatttttcaagaggtatacgaagagaagtggaagcaacagtttgaggaacactctatatggtatgagcatagactgatagatgacatggtagcttatgcattaaaaagtgagggtggatatgtttgggcatgcaagaactatgatggagatgtccagagtgatttgctcgctcaaggatttggttctctgggcctcatgacttctatattgttatcttctgatggcaagacattagaagctgaagcagctcacggcactgtaacaatacattttcggctgcatcaaaagggtcaagaaactagtacaaacagtgttgcttccatttttgcatggacaaagggacttggacatagggctcagcttgatgggaatcaaaagttgttggaatttgttcacacccttgaagcttcttgcattgggacaatagaatccgggaagatgactaacttagctatattagctcatggatccaaggtgtcaagagaattctacttgaacactgaagagtttattgatgctgtagcacagaaacttcaagagaagcttcatgcctcggtgcctatttaagttatcctgaattatgtagtgagaacatgtatgagctgaagaagatcatgagcagcatccttttcacagtgaagcggccgc

SEQ ID NO: 5782 - protein, 470 aa, Solanum tuberosum
MAGVASFVSSSSASASSIASKKLYFQVNSNRQLFNSRVSLTTRIPNASIRCFASSSGPTSKIRVQNPIVEMDGDEMTRVIWKMIKDKLIYPYLELDTKYYDLGILNRDATDDQVTVESAEATLKYNVAVKCATITPDETRVKEFGLKSMWKSPNGTIRNILNGTVFREPILCTNIPRIVPGWKKPICIGRHAFGDQYRATDRIINGPGKLKMVFVPENGESPMELDVYDFKGPGIALAMYNVDQSIRAFAESSMSMAFSKKWPLYLSTKNTILKKYDGRFKDIFQEVYEEKWKQQFEEHSIWYEHRLIDDMVAYALKSEGGYVWACKNYDGDVQSDLLAQGFGSLGLMTSILLSSDGKTLEAEAAHGTVTIHFRLHQKGQETSTNSVASIFAWTKGLGHRAQLDGNQKLLEFVHTLEASCIGTIESGKMTNLAILAHGSKVSREFYLNTEEFIDAVAQKLQEKLHASVPI

SEQ ID NO: 5783 - DNA, 1708 bp, Citrus limon
  misc_feature (1533)..(1533): n is a, c, g, or t
  CDS (155)..(1399)
cgaaagcagcagcatttcaattttcatagtattattattattattattgcttcttgctgcttctttttgtccacacgacctcggcacctccgctctgaccctattatctgactctctctagttgtgaatcaaccgaaactgaacaaagaagaaaatggcttttcagaagatcaaggtcgccaatcccatcgttgaaatggacggagatgaaatgactcgagttttctggaaatcgattaaggataagcttattttcccttttctggagttggacataaagtacttcgaccttggccttccgaatcgtgatgcaactgatgacaaagttaccgttgaaagtgcagaagccactctcaagtacaatgtagcgatcaagtgtgctactattactccagatgaagctcgtgttaaggaatttgtcttgaaacagatgtggaagagtccaaatgggacaatcaggaatattttgaatggcactgttttcagagaaccaatcatttgcaaaaatgtccctcggcttattccaggctggacaaagcccatatgcattggcaggcatgcttttggtgatcaatatcgagcaactgatacagttattcaaggacctggcaaacttaaattggtgtttgtaccagagggaaaagatgagaagacagagttagaggtttacaactttacgggtgagggtggagttgcattgtccatgtataacactgatgagtccatccgaagttttgctgaggcttctatgaacactgcctatcaaaaaaagtggccactctatcttagtacaaaaaacactatccttaaaaattatgatggaaaattcaaagacatatttcaagaggtttatgaggcaaactggaagtcaaagtttgaagctgctggcatatggtatgaacatcgtctcattgatgatatggtagcttatgctctcaaaagtgaaggaggttacgtgtgggcttgcaaagattatgatggaaatgtccaaagtgatttcctagctcaagggtttggatctcttggattgatgacatctgtactggtatgccctgatgggaaaacaattgaagccgaagcagcccatggaacagtcacccgacactacagagttcatcagaaaggtggtgaaactagcacaaacagcatagcctccatctttgcttggtcacgagggcttgcacatagggcgaagttggacaacaatgctaggctgttggattttactgagaaactagaagctgcatgtgttggcactgttgaatctgggaagatgaccaaggatcttgcacttattatccatggatctaagatgactagggaacactatctgaatactgaagagttcattgatgctgtggccgacgatttaagagcaagactctctggcaaagcatgattttatgctacacattcaaaggtaaagacttggggaagcttccctttggttatttttttcatactatgctgagaagaaataattgaagaggggaaaattggggattgggatttggtttttttttaattcctacnatagactgctttcctgttgatcgacaaactttcattttcatgcaagcaaatgttttgaacatggcttgttataaacaaaactattgctgccaaatttacgttcatggtttatttgagctgcacctctgttgcccaaaaaaaaaaaaaaaaaaaaaaaaaaaaaaaaaaaaaaaaa

SEQ ID NO: 5784 - protein, 414 aa, Citrus limon
MAFQKIKVANPIVEMDGDEMTRVFWKSIKDKLIFPFLELDIKYFDLGLPNRDATDDKVTVESAEATLKYNVAIKCATITPDEARVKEFVLKQMWKSPNGTIRNILNGTVFREPIICKNVPRLIPGWTKPICIGRHAFGDQYRATDTVIQGPGKLKLVFVPEGKDEKTELEVYNFTGEGGVALSMYNTDESIRSFAEASMNTAYQKKWPLYLSTKNTILKNYDGKFKDIFQEVYEANWKSKFEAAGIWYEHRLIDDMVAYALKSEGGYVWACKDYDGNVQSDFLAQGFGSLGLMTSVLVCPDGKTIEAEAAHGTVTRHYRVHQKGGETSTNSIASIFAWSRGLAHRAKLDNNARLLDFTEKLEAACVGTVESGKMTKDLALIIHGSKMTREHYLNTEEFIDAVADDLRARLSGKA

SEQ ID NO: 5785 - DNA, 1782 bp, Drosophila melanogaster
  CDS (430)..(1782)
ttcgccgagtgcttattgttttttatactctcgttacattattaattaaaacacttgcttttaagtgtgccgagtgttgtgagagcagcttatcaaagtccgaggttctaaatcttatctgactgggcatttagaacgttgtgattacgccgattgcgcaacaatttgacgattgtacgccacccaagagagtcggaaactgtagcgcttaacggcactttacagttatcagttacggttagagcgcgtctgacgcccacagcatttaattttgctttgtccgaaaattgttctctttcccgggactccagtgtcatattgtctcgtattgtttcacattggtgacaaacactatcgtctctcgtttccagtcgtcggtcggttcattcataataataatacccacatccacaccaatccggttgtaaaatgttcgccctgcgccgcacagccgcaatgatgacgtcggtccaccggcagccgcatctcagccaggccgtttttcgggccaatttcgccatcagcgccgcgatggcccagaagatcaaagccggtcccgttgtggatgtcctcggtgacgagatgacccgcatcatttgggactccattaagagccaactgattctgcccttcctggacattgagctgcatacctacgatcttggtattgagaaccgcgataaaaccgaggaccaggtcaccattgactgtgctgaggccatcaagaagtacaacgtgggcatcaagtgcgccacaatcactcccgacgagaagcgcgtagaggagttcaacctgaagaagatgtggaagtcgcccaacggtaccatccgtaacatcttgggaggaaccgtcttccgtgaggcaatcatctgcaagaacgtgccccgtctggtgactggctggcagaagcctattgtgatcggtcgccatgcccacgccgatcagtacaaggccgtcgactacgtggttcccggacccggcaagctgaccctcacctggaagggaaccgacggtcaggtgatcgatgaggtcattaatgacttcaagggccccggtattgccctgggaatgttcaacacggacgattccattgtggactttgcccacgcctctttcaaatatgctctggaccgcaagctgccgctgtacatgagcaccaagaacaccattctgaagaagtacgatggacgcttcaaggacatattcgaggacctgtacaacaagcagtacaagaaggagtacgaggcggcgggcatctggtatgaacaccgtctcatcgacgatatggttgcttatgccatgaagtcggagggtggcttcgtgtgggcctgcaagaactacgacggtgatgtgcagtcggactccgttgcccagggctacggatctctgggtctgatgacctccgtgctgctatgccccgatggcaagaccgtggaggctgaagccgctcacggaacggtgacgcgtcacttccgcttctaccagcagggcaaggagacctccaccaaccccattgcctcgatattcgcctggacccgtggcctgctgcatcgtgccaagctggacaacaatgagccactgaagcagttcgccgacacccttgagcaggtgtgcatcgacacaattgagagcggcgccatgaccaaggatctggccatctgcattaaaggcaacatcaacgccgttactcgcagggactaccaggagacttttgagttcattaacacgctggccaagaacctggagggtgccctggccaagaatgccgttgctgccaaatga

SEQ ID NO: 5786 - protein, 450 aa, Drosophila melanogaster
MFALRRTAAMMTSVHRQPHLSQAVFRANFAISAAMAQKIKAGPVVDVLGDEMTRIIWDSIKSQLILPFLDIELHTYDLGIENRDKTEDQVTIDCAEAIKKYNVGIKCATITPDEKRVEEFNLKKMWKSPNGTIRNILGGTVFREAIICKNVPRLVTGWQKPIVIGRHAHADQYKAVDYVVPGPGKLTLTWKGTDGQVIDEVINDFKGPGIALGMFNTDDSIVDFAHASFKYALDRKLPLYMSTKNTILKKYDGRFKDIFEDLYNKQYKKEYEAAGIWYEHRLIDDMVAYAMKSEGGFVWACKNYDGDVQSDSVAQGYGSLGLMTSVLLCPDGKTVEAEAAHGTVTRHFRFYQQGKETSTNPIASIFAWTRGLLHRAKLDNNEPLKQFADTLEQVCIDTIESGAMTKDLAICIKGNINAVTRRDYQETFEFINTLAKNLEGALAKNAVAAK

SEQ ID NO: 5787 - DNA, 1503 bp, Oryza sativa
  CDS (84)..(1322)
cttcttcttcttcctcaagactaccaatccaatctcctcctcgccgccatcgcgatctccgccgccgcccgcctgtcgcggccatggcatccaccaagatcaaggtcgccaaccccattgtcgagatggacggtgatgagatgactcgagtattctggaaatctatcaaggacaagcttatcttcccgttcttggagttggacattaagtactttgatctcggacttccataccgtgatcaaaccgacgataaagtcacagtggaggcagcagaggctaccctcaagtacaatgtggccatcaagtgtgcaaccattacaccagatgaagcaagggttaaagagttcagcctaaaatccatgtggaagagcccaaacggcacaattagaaatatcctaaatggcactgtgttcagagaaccaataatctgcaaaaacatccctcggcttgttccaggatggactaagcccatttgcattggaaggcacgcatttggtgatcagtaccgtgcaacggatgcagttatcaagggacctggcaagcttaaattggtttatgagggaaaagatgaggagattgagctggaggtgttcaacttcactggtgctggaggagtggcacagtctatgtacaacactgacgagtccatccgttcctttgctgaggcctctatggccactgcttatgagaagaaatggccattgtacctcagcaccaaaaacacaattttgaagaaatatgatggcaggttcaaggacatcttccaggaggtatatgaagctcagtggaaatcaaaatttgaggctgctggaatatggtatgagcatcgtctcattgatgacatggttgcctatgcactcaagagtgaaggaggctatgtttgggcttgcaagaactatgatggagatgtgcagagtgatttcttagcacaaggttttggatcattgggtttgatgacatcagttttggtatgtcctgatgggaaaaccattgaagctgaagctgcccatgggactgtcacccgtcattaccgtgttcatcagaaaggtggtgaaactagcacaaacagcattgcctcaatctttgcctggacaagaggacttgcacacagggcaaagctagatgacaatgctaggctactggacttcactcagaagcttgaagctgcctgcattggcgctgtcgagtctgggaagatgaccaaggaccttgctctgcttgttcacggatcttcaaatgtcacgaggagtcattacctgaacactgaagagttcatcgatgctgttgctgacgagctcagatcaaggctggcagccaactaaagctaatcaaatcaagtgattttgctgttattgatgtgatccgatgcacttcgattatacatttctagaaccgcatcattcgacgttacaaatattttttttcttaatgaattttgaatcacttggtaggtggagattacaaataaagtttcagagctattcatgagaaagctccagattc

SEQ ID NO: 5788 - protein, 412 aa, Oryza sativa
MASTKIKVANPIVEMDGDEMTRVFWKSIKDKLIFPFLELDIKYFDLGLPYRDQTDDKVTVEAAEATLKYNVAIKCATITPDEARVKEFSLKSMWKSPNGTIRNILNGTVFREPIICKNIPRLVPGWTKPICIGRHAFGDQYRATDAVIKGPGKLKLVYEGKDEEIELEVFNFTGAGGVAQSMYNTDESIRSFAEASMATAYEKKWPLYLSTKNTILKKYDGRFKDIFQEVYEAQWKSKFEAAGIWYEHRLIDDMVAYALKSEGGYVWACKNYDGDVQSDFLAQGFGSLGLMTSVLVCPDGKTIEAEAAHGTVTRHYRVHQKGGETSTNSIASIFAWTRGLAHRAKLDDNARLLDFTQKLEAACIGAVESGKMTKDLALLVHGSSNVTRSHYLNTEEFIDAVADELRSRLAAN

SEQ ID NO: 5789 - DNA, 1859 bp, Oryza sativa
  CDS (201)..(1445)
ggcaggccgaacgcccgcgccgtgtctgcttatgatgcttcgttctctccgcgctccgtgtccgaccttcttcagacttcacacctcgcgcgccgccgcagctccgatcggaagacgctcgattcgtctccgactccgacgaccagaagctaccggcgacgcgagcggagaagcgcggaggggagggggcgcgcgccgccatggcgttcgagaagatcgtcgtggccaaccccgtcgtcgagatggacggtgatgagatgactcgagttatttggaaatggatcaaagataagcttatattccctttcttggacttggacataaaatactatgacttaggtctacctaatcgtgacgctactggggacaaagttacaatagagagtgcagaagcgaccctaaagtataatgtagccatcaaatgtgcaactataactccagatgaaggacgcgtgaaagagtttaatttaagtgcaatgtggaagagtccaaatgggacaataaggaacattttgaatggaactgttttccgagaaccaatcatctgcaagaatattcctcggcttgtacctgggtggataaagcccatatgcattggacgacatgcatttggtgatcaataccgagcaacagatacagttattaaaggtcctgggaagttgaagttagtatttgatggcagagaggaacaaatagagttggatgtgttcaactttactggtgctggtggagtagccttgtctatgtataatactgacgagtctatttgggcattcgctgaagcttccatgaacatggcttaccagaaaagatggccactttatcttagcaccaaaaacacgatcctcaaaaaatacgatggaaggtttaaagatatatttcaggagaactatgaaacaaaatggagagccaagtttgatgatgcaggaatatggtacgaacatcggctgattgatgatatggtggcctatgcccttaagagtgaaggtggctatgtttgggcttgcaagaactatgatggagatgtgcagagcgatctaattgctcaaggttttggatcgctaggtctaatgacatcagttctggtgtgccctgatggtagaaccattgaagctgaagctgctcatggtacagtcacacgccattacagagttcaccaaaaaggaggcgaaactagtacaaatagcattgcttcaatatttgcttggacaaccggactaggacatagggcaaagctcgatgacaataaaagactgttagattttgtacaaaaacttgaagctgcttgtgtgggaacagtggaatctggaaagatgacaaaggatctagctcttcttgtacatgggccaaatgttagccgagataagtatcttaacactgttgagttcatcgatgctgttgctgaggatttaagaacaagattgtcagtaacatccaagttatgaaggaatgaatagggcaacggcaggggacatgttaggatcccatgatacaaagtttatacatttttactttgaataagagcgattgaagcattggtatgcgcagctatcaaccacggtgctctgataaaatctggtaaagattgtatgcatactccatacaacaatggaggtggaggaggatattttgctcgaaataagaagtttgaacttttattcgtcagacttctacttataactactttgatgattaaatcatggccgtgtagcttagttcttctatgccaaaagagcaagtagaactatcctaaaggtacccaccacaagtggtgtttgtgctttgtaccatacaaacaagactgtttatttactacggtatatagcttggaataaaaaagcaggtgcagatctgttggt

SEQ ID NO: 5790 - protein, 414 aa, Oryza sativa
MAFEKIVVANPVVEMDGDEMTRVIWKWIKDKLIFPFLDLDIKYYDLGLPNRDATGDKVTIESAEATLKYNVAIKCATITPDEGRVKEFNLSAMWKSPNGTIRNILNGTVFREPIICKNIPRLVPGWIKPICIGRHAFGDQYRATDTVIKGPGKLKLVFDGREEQIELDVFNFTGAGGVALSMYNTDESIWAFAEASMNMAYQKRWPLYLSTKNTILKKYDGRFKDIFQENYETKWRAKFDDAGIWYEHRLIDDMVAYALKSEGGYVWACKNYDGDVQSDLIAQGFGSLGLMTSVLVCPDGRTIEAEAAHGTVTRHYRVHQKGGETSTNSIASIFAWTTGLGHRAKLDDNKRLLDFVQKLEAACVGTVESGKMTKDLALLVHGPNVSRDKYLNTVEFIDAVAEDLRTRLSVTSKL

SEQ ID NO: 5791 - DNA, 1488 bp, Daucus carota
  CDS (91)..(1341)
agacaaactcagttgtaaattccgccagtttgattacttgtttgtaaaatataattttgtgatcctgggttttgcaaattggaagtaaagatggctatgcagaagatcaaagtgttgaatccaatcgttgaaatggatggtgatgaaatgacaagggttttttggaaatctattaaggagaaacttatatttccatttctggatttagacataaagtattttgatcttggcctccctaatcgtgatgccaccgatgatagagttacaattgaaagtgcagaagccactcttaagtacaatgtagcaattaagtgtgcaactatcacaccagatgaaactcgtctcaaggagttcaacttaaagcagatgtggaagagtccgaacgggactattcgtaacatattaaatggaactgttttccgcgaaccaatcatttgcaaaaatataccgcgacttgtccaaggctggaataagccaatatgcattggcaggcatgcttttggagatcaatatcgagctactgatctagttgttcaaggacctggaaaactcaaaatggtgtttgtaccagatgggcaaagtgagaaaacagagttagaggttttcaactttactggcgctggaggagtagctctttcaatgtacaacactgacgagtccattcatgcttttgctgaggcttctatgaacacagcttaccaaaaaagatggccactatatcttagcactaagaatactatccttaagaaatacgatggaagatttaaggatattttccaagaagtttatgaaaaagagtggaagtcaaagtttgaatctgtaggaatatggtatgagcatcgcttaattgatgatatggttgcttatgctcttaagagcgatggaggttatgtatgggcatgcaaaaactatgatggagatgtccaaagtgactttttagcccaaggattcggatctcttggtttgatgacatctgtactggtatgcccggatggaaagaccattgaagctgaagcagcccatggcacagttactcgtcattatcgtgtccatcaaaaaggaggtgaaactagcactaacagcatagcttcaatctttgcttggtctcgagggctagctcatagagcaaaattagatgacaatgccctcctcctggatttcactgagaaattggaagcagcttgcattggaactgttgaacgcggaaagatgaccaaggaccttgcaattcttctctatgggtctagggtaactaaggctcattatttgaacaccgagggatttatcgatgctgttgctgcagaactgagatcaagactatataagaaatcaaagttataacacatgtgtgttctctatgagatgtcagtgcttgacactgttttttccaatgtatgcaacatttttatttgtgaccatccttataaaataaattcatgtatagcaacttcgatccaaatactcattaatattattaaatcaatgctt

SEQ ID NO: 5792 - protein, 416 aa, Daucus carota
MAMQKIKVLNPIVEMDGDEMTRVFWKSIKEKLIFPFLDLDIKYFDLGLPNRDATDDRVTIESAEATLKYNVAIKCATITPDETRLKEFNLKQMWKSPNGTIRNILNGTVFREPIICKNIPRLVQGWNKPICIGRHAFGDQYRATDLVVQGPGKLKMVFVPDGQSEKTELEVFNFTGAGGVALSMYNTDESIHAFAEASMNTAYQKRWPLYLSTKNTILKKYDGRFKDIFQEVYEKEWKSKFESVGIWYEHRLIDDMVAYALKSDGGYVWACKNYDGDVQSDFLAQGFGSLGLMTSVLVCPDGKTIEAEAAHGTVTRHYRVHQKGGETSTNSIASIFAWSRGLAHRAKLDDNALLLDFTEKLEAACIGTVERGKMTKDLAILLYGSRVTKAHYLNTEGFIDAVAAELRSRLYKKSKL

SEQ ID NO: 5793 - DNA, 1512 bp, Daucus carota
  CDS (93)..(1331)
ggcgtctctcactaaaacccttcttcactatttttctcttcacatctgagctgagctgagtcgagtccgagtcgagatcatcatcatcagaaatggcgtttcagaagatcaaggtcgcgaatcccatcgtcgaaatggacggagatgaaatgactcgtgtattctggaaatctatcaaggacaagcttatatttcccttcgttgagctggatataaaatactttgaccttggccttcctcaccgtgatgcaactgatgataaagttactgttgaaagtgcagaggctaccctcaagtataatgtagctatcaaatgtgcaacaattaccccagatgaagctcgtgtgaaggagtttggcttgaaacagatgtggaagagtccaaatgggacaattagaaatattttaaacggcacggtatttagggaaccaattatatgcaaaaatatcccaaagctcatccctgggtggacaaagccaatatgcattggaagacatgcttttggcgatcagtaccgcgcaacagatgcagttatccaaggaccaggaaagcttaagttggtttttgtaccagaaggtaaagaagagaagacagagttagaagtttacaacttcactggtgctggaggtgttgctttgtcgatgtacaacactgatgagtctattcgttcttttgctgaagcttcaatggccacagcttatgaaaagaagtggccactttatcttagcacaaaaaatactattctgaagaaatatgatggaagatttaaggacatattccaagaagtttatgaagccagctggaaatcgaagtatgatgctgcagggatatggtacgagcaccgtcttattgatgatatggttgcatatgctcttaaaagtgatggaggttatgtctgggcatgcaaaaattatgatggggatgtccaaagtgatttccttgctcaaggttttggatctctggggttgatgacatcagtcctggtatgccctgatggaaagaccatagaagctgaagcagcccatggcactgttacccggcattacagggttcatcagaagggtggagagaccagcacaaacagcatagcatcaatctttgcatggtctcgaggccttgctcacagggcaaagctggatgataatgctgccctcttgagttttgctgaaaagcttgaggctgcttgtgttggtactgtggagtctgggaagatgactaaggatcttgctctcatactacatggatccaaactcagcagggaacactatcttaacactgaagagttcattgatgcagtagcaagtgatttgaaagcaagactcgccaactaagtttaaatgccttgaatgaaatgaaagttggaattattggggagttcagaattaagaaaaaacaacaataagaaaggcagttgctgcattattttgatagtgatgtttgcaatttcttttgagaatatttgtaacttttgtttgaattgcttacctatgatgtgactggaagagttaaatt

SEQ ID NO: 5794 - protein, 412 aa, Daucus carota
MAFQKIKVANPIVEMDGDEMTRVFWKSIKDKLIFPFVELDIKYFDLGLPHRDATDDKVTVESAEATLKYNVAIKCATITPDEARVKEFGLKQMWKSPNGTIRNILNGTVFREPIICKNIPKLIPGWTKPICIGRHAFGDQYRATDAVIQGPGKLKLVFVPEGKEEKTELEVYNFTGAGGVALSMYNTDESIRSFAEASMATAYEKKWPLYLSTKNTILKKYDGRFKDIFQEVYEASWKSKYDAAGIWYEHRLIDDMVAYALKSDGGYVWACKNYDGDVQSDFLAQGFGSLGLMTSVLVCPDGKTIEAEAAHGTVTRHYRVHQKGGETSTNSIASIFAWSRGLAHRAKLDDNAALLSFAEKLEAACVGTVESGKMTKDLALILHGSKLSREHYLNTEEFIDAVASDLKARLAN

SEQ ID NO: 5795 - DNA, 1600 bp, Candida tropicalis
  CDS (201)..(1493)
tctcctgtatcggggaatcacaaaagaaagttcgcggcagagcgttgactaattcctcaaaaattttccactttttcttcgctttatattttgccgattaggaatgaatttttttttttgagttttcgatcaagtagttctccaggaataacacctccgcccataacacttcctattccgcataacaactattccccagaatgatcagagctagtgctatccaacgtaccgcaatgttgctgagacaattgcgcgggttttcgaccagtgctaccttggccgataagatcaaggtcaagaacccaattgttgaattggatggtgacgaaatgacccgtatcatttggcaaaagattaaagaccagttgatcttgccttaccttgacgtcgacttgaagtactatgacttgggtatcgaatctcgtgatgccacagacgatcaaatcaccattgacgccgctaacgctatcaaagaatacggtgttggtgtcaagtgtgcaaccatcaccccagacgaagcaagagtcaaggaattccacttgaagaagatgtggctttctccaaacggtaccattagaaacattctcggtggtactgtcttcagagaatctatcatcatcccatgtatcccaagattgattcccggttgggaaaagccaattgtcatcggtagacacgctttcggcgatcaatacaaggctactgatttggttatcaacgagccaggtagattggaattgagattcactccagccagcggcggcgaagcccagacccaaaaggtttacgactacactggtccaggtgtcggtttggccatgtacaacaccgacgagtccattactggattcgctcatgcttccttcaagatggctttggctaaaggcttgccattgtacatgtccaccaagaacaccatcttgaagaaatacgacggtagattcaaggacatttttcaacagatttacgaacaagattatgctgctgaattcgaaaaacagggcttgtggtacgaacacagattgattgacgacatggttgcccagatgatcaagtccaaaggtggatttgtcatggctttgaagaactacgatggtgacgtgcaatccgatatcgtcgctcaaggttttggttctttgggtttgatgacttctgccttgatgactccagatggtaaggcttatgaagccgaagctgctcacggtaccgtcaccagacactacagacaacaccaacaaggtaaagagacttccaccaactcaattgcttctatctttgcctggaccagaggtttagctcaaagaggtaagttggacgaaactccagacgtggttgactttgccagcaagctcgaacaagctaccattgacactgttgaagttgaccgtataatgaccaaggacttggctttggctatgggcaaaactgatagatctgcatacgtcaccaccactgaatttttggacgctgttgctgacagattgaagaagtaaagtgcaacgtatatatatttgaatacacttcaatgcaagataaactcataaatttatgtacttttcgtttcccgttcccgcgcttctttatctaggtgttcccacaa

SEQ ID NO: 5796 - protein, 430 aa, Candida tropicalis
MIRASAIQRTAMLLRQLRGFSTSATLADKIKVKNPIVELDGDEMTRIIWQKIKDQLILPYLDVDLKYYDLGIESRDATDDQITIDAANAIKEYGVGVKCATITPDEARVKEFHLKKMWLSPNGTIRNILGGTVFRESIIIPCIPRLIPGWEKPIVIGRHAFGDQYKATDLVINEPGRLELRFTPASGGEAQTQKVYDYTGPGVGLAMYNTDESITGFAHASFKMALAKGLPLYMSTKNTILKKYDGRFKDIFQQIYEQDYAAEFEKQGLWYEHRLIDDMVAQMIKSKGGFVMALKNYDGDVQSDIVAQGFGSLGLMTSALMTPDGKAYEAEAAHGTVTRHYRQHQQGKETSTNSIASIFAWTRGLAQRGKLDETPDVVDFASKLEQATIDTVEVDRIMTKDLALAMGKTDRSAYVTTTEFLDAVADRLKK

SEQ ID NO: 5797 - DNA, 1560 bp, Glycine max
  CDS (87)..(1328)
cagcaattcacactggtctttgcttctcgttactcatttctcacctaactttctattcttctcagtctcagatcagaaccttagccatggcagcgttccagaagatcaaggtcgccaaccccatcgtcgagatggacggagatgaaatgactagggttatctggaagtcaatcaaggacaagctcattttgcccttcttggagttggacatcaagtattatgacttaggccttccttaccgtgatgagaccgatgataaagttacaattgaaagtgcggaagcaactctcaagtataatgtggcaattaagtgcgcaactattactccagatgaagctcgtgtgaaggagtttggtctgaagtcaatgtggaagagtccaaatgggacaattaggaacattttgaatggaactgtcttcagagaaccaattctttgcaaaaacattccccgccttgttcctggttggacaaaggcaatatgcattggaagacatgcgtttggtgatcaatatcgggcgactgacacagtaattaaaggagctggaaagctgaagctggtgtttgttccagaaggccagggtgaggagactgaattcgaggtttttaacttcactggtgaagggggtgtttcattggctatgtacaatactgatgagtctattcgttcttttgctgaggcctctatggcaactgctttagagaaaaagtggccactttatcttagcaccaaaaatacaattctgaagaaatatgatggaagattcaaggacatatttcaagaagtttatgaggcaagctggaaatcaaagtttgaggctgctggtatatggtatgagcatcgactcattgatgatatggtggcgtatgcacttaagagtgaaggaggttatgtatgggcatgcaaaaactatgatggagatgtccagagtgatttcttagctcaaggttttggatcactgggtttgatgacatctgtattggtttgccctgatggaaagactattgaagcagaagcagcccacggcacagttacccgccattttagggttcatcagaagggaggcgaaaccagcacaaatagcatagcatccatctttgcctggacaagagggctagcccacagggcaaaactggatgacaatgctaaactcttggatttcactgaaaagctagaggcagcttgcattggagtagtagaggctgggaagatgaccaaggatttggcacttattcttcatggatccaagctgtcaagggagcattatttgaacacagaggaattcatcgatgccgtggcagccgagcttagtgcgaggctttctgcatagacttgattcaagacaagcggaaaaaagacgttagcaacaaggagcgtgcgtgcgtctgctactctcttctattcagaagaaataagaaagggaaaaaaagcattggtccttagccccgtttccttcatttgtttgttggttgggaatgcaagggttggctgtttcttctccataatattggttgtgaactgatttgtcctttgtaatttcttattgatcccttccaactccc

SEQ ID NO: 5798 - protein, 413 aa, Glycine max
MAAFQKIKVANPIVEMDGDEMTRVIWKSIKDKLILPFLELDIKYYDLGLPYRDETDDKVTIESAEATLKYNVAIKCATITPDEARVKEFGLKSMWKSPNGTIRNILNGTVFREPILCKNIPRLVPGWTKAICIGRHAFGDQYRATDTVIKGAGKLKLVFVPEGQGEETEFEVFNFTGEGGVSLAMYNTDESIRSFAEASMATALEKKWPLYLSTKNTILKKYDGRFKDIFQEVYEASWKSKFEAAGIWYEHRLIDDMVAYALKSEGGYVWACKNYDGDVQSDFLAQGFGSLGLMTSVLVCPDGKTIEAEAAHGTVTRHFRVHQKGGETSTNSIASIFAWTRGLAHRAKLDDNAKLLDFTEKLEAACIGVVEAGKMTKDLALILHGSKLSREHYLNTEEFIDAVAAELSARLSA

SEQ ID NO: 5799 - DNA, 1985 bp, Aspergillus niger
  CDS (288)..(1784)
tccgttcttccctcattcctccccaggttcttgcttattgcaggaaagattatttcccagagtgaacagaaacgattttccgggttctccgatctgccccgtgaaggtcccttacagcaacagcatctcgtccagtccggcttaacggcagcttccgaactccaccaccgcctccttccagccgagagcttcacggcttcttgcttgtctttccctcggactttccccggttcctcccacacagcaggcccagttactgtcgagtctttggcaatccatcccacaccatgtcgtctgtccggttcagttccgcattggcgcgccgctccttcgccgtcgcttcccctcctctctctgcccctctctcttcctccgctcgtcgctttctctcttcttcctcttctactatttcttcttcttcctcctctgtctctactcgctctcccagatctcttacttctgcctcatcccttctctcctctcgtactgcttctgcccgctggaccggtctatcctcgttgaaccttactcaatcccgcaccatggctaccgaaatccccaagatcaaggtcaagaaccccgtcgttgagctcgacggtgatgagatgacccgtatcatctggcaggagatcagagaaaagttgattctgccttaccttgacgtcgacctcaagtactatgacctgggtctcgaataccgtgaccagaccgatgaccaggtcaccgttgaggctgccgaggctatcaagaagtatggtgtcggtgtcaagtgcgccaccatcactcccgatgaggctcgtgttgaggagttcaagctgaagaagatgtggctgtcccccaacggcaccatccgtaacatcctcggcggtaccgtcttccgtgaacccatcatcatccccgccattccccgtctcgtccccggctggaacaagcccatcatcatcggtcgtcacgctttcggtgaccagtaccgtgccaccgaccgtgtcatccctggccccggcaagctcgagcttgtctacacccctgtcaatggcgagcccgagaccgtcaaggtctacgacttccagggtggtggtattgcccagactcagtacaacaccgatgagtcgatccgtggcttcgcccacgccagtttccagatggccctgctcaagggtctccctctgtacatgagcaccaagaacaccatcctgaagcgctacgatggtcgcttcaaggatatcttccaggagatctacgagtccacctaccagaaggactttgaggccaagaacctctggtacgagcaccgtctcattgacgacatggttgcccagatgatcaagagtgagggtggattcgtcatggccctgaagaactacgacggtgatgtccagtccgacattgtcgcccagggtttcggctcccttggtctgatgacctcgaccctggtcacccctactggcgaggctttcgagtctgaggctgcccacggtaccgtgacccgtcactaccgcgagcaccagaagggccgcgagacctccaccaaccccattgcctccatcttcgcctggacccgcggtctgatccagcgtggcaagctcgacgagactcctgatgtcgttacctttgctgaggagcttgagcgcgcttgcattgaggttgtcaacgatgagggcatcatgaccaaggatctggctctggcctgcggccgcaaggagcgtgaggcctgggttactacccgcgagtacatggctgccgtcgagcgcagactcaaggccaacctcaagtcccgcctttaaatacccgattgttttccattgatacactaacgctagcgtgactcgatgagtcgatattcttagaattacgggttgcattatgtagattttacaaaaggtggagacagttgttgaaaccacatgtatagtgcaactgatgtttgttccatgtctcatgaacttgtacatgcttgataatgaaaatagatgcagtcttctgat

SEQ ID NO: 5800 - protein, 498 aa, Aspergillus niger
MSSVRFSSALARRSFAVASPPLSAPLSSSARRFLSSSSSTISSSSSSVSTRSPRSLTSASSLLSSRTASARWTGLSSLNLTQSRTMATEIPKIKVKNPVVELDGDEMTRIIWQEIREKLILPYLDVDLKYYDLGLEYRDQTDDQVTVEAAEAIKKYGVGVKCATITPDEARVEEFKLKKMWLSPNGTIRNILGGTVFREPIIIPAIPRLVPGWNKPIIIGRHAFGDQYRATDRVIPGPGKLELVYTPVNGEPETVKVYDFQGGGIAQTQYNTDESIRGFAHASFQMALLKGLPLYMSTKNTILKRYDGRFKDIFQEIYESTYQKDFEAKNLWYEHRLIDDMVAQMIKSEGGFVMALKNYDGDVQSDIVAQGFGSLGLMTSTLVTPTGEAFESEAAHGTVTRHYREHQKGRETSTNPIASIFAWTRGLIQRGKLDETPDVVTFAEELERACIEVVNDEGIMTKDLALACGRKEREAWVTTREYMAAVERRLKANLKSRL

SEQ ID NO: 5801 - DNA, 1727 bp, Homo sapiens
  CDS (67)..(1425)
ggcagccgggaggagcggcgcgcgctcggacctctcccgccctgctcgttcgctctccagcttgggatggccggctacctgcgggtcgtgcgctcgctctgcagagcctcaggctcgcggccggcctgggcgccggcggccctgacagcccccacctcgcaagagcagccgcggcgccactatgccgacaaaaggatcaaggtggcgaagcccgtggtggagatggatggtgatgagatgacccgtattatctggcagttcatcaaggagaagctcatcctgccccacgtggacatccagctaaagtattttgacctcgggctcccaaaccgtgaccagactgatgaccaggtcaccattgactctgcactggccacccagaagtacagtgtggctgtcaagtgtgccaccatcacccctgatgaggcccgtgtggaagagttcaagctgaagaagatgtggaaaagtcccaatggaactatccggaacatcctgggggggactgtcttccgggagcccatcatctgcaaaaacatcccacgcctagtccctggctggaccaagcccatcaccattggcaggcacgcccatggcgaccagtacaaggccacagactttgtggcagaccgggccggcactttcaaaatggtcttcaccccaaaagatggcagtggtgtcaaggagtgggaagtgtacaacttccccgcaggcggcgtgggcatgggcatgtacaacaccgacgagtccatctcaggttttgcgcacagctgcttccagtatgccatccagaagaaatggccgctgtacatgagcaccaagaacaccatactgaaagcctacgatgggcgtttcaaggacatcttccaggagatctttgacaagcactataagaccgacttcgacaagaataagatctggtatgagcaccggctcattgatgacatggtggctcaggtcctcaagtcttcgggtggctttgtgtgggcctgcaagaactatgacggagatgtgcagtcagacatcctggcccagggctttggctcccttggcctgatgacgtccgtcctggtctgccctgatgggaagacgattgaggctgaggccgctcatgggaccgtcacccgccactatcgggagcaccagaagggccggcccaccagcaccaaccccatcgccagcatctttgcctggacacgtggcctggagcaccgggggaagctggatgggaaccaagacctcatcaggtttgcccagatgctggagaaggtgtgcgtggagacggtggagagtggagccatgaccaaggacctggcgggctgcattcacggcctcagcaatgtgaagctgaacgagcacttcctgaacaccacggacttcctcgacaccatcaagagcaacctggacagagccctgggcaggcagtagggggaggcgccacccatggctgcagtggaggggccagggctgagccggcgggtcctcctgagcgcggcagagggtgagcctcacagcccctctctggaggcctttctaggggatgtttttttataagccagatgtttttaaaagcatatgtgtgtttcccctcatggtgacgtgaggcaggagcagtgcgttttacctcagccagtcagtatgttttgcatactgtaatttatattgcccttggaacacatggtgccatatttagctactaaaaagctcttcacaaaaaaaaaaaaaaaaaa

SEQ ID NO: 5802 - protein, 452 aa, Homo sapiens
MAGYLRVVRSLCRASGSRPAWAPAALTAPTSQEQPRRHYADKRIKVAKPVVEMDGDEMTRIIWQFIKEKLILPHVDIQLKYFDLGLPNRDQTDDQVTIDSALATQKYSVAVKCATITPDEARVEEFKLKKMWKSPNGTIRNILGGTVFREPIICKNIPRLVPGWTKPITIGRHAHGDQYKATDFVADRAGTFKMVFTPKDGSGVKEWEVYNFPAGGVGMGMYNTDESISGFAHSCFQYAIQKKWPLYMSTKNTILKAYDGRFKDIFQEIFDKHYKTDFDKNKIWYEHRLIDDMVAQVLKSSGGFVWACKNYDGDVQSDILAQGFGSLGLMTSVLVCPDGKTIEAEAAHGTVTRHYREHQKGRPTSTNPIASIFAWTRGLEHRGKLDGNQDLIRFAQMLEKVCVETVESGAMTKDLAGCIHGLSNVKLNEHFLNTTDFLDTIKSNLDRALGRQ

SEQ ID NO: 5803 - DNA, 1863 bp, Mus musculus
  CDS (24)..(1595)
agtctctggccgagataacactgatgcagaaattggtctatatgcaactctggatccagctcggatcagagcgggggtgcgggcgagcttggccaggcgaacatctttcttcctggcggcgcggcgtggatctaggtgacaggcgacgtgggctcctctcccgcttcctctctcccgaggcggcggcagtggcggcggcagaggtagaagcagcggcgtgctcggacctcgcgtgctcggaatggccggctactgcgggctgtgagctcctctgcagagcctcgggctcagcgcggacctgggcaccggcagcactgactgtccccagctggccggagcagccgcggcgccactatgctgagaagaggatcaaggtggagaagccggtagtggagatggacggtgacgagatgacccggatcatctggcagttcatcaaggagaagctcatcctgcctcacgtggatgttcagctcaagtattttgaccttgggcttccaaaccgtgaccagaccaatgaccaggtcaccattgactctgctctggccgcccagaagtacagtatggctgtcaagtgtgccacaatcacccctgatgaggcccgtgtggaagagttcaagctgaagaaaatgtggaagagccctaacggaacgatccggaacatccttgggggaaccgtcttcagagagccaagcatctgcaaaaacatcccccgccttgtccctgggtggaccaagcccatcaccattggcaggcacgcccatggcgaccagtacaaggccacagattttgtggtagatcgagctggcacgttcaagttggtcttcaccccaaagaatggcagcagtgccaaggagtgggaggtgtataacttccctggcggaggcgttgggatggggatgtacaacaccgacgagtccatttcgggcttcgcgcacagctgcttccagtactctatccagaagaaatggccgctctacttgagcaccaagaacaccattctgaaggcctatgacgggcgtttcaaggacatcttccaggagatctttgacaagcactataagactgacttcgacaggaataagatctggtatgaacatcggctcatcgacgacatggtggcccaggtgctcaagtcttccggtggctttgtgtgggcttgcaaaaactatgatggagacgtgcagtctgacatcctggcctcaaggtttggctccctcggcctgatgacatctgtgctggtctgccctgatgggaagacaattgaggctgaggctgctcatgggacagtcacccgccattaccgagaacaccagaagggccggcccaccagtaccaagggtattgccagcatctttgcctggacacggggtctggagcatcgtgggaagctggatgggaaccaggaccttatcaggtttgcacagacgcgggagaaggtgtgcgtgcagactgtggagggagcgatgaccaaggacctggctggctgtatccatggcctcagcaatgtgaagctgaacgagcacttcctgaacaccacagacttcctggacaccattaagagcaacctggacagagctctgggcaagcagtaggggtgacactactcagcaccagtgggtactctgtacatggtagagggtgcctcacagcccctctctggtggcctttctagggtcatttttttacatatatatgatggagatgttttttaaagtatatgagcattttcctcacggtggacatgaggcaggaacgtgtgctttacctcagacagtcagtgttctgcatactgtaatttatattgctctggaatcacatggtgccatatttagctactaaaaagctcttcgcaaaaaaaaa

SEQ ID NO: 5804 - protein, 523 aa, Mus musculus
MQKLVYMQLWIQLGSERGCGRAWPGEHLSSWRRGVDLGDRRRGLLSRFLSPEAAAVAAAEVEAAACSDLACSEWPATAGCELLCRASGSARTWAPAALTVPSWPEQPRRHYAEKRIKVEKPVVEMDGDEMTRIIWQFIKEKLILPHVDVQLKYFDLGLPNRDQTNDQVTIDSALAAQKYSMAVKCATITPDEARVEEFKLKKMWKSPNGTIRNILGGTVFREPSICKNIPRLVPGWTKPITIGRHAHGDQYKATDFVVDRAGTFKLVFTPKNGSSAKEWEVYNFPGGGVGMGMYNTDESISGFAHSCFQYSIQKKWPLYLSTKNTILKAYDGRFKDIFQEIFDKHYKTDFDRNKIWYEHRLIDDMVAQVLKSSGGFVWACKNYDGDVQSDILASRFGSLGLMTSVLVCPDGKTIEAEAAHGTVTRHYREHQKGRPTSTKGIASIFAWTRGLEHRGKLDGNQDLIRFAQTREKVCVQTVEGAMTKDLAGCIHGLSNVKLNEHFLNTTDFLDTIKSNLDRALGKQ

SEQ ID NO: 5805 - DNA, 1740 bp, Brachydanio rerio
  CDS (80)..(1429)
attcattcgacccttccttcgaccggagtgaagtcgggcagcaacctctagtgtttttggcgagagagagaaaaaaaacatggcaggttatttgaaggtcctaagttctctcagcaggtctgctgccactctatccaaaagccccgccgttcttgctccagcttgccagagtttgcaacagaggaactatgccgataaacgtatccaggtggcacagccggtggtggagatggatggagatgagatgaccaggatcatctgggagttcattaaagaaaagcttattctgaccaatgtgaatgtggatctgaagtactatgacctgggtcttccctatcgtgaccagactgatgatcaagtcacaatcgactccgctattgccactaagaaatacaacgttgctgtcaaatgcgccactattacacctgacgaagctagggtcgaagagttcaaactgaagaaaatgtggaagagtcctaatggaaccatcaggaacattctgggcggcactgtcttccgtgagccaatcatctgcaagaacattcccagacttgttcctggttggacacaggccatcaccattggcagacatgccttcggtgaccagtacaaggcaacagattttgttgtaaaccaaccaggcaaattcaaaatggtctttactccagccgatggaagcaaaaacaaggagtgggaggtgtatgatttccctggtggaggctgtggaatgggcatgtacaacactgatgagtctatcaccggcttcgctcacagctgcttccagtacgccatccagaagaaatggcctctctacatgagcaccaagaacaccatcctgaaggcttatgacggcagattcaaggacatcttccaggatatctttgagaaaaactacaagccagagtttgacaagctgaagatctggtatgaacacagactgattgatgacatggtggctcaggtgctgaagtcatccggtgcctttgtgtgggcctgcaagaactatgatggagatgtgcagtcggacattcttgctcagggtttcggttctctgggtttgatgacctcagttctggtgtgtcctgatggtaagaccattgaagccgaggcagcacacggcacagtaaccaggcattaccgtgagcaccagaagggaaggccaactagcactaaccccattgccagcatcttcgcatggactagaggactggaacaccgtggcaaacttgatggaaacccagacctgatcaagttctctcaaactcttgaacgtgtgtgcgtggagactgtggagagcggcgttatgaccaaggatctggccggctgcattcacggtctggccaactgcaagctgaatgagcattacgtcaacaccacagacttcctggatgccatcaagacaaacctggacaaggctctgggcaaatgaaggacaacaggcccggacaccgcggagcgcgtctgtctttttgtacctcatttttaacttaaaggtcatgaatacaacaatgtattaagggaggagtaataaaacaatagtgatgttcctagctgttctgttagctaatcctgctgatgggtcgctcccatctcttcccaaacctccaggggtctatttttgtaagatgaagtactgtatgtcagaaactgtataataccacaggagaaaaggaaagttcaagggccatgtgagaaaccctctaataaatcaccaagtcacctggaaaaaaaaaaaaaaaa

SEQ ID NO: 5806 - protein, 449 aa, Brachydanio rerio
MAGYLKVLSSLSRSAATLSKSPAVLAPACQSLQQRNYADKRIQVAQPVVEMDGDEMTRIIWEFIKEKLILTNVNVDLKYYDLGLPYRDQTDDQVTIDSAIATKKYNVAVKCATITPDEARVEEFKLKKMWKSPNGTIRNILGGTVFREPIICKNIPRLVPGWTQAITIGRHAFGDQYKATDFVVNQPGKFKMVFTPADGSKNKEWEVYDFPGGGCGMGMYNTDESITGFAHSCFQYAIQKKWPLYMSTKNTILKAYDGRFKDIFQDIFEKNYKPEFDKLKIWYEHRLIDDMVAQVLKSSGAFVWACKNYDGDVQSDILAQGFGSLGLMTSVLVCPDGKTIEAEAAHGTVTRHYREHQKGRPTSTNPIASIFAWTRGLEHRGKLDGNPDLIKFSQTLERVCVETVESGVMTKDLAGCIHGLANCKLNEHYVNTTDFLDAIKTNLDKALGK

SEQ ID NO: 5807 - DNA, 25 bp, Artificial sequence
  Primer sequence
atgacaaagattaaggtagctaacc

SEQ ID NO: 5808 - DNA, 23 bp, Artificial sequence
  Primer sequence
ttacaatgcagctgcctcgaact

SEQ ID NO: 5809 - DNA, 1518 bp, Saccharomyces cerevisiae; identical to SEQ ID NO: 2533
  CDS (1)..(1518)

SEQ ID NO: 5810 - protein, 505 aa, Saccharomyces cerevisiae; identical to SEQ ID NO: 2534

SEQ ID NO: 5811 - DNA, 1548 bp, Mus musculus (house mouse); identical to SEQ ID NO: 2535
  CDS (1)..(1548)

SEQ ID NO: 5812 - protein, 515 aa, Mus musculus (house mouse); identical to SEQ ID NO: 2536

SEQ ID NO: 5813 - DNA, 1593 bp, Fugu rubripes (Japanese pufferfish); identical to SEQ ID NO: 2537
  CDS (1)..(1593)

SEQ ID NO: 5814 - protein, 530 aa, Fugu rubripes (Japanese pufferfish); identical to SEQ ID NO: 2538

SEQ ID NO: 5815 - DNA, 1506 bp, Vibrio cholerae; identical to SEQ ID NO: 2539
  CDS (1)..(1506)

SEQ ID NO: 5816 - protein, 501 aa, Vibrio cholerae; identical to SEQ ID NO: 2540

SEQ ID NO: 5817 - DNA, 1470 bp, Pseudomonas aeruginosa; identical to SEQ ID NO: 2541
  CDS (1)..(1470)

SEQ ID NO: 5818 - protein, 489 aa, Pseudomonas aeruginosa; identical to SEQ ID NO: 2542

SEQ ID NO: 5819 - DNA, 1485 bp, Staphylococcus aureus; identical to SEQ ID NO: 2543
  CDS (1)..(1485)

SEQ ID NO: 5820 - protein, 494 aa, Staphylococcus aureus; identical to SEQ ID NO: 2544

SEQ ID NO: 5821 - DNA, 1488 bp, Streptococcus pneumoniae; identical to SEQ ID NO: 2545
  CDS (1)..(1488)

SEQ ID NO: 5822 - protein, 495 aa, Streptococcus pneumoniae; identical to SEQ ID NO: 2546

SEQ ID NO: 5823 - DNA, 1476 bp, Salmonella enterica subsp. enterica serovar Typhi; identical to SEQ ID NO: 2547
  CDS (1)..(1476)

SEQ ID NO: 5824 - protein, 491 aa, Salmonella enterica subsp. enterica serovar Typhi; identical to SEQ ID NO: 2548

SEQ ID NO: 5825 - DNA, 1476 bp, Agrobacterium tumefaciens; identical to SEQ ID NO: 2549
  CDS (1)..(1476)

SEQ ID NO: 5826 - protein, 491 aa, Agrobacterium tumefaciens; identical to SEQ ID NO: 2550

SEQ ID NO: 5827 - DNA, 1530 bp, Nostoc sp. PCC 7120; identical to SEQ ID NO: 2551
  CDS (1)..(1530)

SEQ ID NO: 5828 - protein, 509 aa, Nostoc sp. PCC 7120; identical to SEQ ID NO: 2552

SEQ ID NO: 5829 - DNA, 1386 bp, Agrobacterium tumefaciens; identical to SEQ ID NO: 2553
  CDS (1)..(1386)

SEQ ID NO: 5830 - protein, 461 aa, Agrobacterium tumefaciens; identical to SEQ ID NO: 2554

SEQ ID NO: 5831 - DNA, 1476 bp, Brucella melitensis; identical to SEQ ID NO: 2555
  CDS (1)..(1476)

SEQ ID NO: 5832 - protein, 491 aa, Brucella melitensis; identical to SEQ ID NO: 2556

SEQ ID NO: 5833 - DNA, 1458 bp, Zymomonas mobilis; identical to SEQ ID NO: 2557
  CDS (1)..(1458)

SEQ ID NO: 5834 - protein, 485 aa, Zymomonas mobilis; identical to SEQ ID NO: 2558

SEQ ID NO: 5835 - DNA, 1470 bp, Bacillus subtilis; identical to SEQ ID NO: 2559
  CDS (1)..(1470)

SEQ ID NO: 5836 - protein, 489 aa, Bacillus subtilis; identical to SEQ ID NO: 2560

SEQ ID NO: 5837 - DNA, 1401 bp, Mycobacterium tuberculosis; identical to SEQ ID NO: 2561
  CDS (1)..(1401)

SEQ ID NO: 5838 - protein, 466 aa, Mycobacterium tuberculosis; identical to SEQ ID NO: 2562

SEQ ID NO: 5839 - DNA, 1545 bp, Mycobacterium tuberculosis; identical to SEQ ID NO: 2563
  CDS (1)..(1545)

SEQ ID NO: 5840 - protein, 514 aa, Mycobacterium tuberculosis; identical to SEQ ID NO: 2564

SEQ ID NO: 5841 - DNA, 1320 bp, Chlamydia trachomatis; identical to SEQ ID NO: 2565
  CDS (1)..(1320)

SEQ ID NO: 5842 - protein, 439 aa, Chlamydia trachomatis; identical to SEQ ID NO: 2566

SEQ ID NO: 5843 - DNA, 1773 bp, Deinococcus radiodurans; identical to SEQ ID NO: 2567
  CDS (1)..(1773)

SEQ ID NO: 5844 - protein, 590 aa, Deinococcus radiodurans; identical to SEQ ID NO: 2568

SEQ ID NO: 5845 - DNA, 1467 bp, Pseudomonas aeruginosa; identical to SEQ ID NO: 2569
  CDS (1)..(1467)

SEQ ID NO: 5846 - protein, 488 aa, Pseudomonas aeruginosa; identical to SEQ ID NO: 2570

SEQ ID NO: 5847 - DNA, 1422 bp, Caulobacter crescentus; identical to SEQ ID NO: 2571
  CDS (1)..(1422)

SEQ ID NO: 5848 - protein, 473 aa, Caulobacter crescentus; identical to SEQ ID NO: 2572

SEQ ID NO: 5849 - DNA, 1437 bp, Borrelia burgdorferi (Lyme disease spirochete); identical to SEQ ID NO: 2573
  CDS (1)..(1437)

SEQ ID NO: 5850 - protein, 478 aa, Borrelia burgdorferi (Lyme disease spirochete); identical to SEQ ID NO: 2574

SEQ ID NO: 5851 - DNA, 1539 bp, Chlamydophila pneumoniae, Chlamydia pneumoniae; identical to SEQ ID NO: 2575
  CDS (1)..(1539)

SEQ ID NO: 5852 - protein, 512 aa, Chlamydophila pneumoniae, Chlamydia pneumoniae; identical to SEQ ID NO: 2576

SEQ ID NO: 5853 - DNA, 1476 bp, Escherichia coli; identical to SEQ ID NO: 2577
  CDS (1)..(1476)

SEQ ID NO: 5854 - protein, 491 aa, Escherichia coli; identical to SEQ ID NO: 2578

SEQ ID NO: 5855 - DNA, 1548 bp, Treponema pallidum subsp. pallidum (syphilis spirochete); identical to SEQ ID NO: 2579
  CDS (1)..(1548)

SEQ ID NO: 5856 - protein, 515 aa, Treponema pallidum subsp. pallidum (syphilis spirochete); identical to SEQ ID NO: 2580

SEQ ID NO: 5857 - DNA, 1476 bp, Buchnera sp; identical to SEQ ID NO: 2581
  CDS (1)..(1476)

SEQ ID NO: 5858 - protein, 491 aa, Buchnera sp; identical to SEQ ID NO: 2582

SEQ ID NO: 5859 - DNA, 1512 bp, Lactococcus lactis subsp. lactis; identical to SEQ ID NO: 2583
  CDS (1)..(1512)

SEQ ID NO: 5860 - protein, 503 aa, Lactococcus lactis subsp. lactis; identical to SEQ ID NO: 2584

SEQ ID NO: 5861 - DNA, 1572 bp, Drosophila melanogaster; identical to SEQ ID NO: 2585
  CDS (1)..(1572)

SEQ ID NO: 5862 - protein, 523 aa, Drosophila melanogaster; identical to SEQ ID NO: 2586

SEQ ID NO: 5863 - DNA, 1575 bp, Synechococcus sp; identical to SEQ ID NO: 2587
  CDS (1)..(1575)

SEQ ID NO: 5864 - protein, 524 aa, Synechococcus sp; identical to SEQ ID NO: 2588

SEQ ID NO: 5865 - DNA, 1485 bp, Haemophilus influenzae; identical to SEQ ID NO: 2589
  CDS (1)..(1485)

SEQ ID NO: 5866 - protein, 494 aa, Haemophilus influenzae; identical to SEQ ID NO: 2590

SEQ ID NO: 5867 - DNA, 1446 bp, Neisseria meningitidis; identical to SEQ ID NO: 2591
  CDS (1)..(1446)

SEQ ID NO: 5868 - protein, 481 aa, Neisseria meningitidis; identical to SEQ ID NO: 2592

SEQ ID NO: 5869 - DNA, 1278 bp, Helicobacter pylori; identical to SEQ ID NO: 2593
  CDS (1)..(1278)

SEQ ID NO: 5870 - protein, 425 aa, Helicobacter pylori; identical to SEQ ID NO: 2594

SEQ ID NO: 5871 - DNA, 1434 bp, Xylella fastidiosa; identical to SEQ ID NO: 2595
  CDS (1)..(1434)

SEQ ID NO: 5872 - protein, 477 aa, Xylella fastidiosa; identical to SEQ ID NO: 2596

SEQ ID NO: 5873 - DNA, 1296 bp, Aquifex aeolicus; identical to SEQ ID NO: 2597
  CDS (1)..(1296)

SEQ ID NO: 5874 - protein, 431 aa, Aquifex aeolicus; identical to SEQ ID NO: 2598

SEQ ID NO: 5875 - DNA, 1491 bp, Thermotoga maritima; identical to SEQ ID NO: 2599
  CDS (1)..(1491)

SEQ ID NO: 5876 - protein, 496 aa, Thermotoga maritima; identical to SEQ ID NO: 2600

SEQ ID NO: 5877 - DNA, 1494 bp, Kluyveromyces marxianus var. lactis, Candida sphaerica; identical to SEQ ID NO: 2601
  CDS (1)..(1494)

SEQ ID NO: 5878 - protein, 497 aa, Kluyveromyces marxianus var. lactis, Candida sphaerica; identical to SEQ ID NO: 2602

SEQ ID NO: 5879 - DNA, 2813 bp, Erwinia chrysanthemi; identical to SEQ ID NO: 2603
  CDS (322)..(1797)

SEQ ID NO: 5880 - protein, 491 aa, Erwinia chrysanthemi; identical to SEQ ID NO: 2604

SEQ ID NO: 5881 - DNA, 3244 bp, Plasmodium falciparum; identical to SEQ ID NO: 2605
  CDS (184)..(2916)

SEQ ID NO: 5882 - protein, 910 aa, Plasmodium falciparum; identical to SEQ ID NO: 2606

SEQ ID NO: 5883 - DNA, 1785 bp, Medicago sativa (alfalfa); identical to SEQ ID NO: 2607
  CDS (38)..(1585)

SEQ ID NO: 5884 - protein, 515 aa, Medicago sativa (alfalfa); identical to SEQ ID NO: 2608

SEQ ID NO: 5885 - DNA, 1689 bp, Solanum tuberosum (potato); identical to SEQ ID NO: 2609
  CDS (46)..(1581)

SEQ ID NO: 5886 - protein, 511 aa, Solanum tuberosum (potato); identical to SEQ ID NO: 2610

SEQ ID NO: 5887 - DNA, 1530 bp, Synechocystis sp; identical to SEQ ID NO: 2611
  CDS (1)..(1530)

SEQ ID NO: 5888 - protein, 509 aa, Synechocystis sp; identical to SEQ ID NO: 2612

SEQ ID NO: 5889 - DNA, 1953 bp, Nicotiana tabacum (common tobacco); identical to SEQ ID NO: 2613
  CDS (43)..(1824)

SEQ ID NO: 5890 - protein, 593 aa, Nicotiana tabacum (common tobacco); identical to SEQ ID NO: 2614

SEQ ID NO: 5891 - DNA, 1869 bp, Nicotiana tabacum (common tobacco); identical to SEQ ID NO: 2615
  CDS (22)..(1788)

SEQ ID NO: 5892 - protein, 588 aa, Nicotiana tabacum (common tobacco); identical to SEQ ID NO: 2616

SEQ ID NO: 5893 - DNA, 2058 bp, Solanum tuberosum (potato); identical to SEQ ID NO: 2617
  CDS (41)..(1774)

SEQ ID NO: 5894 - protein, 577 aa, Solanum tuberosum (potato); identical to SEQ ID NO: 2618

SEQ ID NO: 5895 - DNA, 2049 bp, Spinacia oleracea (spinach); identical to SEQ ID NO: 2619
  CDS (147)..(1871)

SEQ ID NO: 5896 - protein, 574 aa, Spinacia oleracea (spinach); identical to SEQ ID NO: 2620

SEQ ID NO: 5897 - DNA, 2359 bp, Petroselinum crispum (parsley); identical to SEQ ID NO: 2621
  CDS (172)..(1986)

SEQ ID NO: 5898 - protein, 604 aa, Petroselinum crispum (parsley); identical to SEQ ID NO: 2622

SEQ ID NO: 5899 - DNA, 1848 bp, Petroselinum crispum (parsley); identical to SEQ ID NO: 2623
  CDS (41)..(1528)

SEQ ID NO: 5900 - protein, 495 aa, Petroselinum crispum (parsley); identical to SEQ ID NO: 2624

SEQ ID NO: 5901 - DNA, 1957 bp, Petroselinum crispum (parsley); identical to SEQ ID NO: 2625
  CDS (74)..(1678)

SEQ ID NO: 5902 - protein, 534 aa, Petroselinum crispum (parsley); identical to SEQ ID NO: 2626

SEQ ID NO: 5903 - DNA, 1569 bp, Caenorhabditis elegans; identical to SEQ ID NO: 2627
  CDS (1)..(1569)

SEQ ID NO: 5904 - protein, 522 aa, Caenorhabditis elegans; identical to SEQ ID NO: 2628

SEQ ID NO: 5905 - DNA, 1779 bp, Streptomyces coelicolor; identical to SEQ ID NO: 2629
  CDS (1)..(1779)

SEQ ID NO: 5906 - protein, 592 aa, Streptomyces coelicolor; identical to SEQ ID NO: 2630

SEQ ID NO: 5907 - DNA, 1524 bp, Streptomyces coelicolor; identical to SEQ ID NO: 2631
  CDS (1)..(1524)

SEQ ID NO: 5908 - protein, 507 aa, Streptomyces coelicolor; identical to SEQ ID NO: 2632

SEQ ID NO: 5909 - DNA, 1422 bp, Schizosaccharomyces pombe; identical to SEQ ID NO: 2633
  CDS (1)..(1422)

SEQ ID NO: 5910 - protein, 473 aa, Schizosaccharomyces pombe; identical to SEQ ID NO: 2634

SEQ ID NO: 5911 - DNA, 1503 bp, Schizosaccharomyces pombe; identical to SEQ ID NO: 2635
  CDS (1)..(1503)

SEQ ID NO: 5912 - protein, 500 aa, Schizosaccharomyces pombe; identical to SEQ ID NO: 2636

SEQ ID NO: 5913 - DNA, 1428 bp, Schizosaccharomyces pombe; identical to SEQ ID NO: 2637
  CDS (1)..(1428)

SEQ ID NO: 5914 - protein, 475 aa, Schizosaccharomyces pombe; identical to SEQ ID NO: 2638

SEQ ID NO: 5915 - DNA, 1461 bp, Leuconostoc mesenteroides; identical to SEQ ID NO: 2639
  CDS (1)..(1461)

SEQ ID NO: 5916 - protein, 486 aa, Leuconostoc mesenteroides; identical to SEQ ID NO: 2640

SEQ ID NO: 5917 - DNA, 3038 bp, Corynebacterium glutamicum; identical to SEQ ID NO: 2641
  CDS (115)..(1659)

SEQ ID NO: 5918 - protein, 514 aa, Corynebacterium glutamicum; identical to SEQ ID NO: 2642

SEQ ID NO: 5919 - DNA, 1852 bp, Nicotiana tabacum; identical to SEQ ID NO: 2643
  CDS (102)..(1634)

SEQ ID NO: 5920 - protein, 510 aa, Nicotiana tabacum; identical to SEQ ID NO: 2644

SEQ ID NO: 5921 - DNA, 1821 bp, Nicotiana tabacum; identical to SEQ ID NO: 2645
  CDS (88)..(1623)

SEQ ID NO: 5922 - protein, 511 aa, Nicotiana tabacum; identical to SEQ ID NO: 2646

SEQ ID NO: 5923 - DNA, 1808 bp, Chlamydia trachomatis; identical to SEQ ID NO: 2647
  CDS (105)..(1643)

SEQ ID NO: 5924 - protein, 512 aa, Chlamydia trachomatis; identical to SEQ ID NO: 2648

SEQ ID NO: 5925 - DNA, 2750 bp, Plasmodium falciparum; identical to SEQ ID NO: 2649
  CDS (48)..(2258)

SEQ ID NO: 5926 - protein, 736 aa, Plasmodium falciparum; identical to SEQ ID NO: 2650

SEQ ID NO: 5927 - DNA, 1509 bp, Debaryomyces hansenii; identical to SEQ ID NO: 2651
  CDS (1)..(1509)

SEQ ID NO: 5928 - protein, 502 aa, Debaryomyces hansenii; identical to SEQ ID NO: 2652

SEQ ID NO: 5929 - DNA, 1503 bp, Candida glabrata; identical to SEQ ID NO: 2653
  CDS (1)..(1503)

SEQ ID NO: 5930 - protein, 500 aa, Candida glabrata; identical to SEQ ID NO: 2654

SEQ ID NO: 5931 - DNA, 1485 bp, Bacillus thuringiensis serovar konkukian str; identical to SEQ ID NO: 2655
  CDS (1)..(1485)

SEQ ID NO: 5932 - protein, 494 aa, Bacillus thuringiensis serovar konkukian str; identical to SEQ ID NO: 2656

SEQ ID NO: 5933 - DNA, 1554 bp, Oryza sativa; identical to SEQ ID NO: 2657
  CDS (1)..(1554)

SEQ ID NO: 5934 - protein, 517 aa, Oryza sativa; identical to SEQ ID NO: 2658

SEQ ID NO: 5935 - DNA, 1500 bp, Photobacterium profundum; identical to SEQ ID NO: 2659
  CDS (1)..(1500)

SEQ ID NO: 5936 - protein, 499 aa, Photobacterium profundum; identical to SEQ ID NO: 2660

SEQ ID NO: 5937 - DNA, 1551 bp, Parachlamydia sp; identical to SEQ ID NO: 2661
  CDS (1)..(1551)

SEQ ID NO: 5938 - protein, 516 aa, Parachlamydia sp; identical to SEQ ID NO: 2662

SEQ ID NO: 5939 - DNA, 1515 bp, Rhodopseudomonas palustris; identical to SEQ ID NO: 2663
  CDS (1)..(1515)

SEQ ID NO: 5940 - protein, 504 aa, Rhodopseudomonas palustris; identical to SEQ ID NO: 2664

SEQ ID NO: 5941 - DNA, 1650 bp, Corynebacterium diphtheriae; identical to SEQ ID NO: 2665
  CDS (1)..(1650)

SEQ ID NO: 5942 - protein, 549 aa, Corynebacterium diphtheriae; identical to SEQ ID NO: 2666

SEQ ID NO: 5943 - DNA, 1446 bp, uncultured bacterium 581; identical to SEQ ID NO: 2667
  CDS (1)..(1446)

SEQ ID NO: 5944 - protein, 481 aa, uncultured bacterium 581; identical to SEQ ID NO: 2668

SEQ ID NO: 5945 - DNA, 1602 bp, Nonomuraea sp; identical to SEQ ID NO: 2669
  CDS (1)..(1602)

SEQ ID NO: 5946 - protein, 533 aa, Nonomuraea sp; identical to SEQ ID NO: 2670

SEQ ID NO: 5947 - DNA, 1476 bp, Listeria monocytogenes; identical to SEQ ID NO: 2671
  CDS (1)..(1476)

SEQ ID NO: 5948 - protein, 491 aa, Listeria monocytogenes; identical to SEQ ID NO: 2672

SEQ ID NO: 5949 - DNA, 1485 bp, Bacillus cereus; identical to SEQ ID NO: 2673
  CDS (1)..(1485)

SEQ ID NO: 5950 - protein, 494 aa, Bacillus cereus; identical to SEQ ID NO: 2674

SEQ ID NO: 5951 - DNA, 1410 bp, Mycobacterium paratuberculosis; identical to SEQ ID NO: 2675
  CDS (1)..(1410)

SEQ ID NO: 5952 - protein, 469 aa, Mycobacterium paratuberculosis; identical to SEQ ID NO: 2676

SEQ ID NO: 5953 - DNA, 2454 bp, Mycobacterium paratuberculosis; identical to SEQ ID NO: 2677
  CDS (1)..(2454)

SEQ ID NO: 5954 - protein, 817 aa, Mycobacterium paratuberculosis; identical to SEQ ID NO: 2678

SEQ ID NO: 5955 - DNA, 1545 bp, Mycobacterium paratuberculosis; identical to SEQ ID NO: 2679
  CDS (1)..(1545)

SEQ ID NO: 5956 - protein, 514 aa, Mycobacterium paratuberculosis; identical to SEQ ID NO: 2680

SEQ ID NO: 5957 - DNA, 1449 bp, Lactobacillus johnsonii; identical to SEQ ID NO: 2681
  CDS (1)..(1449)

SEQ ID NO: 5958 - protein, 482 aa, Lactobacillus johnsonii; identical to SEQ ID NO: 2682

SEQ ID NO: 5959 - DNA, 1539 bp, Ashbya gossypii; identical to SEQ ID NO: 2683
  CDS (1)..(1539)

SEQ ID NO: 5960 - protein, 512 aa, Ashbya gossypii; identical to SEQ ID NO: 2684

SEQ ID NO: 5961 - DNA, 1734 bp, Oryza sativa; identical to SEQ ID NO: 2685
  CDS (1)..(1734)

SEQ ID NO: 5962 - protein, 577 aa, Oryza sativa; identical to SEQ ID NO: 2686

SEQ ID NO: 5963 - DNA, 1467 bp, Gluconobacter oxydans; identical to SEQ ID NO: 2687
  CDS (1)..(1467)

SEQ ID NO: 5964 - protein, 488 aa, Gluconobacter oxydans; identical to SEQ ID NO: 2688

SEQ ID NO: 5965 - DNA, 1581 bp, Vibrio vulnificus; identical to SEQ ID NO: 2689
  CDS (1)..(1581)

SEQ ID NO: 5966 - protein, 526 aa, Vibrio vulnificus; identical to SEQ ID NO: 2690

SEQ ID NO: 5967 - DNA, 1476 bp, Photorhabdus luminescens; identical to SEQ ID NO: 2691
  CDS (1)..(1476)

SEQ ID NO: 5968 - protein, 491 aa, Photorhabdus luminescens; identical to SEQ ID NO: 2692

SEQ ID NO: 5969 - DNA, 1539 bp, Gloeobacter violaceus; identical to SEQ ID NO: 2693
  CDS (1)..(1539)

SEQ ID NO: 5970 - protein, 512 aa, Gloeobacter violaceus; identical to SEQ ID NO: 2694

SEQ ID NO: 5971 - DNA, 1539 bp, Gloeobacter violaceus; identical to SEQ ID NO: 2695
  CDS (1)..(1539)

SEQ ID NO: 5972 - protein, 512 aa, Gloeobacter violaceus; identical to SEQ ID NO: 2696

SEQ ID NO: 5973 - DNA, 1479 bp, Chromobacterium violaceum; identical to SEQ ID NO: 2697
  CDS (1)..(1479)

SEQ ID NO: 5974 - protein, 492 aa, Chromobacterium violaceum; identical to SEQ ID NO: 2698

SEQ ID NO: 5975 - DNA, 2229 bp, Giardia lamblia ATCC 50803; identical to SEQ ID NO: 2699
  CDS (1)..(2229)

SEQ ID NO: 5976 - protein, 742 aa, Giardia lamblia ATCC 50803; identical to SEQ ID NO: 2700

SEQ ID NO: 5977 - DNA, 2850 bp, Plasmodium yoelii yoelii; identical to SEQ ID NO: 2701
  CDS (1)..(2850)

SEQ ID NO: 5978 - protein, 949 aa, Plasmodium yoelii yoelii; identical to SEQ ID NO: 2702

SEQ ID NO: 5979 - DNA, 1476 bp, Neurospora crassa; identical to SEQ ID NO: 2703
  CDS (1)..(1476)

SEQ ID NO: 5980 - protein, 491 aa, Neurospora crassa; identical to SEQ ID NO: 2704

SEQ ID NO: 5981 - DNA, 1524 bp, Synechococcus sp; identical to SEQ ID NO: 2705
  CDS (1)..(1524)

SEQ ID NO: 5982 - protein, 507 aa, Synechococcus sp; identical to SEQ ID NO: 2706

SEQ ID NO: 5983 - DNA, 1455 bp, Rhodopirellula baltica; identical to SEQ ID NO: 2707
  CDS (1)..(1455)

SEQ ID NO: 5984 - protein, 484 aa, Rhodopirellula baltica; identical to SEQ ID NO: 2708

SEQ ID NO: 5985 - DNA, 1524 bp, Prochlorococcus marinus subsp; identical to SEQ ID NO: 2709
  CDS (1)..(1524)

SEQ ID NO: 5986 - protein, 507 aa, Prochlorococcus marinus subsp; identical to SEQ ID NO: 2710

SEQ ID NO: 5987 - DNA, 1524 bp, Prochlorococcus marinus; identical to SEQ ID NO: 2711
  CDS (1)..(1524)

SEQ ID NO: 5988 - protein, 507 aa, Prochlorococcus marinus; identical to SEQ ID NO: 2712

SEQ ID NO: 5989 - DNA, 1521 bp, Prochlorococcus marinus; identical to SEQ ID NO: 2713
  CDS (1)..(1521)

SEQ ID NO: 5990 - protein, 506 aa, Prochlorococcus marinus; identical to SEQ ID NO: 2714

SEQ ID NO: 5991 - DNA, 1488 bp, Haemophilus ducreyi; identical to SEQ ID NO: 2715
  CDS (1)..(1488)

SEQ ID NO: 5992 - protein, 495 aa, Haemophilus ducreyi; identical to SEQ ID NO: 2716

SEQ ID NO: 5993 - DNA, 1497 bp, Candidatus Blochmannia floridanus; identical to SEQ ID NO: 2717
  CDS (1)..(1497)

SEQ ID NO: 5994 - protein, 498 aa, Candidatus Blochmannia floridanus; identical to SEQ ID NO: 2718

SEQ ID NO: 5995 - DNA, 1768 bp, Oryza sativa; identical to SEQ ID NO: 2719
  CDS (2)..(1768)

SEQ ID NO: 5996 - protein, 588 aa, Oryza sativa; identical to SEQ ID NO: 2720

SEQ ID NO: 5997 - DNA, 1548 bp, Bos indicus; identical to SEQ ID NO: 2721
  CDS (1)..(1548)

SEQ ID NO: 5998 - protein, 515 aa, Bos indicus; identical to SEQ ID NO: 2722

SEQ ID NO: 5999 - DNA, 1536 bp, Chlamydophila caviae; identical to SEQ ID NO: 2723
  CDS (1)..(1536)

SEQ ID NO: 6000 - protein, 511 aa, Chlamydophila caviae; identical to SEQ ID NO: 2724

SEQ ID NO: 6001 - DNA, 1524 bp, Streptomyces avermitilis; identical to SEQ ID NO: 2725
  CDS (1)..(1524)

SEQ ID NO: 6002 - protein, 507 aa, Streptomyces avermitilis; identical to SEQ ID NO: 2726

SEQ ID NO: 6003 - DNA, 1647 bp, Streptomyces avermitilis; identical to SEQ ID NO: 2727
  CDS (1)..(1647)

SEQ ID NO: 6004 - protein, 548 aa, Streptomyces avermitilis; identical to SEQ ID NO: 2728

SEQ ID NO: 6005 - DNA, 1491 bp, Nitrosomonas europaea; identical to SEQ ID NO: 2729
  CDS (1)..(1491)

SEQ ID NO: 6006 - protein, 496 aa, Nitrosomonas europaea; identical to SEQ ID NO: 2730

SEQ ID NO: 6007 - DNA, 1524 bp, Enterococcus faecalis; identical to SEQ ID NO: 2731
  CDS (1)..(1524)

SEQ ID NO: 6008 - protein, 507 aa, Enterococcus faecalis; identical to SEQ ID NO: 2732

SEQ ID NO: 6009 - DNA, 1464 bp, Tropheryma whipplei; identical to SEQ ID NO: 2733
  CDS (1)..(1464)

SEQ ID NO: 6010 - protein, 487 aa, Tropheryma whipplei; identical to SEQ ID NO: 2734

SEQ ID NO: 6011 - DNA, 2145 bp, Leishmania mexicana; identical to SEQ ID NO: 2735
  CDS (298)..(1986)

SEQ ID NO: 6012 - protein, 562 aa, Leishmania mexicana; identical to SEQ ID NO: 2736

SEQ ID NO: 6013 - DNA, 1494 bp, Dictyostelium discoideum; identical to SEQ ID NO: 2737
  CDS (1)..(1494)

SEQ ID NO: 6014 - protein, 497 aa, Dictyostelium discoideum; identical to SEQ ID NO: 2738

SEQ ID NO: 6015 - DNA, 1503 bp, Xylella fastidiosa; identical to SEQ ID NO: 2739
  CDS (1)..(1503)

SEQ ID NO: 6016 - protein, 500 aa, Xylella fastidiosa; identical to SEQ ID NO: 2740

SEQ ID NO: 6017 - DNA, 1506 bp, Vibrio parahaemolyticus; identical to SEQ ID NO: 2741
  CDS (1)..(1506)

SEQ ID NO: 6018 - protein, 501 aa, Vibrio parahaemolyticus; identical to SEQ ID NO: 2742

SEQ ID NO: 6019 - DNA, 1533 bp, Pseudomonas syringae; identical to SEQ ID NO: 2743
  CDS (1)..(1533)

SEQ ID NO: 6020 - protein, 510 aa, Pseudomonas syringae; identical to SEQ ID NO: 2744

SEQ ID NO: 6021 - DNA, 1470 bp, Pseudomonas syringae; identical to SEQ ID NO: 2745
  CDS (1)..(1470)

SEQ ID NO: 6022 - protein, 489 aa, Pseudomonas syringae; identical to SEQ ID NO: 2746

SEQ ID NO: 6023 - DNA, 1458 bp, Pseudomonas putida; identical to SEQ ID NO: 2747
  CDS (1)..(1458)

SEQ ID NO: 6024 - protein, 485 aa, Pseudomonas putida; identical to SEQ ID NO: 2748

SEQ ID NO: 6025 - DNA, 1506 bp, Pseudomonas putida; identical to SEQ ID NO: 2749
  CDS (1)..(1506)

SEQ ID NO: 6026 - protein, 501 aa, Pseudomonas putida; identical to SEQ ID NO: 2750

SEQ ID NO: 6027 - DNA, 1470 bp, Pseudomonas putida; identical to SEQ ID NO: 2751
  CDS (1)..(1470)

SEQ ID NO: 6028 - protein, 489 aa, Pseudomonas putida; identical to SEQ ID NO: 2752

SEQ ID NO: 6029 - DNA, 1485 bp, Lactobacillus plantarum; identical to SEQ ID NO: 2753
  CDS (1)..(1485)

SEQ ID NO: 6030 - protein, 494 aa, Lactobacillus plantarum; identical to SEQ ID NO: 2754

SEQ ID NO: 6031 - DNA, 1440 bp, Clostridium tetani; identical to SEQ ID NO: 2755
  CDS (1)..(1440)

SEQ ID NO: 6032 - protein, 479 aa, Clostridium tetani; identical to SEQ ID NO: 2756

SEQ ID NO: 6033 - DNA, 1512 bp, Bradyrhizobium japonicum; identical to SEQ ID NO: 2757
  CDS (1)..(1512)

SEQ ID NO: 6034 - protein, 503 aa, Bradyrhizobium japonicum; identical to SEQ ID NO: 2758

SEQ ID NO: 6035 - DNA, 1497 bp, Bacteroides thetaiotaomicron; identical to SEQ ID NO: 2759
  CDS (1)..(1497)

SEQ ID NO: 6036 - protein, 498 aa, Bacteroides thetaiotaomicron; identical to SEQ ID NO: 2760

SEQ ID NO: 6037 - DNA, 4583 bp, Mus musculus; identical to SEQ ID NO: 2761
  CDS (119)..(2488)

SEQ ID NO: 6038 - protein, 789 aa, Mus musculus; identical to SEQ ID NO: 2762

SEQ ID NO: 6039 - DNA, 1485 bp, Staphylococcus epidermidis; identical to SEQ ID NO: 2763
  CDS (1)..(1485)

SEQ ID NO: 6040 - protein, 494 aa, Staphylococcus epidermidis; identical to SEQ ID NO: 2764

SEQ ID NO: 6041 - DNA, 1590 bp, Yersinia pestis; identical to SEQ ID NO: 2765
  CDS (1)..(1590)

SEQ ID NO: 6042 - protein, 529 aa, Yersinia pestis; identical to SEQ ID NO: 2766

SEQ ID NO: 6043 - DNA, 1530 bp, Synechococcus elongatus; identical to SEQ ID NO: 2767
  CDS (1)..(1530)

SEQ ID NO: 6044 - protein, 509 aa, Synechococcus elongatus; identical to SEQ ID NO: 2768

SEQ ID NO: 6045 - DNA, 1473 bp, Shewanella oneidensis; identical to SEQ ID NO: 2769
  CDS (1)..(1473)

SEQ ID NO: 6046 - protein, 490 aa, Shewanella oneidensis; identical to SEQ ID NO: 2770

SEQ ID NO: 6047 - DNA, 1476 bp, Oceanobacillus iheyensis; identical to SEQ ID NO: 2771
  CDS (1)..(1476)

SEQ ID NO: 6048 - protein, 491 aa, Oceanobacillus iheyensis; identical to SEQ ID NO: 2772

SEQ ID NO: 6049 - DNA, 1344 bp, Corynebacterium efficiens; identical to SEQ ID NO: 2773
  CDS (1)..(1344)

SEQ ID NO: 6050 - protein, 447 aa, Corynebacterium efficiens; identical to SEQ ID NO: 2774

SEQ ID NO: 6051 - DNA, 1545 bp, Corynebacterium efficiens; identical to SEQ ID NO: 2775
  CDS (1)..(1545)

SEQ ID NO: 6052 - protein, 514 aa, Corynebacterium efficiens; identical to SEQ ID NO: 2776

SEQ ID NO: 6053 - DNA, 1668 bp, Bifidobacterium longum; identical to SEQ ID NO: 2777
  CDS (1)..(1668)

SEQ ID NO: 6054 - protein, 555 aa, Bifidobacterium longum; identical to SEQ ID NO: 2778

SEQ ID NO: 6055 - DNA, 1284 bp, Rhodococcus opacus; identical to SEQ ID NO: 2779
  CDS (1)..(1284)

SEQ ID NO: 6056 - protein, 427 aa, Rhodococcus opacus; identical to SEQ ID NO: 2780

SEQ ID NO: 6057 - DNA, 2879 bp, Leishmania guyanensis; identical to SEQ ID NO: 2781
  misc_feature (1992)..(2321): n is a, c, g, or t
  misc_feature (2700)..(2700): n is a, c, g, or t
  misc_feature (2840)..(2840): n is a, c, g, or t
  CDS (205)..(1893)

SEQ ID NO: 6058 - protein, 562 aa, Leishmania guyanensis; identical to SEQ ID NO: 2782

SEQ ID NO: 6059 - DNA, 1689 bp, Leishmania mexicana; identical to SEQ ID NO: 2783
  misc_feature (227)..(444): n is a, c, g, or t
  misc_feature (1475)..(1528): n is a, c, g, or t
  CDS (1)..(1689)

SEQ ID NO: 6060 - protein, 562 aa, Leishmania mexicana; identical to SEQ ID NO: 2784
  misc_feature (76)..(148): Xaa can be any naturally occuring amino acid
  misc_feature (187)..(187): Xaa can be any naturally occuring amino acid
  misc_feature (197)..(197): Xaa can be any naturally occuring amino acid
  misc_feature (224)..(224): Xaa can be any naturally occuring amino acid
  misc_feature (243)..(243): Xaa can be any naturally occuring amino acid
  misc_feature (250)..(250): Xaa can be any naturally occuring amino acid
  misc_feature (492)..(510): Xaa can be any naturally occuring amino acid

SEQ ID NO: 6061 - DNA, 2916 bp, Leishmania amazonensis; identical to SEQ ID NO: 2785
  misc_feature (2191)..(2311): n is a, c, g, or t
  CDS (207)..(1895)

SEQ ID NO: 6062 - protein, 562 aa, Leishmania amazonensis; identical to SEQ ID NO: 2786
  misc_feature (463)..(463): Xaa can be any naturally occuring amino acid
  misc_feature (481)..(481): Xaa can be any naturally occuring amino acid

SEQ ID NO: 6063 - DNA, 1440 bp, Chlorobium tepidum; identical to SEQ ID NO: 2787
  CDS (1)..(1440)

SEQ ID NO: 6064 - protein, 479 aa, Chlorobium tepidum; identical to SEQ ID NO: 2788

SEQ ID NO: 6065 - DNA, 2187 bp, Methylobacterium extorquens; identical to SEQ ID NO: 2789
  CDS (640)..(2187)

SEQ ID NO: 6066 - protein, 515 aa, Methylobacterium extorquens; identical to SEQ ID NO: 2790

SEQ ID NO: 6067 - DNA, 1476 bp, Bartonella henselae; identical to SEQ ID NO: 2791
  CDS (1)..(1476)

SEQ ID NO: 6068 - protein, 491 aa, Bartonella henselae; identical to SEQ ID NO: 2792

SEQ ID NO: 6069 - DNA, 2266 bp, Toxoplasma gondii; identical to SEQ ID NO: 2793
  CDS (169)..(1851)

SEQ ID NO: 6070 - protein, 560 aa, Toxoplasma gondii; identical to SEQ ID NO: 2794

SEQ ID NO: 6071 - DNA, 1923 bp, Xanthomonas campestris; identical to SEQ ID NO: 2795
  CDS (1)..(1923)

SEQ ID NO: 6072 - protein, 640 aa, Xanthomonas campestris; identical to SEQ ID NO: 2796

SEQ ID NO: 6073 - DNA, 1431 bp, Xanthomonas campestris; identical to SEQ ID NO: 2797
  CDS (1)..(1431)

SEQ ID NO: 6074 - protein, 476 aa, Xanthomonas campestris; identical to SEQ ID NO: 2798

SEQ ID NO: 6075 - DNA, 1839 bp, Xanthomonas axonopodis; identical to SEQ ID NO: 2799
  CDS (1)..(1839)

SEQ ID NO: 6076 - protein, 612 aa, Xanthomonas axonopodis; identical to SEQ ID NO: 2800

SEQ ID NO: 6077 - DNA, 1431 bp, Xanthomonas axonopodis; identical to SEQ ID NO: 2801
  CDS (1)..(1431)

SEQ ID NO: 6078 - protein, 476 aa, Xanthomonas axonopodis; identical to SEQ ID NO: 2802

SEQ ID NO: 6079 - DNA, 1458 bp, Thermoanaerobacter tengcongensis; identical to SEQ ID NO: 2803
  CDS (1)..(1458)

SEQ ID NO: 6080 - protein, 485 aa, Thermoanaerobacter tengcongensis; identical to SEQ ID NO: 2804

SEQ ID NO: 6081 - DNA, 1762 bp, Oryza sativa; identical to SEQ ID NO: 2805
  CDS (41)..(1558)

SEQ ID NO: 6082 - protein, 505 aa, Oryza sativa; identical to SEQ ID NO: 2806

SEQ ID NO: 6083 - DNA, 1305 bp, Encephalitozoon cuniculi; identical to SEQ ID NO: 2807
  CDS (1)..(1305)

SEQ ID NO: 6084 - protein, 434 aa, Encephalitozoon cuniculi; identical to SEQ ID NO: 2808

SEQ ID NO: 6085 - DNA, 2125 bp, Drosophila melanogaster; identical to SEQ ID NO: 2809
  CDS (158)..(1738)

SEQ ID NO: 6086 - protein, 526 aa, Drosophila melanogaster; identical to SEQ ID NO: 2810

SEQ ID NO: 6087 - DNA, 1470 bp, Ralstonia solanacearum; identical to SEQ ID NO: 2811
  CDS (1)..(1470)

SEQ ID NO: 6088 - protein, 489 aa, Ralstonia solanacearum; identical to SEQ ID NO: 2812

SEQ ID NO: 6089 - DNA, 1521 bp, Enterococcus mundtii; identical to SEQ ID NO: 2813
  CDS (1)..(1521)

SEQ ID NO: 6090 - protein, 506 aa, Enterococcus mundtii; identical to SEQ ID NO: 2814

SEQ ID NO: 6091 - DNA, 2230 bp, Homo sapiens; identical to SEQ ID NO: 2815
  CDS (54)..(1601)

SEQ ID NO: 6092 - protein, 515 aa, Homo sapiens [sequence omitted]

SEQ ID NO: 6093 - DNA, 1470 bp, Rhizobium loti; identical to SEQ ID NO: 2817
  CDS (1)..(1470)

SEQ ID NO: 6094 - protein, 489 aa, Rhizobium loti; identical to SEQ ID NO: 2818

SEQ ID NO: 6095 - DNA, 1428 bp, Rhizobium loti; identical to SEQ ID NO: 2819
  CDS (1)..(1428)

SEQ ID NO: 6096 - protein, 475 aa, Rhizobium loti; identical to SEQ ID NO: 2820

SEQ ID NO: 6097 - DNA, 3584 bp, Plasmodium berghei; identical to SEQ ID NO: 2821
  CDS (370)..(3222)

SEQ ID NO: 6098 - protein, 950 aa, Plasmodium berghei; identical to SEQ ID NO: 2822

SEQ ID NO: 6099 - DNA, 1491 bp, Pasteurella multocida; identical to SEQ ID NO: 2823
  CDS (1)..(1491)

SEQ ID NO: 6100 - protein, 496 aa, Pasteurella multocida; identical to SEQ ID NO: 2824

SEQ ID NO: 6101 - DNA, 1470 bp, Pseudomonas putida; identical to SEQ ID NO: 2825
  CDS (1)..(1470)

SEQ ID NO: 6102 - protein, 489 aa, Pseudomonas putida; identical to SEQ ID NO: 2826

SEQ ID NO: 6103 - DNA, 1566 bp, Trypanosoma brucei; identical to SEQ ID NO: 2827
  CDS (1)..(1566)

SEQ ID NO: 6104 - protein, 521 aa, Trypanosoma brucei; identical to SEQ ID NO: 2828

SEQ ID NO: 6105 - DNA, 1904 bp, Triticum aestivum; identical to SEQ ID NO: 2829
  CDS (153)..(1682)

SEQ ID NO: 6106 - protein, 509 aa, Triticum aestivum; identical to SEQ ID NO: 2830

SEQ ID NO: 6107 - DNA, 2098 bp, Solanum tuberosum; identical to SEQ ID NO: 2831
  CDS (27)..(1775)

SEQ ID NO: 6108 - protein, 582 aa, Solanum tuberosum; identical to SEQ ID NO: 2832

SEQ ID NO: 6109 - DNA, 1924 bp, Dunaliella bioculata; identical to SEQ ID NO: 2833
  CDS (68)..(1840)

SEQ ID NO: 6110 - protein, 590 aa, Dunaliella bioculata; identical to SEQ ID NO: 2834

SEQ ID NO: 6111 - DNA, 1976 bp, Cyanidium caldarium; identical to SEQ ID NO: 2835
  CDS (46)..(1848)

SEQ ID NO: 6112 - protein, 600 aa, Cyanidium caldarium; identical to SEQ ID NO: 2836

SEQ ID NO: 6113 - DNA, 2106 bp, Drosophila melanogaster; identical to SEQ ID NO: 2837
  CDS (28)..(1746)

SEQ ID NO: 6114 - protein, 572 aa, Drosophila melanogaster; identical to SEQ ID NO: 2838

SEQ ID NO: 6115 - DNA, 1777 bp, Mesembryanthemum crystallinum; identical to SEQ ID NO: 2839
  CDS (39)..(1589)

SEQ ID NO: 6116 - protein, 516 aa, Mesembryanthemum crystallinum; identical to SEQ ID NO: 2840

SEQ ID NO: 6117 - DNA, 1542 bp, Mus musculus; identical to SEQ ID NO: 2841
  CDS (1)..(1542)

SEQ ID NO: 6118 - protein, 513 aa, Mus musculus; identical to SEQ ID NO: 2842

SEQ ID NO: 6119 - DNA, 1485 bp, Actinobacillus actinomycetemcomitans; identical to SEQ ID NO: 2843
  CDS (1)..(1485)

SEQ ID NO: 6120 - protein, 494 aa, Actinobacillus actinomycetemcomitans; identical to SEQ ID NO: 2844

SEQ ID NO: 6121 - DNA, 1473 bp, Buchnera aphidicola; identical to SEQ ID NO: 2845
  CDS (1)..(1473)

SEQ ID NO: 6122 - protein, 490 aa, Buchnera aphidicola; identical to SEQ ID NO: 2846

SEQ ID NO: 6123 - DNA, 1473 bp, Buchnera aphidicola; identical to SEQ ID NO: 2847
  CDS (1)..(1473)

SEQ ID NO: 6124 - protein, 490 aa, Buchnera aphidicola; identical to SEQ ID NO: 2848

SEQ ID NO: 6125 - DNA, 2049 bp, Ceratitis capitata; identical to SEQ ID NO: 2849
  CDS (60)..(1640)

SEQ ID NO: 6126 - protein, 526 aa, Ceratitis capitata; identical to SEQ ID NO: 2850

SEQ ID NO: 6127 - DNA, 1524 bp, Chlamydia muridarum; identical to SEQ ID NO: 2851
  CDS (1)..(1524)

SEQ ID NO: 6128 - protein, 507 aa, Chlamydia muridarum; identical to SEQ ID NO: 2852

SEQ ID NO: 6129 - DNA, 2062 bp, Drosophila melanogaster; identical to SEQ ID NO: 2853
  CDS (303)..(1877)

SEQ ID NO: 6130 - protein, 524 aa, Drosophila melanogaster; identical to SEQ ID NO: 2854

SEQ ID NO: 6131 - DNA, 1536 bp, Emericella nidulans; identical to SEQ ID NO: 2855
  CDS (1)..(1536)

SEQ ID NO: 6132 - protein, 511 aa, Emericella nidulans; identical to SEQ ID NO: 2856

SEQ ID NO: 6133 - DNA, 1957 bp, Leuconostoc mesenteroides; identical to SEQ ID NO: 2857
  CDS (206)..(1666)

SEQ ID NO: 6134 - protein, 486 aa, Leuconostoc mesenteroides; identical to SEQ ID NO: 2858

SEQ ID NO: 6135 - DNA, 2055 bp, Macropus robustus; identical to SEQ ID NO: 2859
  CDS (94)..(1641)

SEQ ID NO: 6136 - protein, 515 aa, Macropus robustus; identical to SEQ ID NO: 2860

SEQ ID NO: 6137 - DNA, 1530 bp, Nostoc punctiforme; identical to SEQ ID NO: 2861
  CDS (1)..(1530)

SEQ ID NO: 6138 - protein, 509 aa, Nostoc punctiforme; identical to SEQ ID NO: 2862

SEQ ID NO: 6139 - DNA, 1476 bp, Rhizobium meliloti; identical to SEQ ID NO: 2863
  CDS (1)..(1476)

SEQ ID NO: 6140 - protein, 491 aa, Rhizobium meliloti; identical to SEQ ID NO: 2864

SEQ ID NO: 6141 - DNA, 2853 bp, Homo sapiens; identical to SEQ ID NO: 2865
  CDS (273)..(2648)

SEQ ID NO: 6142 - protein, 791 aa, Homo sapiens; identical to SEQ ID NO: 2866

SEQ ID NO: 6143 - DNA, 1970 bp, Arabidopsis thaliana; identical to SEQ ID NO: 2867
  CDS (60)..(1790)

SEQ ID NO: 6144 - protein, 576 aa, Arabidopsis thaliana; identical to SEQ ID NO: 2868

SEQ ID NO: 6145 - DNA, 2112 bp, Arabidopsis thaliana; identical to SEQ ID NO: 2869
  CDS (142)..(1932)

SEQ ID NO: 6146 - protein, 596 aa, Arabidopsis thaliana; identical to SEQ ID NO: 2870

SEQ ID NO: 6147 - DNA, 2161 bp, Arabidopsis thaliana; identical to SEQ ID NO: 2871
  CDS (90)..(1967)

SEQ ID NO: 6148 - protein, 625 aa, Arabidopsis thaliana; identical to SEQ ID NO: 2872

SEQ ID NO: 6149 - DNA, 1936 bp, Arabidopsis thaliana; identical to SEQ ID NO: 2873
  CDS (136)..(1686)

SEQ ID NO: 6150 - protein, 516 aa, Arabidopsis thaliana; identical to SEQ ID NO: 2874

SEQ ID NO: 6151 - DNA, 1959 bp, Arabidopsis thaliana; identical to SEQ ID NO: 2875
  CDS (194)..(1741)

SEQ ID NO: 6152 - protein, 515 aa, Arabidopsis thaliana [sequence omitted]

SEQ ID NO: 6153 - DNA, 1503 bp, Xenopus laevis; identical to SEQ ID NO: 2877
  CDS (1)..(1503)

SEQ ID NO: 6154 - protein, 500 aa, Xenopus laevis; identical to SEQ ID NO: 2878

SEQ ID NO: 6155 - DNA, 2004 bp, Arabidopsis thaliana; identical to SEQ ID NO: 2879
  CDS (51)..(1850)

SEQ ID NO: 6156 - protein, 599 aa, Arabidopsis thaliana; identical to SEQ ID NO: 2880

SEQ ID NO: 6157 - DNA, 23 bp, Artificial sequence
  Primer sequence
atgagtgaaggccccgtcaaatt

SEQ ID NO: 6158 - DNA, 25 bp, Artificial sequence
  Primer sequence
ctaattatccttcgtatcttctggc

SEQ ID NO: 6159 - protein, 65 aa, Artificial sequence
  Consensus
  Variant (1)..(1): Xaa in position 1 is Val, Ile, Leu or Phe
  Variant (3)..(3): Xaa in position 3 is any amino acid
  Variant (4)..(4): Xaa in position 4 is Gly, Ala or Leu
  Variant (5)..(5): Xaa in position 5 is any amino acid
  Variant (7)..(7): Xaa in position 7 is Ser or Thr
  Variant (8)..(8): Xaa in position 8 is any amino acid
  Variant (9)..(9): Xaa in position 9 is Asp, Phe or Tyr
  Variant (10)..(10): Xaa in position 10 is Ile, Val, Leu, Cys or Ala
  Variant (11)..(11): Xaa in position 11 is any amino acid
  Variant (12)..(12): Xaa in position 12 is Asp, Asn or Glu
  Variant (13)..(13): Xaa in position 13 is Thr, Leu, Asn, Ile or Ser
  Variant (14)..(14): Xaa in position 14 is Ala, Ser, Gly, Val, Thr or Cys
  Variant (15)..(15): Xaa in position 15 is any or no amino acid
  Variant (16)..(41): Xaa in position 16 to 41 is any amino acid
  Variant (42)..(42): Xaa in position 42 is Ala, Ser, Val or Thr
  Variant (43)..(43): Xaa in position 43 is any or no amino acid
  Variant (44)..(51): Xaa in position 44 to 51 is any amino acid
  Variant (52)..(52): Xaa in position 52 is Gly, Ser or Ala
  Variant (53)..(53): Xaa in position 53 is Arg, Trp, Phe, Lys or Leu
  Variant (54)..(54): Xaa in position 54 is Thr or Ser
  Variant (55)..(55): Xaa in position 55 is His, Trp or Leu
  Variant (56)..(56): Xaa in position 56 is any amino acid
  Variant (57)..(57): Xaa in position 57 is Gln, Val, Ile or Met
  Variant (58)..(58): Xaa in position 58 is any amino acid
  Variant (59)..(59): Xaa in position 59 is Ala or Gly
  Variant (60)..(60): Xaa in position 60 is any amino acid
  Variant (61)..(61): Xaa in position 61 is Pro, Leu or Ala
  Variant (62)..(62): Xaa in position 62 is Thr, Ile, Ser, Val or Met
  Variant (63)..(63): Xaa in position 63 is Thr, Ser or Arg
  Variant (64)..(64): Xaa in position 64 is any amino acid
XHXXXTXXXXXXXXXXXXXXXXXXXXXXXXXXXXXXXXXXXXXXXXXXXXXXXXXXXXXXXXXXG

SEQ ID NO: 6160 - protein, 15 aa, Artificial sequence
  Consensus
  Variant (1)..(1): Xaa in position 1 is Gly or Ala
  Variant (4)..(4): Xaa in position 4 is Ala, Thr, Ser or Val
  Variant (6)..(6): Xaa in position 6 is Pro or Ala
  Variant (7)..(7): Xaa in position 7 is His, Tyr, Gln or Ser
  Variant (9)..(9): Xaa in position 9 is any amino acid
  Variant (11)..(11): Xaa in position 11 is Pro, Thr or Ala
  Variant (12)..(14): Xaa in position 12 to 14 is any amino acid
  Variant (15)..(15): Xaa in position 15 is Glu or Ala
XSSXMXXKXNXXXXX

SEQ ID NO: 6161 - protein, 396 aa, Artificial sequence
  Consensus
  Variant (1)..(396): Xaa in all positions is any amino acid
RYXXXXXXXXXXXXXXXXXXXXXXXXXXXEXXXXXXXXXXXXXXXXXXXXXXXXXXXXXXXXXXXXXXXXXXXXXXXXXXXXXXXXXXEXXXXXXXXXXXHDXXAXXXXXXXXXXXXXXXXXXXXXXXXXXXHXXXTSXDXXXXXXXXXXXXXXXXXXXXXXXXXXXXXXXXAXXXXXXXXXXRXHXXXAXPXTXGXXXAXXXXXXXXXXXXXXXXXXXXXXXXXXXGXXGXXXXXXXXXXXXXXXXXXXXXXXXXXXXXXXXXXXXXXXXXXXXXXXXXXXXXXXXXXXXXXXXXXXXXRXXXXXXXXXXXXXXXXXXXXGSSXMPHKXNPXXXEXXXXXXXXXXXXXXXXXXXXXXXXXXXXXXXSXXXXXXXXXXXXXXXXXXXXXXXXXXXL

SEQ ID NO: 6162 - protein, 55 aa, Artificial sequence
  Consensus
  Variant (1)..(1): Xaa in position 1 is Ser, Ala, Thr, Pro or Val
  Variant (2)..(2): Xaa in position 2 is Pro, Ala, Asn, Ser or Gly
  Variant (3)..(3): Xaa in position 3 is Tyr, Phe, His or Arg
  Variant (4)..(12): Xaa in position 4 to 12 is any or no amino acid
  Variant (13)..(22): Xaa in position 13 to 22 is any amino acid
  Variant (23)..(23): Xaa in position 23 is Leu, Ile or Val
  Variant (24)..(24): Xaa in position 24 is any amino acid
  Variant (25)..(25): Xaa in position 25 is Gly, Ser, Ala or Cys
  Variant (26)..(26): Xaa in position 26 is any amino acid
  Variant (30)..(37): Xaa in position 30 to 37 is any or no amino acid
  Variant (38)..(46): Xaa in position 38 to 46 is any amino acid
  Variant (47)..(47): Xaa in position 47 is Val, Ile, Ala, Leu or Phe
  Variant (48)..(50): Xaa in position 48 to 50 is any amino acid
  Variant (52)..(52): Xaa in position 52 is Ile, Leu or Met
  Variant (53)..(53): Xaa in position 53 is Ala, Lys or Ser
  Variant (55)..(55): Xaa in position 55 is Thr or Ser
XXXXXXXXXXXXXXXXXXXXXXXXXXSPEXXXXXXXXXXXXXXXXXXXXXPXXGX

SEQ ID NO: 6163 - protein, 49 aa, Artificial sequence
  Consensus
  Variant (2)..(2): Xaa in position 2 is Glu, Asp, Gln or Asn
  Variant (3)..(3): Xaa in position 3 is any amino acid
  Variant (4)..(4): Xaa in position 4 is Ala or Ser
  Variant (6)..(6): Xaa in position 6 is His, Asn or Leu
  Variant (7)..(7): Xaa in position 7 is any amino acid
  Variant (8)..(8): Xaa in position 8 is Met or Val
  Variant (9)..(9): Xaa in position 9 is Leu, Ile, Cys or Ser
  Variant (10)..(10): Xaa in position 10 is Val, Ile, Leu, Thr or Ser
  Variant (12)..(12): Xaa in position 12 is Leu or Val
  Variant (13)..(13): Xaa in position 13 is any amino acid
  Variant (15)..(15): Xaa in position 15 is Asn, His or Glu
  Variant (16)..(16): Xaa in position 16 is Asp or Glu
  Variant (17)..(17): Xaa in position 17 is Leu, Ile, Val, Lys or Met
  Variant (18)..(20): Xaa in position 18 to 20 is any amino acid
  Variant (21)..(21): Xaa in position 21 is Cys, Ser or Ala
  Variant (22)..(23): Xaa in position 22 to 23 is any or no amino acid
  Variant (24)..(24): Xaa in position 24 is any amino acid
  Variant (25)..(25): Xaa in position 25 is Ser, Thr, Glu or Lys
  Variant (26)..(27): Xaa in position 26 to 27 is any amino acid
  Variant (28)..(28): Xaa in position 28 is Val, Ile, Leu, Thr or Ala
  Variant (29)..(33): Xaa in position 29 to 33 is any amino acid
  Variant (34)..(34): Xaa in position 34 is Val, Ile, Leu or Thr
  Variant (35)..(36): Xaa in position 35 to 36 is any amino acid
  Variant (37)..(37): Xaa in position 37 is Tyr, Phe or Arg
  Variant (38)..(39): Xaa in position 38 to 39 is any amino acid
  Variant (40)..(40): Xaa in position 40 is Val, Leu or Ile
  Variant (41)..(41): Xaa in position 41 is any amino acid
  Variant (42)..(42): Xaa in position 42 is His or Gln
  Variant (43)..(43): Xaa in position 43 is Leu, Ile, Met or Thr
  Variant (44)..(44): Xaa in position 44 is any amino acid
  Variant (45)..(45): Xaa in position 45 is Ser, Asp or Thr
  Variant (46)..(46): Xaa in position 46 is any amino acid
  Variant (47)..(47): Xaa in position 47 is Val or Ile
  Variant (48)..(48): Xaa in position 48 is any amino acid
  Variant (49)..(49): Xaa in position 49 is Gly or Ala
KXXXEXXXXXDXXRXXXXXXXXXXXXXXXXXXXXXXXXXXXXXXXXXXX

SEQ ID NO: 6164 - protein, 52 aa, Artificial sequence
  Consensus
  Variant (1)..(1): Xaa in position 1 is Gly or Val
  Variant (2)..(2): Xaa in position 2 is Thr or Ser
  Variant (3)..(3): Xaa in position 3 is Val, Leu, Ile, Met or Ala
  Variant (4)..(4): Xaa in position 4 is Thr or Ser
  Variant (6)..(6): Xaa in position 6 is Ala, Cys, Ser or Ile
  Variant (9)..(10): Xaa in position 9 to 10 is any amino acid
  Variant (11)..(11): Xaa in position 11 is Ala, Thr, Ser or Cys
  Variant (12)..(12): Xaa in position 12 is Met, Ile, Leu or Val
  Variant (13)..(13): Xaa in position 13 is any or no amino acid
  Variant (14)..(14): Xaa in position 14 is any amino acid
  Variant (15)..(15): Xaa in position 15 is Ile, Leu or Val
  Variant (16)..(17): Xaa in position 16 to 17 is any amino acid
  Variant (18)..(18): Xaa in position 18 is any or no amino acid
  Variant (19)..(19): Xaa in position 19 is Glu or Tyr
  Variant (20)..(22): Xaa in position 20 to 22 is any amino acid
  Variant (24)..(25): Xaa in position 24 to 25 is any amino acid
  Variant (26)..(26): Xaa in position 26 is Tyr, Phe or Trp
  Variant (27)..(27): Xaa in position 27 is Gly, Ala, Ser, Cys, Thr or Tyr
  Variant (29)..(30): Xaa in position 29 to 30 is any amino acid
  Variant (31)..(31): Xaa in position 31 is Gly, Ala, Leu, Phe or Ile
  Variant (32)..(37): Xaa in position 32 to 37 is any or no amino acid
  Variant (38)..(47): Xaa in position 38 to 47 is any amino acid
  Variant (48)..(48): Xaa in position 48 is Ile, Leu, Val or Met
  Variant (49)..(49): Xaa in position 49 is any amino acid
  Variant (50)..(50): Xaa in position 50 is Ile or Leu
  Variant (52)..(52): Xaa in position 52 is Thr, Ser, Met or Ala
XXXXGXPKXXXXXXXXXXXXXXRXXXXGXXXXXXXXXXXXXXXXXXXXXXRX

SEQ ID NO: 6165 - protein, 20 aa, Artificial sequence
  Consensus
  Variant (1)..(1): Xaa in position 1 is Gly or Ala
  Variant (2)..(2): Xaa in position 2 is Ala, Gly, Cys or Ser
  Variant (3)..(3): Xaa in position 3 is Gly, Ala or Thr
  Variant (4)..(4): Xaa in position 4 is Ile, Val or Leu
  Variant (5)..(5): Xaa in position 5 is Val, Thr, Leu or Ile
  Variant (6)..(7): Xaa in position 6 to 7 is any amino acid
  Variant (9)..(12): Xaa in position 9 to 12 is any amino acid
  Variant (14)..(15): Xaa in position 14 to 15 is any amino acid
  Variant (17)..(19): Xaa in position 17 to 19 is any amino acid
XXXXXXXSXXXXEXXEXXXK

SEQ ID NO: 6166 - protein, 58 aa, Artificial sequence
  Consensus
  Variant (1)..(1): Xaa in Position 1 is Ile, Val, Leu or Ala
  Variant (2)..(2): Xaa in Position 2 is Ile, Val or Leu
  Variant (3)..(3): Xaa in Position 3 is any amino acid
  Variant (4)..(4): Xaa in Position 4 is Ile, Val or Leu
  Variant (5)..(5): Xaa in Position 5 is any amino acid
  Variant (6)..(6): Xaa in Position 6 is Gly or Ala
  Variant (7)..(7): Xaa in Position 7 is any amino acid
  Variant (8)..(8): Xaa in Position 8 is Ser, Thr or Ala
  Variant (9)..(9): Xaa in Position 9 is Gly, Ala or Ser
  Variant (10)..(10): Xaa in Position 10 is Ser, Cys, Ala or Gly
  Variant (13)..(13): Xaa in Position 13 is Thr or Ser
  Variant (14)..(18): Xaa in Position 14 to 18 is any amino acid
  Variant (19)..(19): Xaa in Position 19 is Ile, Leu, Val or Met
  Variant (20)..(27): Xaa in Position 20 to 27 is any amino acid
  Variant (28)..(52): Xaa in Position 28 to 52 is no amino acid or any amino acid
  Variant (53)..(53): Xaa in Position 53 is Ile, Leu or Val
  Variant (54)..(55): Xaa in Position 54 to 55 is any amino acid
  Variant (57)..(57): Xaa in Position 57 is any amino acid
  Variant (58)..(58): Xaa in Position 58 is Tyr or Phe
XXXXXXXXXXGKXXXXXXXXXXXXXXXXXXXXXXXXXXXXXXXXXXXXXXXXXXXDXX

SEQ ID NO: 6167 - protein, 74 aa, Artificial sequence
  Consensus
  Variant (1)..(1): Xaa in Position 1 is Ala, Ser, Val, Glu or Cys
  Variant (2)..(10): Xaa in Position 2 to 10 is any amino acid
  Variant (11)..(11): Xaa in Position 11 is Leu, Ile, Val or Met
  Variant (12)..(13): Xaa in Position 12 to 13 is any amino acid
  Variant (14)..(14): Xaa in Position 14 is Leu or Ile
  Variant (15)..(19): Xaa in Position 15 to 19 is any amino acid
  Variant (20)..(20): Xaa in Position 20 is Val, Ile, Leu, Thr or Tyr
  Variant (21)..(22): Xaa in Position 21 to 22 is any amino acid
  Variant (24)..(24): Xaa in Position 24 is any amino acid
  Variant (26)..(34): Xaa in Position 26 to 34 is any amino acid
  Variant (35)..(46): Xaa in Position 35 to 46 is no amino acid or any amino acid
  Variant (47)..(47): Xaa in Position 47 is Val, Ile or Phe
  Variant (48)..(48): Xaa in Position 48 is Ile, Val, Leu or Phe
  Variant (49)..(49): Xaa in Position 49 is Ile, Val or Leu
  Variant (50)..(50): Xaa in Position 50 is any amino acid
  Variant (51)..(51): Xaa in Position 51 is Glu or Asp
  Variant (53)..(53): Xaa in Position 53 is Ile or Leu
  Variant (54)..(54): Xaa in Position 54 is Leu, His, Tyr, Phe or Met
  Variant (55)..(59): Xaa in Position 55 to 59 is any amino acid
  Variant (60)..(63): Xaa in Position 60 to 63 is no amino acid or any amino acid
  Variant (64)..(64): Xaa in Position 64 is Leu, Ile, Val or Met
  Variant (65)..(71): Xaa in Position 65 to 71 is any amino acid
  Variant (72)..(72): Xaa in Position 72 is Ile, Val or Leu
  Variant (73)..(73): Xaa in Position 73 is Phe, Tyr or Ser
  Variant (74)..(74): Xaa in Position 74 is Val, Met, Leu, Ile or Phe
XXXXXXXXXXXXXXXXXXXXXXPXYXXXXXXXXXXXXXXXXXXXXXXXXXXGXXXXXXXXXXXXXXXXXXXXXX

SEQ ID NO: 6168 - protein, 44 aa, Artificial sequence
  Consensus
  Variant (1)..(1): Xaa in Position 1 is Arg or Lys
  Variant (2)..(2): Xaa in Position 2 is Ile, Val, Leu or Met
  Variant (3)..(3): Xaa in Position 3 is any amino acid
  Variant (6)..(29): Xaa in Position 6 to 29 is any amino acid
  Variant (30)..(32): Xaa in Position 30 to 32 is no amino acid or any amino acid
  Variant (33)..(33): Xaa in Position 33 is Phe, Tyr, Trp or Asn
  Variant (34)..(34): Xaa in Position 34 is Ile, Val or Cys
  Variant (35)..(35): Xaa in Position 35 is any amino acid
  Variant (36)..(36): Xaa in Position 36 is Pro or Lys
  Variant (37)..(40): Xaa in Position 37 to 40 is any amino acid
  Variant (42)..(43): Xaa in Position 42 to 43 is any amino acid
  Variant (44)..(44): Xaa in Position 44 is Ile, Val, Leu, Met or Lys
XXXRDXXXXXXXXXXXXXXXXXXXXXXXXXXXXXXXXXXXAXXX

SEQ ID NO: 6169 - protein, 229 aa, Artificial sequence
  Consensus
  Variant (1)..(1): Xaa in Position 1 is Ile, Val or Met
  Variant (2)..(3): Xaa in Position 2 to 3 is any amino acid
  Variant (4)..(4): Xaa in Position 4 is Ile, Val or Leu
  Variant (5)..(5): Xaa in Position 5 is any amino acid
  Variant (6)..(6): Xaa in Position 6 is Ala, Gly or Ser
  Variant (7)..(7): Xaa in Position 7 is Arg or Tyr
  Variant (8)..(8): Xaa in Position 8 is any amino acid
  Variant (9)..(9): Xaa in Position 9 is Ile or Val
  Variant (10)..(10): Xaa in Position 10 is any amino acid
  Variant (14)..(14): Xaa in Position 14 is Gly or Ala
  Variant (15)..(15): Xaa in Position 15 is any amino acid
  Variant (18)..(18): Xaa in Position 18 is Val, Ile or Leu
  Variant (19)..(19): Xaa in Position 19 is Glu, Gln or Ala
  Variant (20)..(20): Xaa in Position 20 is Val, Ala, Cys or Ser
  Variant (21)..(21): Xaa in Position 21 is Asp, Glu, Lys or Val
  Variant (22)..(22): Xaa in Position 22 is Val, Leu or Ile
  Variant (23)..(29): Xaa in Position 23 to 29 is any amino acid
  Variant (30)..(30): Xaa in Position 30 is no amino acid or any amino acid
  Variant (31)..(31): Xaa in Position 31 is no amino acid or any amino acid
  Variant (32)..(32): Xaa in Position 32 is Ala, Gly or Ser
  Variant (33)..(33): Xaa in Position 33 is any amino acid
  Variant (34)..(34): Xaa in Position 34 is Val, Ala or Ser
  Variant (38)..(38): Xaa in Position 38 is Ala or Asp
  Variant (42)..(43): Xaa in Position 42 to 43 is any amino acid
  Variant (46)..(46): Xaa in Position 46 is any amino acid
  Variant (48)..(48): Xaa in Position 48 is Leu, Met or Val
  Variant (51)..(54): Xaa in Position 51 to 54 is any amino acid
  Variant (55)..(59): Xaa in Position 55 to 59 is no amino acid or any amino acid
  Variant (60)..(60): Xaa in Position 60 is Tyr, Phe, Trp, His or Leu
  Variant (61)..(61): Xaa in Position 61 is no amino acid or any amino acid
  Variant (63)..(63): Xaa in Position 63 is Lys or Leu
  Variant (64)..(64): Xaa in Position 64 is Gly or Ser
  Variant (65)..(65): Xaa in Position 65 is Val or Thr
  Variant (66)..(67): Xaa in Position 66 to 67 is any amino acid
  Variant (68)..(68): Xaa in Position 68 is Ala or Ser
  Variant (69)..(69): Xaa in Position 69 is Val, Ile, Cys or Leu
  Variant (70)..(71): Xaa in Position 70 to 71 is any amino acid
  Variant (72)..(72): Xaa in Position 72 is Val, Ile or Leu
  Variant (73)..(75): Xaa in Position 73 to 75 is any amino acid
  Variant (76)..(76): Xaa in Position 76 is Ile, Leu or Val
  Variant (77)..(79): Xaa in Position 77 to 79 is any amino acid
  Variant (80)..(80): Xaa in Position 80 is Leu, Ile, Val or Phe
  Variant (81)..(87): Xaa in Position 81 to 87 is any amino acid
  Variant (88)..(88): Xaa in Position 88 is no amino acid or any amino acid
  Variant (89)..(89): Xaa in Position 89 is no amino acid or any amino acid
  Variant (91)..(92): Xaa in Position 91 to 92 is any amino acid
  Variant (93)..(93): Xaa in Position 93 is Ile, Val or Leu
  Variant (95)..(96): Xaa in Position 95 to 96 is any amino acid
  Variant (97)..(97): Xaa in Position 97 is Met, Leu or Ile
  Variant (98)..(99): Xaa in Position 98 to 99 is any amino acid
  Variant (100)..(100): Xaa in Position 100 is no amino acid or any amino acid
  Variant (101)..(101): Xaa in Position 101 is no amino acid or any amino acid
  Variant (102)..(102): Xaa in Position 102 is Leu, Val, Ile, Met or Ala
  Variant (104)..(104): Xaa in Position 104 is Gly, Glu or Ala
  Variant (105)..(105): Xaa in Position 105 is Thr or Ser
  Variant (106)..(106): Xaa in Position 106 is any amino acid
  Variant (107)..(107): Xaa in Position 107 is Asn, Thr, Phe or Asp
  Variant (108)..(108): Xaa in Position 108 is Lys, Glu, Tyr or Phe
  Variant (109)..(110): Xaa in Position 109 to 110 is any amino acid
  Variant (111)..(115): Xaa in Position 111 to 115 is no amino acid or any amino acid
  Variant (116)..(116): Xaa in Position 116 is Leu, Phe or Ile
  Variant (118)..(118): Xaa in Position 118 is Ala, Gly or Ser
  Variant (120)..(120): Xaa in Position 120 is Ala, Ser or Gly
  Variant (121)..(121): Xaa in Position 121 is Ile, Val, Met, Leu or Thr
  Variant (123)..(123): Xaa in Position 123 is Gly, Ala or Ser
  Variant (126)..(126): Xaa in Position 126 is Leu, Met or Ile
  Variant (128)..(129): Xaa in Position 128 to 129 is any amino acid
  Variant (130)..(130): Xaa in Position 130 is Lys, Arg, His or Tyr
  Variant (131)..(131): Xaa in Position 131 is Ala or Ser
  Variant (132)..(132): Xaa in Position 132 is Ala, Gly, Ser, Asn or Val
  Variant (133)..(133): Xaa in Position 133 is Ala or Ser
  Variant (134)..(137): Xaa in Position 134 to 137 is any amino acid
  Variant (138)..(138): Xaa in Position 138 is Leu, Ile, Met, Val, Gln or Arg
  Variant (139)..(139): Xaa in Position 139 is Pro or Ser
  Variant (141)..(141): Xaa in Position 141 is Tyr, Phe or Trp
  Variant (142)..(142): Xaa in Position 142 is any amino acid
  Variant (143)..(143): Xaa in Position 143 is Tyr or His
  Variant (144)..(144): Xaa in Position 144 is Ile, Leu, Val or Phe
  Variant (145)..(145): Xaa in Position 145 is Gly, Ala or Ser
  Variant (146)..(151): Xaa in Position 146 to 151 is any amino acid
  Variant (152)..(157): Xaa in Position 152 to 157 is no amino acid or any amino acid
  Variant (158)..(158): Xaa in Position 158 is Leu, Met or Ile
  Variant (160)..(160): Xaa in Position 160 is any amino acid
  Variant (162)..(163): Xaa in Position 162 to 163 is any amino acid
  Variant (165)..(165): Xaa in Position 165 is Val, Ile or Leu
  Variant (166)..(166): Xaa in Position 166 is Ile, Leu, Val or Met
  Variant (170)..(170): Xaa in Position 170 is any amino acid
  Variant (172)..(172): Xaa in Position 172 is Ala or Ser
  Variant (173)..(175): Xaa in Position 173 to 175 is any amino acid
  Variant (176)..(176): Xaa in Position 176 is no amino acid or any amino acid
  Variant (177)..(177): Xaa in Position 177 is Leu, Val or Ile
  Variant (178)..(179): Xaa in Position 178 to 179 is any amino acid
  Variant (180)..(180): Xaa in Position 180 is Gln or Ala
  Variant (182)..(182): Xaa in Position 182 is Phe or Tyr
  Variant (183)..(183): Xaa in Position 183 is Met or Leu
  Variant (184)..(184): Xaa in Position 184 is Ile, Val or Leu
  Variant (185)..(185): Xaa in Position 185 is any amino acid
  Variant (187)..(193): Xaa in Position 187 to 193 is any amino acid
  Variant (194)..(194): Xaa in Position 194 is Glu or Asp
  Variant (195)..(195): Xaa in Position 195 is Ala, Gly or Ser
  Variant (196)..(196): Xaa in Position 196 is Leu, Met, Val, Ile or Phe
  Variant (197)..(197): Xaa in Position 197 is Arg, Lys, Gln or Glu
  Variant (198)..(200): Xaa in Position 198 to 200 is any amino acid
  Variant (201)..(201): Xaa in Position 201 is Glu, Asn or Asp
  Variant (202)..(202): Xaa in Position 202 is Val, Ile or Thr
  Variant (203)..(203): Xaa in Position 203 is Tyr or Phe
  Variant (204)..(205): Xaa in Position 204 to 205 is any amino acid
  Variant (207)..(218): Xaa in Position 207 to 218 is any amino acid
  Variant (219)..(219): Xaa in Position 219 is no amino acid or any amino acid
  Variant (220)..(220): Xaa in Position 220 is no amino acid or any amino acid
  Variant (221)..(221): Xaa in Position 221 is Val, Leu or Lys
  Variant (223)..(223): Xaa in Position 223 is Asp or Tyr
  Variant (224)..(224): Xaa in Position 224 is Glu or Asp
  Variant (227)..(227): Xaa in Position 227 is any amino acid
XXXXXXXXXXDSRXXPTXXXXXXXXXXXXXXXXXPSGXSTGXXEAXEXRDXXXXXXXXXXXGXXXXXXXXXXXXXXXXXXXXXXXXXXXQXXXDXXXXXXXXDXXXXXXXXXXXXXGXNXXLXVSXAXXXXXXXXXXXXLXXXXXXXXXXXXXXXXXXPXPXXNXXNGGXHXXXXXXXXXEXXXXPXXXXXXXXXXXXXXXXXXXLXXXXXXXXXXXXXXXGXXGGXAP

SEQ ID NO: 6170 - protein, 134 aa, Artificial sequence
  Consensus
  Variant (1)..(1): Xaa in Position 1 is Tyr, Phe or His
  Variant (3)..(3): Xaa in Position 3 is no amino acid or any amino acid
  Variant (4)..(4): Xaa in Position 4 is Ile, Val or Leu
  Variant (5)..(5): Xaa in Position 5 is any amino acid
  Variant (6)..(6): Xaa in Position 6 is Ser or Thr
  Variant (7)..(7): Xaa in Position 7 is Ile, Leu or Val
  Variant (10)..(12): Xaa in Position 10 to 12 is any amino acid
  Variant (13)..(13): Xaa in Position 13 is Glu or Gln
  Variant (14)..(14): Xaa in Position 14 is any amino acid
  Variant (16)..(16): Xaa in Position 16 is Trp, Phe or Tyr
  Variant (17)..(18): Xaa in Position 17 to 18 is any amino acid
  Variant (19)..(19): Xaa in Position 19 is Trp, Phe, Tyr, Met or His
  Variant (20)..(28): Xaa in Position 20 to 28 is any amino acid
  Variant (29)..(29): Xaa in Position 29 is no amino acid or any amino acid
  Variant (30)..(30): Xaa in Position 30 is no amino acid or any amino acid
  Variant (31)..(31): Xaa in Position 31 is Gln or Glu
  Variant (32)..(32): Xaa in Position 32 is Leu, Ile or Val
  Variant (33)..(33): Xaa in Position 33 is Val or Ile
  Variant (34)..(34): Xaa in Position 34 is Gly or Ala
  Variant (37)..(37): Xaa in Position 37 is Leu, Met, Phe or Ile
  Variant (38)..(38): Xaa in Position 38 is any amino acid
  Variant (39)..(39): Xaa in Position 39 is Val, Cys or Thr
  Variant (42)..(44): Xaa in Position 42 to 44 is any amino acid
  Variant (45)..(45): Xaa in Position 45 is Leu, Ile, Val or Phe
  Variant (46)..(47): Xaa in Position 46 to 47 is any amino acid
  Variant (48)..(48): Xaa in Position 48 is Gly or Ala
  Variant (49)..(49): Xaa in Position 49 is Ile, Val, Leu or Ala
  Variant (50)..(54): Xaa in Position 50 to 54 is any amino acid
  Variant (55)..(55): Xaa in Position 55 is Asn or Asp
  Variant (56)..(56): Xaa in Position 56 is any amino acid
  Variant (57)..(57): Xaa in Position 57 is Ile, Leu or Val
  Variant (59)..(59): Xaa in Position 59 is Ile, Leu or Val
  Variant (61)..(61): Xaa in Position 61 is any amino acid
  Variant (65)..(65): Xaa in Position 65 is Gly or Ala
  Variant (66)..(66): Xaa in Position 66 is Thr or Ser
  Variant (67)..(67): Xaa in Position 67 is Leu, Val, Ile or Met
  Variant (68)..(68): Xaa in Position 68 is Thr or Ser
  Variant (70)..(70): Xaa in Position 70 is Thr, Ser or Ala
  Variant (71)..(76): Xaa in Position 71 to 76 is any amino acid
  Variant (77)..(77): Xaa in Position 77 is Ala, Ser or Thr
  Variant (78)..(81): Xaa in Position 78 to 81 is any amino acid
  Variant (82)..(82): Xaa in Position 82 is Tyr, Trp or Phe
  Variant (83)..(83): Xaa in Position 83 is any amino acid
  Variant (84)..(84): Xaa in Position 84 is no amino acid or any amino acid
  Variant (85)..(85): Xaa in Position 85 is Val, Met, Ile or Phe
  Variant (86)..(86): Xaa in Position 86 is any amino acid
  Variant (87)..(87): Xaa in Position 87 is Ser or Ala
  Variant (91)..(91): Xaa in Position 91 is Gly or Ala
  Variant (93)..(93): Xaa in Position 93 is Thr or Ser
  Variant (94)..(94): Xaa in Position 94 is Glu, Val, Gly, Ala or Asp
  Variant (96)..(97): Xaa in Position 96 to 97 is any amino acid
  Variant (99)..(99): Xaa in Position 99 is Ala or Ser
  Variant (100)..(100): Xaa in Position 100 is Asp, His or Glu
  Variant (101)..(101): Xaa in Position 101 is Leu, Ile or Phe
  Variant (102)..(102): Xaa in Position 102 is Ala, Val, Ser or Thr
  Variant (104)..(104): Xaa in Position 104 is Ala or Gly
  Variant (105)..(108): Xaa in Position 105 to 108 is any amino acid
  Variant (109)..(109): Xaa in Position 109 is Gln, Glu, Phe, His or Met
  Variant (110)..(110): Xaa in Position 110 is Ile or Leu
  Variant (112)..(112): Xaa in Position 112 is Thr or Ser
  Variant (114)..(114): Xaa in Position 114 is Ser or Ala
  Variant (115)..(116): Xaa in Position 115 to 116 is any amino acid
  Variant (118)..(118): Xaa in Position 118 is Ser, Thr or Gly
  Variant (119)..(119): Xaa in Position 119 is Glu or Asp
  Variant (121)..(121): Xaa in Position 121 is any amino acid
  Variant (122)..(122): Xaa in Position 122 is Ala, Glu, Ser or Cys
  Variant (124)..(124): Xaa in Position 124 is Tyr, Leu, Phe or Trp
  Variant (126)..(126): Xaa in Position 126 is Gln, Arg or Glu
  Variant (127)..(127): Xaa in Position 127 is Leu, Ile or Phe
  Variant (128)..(128): Xaa in Position 128 is Leu, Ile or Met
  Variant (129)..(129): Xaa in Position 129 is any amino acid
  Variant (132)..(133): Xaa in Position 132 to 133 is any amino acid
  Variant (134)..(134): Xaa in Position 134 is Leu, Ile or Met
XPXXXXXEDXXXXXDXXXXXXXXXXXXXXXXXXXDDXXXTNXXXXXXXXXXXXXXXXLXKXNQIXXXXEXXXXXXXXXXXXXXXXXXHRSXEXXDXXIXXXXVXXXXXXXKXGXXXRXXRXXKXNXXXXIEXXX

SEQ ID NO: 6171 - protein, 598 aa, Artificial sequence
  Consensus
  Variant (1)..(598): Xaa in all Positions is any amino acid
XXXXXXXXXXXXXXXXXXXXXXXXXXXXXXXXXXXXXXXXXXXXXXXXXXXXXXXXXXXXXXXXXXXXXIXXXXARXXXDSRGNPTVEXXXXXXXGXXXXAXVPSGASTGXXEAXELRDXXXXXXXXXXXGKGVXXAVXXVNXXIXXXXXXXXXXXXXQXXXDXXXXXXXLDGTXNKXXXXXXXLGANAILXVSXAXXXAXAXXXXXPLYXXXXXXXXXXXXXXXXXPXPXXNXXNGGXHAXXXXXXXQEFMIXPXGAXXXXEAXXXGXEXXHXLKXXXXXXXGXXXXXVGDEGGFAPXXXXXXXXXXXXXXXXXXXXXXXXXXXXXAIXXAGYXXXXXXXXXXXXXXXXXXXXDXAXSEFXXXXXXXXXXYXXXXXXXXXXXXXXXXXXXXXXXXXXXXXXXXXXXXXXXXXYPXXXXIXSIEDXXXXXDWXXXXXXTXXXXXXXQXVGDDLXVTNXXXXXXXIXXXXXNXXLXKXNQIGXXTEXXXAXXXXXXXXXXXXXSHRSGETEDXXIADXXVXXXXGQIKTGXXXRXXRXAKYNQLXRIEXXLGXXXXXXXXXXXXXXXXXGXXXXXXXXXXXXXXXXXXXXXXXXXXXXX

SEQ ID NO: 6172 - protein, 48 aa, Artificial sequence
  Consensus
  Variant (1)..(1): Xaa in position 1 is Val, Ile or Ala
  Variant (2)..(2): Xaa in position 2 is Ala or Gly
  Variant (3)..(3): Xaa in position 3 is Ile, Val or Leu
  Variant (4)..(4): Xaa in position 4 is Ile, Val or Phe
  Variant (6)..(6): Xaa in position 6 is Ser, Ala, Gly or Cys
  Variant (9)..(9): Xaa in position 9 is Ala, Ser or Gly
  Variant (10)..(10): Xaa in position 10 is Gly or Ser
  Variant (11)..(11): Xaa in position 11 is Leu, Ile or Met
  Variant (12)..(13): Xaa in position 12 to 13 is any amino acid
  Variant (14)..(14): Xaa in position 14 is Ala, Ser or Gly
  Variant (15)..(16): Xaa in position 15 to 16 is any amino acid
  Variant (17)..(17): Xaa in position 17 is Leu or Met
  Variant (18)..(20): Xaa in position 18 to 20 is any amino acid
  Variant (22)..(22): Xaa in position 22 is any or no amino acid
  Variant (23)..(26): Xaa in position 23 to 26 is any amino acid
  Variant (27)..(27): Xaa in position 27 is Val, Ile or Leu
  Variant (28)..(28): Xaa in position 28 is Phe, Tyr or His
  Variant (29)..(29): Xaa in position 29 is Glu or Asp
  Variant (30)..(30): Xaa in position 30 is Arg, Ala, Lys, Glu or Ser
  Variant (31)..(32): Xaa in position 31 to 32 is any or no amino acid
  Variant (33)..(36): Xaa in position 33 to 36 is any amino acid
  Variant (39)..(42): Xaa in position 39 to 42 is any amino acid
  Variant (43)..(43): Xaa in position 43 is Gly, Glu or Ile
  Variant (44)..(44): Xaa in position 44 is Ile or Val
  Variant (45)..(45): Xaa in position 45 is Pro or Ala
  Variant (46)..(46): Xaa in position 46 is any amino acid
  Variant (47)..(47): Xaa in position 47 is Phe, Tyr, Met or Val
  Variant (48)..(48): Xaa in position 48 is Lys or Arg
XXXXGXGPXXXXXXXXXXXXGXXXXXXXXXXXXXXXGGXXXXXXXXXX

SEQ ID NO: 6173 - protein, 19 aa, Artificial sequence
  Consensus
  Variant (1)..(1): Xaa in position 1 is Val, Ala, Thr, Leu or Ile
  Variant (2)..(2): Xaa in position 2 is Val, Ile, Ala or Leu
  Variant (3)..(3): Xaa in position 3 is Val or Ile
  Variant (4)..(4): Xaa in position 4 is Ile, Leu, Val or Phe
  Variant (6)..(6): Xaa in position 6 is Gly or Ala
  Variant (8)..(8): Xaa in position 8 is Asp, Asn, Phe or Met
  Variant (9)..(9): Xaa in position 9 is Thr or Val
  Variant (10)..(10): Xaa in position 10 is Ala or Gly
  Variant (11)..(11): Xaa in position 11 is any amino acid
  Variant (13)..(13): Xaa in position 13 is Cys, Ala, Val or Ser
  Variant (14)..(16): Xaa in position 14 to 16 is any amino acid
  Variant (17)..(17): Xaa in position 17 is Ala, Ser, Leu, Val or Met
  Variant (18)..(18): Xaa in position 18 is any amino acid
  Variant (19)..(19): Xaa in position 19 is Arg, Leu or Val
XXXXGXGXXXXDXXXXXXX

SEQ ID NO: 6174 - protein, 28 aa, Artificial sequence
  Consensus
  Variant (1)..(1): Xaa in position 1 is Val, Ile, Leu, Thr or Cys
  Variant (2)..(2): Xaa in position 2 is Phe, Tyr, Trp, Gly or Leu
  Variant (3)..(4): Xaa in position 3 to 4 is any amino acid
  Variant (5)..(5): Xaa in position 5 is Gly or Lys
  Variant (6)..(6): Xaa in position 6 is Asp or Arg
  Variant (7)..(9): Xaa in position 7 to 9 is any amino acid
  Variant (10)..(10): Xaa in position 10 is Gly or Cys
  Variant (11)..(18): Xaa in position 11 to 18 is any or no amino acid
  Variant (19)..(20): Xaa in position 19 to 20 is any amino acid
  Variant (21)..(21): Xaa in position 21 is Val, Ile, Ala, Thr or Leu
  Variant (22)..(22): Xaa in position 22 is Val, Ile or Leu
  Variant (23)..(23): Xaa in position 23 is any amino acid
  Variant (24)..(24): Xaa in position 24 is Ala, Gly, Cys or Ser
  Variant (25)..(25): Xaa in position 25 is Ile, Val, Met, Ala or Leu
  Variant (26)..(27): Xaa in position 26 to 27 is any amino acid
  Variant (28)..(28): Xaa in position 28 is Gly, Ile or Ala
XXXXXXXXXXXXXXXXXXXXXXXXXXXX

SEQ ID NO: 6175 - protein, 313 aa, Artificial sequence
  Consensus
  Variant (1)..(313): Xaa in all positions is any amino acid
CPXXXXIPXXXXXXXXXXXXXXXXXXXAXXXXXXXNXXPXXXGRXCPXXXXXXXXXXXXXXXXXXXXXXXXXXXIXXXXXXXXXXXXXXXXXXXXXXXXXXXXXXXXXXXXXXXXXXXXXXXXXXXXAXXGXGPAGLXXAXXLXXXGXXXXXXXXXXXXXXGGXXXXGIPXXXXXXXXXXXXXXXXXXXXGXXXXXXXXXGXXXXXXXXXXXXXXXXXXXXXXXXXXAXXXXXGXXXXXXXXXXXXXXXXXXXXXXAXXXLXXXXXXXXXXXXXXXXXXXXXXXXXXXXXXXXXVXVXGGGXTXXDXXXXXXR

SEQ ID NO: 6176 - protein, 56 aa, Artificial sequence
  Consensus
  Variant (1)..(1): Xaa in position 1 is Gly or Ala
  Variant (2)..(4): Xaa in position 2 to 4 is any amino acid
  Variant (5)..(5): Xaa in position 5 is Ala, Ser or Cys
  Variant (6)..(7): Xaa in position 6 to 7 is any amino acid
  Variant (8)..(8): Xaa in position 8 is Val, Ile, Leu or Ala
  Variant (9)..(9): Xaa in position 9 is any amino acid
  Variant (10)..(10): Xaa in position 10 is Thr, Ala or Val
  Variant (13)..(14): Xaa in position 13 to 14 is any amino acid
  Variant (15)..(15): Xaa in position 15 is Tyr, Met or His
  Variant (16)..(16): Xaa in position 16 is Ala, Ser, Leu, Lys or Val
  Variant (17)..(17): Xaa in position 17 is any amino acid
  Variant (18)..(18): Xaa in position 18 is Glu, Gln or Asp
  Variant (19)..(19): Xaa in position 19 is Ile, Leu, Val or Glu
  Variant (20)..(34): Xaa in position 20 to 34 is any or no amino acid
  Variant (35)..(43): Xaa in position 35 to 43 is any amino acid
  Variant (44)..(44): Xaa in position 44 is Gly, Val or Tyr
  Variant (45)..(45): Xaa in position 45 is Ile or Val
  Variant (46)..(46): Xaa in position 46 is any amino acid
  Variant (49)..(49): Xaa in position 49 is Ile, Met, Val, Leu or Cys
  Variant (51)..(52): Xaa in position 51 to 52 is any amino acid
  Variant (53)..(53): Xaa in position 53 is any or no amino acid
  Variant (54)..(54): Xaa in position 54 is Trp, Tyr, Phe or Leu
  Variant (55)..(55): Xaa in position 55 is any amino acid
  Variant (56)..(56): Xaa in position 56 is Pro or Glu
XXXXXXXXXXVSXXXXXXXXXXXXXXXXXXXXXXXXXXXXXXXXXXNGXDXXXXXX

SEQ ID NO: 6177 - protein, 65 aa, Artificial sequence
  Consensus
  Variant (1)..(1): Xaa in position 1 is Lys, Arg or Phe
  Variant (2)..(4): Xaa in position 2 to 4 is any amino acid
  Variant (5)..(5): Xaa in position 5 is Lys, Arg, Ala or Glu
  Variant (6)..(7): Xaa in position 6 to 7 is any amino acid
  Variant (8)..(8): Xaa in position 8 is Leu, Val or Ile
  Variant (9)..(11): Xaa in position 9 to 11 is any amino acid
  Variant (12)..(12): Xaa in position 12 is Leu, Val, Phe, Met or Thr
  Variant (13)..(13): Xaa in position 13 is any amino acid
  Variant (14)..(14): Xaa in position 14 is Leu, Ile, Phe or Val
  Variant (15)..(19): Xaa in position 15 to 19 is any or no amino acid
  Variant (20)..(22): Xaa in position 20 to 22 is any amino acid
  Variant (23)..(23): Xaa in position 23 is Leu, Val, Ile or Met
  Variant (24)..(24): Xaa in position 24 is Ile, Val, Phe, Leu, Tyr or Met
  Variant (25)..(26): Xaa in position 25 to 26 is any amino acid
  Variant (27)..(27): Xaa in position 27 is Ile or Val
  Variant (28)..(28): Xaa in position 28 is Gly, Ser, Thr, Cys or Ala
  Variant (30)..(30): Xaa in position 30 is Leu, Ile or Phe
  Variant (31)..(31): Xaa in position 31 is any or no amino acid
  Variant (32)..(33): Xaa in position 32 to 33 is any amino acid
  Variant (37)..(37): Xaa in position 37 is any amino acid
  Variant (38)..(38): Xaa in position 38 is Asp, His or Glu
  Variant (39)..(39): Xaa in position 39 is any amino acid
  Variant (40)..(40): Xaa in position 40 is Ile, Leu, Val, Met, Ala or Thr
  Variant (41)..(54): Xaa in position 41 to 54 is any amino acid
  Variant (55)..(59): Xaa in position 55 to 59 is any or no amino acid
  Variant (60)..(60): Xaa in position 60 is Val, Ile, Ala, Leu or Tyr
  Variant (61)..(61): Xaa in position 61 is Leu, Ile, Val, Met or Cys
  Variant (62)..(62): Xaa in position 62 is Leu, Val, Ile or Ala
  Variant (64)..(64): Xaa in position 64 is any amino acid
  Variant (65)..(65): Xaa in position 65 is Gly, Ala, Ser, Pro or Cys
XXXXXXXXXXXXXXXXXXXXXXXXXXXXRXXXXQKGXXXXXXXXXXXXXXXXXXXXXXXXXXGXX

SEQ ID NO: 6178 - protein, 51 aa, Artificial sequence
  Consensus
  Variant (1)..(1): Xaa in position 1 is Phe, Tyr, Leu or His
  Variant (2)..(5): Xaa in position 2 to 5 is any amino acid
  Variant (6)..(6): Xaa in position 6 is Ala, Ser, Ile or Val
  Variant (7)..(7): Xaa in position 7 is His, Arg or Gln
  Variant (8)..(8): Xaa in position 8 is any amino acid
  Variant (9)..(9): Xaa in position 9 is Ile, Val, Leu, Met or Ala
  Variant (10)..(10): Xaa in position 10 is any amino acid
  Variant (11)..(11): Xaa in position 11 is Ala, Gly or Thr
  Variant (12)..(12): Xaa in position 12 is Gly, Ala or Ser
  Variant (13)..(13): Xaa in position 13 is any amino acid
  Variant (15)..(16): Xaa in position 15 to 16 is any amino acid
  Variant (17)..(17): Xaa in position 17 is Leu, Ile, Val, Ala, Met or Cys
  Variant (18)..(18): Xaa in position 18 is Met, Ile, Val, His or Cys
  Variant (19)..(19): Xaa in position 19 is Pro or Thr
  Variant (21)..(21): Xaa in position 21 is any amino acid
  Variant (22)..(22): Xaa in position 22 is Phe or Tyr
  Variant (24)..(24): Xaa in position 24 is Pro or Ala
  Variant (25)..(25): Xaa in position 25 is Cys, Phe or Leu
  Variant (27)..(27): Xaa in position 27 is Leu or Ile
  Variant (28)..(28): Xaa in position 28 is any amino acid
  Variant (29)..(29): Xaa in position 29 is Gln, Asn or Pro
  Variant (30)..(30): Xaa in position 30 is Leu, Met or Ile
  Variant (31)..(31): Xaa in position 31 is any amino acid
  Variant (32)..(32): Xaa in position 32 is Ala, Gly or Ser
  Variant (33)..(33): Xaa in position 33 is Met, Leu or Gln
  Variant (34)..(34): Xaa in position 34 is any amino acid
  Variant (35)..(35): Xaa in position 35 is Tyr, Phe, Cys or Leu
  Variant (36)..(36): Xaa in position 36 is Gly, Ala or Asn
  Variant (37)..(37): Xaa in position 37 is Thr, Ser, Ala or Cys
  Variant (38)..(38): Xaa in position 38 is Val, Ile, Leu, Pro or Ala
  Variant (39)..(39): Xaa in position 39 is Pro, Cys or Val
  Variant (40)..(40): Xaa in position 40 is Ile, Val, Leu or Ala
  Variant (41)..(41): Xaa in position 41 is Val, Ala or Cys
  Variant (42)..(42): Xaa in position 42 is Arg, His, Ala, Ser or Thr
  Variant (43)..(43): Xaa in position 43 is any amino acid
  Variant (44)..(44): Xaa in position 44 is Thr or Val
  Variant (47)..(47): Xaa in position 47 is Leu or Ile
  Variant (48)..(48): Xaa in position 48 is any amino acid
  Variant (49)..(49): Xaa in position 49 is Asp or Glu
  Variant (50)..(50): Xaa in position 50 is Thr, Ser or Val
  Variant (51)..(51): Xaa in position 51 is Val or Ile
XXXXXXXXXXXXXDXXXXXSXXEXXGXXXXXXXXXXXXXXXXXXGGXXXXX

SEQ ID NO: 6179 - protein, 70 aa, Artificial sequence
  Consensus
  Variant (1)..(1): Xaa in position 1 is Val or Ile
  Variant (2)..(2): Xaa in position 2 is any amino acid
  Variant (5)..(5): Xaa in position 5 is Glu, Asp or Lys
  Variant (8)..(8): Xaa in position 8 is Trp, Tyr or Phe
  Variant (9)..(9): Xaa in position 9 is any amino acid
  Variant (10)..(10): Xaa in position 10 is Ala, Thr or Ser
  Variant (12)..(12): Xaa in position 12 is Met or Ile
  Variant (13)..(13): Xaa in position 13 is Gln, Glu, Ala or Ser
  Variant (14)..(14): Xaa in position 14 is Gln or Glu
  Variant (15)..(17): Xaa in position 15 to 17 is any amino acid
  Variant (18)..(18): Xaa in position 18 is Ile, Phe, Tyr or Val
  Variant (19)..(19): Xaa in position 19 is any or no amino acid
  Variant (20)..(21): Xaa in position 20 to 21 is any amino acid
  Variant (23)..(24): Xaa in position 23 to 24 is any amino acid
  Variant (25)..(25): Xaa in position 25 is Asp or Asn
  Variant (27)..(28): Xaa in position 27 to 28 is any amino acid
  Variant (29)..(29): Xaa in position 29 is Leu, Ile or Val
  Variant (30)..(30): Xaa in position 30 is any amino acid
  Variant (32)..(32): Xaa in position 32 is Asp, Gly or Cys
  Variant (35)..(35): Xaa in position 35 is Pro or Gln
  Variant (36)..(36): Xaa in position 36 is Leu, Met, Cys or Ile
  Variant (40)..(40): Xaa in position 40 is Ala or Gly
  Variant (41)..(41): Xaa in position 41 is Gly or Ala
  Variant (42)..(42): Xaa in position 42 is His or Phe
  Variant (43)..(43): Xaa in position 43 is Val, Leu or Ala
  Variant (44)..(44): Xaa in position 44 is any amino acid
  Variant (45)..(45): Xaa in position 45 is Ile, Val, Ala or Leu
  Variant (46)..(46): Xaa in position 46 is Tyr, Phe or His
  Variant (47)..(48): Xaa in position 47 to 48 is any amino acid
  Variant (49)..(49): Xaa in position 49 is Leu, Phe, Met or Val
  Variant (50)..(51): Xaa in position 50 to 51 is any amino acid
  Variant (52)..(52): Xaa in position 52 is Leu, Val, Ala, Phe or Tyr
  Variant (53)..(53): Xaa in position 53 is Thr or Ser
  Variant (54)..(54): Xaa in position 54 is Asp, Ser, Gly or Glu
  Variant (55)..(55): Xaa in position 55 is any amino acid
  Variant (56)..(57): Xaa in position 56 to 57 is any or no amino acid
  Variant (58)..(58): Xaa in position 58 is Asn, Asp, His or Glu
  Variant (59)..(59): Xaa in position 59 is Ile or Val
  Variant (60)..(61): Xaa in position 60 to 61 is any amino acid
  Variant (62)..(62): Xaa in position 62 is Ala, Gly or Val
  Variant (64)..(64): Xaa in position 64 is any amino acid
  Variant (65)..(65): Xaa in position 65 is Ile, Leu, Ala, Phe or Val
  Variant (66)..(66): Xaa in position 66 is Phe or Tyr
  Variant (67)..(68): Xaa in position 67 to 68 is any amino acid
  Variant (69)..(69): Xaa in position 69 is Leu, Ile, Val or Phe
  Variant (70)..(70): Xaa in position 70 is Tyr or Leu
XXYTXIDXXXYXXXXXXXXXXGXXXYXXXXGXTGXXVYPXXXXXXXXXXXXXXXXXXXXXXXQXXXXXXX

SEQ ID NO: 6180 - protein, 15 aa, Artificial sequence
  Consensus
  Variant (1)..(1): Xaa in position 1 is Ser or Gly
  Variant (2)..(2): Xaa in position 2 is Lys or Tyr
  Variant (4)..(4): Xaa in position 4 is Leu, Ile or Val
  Variant (5)..(5): Xaa in position 5 is His or Phe
  Variant (7)..(7): Xaa in position 7 is Ile or Val
  Variant (8)..(8): Xaa in position 8 is Tyr or Phe
  Variant (9)..(9): Xaa in position 9 is Val or Ile
  Variant (12)..(12): Xaa in position 12 is Leu or Cys
XXRXXSXXXLRXFND

SEQ ID NO: 6181 - protein, 16 aa, Artificial sequence
  Consensus
  Variant (1)..(1): Xaa in position 1 is Ser or Thr
  Variant (2)..(2): Xaa in position 2 is any amino acid
  Variant (3)..(3): Xaa in position 3 is Ala or Gly
  Variant (4)..(4): Xaa in position 4 is Val, Ile, Cys or Leu
  Variant (5)..(5): Xaa in position 5 is Ser or Gly
  Variant (6)..(6): Xaa in position 6 is Val or Ile
  Variant (9)..(9): Xaa in position 9 is Asn, Ser or Thr
  Variant (10)..(10): Xaa in position 10 is any amino acid
  Variant (11)..(11): Xaa in position 11 is Leu or Met
  Variant (13)..(13): Xaa in position 13 is Tyr, Phe or Ser
  Variant (14)..(14): Xaa in position 14 is Ala, Leu, Phe or Val
  Variant (16)..(16): Xaa in position 16 is Ala, Gly or Thr
XXXXXXKMXXXLXXPX

SEQ ID NO: 6182 - protein, 63 aa, Artificial sequence
  Consensus
  Variant (2)..(2): Xaa in position 2 is Val, Leu or Ile
  Variant (3)..(3): Xaa in position 3 is any amino acid
  Variant (4)..(4): Xaa in position 4 is Leu, Val, Ile, Phe or Met
  Variant (5)..(5): Xaa in position 5 is Gly, Ala or Ser
  Variant (6)..(7): Xaa in position 6 to 7 is any amino acid
  Variant (9)..(18): Xaa in position 9 to 18 is any or no amino acid
  Variant (19)..(24): Xaa in position 19 to 24 is any amino acid
  Variant (26)..(26): Xaa in position 26 is Leu, Phe, Ile or Trp
  Variant (27)..(28): Xaa in position 27 to 28 is any amino acid
  Variant (29)..(29): Xaa in position 29 is Ala or Ser
  Variant (31)..(31): Xaa in position 31 is Asp, Asn or Glu
  Variant (32)..(32): Xaa in position 32 is Leu or Phe
  Variant (33)..(33): Xaa in position 33 is any amino acid
  Variant (35)..(35): Xaa in position 35 is any amino acid
  Variant (37)..(37): Xaa in position 37 is any amino acid
  Variant (38)..(38): Xaa in position 38 is Tyr, His, Phe or Trp
  Variant (39)..(39): Xaa in position 39 is any amino acid
  Variant (41)..(41): Xaa in position 41 is Thr or Ser
  Variant (42)..(42): Xaa in position 42 is Val or Ile
  Variant (44)..(44): Xaa in position 44 is Trp, Tyr or Phe
  Variant (45)..(45): Xaa in position 45 is Arg, Gln or Lys
  Variant (46)..(46): Xaa in position 46 is Phe, Met or Leu
  Variant (47)..(47): Xaa in position 47 is Leu, Val, Met or Ile
  Variant (48)..(51): Xaa in position 48 to 51 is any amino acid
  Variant (52)..(57): Xaa in position 52 to 57 is any or no amino acid
  Variant (59)..(62): Xaa in position 59 to 62 is any amino acid
QXXXXXXFXXXXXXXXXXXXXXXXYXXXXFXXXRXFXXXWXXNXXXXXXXXXXXXXXFXXXXF

SEQ ID NO: 6183 - protein, 26 aa, Artificial sequence
  Consensus
  Variant (2)..(2): Xaa in position 2 is Phe, Leu, Ala, Ile or Tyr
  Variant (3)..(3): Xaa in position 3 is Ile or Val
  Variant (5)..(5): Xaa in position 5 is Val, Ile or Leu
  Variant (6)..(6): Xaa in position 6 is any amino acid
  Variant (7)..(7): Xaa in position 7 is Phe or Cys
  Variant (8)..(8): Xaa in position 8 is Ala or Ser
  Variant (9)..(9): Xaa in position 9 is Arg or His
  Variant (16)..(16): Xaa in position 16 is Tyr or Leu
  Variant (17)..(17): Xaa in position 17 is Ser, Val, Ala or Ile
  Variant (18)..(18): Xaa in position 18 is Trp or Tyr
  Variant (19)..(19): Xaa in position 19 is Tyr, Phe or Val
  Variant (20)..(20): Xaa in position 20 is Phe, His, Ala, Cys or Tyr
  Variant (21)..(21): Xaa in position 21 is Trp, His, Phe or Tyr
  Variant (22)..(23): Xaa in position 22 to 23 is any amino acid
  Variant (25)..(25): Xaa in position 25 is any amino acid
  Variant (26)..(26): Xaa in position 26 is Leu or Met
NXXGXXXXXSLHYQFXXXXXXXXPXX

SEQ ID NO: 6184 - protein, 640 aa, Artificial sequence
  Consensus
  Variant (1)..(640): Xaa in all positions is any amino acid
XXXXXXXXXXXXXXXXXXXXXXXXXXXXXXXXXXXXXXXXXXXXXXXXXXXXXXXXXXXXXXXXXXXXXXXXXXXXXXXXXXXXXXXXXXXXXXIXXVXYTEIDXXAYMXXXXXXXXXGXXXYXXXXGXTGPLVYPAXXXXXXXXLXXXTXXXXXXXXXQXXFXXXYXXXXXXXXXXYXXXXXXXXPXXXXXXXXXSXRXHSIXVLRLFNDXXXXXXXXXXXXXXXXXXXXXXXXXXXXXXXXXXXXXXXXSXAXXXKMNXLLXXPXXXXXXXXXXXXXXXXXXXXXXXXXXXQXXXXXXFLXXXXXXXXXXXXXXXYXXXXFXXXRXFXXXWXVNXXFXXXXXXXXXXXFXXXXFXXXLLXXHXXXLXXFXXXXXXXXXXXXXXXXXXXXXXXXXXXXXXXXXXXXXXXXXXXXXXXXXXXXXXXXXXXXXXXXXXXXXXXXXXXXXXXXXXXXXXXXXXXXXXXXXXXXXXXXXXXXXXXXXXXXXXXXXXXNXIGXXXXRSLHYQFXXWYXXXXPXLXXXXXXXXXXXXXXXXXXXXXXXXXXXXXXXXXXXXXXXXXXXXXXXXXEXXWNXXPXXXXXSXXLXXXXXXXXXXXXXXXXXXXXXXXXXXXXXXXXXXXXXXXXXXXXXXXXXXXXXX

SEQ ID NO: 6185 - protein, 37 aa, Artificial sequence
  Consensus
  Variant (1)..(1): Xaa in position 1 is Gly or Val
  Variant (2)..(3): Xaa in position 2 to 3 is any amino acid
  Variant (4)..(4): Xaa in position 4 is Ile, Leu, Ala or Val
  Variant (5)..(5): Xaa in position 5 is Leu, Phe, Met or Ile
  Variant (6)..(7): Xaa in position 6 to 7 is any amino acid
  Variant (8)..(8): Xaa in position 8 is Arg, Lys or Gln
  Variant (9)..(9): Xaa in position 9 is Pro or Tyr
  Variant (10)..(10): Xaa in position 10 is any amino acid
  Variant (11)..(11): Xaa in position 11 is Ile, Val, Leu, Met or Ala
  Variant (12)..(15): Xaa in position 12 to 15 is any amino acid
  Variant (16)..(16): Xaa in position 16 is Leu, Ile or Val
  Variant (17)..(18): Xaa in position 17 to 18 is any amino acid
  Variant (19)..(20): Xaa in position 19 to 20 is any or no amino acid
  Variant (21)..(21): Xaa in position 21 is Leu or Ala
  Variant (22)..(23): Xaa in position 22 to 23 is any amino acid
  Variant (24)..(24): Xaa in position 24 is Leu, Met or Tyr
  Variant (25)..(25): Xaa in position 25 is Pro, Asp or Lys
  Variant (26)..(26): Xaa in position 26 is any amino acid
  Variant (27)..(27): Xaa in position 27 is Asn, Gly or Asp
  Variant (28)..(28): Xaa in position 28 is Thr or Ser
  Variant (29)..(29): Xaa in position 29 is Leu, Phe, Ile or Val
  Variant (31)..(32): Xaa in position 31 to 32 is any amino acid
  Variant (33)..(33): Xaa in position 33 is Tyr or Phe
  Variant (34)..(35): Xaa in position 34 to 35 is any amino acid
  Variant (36)..(36): Xaa in position 36 is Phe, Trp, Gln or Thr
  Variant (37)..(37): Xaa in position 37 is Leu, Met or Ile
XXXXXXXXXXXXXXXXXXXXXXXXXXXXXGXXXXXXX

SEQ ID NO: 6186 - protein, 42 aa, Artificial sequence
  Consensus
  Variant (1)..(1): Xaa in position 1 is Ala, Ser, Gln or Leu
  Variant (2)..(2): Xaa in position 2 is Tyr or Phe
  Variant (3)..(3): Xaa in position 3 is Val, Ile, Phe or Leu
  Variant (4)..(5): Xaa in position 4 to 5 is any amino acid
  Variant (6)..(6): Xaa in position 6 is Arg or His
  Variant (7)..(7): Xaa in position 7 is Tyr, Ala, Trp or Ile
  Variant (8)..(8): Xaa in position 8 is Arg, Gln or Thr
  Variant (9)..(9): Xaa in position 9 is Glu or Gln
  Variant (10)..(10): Xaa in position 10 is any amino acid
  Variant (13)..(13): Xaa in position 13 is Phe, Ile, Leu or Met
  Variant (14)..(14): Xaa in position 14 is any amino acid
  Variant (16)..(16): Xaa in position 16 is any amino acid
  Variant (17)..(17): Xaa in position 17 is Leu, Ile, Val or Ala
  Variant (18)..(18): Xaa in position 18 is any amino acid
  Variant (19)..(19): Xaa in position 19 is Gly, Asn, Asp or Glu
  Variant (20)..(21): Xaa in position 20 to 21 is any amino acid
  Variant (22)..(22): Xaa in position 22 is Ile, Thr or Ala
  Variant (23)..(23): Xaa in position 23 is Asn, Ile, Ser or Val
  Variant (24)..(24): Xaa in position 24 is any amino acid
  Variant (25)..(25): Xaa in position 25 is Glu, Leu or Ile
  Variant (26)..(26): Xaa in position 26 is Gly, Ala, Ser or Asp
  Variant (28)..(29): Xaa in position 28 to 29 is any amino acid
  Variant (30)..(30): Xaa in position 30 is Leu, Val or Ile
  Variant (31)..(31): Xaa in position 31 is Lys, Gln or Glu
  Variant (32)..(32): Xaa in position 32 is any amino acid
  Variant (33)..(33): Xaa in position 33 is Phe, Leu, Ile or Val
  Variant (34)..(34): Xaa in position 34 is Glu or Tyr
  Variant (35)..(36): Xaa in position 35 to 36 is any amino acid
  Variant (37)..(37): Xaa in position 37 is Asn, Gln or His
  Variant (38)..(39): Xaa in position 38 to 39 is any amino acid
  Variant (40)..(40): Xaa in position 40 is Leu, Val, Ile or Ala
  Variant (41)..(41): Xaa in position 41 is Pro or Ser
  Variant (42)..(42): Xaa in position 42 is Met, Leu, Ile or Val
XXXXXXXXXXHDXXHXXXXXXXXXXXEXXXXXXXXXXXXXXX

SEQ ID NO: 6187 - protein, 197 aa, Artificial sequence
  Consensus
  Variant (1)..(197): Xaa in all positions is any amino acid
PXXXXXXXXXXXXXXXXXXXXXXXXXXXXXXXXGXXXLXXXPXXXXXXXXXXXLXXXPXXXXGXXYXXXXXXXXXXXXXRXXXXXXXXXXXXYXXXRXRXXHDXXHXXXXXXXXXXGEXXXKXXEXXXXXXPXXXXXXXXXXXXXXXXXXXXXXXXXXPXXXXXXXXXXXXXXXXXXXXXXXXXXEXXXXXXXXXXR

SEQ ID NO: 6188 - protein, 65 aa, Artificial sequence; identical to SEQ ID NO: 1307
  Consensus
  Variant (4)..(4): Xaa in Position 4 is Glu, Gln, Lys or Ala
  Variant (5)..(5): Xaa in Position 5 is Thr or Ser
  Variant (6)..(6): Xaa in Position 6 is any amino acid
  Variant (7)..(7): Xaa in Position 7 is Trp, Phe or Tyr
  Variant (8)..(8): Xaa in Position 8 is Asn, Ser or Ala
  Variant (9)..(13): Xaa in Position 9 to 13 is any amino acid
  Variant (14)..(14): Xaa in Position 14 is Gln or Thr
  Variant (15)..(15): Xaa in Position 15 is Gly or Ser
  Variant (16)..(16): Xaa in Position 16 is no amino acid or any amino acid
  Variant (17)..(18): Xaa in Position 17 to 18 is any amino acid
  Variant (19)..(19): Xaa in Position 19 is Asp, Asn or Glu
  Variant (20)..(21): Xaa in Position 20 to 21 is any amino acid
  Variant (23)..(25): Xaa in Position 23 to 25 is any amino acid
  Variant (26)..(26): Xaa in Position 26 is Gly or Ser
  Variant (27)..(29): Xaa in Position 27 to 29 is any amino acid
  Variant (30)..(30): Xaa in Position 30 is Ala, Met, Val or Ile
  Variant (31)..(36): Xaa in Position 31 to 36 is any amino acid
  Variant (37)..(37): Xaa in Position 37 is Leu, Ile, Val, Ala or Phe
  Variant (38)..(44): Xaa in Position 38 to 44 is any amino acid
  Variant (45)..(55): Xaa in Position 45 to 55 is no amino acid or any amino acid
  Variant (56)..(56): Xaa in Position 56 is Thr, Ser, Ala or Val
  Variant (58)..(60): Xaa in Position 58 to 60 is any amino acid
  Variant (62)..(62): Xaa in Position 62 is Ala, Thr or Pro
  Variant (63)..(64): Xaa in Position 63 to 64 is any amino acid

SEQ ID NO: 6189 - protein, 43 aa, Artificial sequence; identical to SEQ ID NO: 1308
  Consensus
  Variant (1)..(1): Xaa in Position 1 is Gly, Asn or Asp
  Variant (2)..(2): Xaa in Position 2 is Asp, Glu or Gln
  Variant (3)..(3): Xaa in Position 3 is any amino acid
  Variant (4)..(4): Xaa in Position 4 is Val or Ile
  Variant (5)..(7): Xaa in Position 5 to 7 is any amino acid
  Variant (8)..(8): Xaa in Position 8 is Met, Leu, Ile or Ala
  Variant (9)..(18): Xaa in Position 9 to 18 is any amino acid
  Variant (19)..(19): Xaa in Position 19 is Leu, Met, Gln, Phe or Tyr
  Variant (20)..(20): Xaa in Position 20 is Ala, Gly or Ser
  Variant (21)..(23): Xaa in Position 21 to 23 is any amino acid
  Variant (24)..(24): Xaa in Position 24 is Ile, Leu, Val or Ala
  Variant (26)..(26): Xaa in Position 26 is Ala, Gly, Val or no amino acid
  Variant (27)..(34): Xaa in Position 27 to 34 is any amino acid
  Variant (35)..(35): Xaa in Position 35 is Phe, Tyr or Leu
  Variant (36)..(39): Xaa in Position 36 to 39 is any amino acid
  Variant (40)..(40): Xaa in Position 40 is Leu, Ile or Val
  Variant (41)..(42): Xaa in Position 41 to 42 is any amino acid
  Variant (43)..(43): Xaa in Position 43 is Arg or Gln

SEQ ID NO: 6190 - protein, 14 aa, Artificial sequence
  Consensus
  Variant (1)..(1): Xaa in Position 1 is Ile, Leu, Met or Val
  Variant (2)..(2): Xaa in Position 2 is any amino acid
  Variant (3)..(3): Xaa in Position 3 is Tyr, Phe or Ser
  Variant (4)..(4): Xaa in Position 4 is Thr or Ser
  Variant (7)..(7): Xaa in Position 7 is Thr or Ser
  Variant (10)..(10): Xaa in Position 10 is any amino acid
  Variant (11)..(11): Xaa in Position 11 is Pro, Ala or Ser
  Variant (13)..(13): Xaa in Position 13 is any amino acid
  Variant (14)..(14): Xaa in Position 14 is Val, Ile, Leu, Ala or Thr
XXXXSGXTGXXKXX

SEQ ID NO: 6191 - protein, 55 aa, Artificial sequence; identical to SEQ ID NO: 1310
  Consensus
  Variant (1)..(1): Xaa in Position 1 is Tyr, Trp, Phe, Leu or His
  Variant (2)..(3): Xaa in Position 2 to 3 is any amino acid
  Variant (4)..(4): Xaa in Position 4 is Gly, Ala or Phe
  Variant (6)..(12): Xaa in Position 6 to 12 is any amino acid
  Variant (13)..(13): Xaa in Position 13 is no amino acid or any amino acid
  Variant (14)..(14): Xaa in Position 14 is Gly, Asp or no amino acid
  Variant (15)..(19): Xaa in Position 15 to 19 is any amino acid
  Variant (20)..(20): Xaa in Position 20 is Gly, Ser, Ala or Asp
  Variant (22)..(22): Xaa in Position 22 is any amino acid
  Variant (23)..(23): Xaa in Position 23 is Asp or Lys
  Variant (24)..(24): Xaa in Position 24 is Asp, Glu, Ser, Ala or Thr
  Variant (25)..(25): Xaa in Position 25 is any amino acid
  Variant (26)..(26): Xaa in Position 26 is Ile, Leu, Met or Val
  Variant (27)..(29): Xaa in Position 27 to 29 is any amino acid
  Variant (31)..(31): Xaa in Position 31 is any amino acid
  Variant (32)..(32): Xaa in Position 32 is Arg, Lys, Gln or Leu
  Variant (33)..(33): Xaa in Position 33 is Leu, Ile, Val or Met
  Variant (34)..(36): Xaa in Position 34 to 36 is any amino acid
  Variant (37)..(37): Xaa in Position 37 is Glu, Asp, Thr or Ala
  Variant (38)..(38): Xaa in Position 38 is Ile, Val, Met or Leu
  Variant (39)..(39): Xaa in Position 39 is Glu, Tyr or Asp
  Variant (40)..(41): Xaa in Position 40 to 41 is any amino acid
  Variant (42)..(42): Xaa in Position 42 is Leu, Ile, Val or Met
  Variant (43)..(47): Xaa in Position 43 to 47 is any amino acid
  Variant (48)..(48): Xaa in Position 48 is Val or Ile
  Variant (49)..(49): Xaa in Position 49 is any amino acid
  Variant (50)..(50): Xaa in Position 50 is Glu or Asp
  Variant (51)..(51): Xaa in Position 51 is Ala, Cys, Ser, Val or Thr
  Variant (52)..(53): Xaa in Position 52 to 53 is any amino acid
  Variant (54)..(54): Xaa in Position 54 is Val, Ile, Leu, Thr or Phe
  Variant (55)..(55): Xaa in Position 55 is Gly, Ala, Ser or Pro

SEQ ID NO: 6192 - protein, 14 aa, Artificial sequence
  Consensus
  Variant (1)..(1): Xaa in Position 1 is Leu, Ile or Met
  Variant (3)..(3): Xaa in Position 3 is Lys, Arg, Met or His
  Variant (4)..(4): Xaa in Position 4 is Thr or Ser
  Variant (5)..(5): Xaa in Position 5 is any amino acid
  Variant (6)..(6): Xaa in Position 6 is Ser, Thr, Asn or Val
  Variant (7)..(7): Xaa in Position 7 is Gly, Ala or Ser
  Variant (9)..(9): Xaa in Position 9 is Ile, Val, Leu, Met, Lys or Arg
  Variant (10)..(10): Xaa in Position 10 is any amino acid
  Variant (11)..(11): Xaa in Position 11 is Arg or Glu
  Variant (12)..(13): Xaa in Position 12 to 13 is any amino acid
  Variant (14)..(14): Xaa in Position 14 is Leu, Ile, Val or Met
XPXXXXXKXXXXXX

SEQ ID NO: 6193 - protein, 1077 aa, Artificial sequence; identical to SEQ ID NO: 1312
  Consensus
  Variant (1)..(1077): Xaa in all Positions is any amino acid

SEQ ID NO: 6194 - protein, 137 aa, Artificial sequence
  Consensus
  Variant (1)..(1): Xaa in position 1 is Lys, Arg or Gln
  Variant (2)..(2): Xaa in position 2 is Ile, Lys, Val or Leu
  Variant (3)..(6): Xaa in position 3 to 6 is any amino acid
  Variant (7)..(7): Xaa in position 7 is Pro, Ser or Thr
  Variant (8)..(8): Xaa in position 8 is Ile, Val or Leu
  Variant (9)..(9): Xaa in position 9 is Val or Ala
  Variant (10)..(10): Xaa in position 10 is Glu or Asp
  Variant (11)..(11): Xaa in position 11 is Met, Leu, Ile or Val
  Variant (12)..(12): Xaa in position 12 is Asp, Gln or Leu
  Variant (16)..(16): Xaa in position 16 is Met or Gln
  Variant (17)..(17): Xaa in position 17 is Thr or Ala
  Variant (18)..(18): Xaa in position 18 is Arg or Lys
  Variant (19)..(19): Xaa in position 19 is Ile or Val
  Variant (20)..(20): Xaa in position 20 is Ile, Phe or Met
  Variant (22)..(23): Xaa in position 22 to 23 is any amino acid
  Variant (24)..(24): Xaa in position 24 is Ile or Val
  Variant (25)..(25): Xaa in position 25 is Lys, Arg or Gln
  Variant (26)..(27): Xaa in position 26 to 27 is any amino acid
  Variant (28)..(28): Xaa in position 28 is Leu or Phe
  Variant (29)..(29): Xaa in position 29 is Ile, Val or Leu
  Variant (30)..(30): Xaa in position 30 is any amino acid
  Variant (31)..(31): Xaa in position 31 is Pro or Thr
  Variant (32)..(32): Xaa in position 32 is Tyr, Phe, His or Asn
  Variant (33)..(33): Xaa in position 33 is Leu, Val or Met
  Variant (34)..(34): Xaa in position 34 is Asp, Glu or Asn
  Variant (35)..(35): Xaa in position 35 is Leu, Val, Ile or Met
  Variant (36)..(38): Xaa in position 36 to 38 is any amino acid
  Variant (39)..(39): Xaa in position 39 is Tyr, Phe, Ser or Thr
  Variant (40)..(40): Xaa in position 40 is Tyr or Phe
  Variant (41)..(41): Xaa in position 41 is Asp or Ser
  Variant (43)..(43): Xaa in position 43 is Gly or Ser
  Variant (44)..(44): Xaa in position 44 is Ile, Leu, Val or Met
  Variant (45)..(46): Xaa in position 45 to 46 is any amino acid
  Variant (48)..(48): Xaa in position 48 is Asp or Asn
  Variant (49)..(49): Xaa in position 49 is any amino acid
  Variant (51)..(51): Xaa in position 51 is any amino acid
  Variant (53)..(53): Xaa in position 53 is Gln, Lys or Arg
  Variant (54)..(54): Xaa in position 54 is Val or Ile
  Variant (56)..(56): Xaa in position 56 is any amino acid
  Variant (57)..(57): Xaa in position 57 is Asp or Glu
  Variant (58)..(58): Xaa in position 58 is Ser, Ala or Thr
  Variant (59)..(59): Xaa in position 59 is Ala or Ser
  Variant (60)..(60): Xaa in position 60 is any amino acid
  Variant (61)..(61): Xaa in position 61 is Ala or Glu
  Variant (62)..(62): Xaa in position 62 is any amino acid
  Variant (63)..(63): Xaa in position 63 is Lys, Leu, Gln or Met
  Variant (64)..(64): Xaa in position 64 is Lys, Glu, Gln or Arg
  Variant (65)..(65): Xaa in position 65 is Tyr, His or Val
  Variant (66)..(66): Xaa in position 66 is any amino acid
  Variant (67)..(67): Xaa in position 67 is Val, Met or Ile
  Variant (68)..(68): Xaa in position 68 is Gly or Ala
  Variant (69)..(69): Xaa in position 69 is Val or Ile
  Variant (77)..(77): Xaa in position 77 is Asp or Asn
  Variant (78)..(78): Xaa in position 78 is Glu, Ala, Ser or Gln
  Variant (79)..(79): Xaa in position 79 is any amino acid
  Variant (81)..(81): Xaa in position 81 is Val, Met, Ile or Leu
  Variant (82)..(82): Xaa in position 82 is any amino acid
  Variant (84)..(84): Xaa in position 84 is Phe or Tyr
  Variant (85)..(85): Xaa in position 85 is any amino acid
  Variant (88)..(88): Xaa in position 88 is any amino acid
  Variant (91)..(91): Xaa in position 91 is Lys, Arg or Leu
  Variant (95)..(95): Xaa in position 95 is Gly or Ala
  Variant (97)..(97): Xaa in position 97 is Ile or Leu
  Variant (99)..(99): Xaa in position 99 is Asn, Ser or Ala
  Variant (100)..(100): Xaa in position 100 is Ile, Ala or Tyr
  Variant (101)..(101): Xaa in position 101 is Leu or Ile
  Variant (102)..(102): Xaa in position 102 is Gly, Asn or Asp
  Variant (104)..(104): Xaa in position 104 is Thr or Val
  Variant (105)..(105): Xaa in position 105 is Val or Ile
  Variant (108)..(108): Xaa in position 108 is any amino acid
  Variant (109)..(109): Xaa in position 109 is Pro, Ala or Ser
  Variant (111)..(111): Xaa in position 111 is Ile, Val, Leu or Met
  Variant (112)..(112): Xaa in position 112 is Cys, Ile, Val or Met
  Variant (113)..(114): Xaa in position 113 to 114 is any amino acid
  Variant (115)..(115): Xaa in position 115 is Ile, Val or Leu
  Variant (117)..(117): Xaa in position 117 is Arg, Lys or Pro
  Variant (118)..(118): Xaa in position 118 is Leu, Ile, Ala or Tyr
  Variant (119)..(119): Xaa in position 119 is Val, Ile or Leu
  Variant (120)..(121): Xaa in position 120 to 121 is any amino acid
  Variant (123)..(124): Xaa in position 123 to 124 is any amino acid
  Variant (125)..(125): Xaa in position 125 is Pro or Ala
  Variant (127)..(127): Xaa in position 127 is Ile, Cys, Val or Thr
  Variant (128)..(128): Xaa in position 128 is Ile or Val
  Variant (129)..(129): Xaa in position 129 is Gly or Ala
  Variant (133)..(133): Xaa in position 133 is Phe, His or Tyr
  Variant (134)..(134): Xaa in position 134 is Gly or Ala
  Variant (136)..(136): Xaa in position 136 is Gln, Ile or Leu
XXXXXXXXXXXXGDEXXXXXWXXXXXXXXXXXXXXXXXXXXLXXXXRXXTXDXXTXXXXXXXXXXXXXXKCATITPXXXRXXEXXLKXMWXSPNXTXRXXXXGXXFRXXIXXXXXPXXXXXWXXXIXXXRHAXXDXY

SEQ ID NO: 6195 - protein, 166 aa, Artificial sequence
  Consensus
  Variant (1)..(1): Xaa in position 1 is Met or Gln
  Variant (2)..(2): Xaa in position 2 is Tyr, His or Phe
  Variant (4)..(6): Xaa in position 4 to 6 is any amino acid
  Variant (8)..(8): Xaa in position 8 is Ile or Val
  Variant (9)..(10): Xaa in position 9 to 10 is any amino acid
  Variant (13)..(13): Xaa in position 13 is any amino acid
  Variant (14)..(14): Xaa in position 14 is Ala or Ser
  Variant (15)..(15): Xaa in position 15 is Ser or Cys
  Variant (16)..(16): Xaa in position 16 is Phe, Met, Leu or Ile
  Variant (17)..(18): Xaa in position 17 to 18 is any amino acid
  Variant (19)..(19): Xaa in position 19 is Ala, Gly or Ser
  Variant (20)..(20): Xaa in position 20 is Leu, Tyr, Ile or Phe
  Variant (21)..(25): Xaa in position 21 to 25 is any amino acid
  Variant (26)..(26): Xaa in position 26 is Leu, Val or Ile
  Variant (27)..(27): Xaa in position 27 is Tyr, Phe or Trp
  Variant (28)..(28): Xaa in position 28 is Leu, Met, Phe or Ser
  Variant (29)..(29): Xaa in position 29 is Ser, Thr or Ala
  Variant (32)..(32): Xaa in position 32 is Asn, Asp or Ser
  Variant (35)..(35): Xaa in position 35 is Leu, Ser or Met
  Variant (37)..(37): Xaa in position 37 is any amino acid
  Variant (39)..(39): Xaa in position 39 is Asp or His
  Variant (40)..(40): Xaa in position 40 is Gly, Ala or His
  Variant (41)..(41): Xaa in position 41 is any amino acid
  Variant (43)..(43): Xaa in position 43 is Lys or Arg
  Variant (44)..(44): Xaa in position 44 is Asp or Ala
  Variant (45)..(45): Xaa in position 45 is Ile, Val, Leu or Thr
  Variant (47)..(49): Xaa in position 47 to 49 is any amino acid
  Variant (50)..(50): Xaa in position 50 is Tyr, Phe, Ala or Val
  Variant (51)..(51): Xaa in position 51 is any or no amino acid
  Variant (52)..(57): Xaa in position 52 to 57 is any amino acid
  Variant (58)..(58): Xaa in position 58 is Phe, Tyr or Leu
  Variant (59)..(61): Xaa in position 59 to 61 is any amino acid
  Variant (62)..(62): Xaa in position 62 is Gly, Lys, Asn or Ser
  Variant (63)..(63): Xaa in position 63 is Ile, Leu or Val
  Variant (64)..(64): Xaa in position 64 is any amino acid
  Variant (66)..(66): Xaa in position 66 is any amino acid
  Variant (67)..(67): Xaa in position 67 is His or Tyr
  Variant (68)..(68): Xaa in position 68 is any amino acid
  Variant (73)..(73): Xaa in position 73 is Met or Ala
  Variant (74)..(74): Xaa in position 74 is Val or Ala
  Variant (76)..(77): Xaa in position 76 to 77 is any amino acid
  Variant (78)..(78): Xaa in position 78 is Leu, Ile, Met or Val
  Variant (79)..(79): Xaa in position 79 is Lys or Arg
  Variant (80)..(80): Xaa in position 80 is Ser or Trp
  Variant (81)..(81): Xaa in position 81 is any amino acid
  Variant (83)..(83): Xaa in position 83 is Gly or Ala
  Variant (84)..(84): Xaa in position 84 is Tyr, Phe or Met
  Variant (85)..(85): Xaa in position 85 is Val, Ile or Leu
  Variant (86)..(86): Xaa in position 86 is Trp, Met, Ile or Leu
  Variant (88)..(88): Xaa in position 88 is Cys, Leu, Met or Phe
  Variant (89)..(89): Xaa in position 89 is Lys or Met
  Variant (92)..(92): Xaa in position 92 is Asp or Glu
  Variant (95)..(95): Xaa in position 95 is Val or Ile
  Variant (96)..(96): Xaa in position 96 is Gln, Met or Glu
  Variant (99)..(99): Xaa in position 99 is any amino acid
  Variant (100)..(100): Xaa in position 100 is Val, Leu or Ile
  Variant (102)..(102): Xaa in position 102 is Gln, Ser or Thr
  Variant (103)..(103): Xaa in position 103 is Gly or Ala
  Variant (104)..(104): Xaa in position 104 is Phe or Tyr
  Variant (108)..(108): Xaa in position 108 is Gly or Ala
  Variant (109)..(109): Xaa in position 109 is Leu or Met
  Variant (111)..(111): Xaa in position 111 is Thr or Ser
  Variant (113)..(113): Xaa in position 113 is Val, Ile, Thr or Ala
  Variant (115)..(116): Xaa in position 115 to 116 is any amino acid
  Variant (117)..(117): Xaa in position 117 is Pro, Ser or Ala
  Variant (118)..(118): Xaa in position 118 is Asp, Thr or Asn
  Variant (120)..(120): Xaa in position 120 is any or no amino acid
  Variant (121)..(122): Xaa in position 121 to 122 is any amino acid
  Variant (123)..(123): Xaa in position 123 is Glu, Ala, Ile or Val
  Variant (124)..(124): Xaa in position 124 is any amino acid
  Variant (127)..(127): Xaa in position 127 is Ala or Ser
  Variant (133)..(133): Xaa in position 133 is Arg or Lys
  Variant (135)..(135): Xaa in position 135 is Tyr or Phe
  Variant (136)..(136): Xaa in position 136 is Arg, Tyr or Met
  Variant (137)..(137): Xaa in position 137 is any amino acid
  Variant (138)..(138): Xaa in position 138 is His, Tyr or Trp
  Variant (139)..(139): Xaa in position 139 is Gln or Leu
  Variant (140)..(140): Xaa in position 140 is Lys, Gln, Ala or Arg
  Variant (141)..(141): Xaa in position 141 is Gly or Asn
  Variant (142)..(143): Xaa in position 142 to 143 is any amino acid
  Variant (148)..(148): Xaa in position 148 is Ser or Pro
  Variant (149)..(149): Xaa in position 149 is Ile or Val
  Variant (151)..(151): Xaa in position 151 is Ser or Thr
  Variant (156)..(156): Xaa in position 156 is Thr, Ser or Ala
  Variant (157)..(157): Xaa in position 157 is any amino acid
  Variant (158)..(158): Xaa in position 158 is Gly or Ala
  Variant (159)..(159): Xaa in position 159 is Leu or Ile
  Variant (160)..(161): Xaa in position 160 to 161 is any amino acid
  Variant (163)..(163): Xaa in position 163 is Ala or Gly
  Variant (164)..(164): Xaa in position 164 is any amino acid
  Variant (165)..(165): Xaa in position 165 is Leu, Phe or Val
XXNXXXSXXXFAXXXXXXXXXXXXXXXXXTKXTIXKXYXXXFXXXFXXXXXXXXXXXXXXXXXXYXXXLIDDXXAXXXXXXGXXXXAXXNYXGDXXSDXXAXXXGSLXXMXSXLXXXXGXXXXXEAXHGTVTXHXXXXXXXXXTSTNXXAXIFAWXXXXXXRXXXD

SEQ ID NO: 6196 - protein, 447 aa, Artificial sequence
  Consensus
  Variant (1)..(447): Xaa in all positions is any amino acid
XXKIXVXXPXVEXDGDEMTRXIWXXIKXKLIXPXXXXXXXYXDLXXXXRDXTXDXVTXXXAXAXXKXXVXXKCATITPDEXRVXEFXLKXMWXSPNGTIRNILXGTVFREPIXXXXXPRLVPXWXKPIXIGRHAXGDQYXATDXXXXXXGXXXXXXXXXXXXXXXXXXXXVXXXXXXXXXGVXXXMYNXDXSIXXFAXXXXXXXXXXXXPXYXSTKNTILKXYDGRFKDIFXXXXXXXXKXXFXXXXXXYEHRLIDDMVAXXXKXXGGXXXAXKNYDGDVQSDXXAQGXGSLGLMTSVLXXPDGKXXEXEAAHGTVTRHXRXXQXGXXTSTNXIASIFAWXRGLXXRXXLDXXXXXXXFXXXLEXXXXXTVXXXXXMTKDLAXXXXXXXXXXXXXXXXXXTXXFXXXXXXXLXXXXXXXXXXXXXXXXXXXXXXXXXXXXXXXXXXX

SEQ ID NO: 6197 - protein, 447 aa, Artificial sequence
  Consensus
  Variant (1)..(447): Xaa in all positions is any amino acid
XXXXXXXXXXXXXXGDEXXXXXWXXXXXXXXXXXXXXXXXXXXLXXXXRXXTXDXXTXXXXXXXXXXXXXXKCATITPXXXRXXEXXLXXXWXSPNXTXRXXXXGXXFRXXXXXXXXXXXXXXWXXXIXXXRHAXXDXYXXXXXXXXXXXXXXXXXXXXXXXXXXXXXXXXXXXXXXXXXXXXXXXXNXXXSXXXFAXXXXXXXXXXXXXXXXXTKXTIXKXYXXXFXXXFXXXXXXXXXXXXXXXXXXYXXXLIDDXXAXXXXXXGXXXXAXXXYXGXXXSDXXAXXXGSLXXMXSXLXXXXGXXXXXEAXHGTVXXHXXXXXXXXXTSTXXXAXIFAWXXXXXXRXXXDXXXXXXXXXXXXEXXXXXXXXXXXXXXXXLXXXXXXXXXXXXXXXXXXXXXXXXXXXXXXXXXXXXXXXXXXXXXXXXXXXXXXXXXXXXXXXXXX

SEQ ID NO: 6198 - protein, 150 aa, Artificial sequence; identical to SEQ ID NO: 2917
  Consensus
  Variant (1)..(1): Xaa in Position 1 is Arg or Lys
  Variant (2)..(2): Xaa in Position 2 is Val, Ile, Leu or Ala
  Variant (3)..(3): Xaa in Position 3 is Ile, Val, Met or Ala
  Variant (4)..(4): Xaa in Position 4 is Ile, Val, Leu, Met or Ala
  Variant (8)..(8): Xaa in Position 8 is Phe, Ile, Leu or Tyr
  Variant (9)..(9): Xaa in Position 9 is Gly or Ala
  Variant (10)..(10): Xaa in Position 10 is any amino acid
  Variant (11)..(11): Xaa in Position 11 is Asp, Ser or Asn
  Variant (12)..(13): Xaa in Position 12 to 13 is any amino acid
  Variant (14)..(14): Xaa in Position 14 is Ser, Thr or Asn
  Variant (15)..(15): Xaa in Position 15 is Ala, Ser, Phe or Tyr
  Variant (16)..(17): Xaa in Position 16 to 17 is any amino acid
  Variant (18)..(18): Xaa in Position 18 is Leu, Ile, Val or Phe
  Variant (19)..(21): Xaa in Position 19 to 21 is any amino acid
  Variant (22)..(22): Xaa in Position 22 is Leu, Ile or Val
  Variant (23)..(27): Xaa in Position 23 to 27 is any amino acid
  Variant (28)..(28): Xaa in Position 28 is Glu, Asp, Pro or Ser
  Variant (29)..(30): Xaa in Position 29 to 30 is any amino acid
  Variant (31)..(31): Xaa in Position 31 is Ile, Val, Leu, Thr or Met
  Variant (32)..(32): Xaa in Position 32 is Tyr, Phe or Leu
  Variant (33)..(33): Xaa in Position 33 is Arg, His or Leu
  Variant (34)..(34): Xaa in Position 34 is Ile, Val, Met or Leu
  Variant (37)..(37): Xaa in Position 37 is Tyr or Phe
  Variant (39)..(39): Xaa in Position 39 is Gly, Ser or Ala
  Variant (40)..(40): Xaa in Position 40 is Lys, Arg or Glu
  Variant (41)..(42): Xaa in Position 41 to 42 is any amino acid
  Variant (43)..(43): Xaa in Position 43 is Val, Ile, Leu, Ala or Met
  Variant (44)..(44): Xaa in Position 44 is any amino acid
  Variant (45)..(45): Xaa in Position 45 is Asn, Gly, Gln or Ala
  Variant (46)..(46): Xaa in Position 46 is Leu, Ile, Met, Phe or Val
  Variant (47)..(49): Xaa in Position 47 to 49 is any amino acid
  Variant (50)..(50): Xaa in Position 50 is Arg, Lys or Glu
  Variant (51)..(51): Xaa in Position 51 is Phe or Tyr
  Variant (52)..(52): Xaa in Position 52 is any amino acid
  Variant (54)..(59): Xaa in Position 54 to 59 is any amino acid
  Variant (60)..(60): Xaa in Position 60 is no amino acid or any amino acid
  Variant (61)..(61): Xaa in Position 61 is Trp, Met, Asn or Leu
  Variant (62)..(63): Xaa in Position 62 to 63 is any amino acid
  Variant (64)..(64): Xaa in Position 64 is no amino acid or any amino acid
  Variant (65)..(65): Xaa in Position 65 is no amino acid or any amino acid
  Variant (66)..(66): Xaa in Position 66 is Ile, Val or Ala
  Variant (67)..(68): Xaa in Position 67 to 68 is any amino acid
  Variant (69)..(69): Xaa in Position 69 is Val, Ile, Met or Leu
  Variant (70)..(70): Xaa in Position 70 is any amino acid
  Variant (71)..(71): Xaa in Position 71 is Ile, Leu, Val, Phe or Ser
  Variant (72)..(74): Xaa in Position 72 to 74 is any amino acid
  Variant (76)..(77): Xaa in Position 76 to 77 is any amino acid
  Variant (78)..(78): Xaa in Position 78 is Gly, Asp, Val or Ala
  Variant (79)..(81): Xaa in Position 79 to 81 is any amino acid
  Variant (82)..(82): Xaa in Position 82 is Arg or Lys
  Variant (83)..(83): Xaa in Position 83 is no amino acid or any amino acid
  Variant (84)..(84): Xaa in Position 84 is no amino acid or any amino acid
  Variant (85)..(85): Xaa in Position 85 is Tyr or Phe
  Variant (86)..(86): Xaa in Position 86 is Tyr, Phe or Trp
  Variant (87)..(87): Xaa in Position 87 is Asp, Glu, Ala or Asn
  Variant (88)..(89): Xaa in Position 88 to 89 is any amino acid
  Variant (91)..(91): Xaa in Position 91 is no amino acid or any amino acid
  Variant (92)..(92): Xaa in Position 92 is any amino acid
  Variant (93)..(93): Xaa in Position 93 is Leu, Ile, Val, Met or Ala
  Variant (94)..(94): Xaa in Position 94 is Arg, Lys or Leu
  Variant (96)..(96): Xaa in Position 96 is Met, Val, Ile or Leu
  Variant (97)..(97): Xaa in Position 97 is Val, Met, Ile, Leu or Phe
  Variant (98)..(98): Xaa in Position 98 is Gln, Pro or Thr
  Variant (99)..(99): Xaa in Position 99 is Asn or Ser
  Variant (100)..(100): Xaa in Position 100 is His, Gln or Pro
  Variant (101)..(102): Xaa in Position 101 to 102 is any amino acid
  Variant (103)..(103): Xaa in Position 103 is Gln, Glu, Asn or Leu
  Variant (104)..(104): Xaa in Position 104 is Leu, Ile, Val, Met or Thr
  Variant (105)..(105): Xaa in Position 105 is Leu, Met, Val, Ile, Phe or Tyr
  Variant (106)..(106): Xaa in Position 106 is any amino acid
  Variant (107)..(107): Xaa in Position 107 is Leu, Met, Ile, Val, Trp or Phe
  Variant (108)..(109): Xaa in Position 108 to 109 is any amino acid
  Variant (111)..(111): Xaa in Position 111 is Glu, Asp, Ser or Asn
  Variant (112)..(112): Xaa in Position 112 is any amino acid
  Variant (114)..(118): Xaa in Position 114 to 118 is any amino acid
  Variant (119)..(121): Xaa in Position 119 to 121 is no amino acid or any amino acid
  Variant (122)..(122): Xaa in Position 122 is Ile, Val, Leu, Phe or Met
  Variant (123)..(124): Xaa in Position 123 to 124 is any amino acid
  Variant (125)..(125): Xaa in Position 125 is Glu, Lys, Ala, Arg or His
  Variant (126)..(126): Xaa in Position 126 is Lys or Val
  Variant (127)..(128): Xaa in Position 127 to 128 is any amino acid
  Variant (129)..(129): Xaa in Position 129 is Val, Ile, Ala, Leu or Phe
  Variant (130)..(130): Xaa in Position 130 is Leu, Ile, Val, Phe or Met
  Variant (131)..(140): Xaa in Position 131 to 140 is any amino acid
  Variant (141)..(145): Xaa in Position 141 to 145 is no amino acid or any amino acid
  Variant (146)..(146): Xaa in Position 146 is Val, Leu, Ile, Ala or Ser
  Variant (147)..(147): Xaa in Position 147 is any amino acid
  Variant (148)..(148): Xaa in Position 148 is Gly or Ala
  Variant (149)..(149): Xaa in Position 149 is Gln or Arg
  Variant (150)..(150): Xaa in Position 150 is Tyr or Phe

SEQ ID NO: 6199 - protein, 44 aa, Artificial sequence; identical to SEQ ID NO: 2918
  Consensus
  Variant (1)..(1): Xaa in Position 1 is Tyr or Leu
  Variant (2)..(2): Xaa in Position 2 is any amino acid
  Variant (3)..(13): Xaa in Position 3 to 13 is no amino acid or any amino acid
  Variant (15)..(17): Xaa in Position 15 to 17 is any amino acid
  Variant (19)..(19): Xaa in Position 19 is Phe or Tyr
  Variant (20)..(25): Xaa in Position 20 to 25 is any amino acid
  Variant (26)..(26): Xaa in Position 26 is Ile, Val, Leu or Phe
  Variant (27)..(29): Xaa in Position 27 to 29 is any amino acid
  Variant (30)..(30): Xaa in Position 30 is Arg, Asn, Phe or Gln
  Variant (31)..(31): Xaa in Position 31 is Trp or Phe
  Variant (32)..(32): Xaa in Position 32 is any amino acid
  Variant (33)..(33): Xaa in Position 33 is Gly or Asp
  Variant (34)..(34): Xaa in Position 34 is Val or Thr
  Variant (36)..(36): Xaa in Position 36 is Phe or Ile
  Variant (37)..(37): Xaa in Position 37 is any amino acid
  Variant (38)..(38): Xaa in Position 38 is Leu, Met, Ile, Val or Phe
  Variant (39)..(40): Xaa in Position 39 to 40 is any amino acid
  Variant (41)..(41): Xaa in Position 41 is Gly or Ala
  Variant (43)..(43): Xaa in Position 43 is any amino acid
  Variant (44)..(44): Xaa in Position 44 is Leu, Met or Val

SEQ ID NO: 6200 - protein, 97 aa, Artificial sequence; identical to SEQ ID NO: 2919
  Consensus
  Variant (1)..(1): Xaa in Position 1 is Asn, Asp, Gln, Arg or Lys
  Variant (2)..(4): Xaa in Position 2 to 4 is any amino acid
  Variant (5)..(5): Xaa in Position 5 is Ile, Leu, Met, Phe or Val
  Variant (6)..(6): Xaa in Position 6 is any amino acid
  Variant (7)..(7): Xaa in Position 7 is Ile, Leu, Val, Ala or Ser
  Variant (8)..(8): Xaa in Position 8 is any amino acid
  Variant (9)..(9): Xaa in Position 9 is Pro or His
  Variant (10)..(12): Xaa in Position 10 to 12 is any amino acid
  Variant (13)..(13): Xaa in Position 13 is Ile, Val, Met, Leu, Phe or Ala
  Variant (14)..(19): Xaa in Position 14 to 19 is any amino acid
  Variant (20)..(20): Xaa in Position 20 is Lys, Ser or Arg
  Variant (21)..(29): Xaa in Position 21 to 29 is any amino acid
  Variant (30)..(35): Xaa in Position 30 to 35 is no amino acid or no amino acid
  Variant (36)..(36): Xaa in Position 36 is Leu, Ile, Met or Val
  Variant (37)..(44): Xaa in Position 37 to 44 is any amino acid
  Variant (45)..(64): Xaa in Position 45 to 64 is no amino acid or any amino acid
  Variant (65)..(65): Xaa in Position 65 is Ala, Gly, Pro or Ser
  Variant (66)..(66): Xaa in Position 66 is Tyr or Leu
  Variant (67)..(68): Xaa in Position 67 to 68 is any amino acid
  Variant (69)..(69): Xaa in Position 69 is Leu, Met or Tyr
  Variant (70)..(70): Xaa in Position 70 is Leu, Ile, Phe or Met
  Variant (71)..(71): Xaa in Position 71 is any amino acid
  Variant (72)..(72): Xaa in Position 72 is Asp, Glu, Ala, Asn or His
  Variant (73)..(75): Xaa in Position 73 to 75 is any amino acid
  Variant (76)..(76): Xaa in Position 76 is Gly, Ser or Asp
  Variant (77)..(80): Xaa in Position 77 to 80 is any amino acid
  Variant (81)..(81): Xaa in Position 81 is Phe or Tyr
  Variant (82)..(85): Xaa in Position 82 to 85 is any amino acid
  Variant (86)..(86): Xaa in Position 86 is no amino acid or any amino acid
  Variant (87)..(87): Xaa in Position 87 is Val, Ile, Leu, Ala or Gln
  Variant (88)..(90): Xaa in Position 88 to 90 is any amino acid
  Variant (92)..(96): Xaa in Position 92 to 96 is any amino acid
  Variant (97)..(97): Xaa in Position 97 is Ile, Val, Leu, Phe or Ala

SEQ ID NO: 6201 - protein, 1277 aa, Artificial sequence; identical to SEQ ID NO: 2920
  Consensus
  Variant (1)..(1277): Xaa in all Positions is any amino acid

SEQ ID NO: 6202 - DNA, 1047 bp, Escherichia coli K12; identical to SEQ ID NO: 1323
  CDS (1)..(1047)

SEQ ID NO: 6203 - protein, 348 aa, Escherichia coli K12; identical to SEQ ID NO: 1324

SEQ ID NO: 6204 - DNA, 1235 bp, Salmonella typhimurium; identical to SEQ ID NO: 1325
  CDS (165)..(1235)

SEQ ID NO: 6205 - protein, 356 aa, Salmonella typhimurium; identical to SEQ ID NO: 1326

SEQ ID NO: 6206 - DNA, 1086 bp, Deinococcus radiodurans; identical to SEQ ID NO: 1327
  CDS (1)..(1086)

SEQ ID NO: 6207 - protein, 361 aa, Deinococcus radiodurans; identical to SEQ ID NO: 1328

SEQ ID NO: 6208 - DNA, 1056 bp, Neisseria meningitidis; identical to SEQ ID NO: 1329
  CDS (1)..(1056)

SEQ ID NO: 6209 - protein, 351 aa, Neisseria meningitidis; identical to SEQ ID NO: 1330

SEQ ID NO: 6210 - DNA, 1047 bp, Yersinia pestis; identical to SEQ ID NO: 1331
  CDS (1)..(1047)

SEQ ID NO: 6211 - protein, 348 aa, Yersinia pestis; identical to SEQ ID NO: 1332

SEQ ID NO: 6212 - DNA, 1071 bp, Escherichia coli; identical to SEQ ID NO: 1333
  CDS (1)..(1071)

SEQ ID NO: 6213 - protein, 356 aa, Escherichia coli; identical to SEQ ID NO: 1334

SEQ ID NO: 6214 - DNA, 1131 bp, Nostoc sp. PCC 7120; identical to SEQ ID NO: 1335
  CDS (1)..(1131)

SEQ ID NO: 6215 - protein, 376 aa, Nostoc sp. PCC 7120; identical to SEQ ID NO: 1336

SEQ ID NO: 6216 - DNA, 1053 bp, Salmonella enterica subsp. enterica serovar Typhi; identical to SEQ ID NO: 1337
  CDS (1)..(1053)

SEQ ID NO: 6217 - protein, 350 aa, Salmonella enterica subsp. enterica serovar Typhi; identical to SEQ ID NO: 1338

SEQ ID NO: 6218 - DNA, 1077 bp, Pseudomonas aeruginosa; identical to SEQ ID NO: 1339
  CDS (1)..(1077)

SEQ ID NO: 6219 - protein, 358 aa, Pseudomonas aeruginosa; identical to SEQ ID NO: 1340

SEQ ID NO: 6220 - DNA, 1047 bp, Buchnera sp; identical to SEQ ID NO: 1341
  CDS (1)..(1047)

SEQ ID NO: 6221 - protein, 348 aa, Buchnera sp; identical to SEQ ID NO: 1342

SEQ ID NO: 6222 - DNA, 1074 bp, Vibrio cholerae; identical to SEQ ID NO: 1343
  CDS (1)..(1074)

SEQ ID NO: 6223 - protein, 357 aa, Vibrio cholerae; identical to SEQ ID NO: 1344

SEQ ID NO: 6224 - DNA, 1038 bp, Lactococcus lactis subsp. lactis; identical to SEQ ID NO: 1345
  CDS (1)..(1038)

SEQ ID NO: 6225 - protein, 345 aa, Lactococcus lactis subsp. lactis; identical to SEQ ID NO: 1346

SEQ ID NO: 6226 - DNA, 1023 bp, Lactococcus lactis subsp. lactis; identical to SEQ ID NO: 1347
  CDS (1)..(1023)

SEQ ID NO: 6227 - protein, 340 aa, Lactococcus lactis subsp. lactis; identical to SEQ ID NO: 1348

SEQ ID NO: 6228 - DNA, 1032 bp, Streptococcus pneumoniae; identical to SEQ ID NO: 1349
  CDS (1)..(1032)

SEQ ID NO: 6229 - protein, 343 aa, Streptococcus pneumoniae; identical to SEQ ID NO: 1350

SEQ ID NO: 6230 - DNA, 1095 bp, Pseudomonas aeruginosa; identical to SEQ ID NO: 1351
  CDS (1)..(1095)

SEQ ID NO: 6231 - protein, 364 aa, Pseudomonas aeruginosa; identical to SEQ ID NO: 1352

SEQ ID NO: 6232 - DNA, 1110 bp, Caulobacter crescentus; identical to SEQ ID NO: 1353
  CDS (1)..(1110)

SEQ ID NO: 6233 - protein, 369 aa, Caulobacter crescentus; identical to SEQ ID NO: 1354

SEQ ID NO: 6234 - DNA, 1032 bp, Streptococcus pneumoniae; identical to SEQ ID NO: 1355
  CDS (1)..(1032)

SEQ ID NO: 6235 - protein, 343 aa, Streptococcus pneumoniae; identical to SEQ ID NO: 1356

SEQ ID NO: 6236 - DNA, 1047 bp, Buchnera aphidicola; identical to SEQ ID NO: 1357
  CDS (1)..(1047)

SEQ ID NO: 6237 - protein, 348 aa, Buchnera aphidicola; identical to SEQ ID NO: 1358

SEQ ID NO: 6238 - DNA, 1089 bp, Haemophilus influenzae; identical to SEQ ID NO: 1359
  CDS (1)..(1089)

SEQ ID NO: 6239 - protein, 362 aa, Haemophilus influenzae; identical to SEQ ID NO: 1360

SEQ ID NO: 6240 - DNA, 1502 bp, Candida albicans; identical to SEQ ID NO: 1361
  CDS (336)..(1442)

SEQ ID NO: 6241 - protein, 368 aa, Candida albicans; identical to SEQ ID NO: 1362

SEQ ID NO: 6242 - DNA, 1113 bp, Saccharomyces cerevisiae; identical to SEQ ID NO: 1363
  CDS (1)..(1113)

SEQ ID NO: 6243 - protein, 370 aa, Saccharomyces cerevisiae; identical to SEQ ID NO: 1364

SEQ ID NO: 6244 - DNA, 2048 bp, Saccharomyces cerevisiae; identical to SEQ ID NO: 1365
  CDS (619)..(1731)

SEQ ID NO: 6245 - protein, 370 aa, Saccharomyces cerevisiae; identical to SEQ ID NO: 1366

SEQ ID NO: 6246 - DNA, 1107 bp, Schizosaccharomyces pombe; identical to SEQ ID NO: 1367
  CDS (1)..(1107)

SEQ ID NO: 6247 - protein, 368 aa, Schizosaccharomyces pombe; identical to SEQ ID NO: 1368

SEQ ID NO: 6248 - DNA, 1089 bp, Amycolatopsis orientalis; identical to SEQ ID NO: 1369
  CDS (1)..(1089)

SEQ ID NO: 6249 - protein, 362 aa, Amycolatopsis orientalis; identical to SEQ ID NO: 1370

SEQ ID NO: 6250 - DNA, 1119 bp, Schizosaccharomyces pombe; identical to SEQ ID NO: 1371
  CDS (1)..(1119)

SEQ ID NO: 6251 - protein, 372 aa, Schizosaccharomyces pombe; identical to SEQ ID NO: 1372

SEQ ID NO: 6252 - DNA, 1248 bp, Corynebacterium glutamicum; identical to SEQ ID NO: 1373
  CDS (101)..(1228)

SEQ ID NO: 6253 - protein, 375 aa, Corynebacterium glutamicum; identical to SEQ ID NO: 1374

SEQ ID NO: 6254 - DNA, 1083 bp, Methylophilus methylotrophus; identical to SEQ ID NO: 1375
  CDS (1)..(1083)

SEQ ID NO: 6255 - protein, 360 aa, Methylophilus methylotrophus; identical to SEQ ID NO: 1376

SEQ ID NO: 6256 - DNA, 1107 bp, Debaryomyces hansenii; identical to SEQ ID NO: 1377
  CDS (1)..(1107)

SEQ ID NO: 6257 - protein, 368 aa, Debaryomyces hansenii; identical to SEQ ID NO: 1378

SEQ ID NO: 6258 - DNA, 1074 bp, Yarrowia lipolytica; identical to SEQ ID NO: 1379
  CDS (1)..(1074)

SEQ ID NO: 6259 - protein, 357 aa, Yarrowia lipolytica; identical to SEQ ID NO: 1380

SEQ ID NO: 6260 - DNA, 1089 bp, Yarrowia lipolytica; identical to SEQ ID NO: 1381
  CDS (1)..(1089)

SEQ ID NO: 6261 - protein, 362 aa, Yarrowia lipolytica; identical to SEQ ID NO: 1382

SEQ ID NO: 6262 - DNA, 1119 bp, Kluyveromyces lactis; identical to SEQ ID NO: 1383
  CDS (1)..(1119)

SEQ ID NO: 6263 - protein, 372 aa, Kluyveromyces lactis; identical to SEQ ID NO: 1384

SEQ ID NO: 6264 - DNA, 1095 bp, Kluyveromyces lactis; identical to SEQ ID NO: 1385
  CDS (1)..(1095)

SEQ ID NO: 6265 - protein, 364 aa, Kluyveromyces lactis; identical to SEQ ID NO: 1386

SEQ ID NO: 6266 - DNA, 1074 bp, Erwinia carotovora subsp; identical to SEQ ID NO: 1387
  CDS (1)..(1074)

SEQ ID NO: 6267 - protein, 357 aa, Erwinia carotovora subsp; identical to SEQ ID NO: 1388

SEQ ID NO: 6268 - DNA, 1047 bp, Erwinia carotovora subsp; identical to SEQ ID NO: 1389
  CDS (1)..(1047)

SEQ ID NO: 6269 - protein, 348 aa, Erwinia carotovora subsp; identical to SEQ ID NO: 1390

SEQ ID NO: 6270 - DNA, 1056 bp, Erwinia carotovora subsp; identical to SEQ ID NO: 1391
  CDS (1)..(1056)

SEQ ID NO: 6271 - protein, 351 aa, Erwinia carotovora subsp; identical to SEQ ID NO: 1392

SEQ ID NO: 6272 - DNA, 1113 bp, Acinetobacter sp; identical to SEQ ID NO: 1393
  CDS (1)..(1113)

SEQ ID NO: 6273 - protein, 370 aa, Acinetobacter sp; identical to SEQ ID NO: 1394

SEQ ID NO: 6274 - DNA, 1056 bp, Acinetobacter sp; identical to SEQ ID NO: 1395
  CDS (1)..(1056)

SEQ ID NO: 6275 - protein, 351 aa, Acinetobacter sp; identical to SEQ ID NO: 1396

SEQ ID NO: 6276 - DNA, 1119 bp, Candida glabrata; identical to SEQ ID NO: 1397
  CDS (1)..(1119)

SEQ ID NO: 6277 - protein, 372 aa, Candida glabrata; identical to SEQ ID NO: 1398

SEQ ID NO: 6278 - DNA, 1071 bp, Candida glabrata; identical to SEQ ID NO: 1399
  CDS (1)..(1071)

SEQ ID NO: 6279 - protein, 356 aa, Candida glabrata; identical to SEQ ID NO: 1400

SEQ ID NO: 6280 - DNA, 1083 bp, Photobacterium profundum; identical to SEQ ID NO: 1401
  CDS (1)..(1083)

SEQ ID NO: 6281 - protein, 360 aa, Photobacterium profundum; identical to SEQ ID NO: 1402

SEQ ID NO: 6282 - DNA, 1053 bp, Photobacterium profundum; identical to SEQ ID NO: 1403
  CDS (1)..(1053)

SEQ ID NO: 6283 - protein, 350 aa, Photobacterium profundum; identical to SEQ ID NO: 1404

SEQ ID NO: 6284 - DNA, 1113 bp, Photobacterium profundum; identical to SEQ ID NO: 1405
  CDS (1)..(1113)

SEQ ID NO: 6285 - protein, 370 aa, Photobacterium profundum; identical to SEQ ID NO: 1406

SEQ ID NO: 6286 - DNA, 1056 bp, Photobacterium profundum; identical to SEQ ID NO: 1407
  CDS (1)..(1056)

SEQ ID NO: 6287 - protein, 351 aa, Photobacterium profundum; identical to SEQ ID NO: 1408

SEQ ID NO: 6288 - DNA, 1092 bp, Parachlamydia sp; identical to SEQ ID NO: 1409
  CDS (1)..(1092)

SEQ ID NO: 6289 - protein, 363 aa, Parachlamydia sp; identical to SEQ ID NO: 1410

SEQ ID NO: 6290 - DNA, 1095 bp, Rhodopseudomonas palustris; identical to SEQ ID NO: 1411
  CDS (1)..(1095)

SEQ ID NO: 6291 - protein, 364 aa, Rhodopseudomonas palustris; identical to SEQ ID NO: 1412

SEQ ID NO: 6292 - DNA, 1100 bp, Amycolatopsis methanolica; identical to SEQ ID NO: 1413
  CDS (1)..(1086)

SEQ ID NO: 6293 - protein, 361 aa, Amycolatopsis methanolica; identical to SEQ ID NO: 1414

SEQ ID NO: 6294 - DNA, 1071 bp, Treponema denticola; identical to SEQ ID NO: 1415
  CDS (1)..(1071)

SEQ ID NO: 6295 - protein, 356 aa, Treponema denticola; identical to SEQ ID NO: 1416

SEQ ID NO: 6296 - DNA, 1068 bp, Geobacter sulfurreducens; identical to SEQ ID NO: 1417
  CDS (1)..(1068)

SEQ ID NO: 6297 - protein, 355 aa, Geobacter sulfurreducens; identical to SEQ ID NO: 1418

SEQ ID NO: 6298 - DNA, 1095 bp, Ashbya gossypii; identical to SEQ ID NO: 1419
  CDS (1)..(1095)

SEQ ID NO: 6299 - protein, 364 aa, Ashbya gossypii; identical to SEQ ID NO: 1420

SEQ ID NO: 6300 - DNA, 1122 bp, Ashbya gossypii; identical to SEQ ID NO: 1421
  CDS (1)..(1122)

SEQ ID NO: 6301 - protein, 373 aa, Ashbya gossypii; identical to SEQ ID NO: 1422

SEQ ID NO: 6302 - DNA, 1098 bp, Amycolatopsis balhimycina; identical to SEQ ID NO: 1423
  CDS (1)..(1098)

SEQ ID NO: 6303 - protein, 365 aa, Amycolatopsis balhimycina; identical to SEQ ID NO: 1424

SEQ ID NO: 6304 - DNA, 1071 bp, Vibrio vulnificus; identical to SEQ ID NO: 1425
  CDS (1)..(1071)

SEQ ID NO: 6305 - protein, 356 aa, Vibrio vulnificus; identical to SEQ ID NO: 1426

SEQ ID NO: 6306 - DNA, 1047 bp, Photorhabdus luminescens; identical to SEQ ID NO: 1427
  CDS (1)..(1047)

SEQ ID NO: 6307 - protein, 348 aa, Photorhabdus luminescens; identical to SEQ ID NO: 1428

SEQ ID NO: 6308 - DNA, 1053 bp, Photorhabdus luminescens; identical to SEQ ID NO: 1429
  CDS (1)..(1053)

SEQ ID NO: 6309 - protein, 350 aa, Photorhabdus luminescens; identical to SEQ ID NO: 1430

SEQ ID NO: 6310 - DNA, 1095 bp, Photorhabdus luminescens; identical to SEQ ID NO: 1431
  CDS (1)..(1095)

SEQ ID NO: 6311 - protein, 364 aa, Photorhabdus luminescens; identical to SEQ ID NO: 1432

SEQ ID NO: 6312 - DNA, 1119 bp, Gloeobacter violaceus; identical to SEQ ID NO: 1433
  CDS (1)..(1119)

SEQ ID NO: 6313 - protein, 372 aa, Gloeobacter violaceus; identical to SEQ ID NO: 1434

SEQ ID NO: 6314 - DNA, 1107 bp, Chromobacterium violaceum; identical to SEQ ID NO: 1435
  CDS (1)..(1107)

SEQ ID NO: 6315 - protein, 368 aa, Chromobacterium violaceum; identical to SEQ ID NO: 1436

SEQ ID NO: 6316 - DNA, 1059 bp, Chromobacterium violaceum; identical to SEQ ID NO: 1437
  CDS (1)..(1059)

SEQ ID NO: 6317 - protein, 352 aa, Chromobacterium violaceum; identical to SEQ ID NO: 1438

SEQ ID NO: 6318 - DNA, 1140 bp, Neurospora crassa; identical to SEQ ID NO: 1439
  CDS (1)..(1140)

SEQ ID NO: 6319 - protein, 379 aa, Neurospora crassa; identical to SEQ ID NO: 1440

SEQ ID NO: 6320 - DNA, 1092 bp, Neurospora crassa; identical to SEQ ID NO: 1441
  CDS (1)..(1092)

SEQ ID NO: 6321 - protein, 363 aa, Neurospora crassa; identical to SEQ ID NO: 1442

SEQ ID NO: 6322 - DNA, 1068 bp, Synechococcus sp; identical to SEQ ID NO: 1443
  CDS (1)..(1068)

SEQ ID NO: 6323 - protein, 355 aa, Synechococcus sp; identical to SEQ ID NO: 1444

SEQ ID NO: 6324 - DNA, 1053 bp, Rhodopirellula baltica; identical to SEQ ID NO: 1445
  CDS (1)..(1053)

SEQ ID NO: 6325 - protein, 350 aa, Rhodopirellula baltica; identical to SEQ ID NO: 1446

SEQ ID NO: 6326 - DNA, 1068 bp, Prochlorococcus marinus subsp; identical to SEQ ID NO: 1447
  CDS (1)..(1068)

SEQ ID NO: 6327 - protein, 355 aa, Prochlorococcus marinus subsp; identical to SEQ ID NO: 1448

SEQ ID NO: 6328 - DNA, 1083 bp, Prochlorococcus marinus; identical to SEQ ID NO: 1449
  CDS (1)..(1083)

SEQ ID NO: 6329 - protein, 360 aa, Prochlorococcus marinus; identical to SEQ ID NO: 1450

SEQ ID NO: 6330 - DNA, 1074 bp, Prochlorococcus marinus; identical to SEQ ID NO: 1451
  CDS (1)..(1074)

SEQ ID NO: 6331 - protein, 357 aa, Prochlorococcus marinus; identical to SEQ ID NO: 1452

SEQ ID NO: 6332 - DNA, 1113 bp, Haemophilus ducreyi; identical to SEQ ID NO: 1453
  CDS (1)..(1113)

SEQ ID NO: 6333 - protein, 370 aa, Haemophilus ducreyi; identical to SEQ ID NO: 1454

SEQ ID NO: 6334 - DNA, 1080 bp, Haemophilus ducreyi; identical to SEQ ID NO: 1455
  CDS (1)..(1080)

SEQ ID NO: 6335 - protein, 359 aa, Haemophilus ducreyi; identical to SEQ ID NO: 1456

SEQ ID NO: 6336 - DNA, 1086 bp, Candidatus Blochmannia floridanus; identical to SEQ ID NO: 1457
  CDS (1)..(1086)

SEQ ID NO: 6337 - protein, 361 aa, Candidatus Blochmannia floridanus; identical to SEQ ID NO: 1458

SEQ ID NO: 6338 - DNA, 1074 bp, Bordetella pertussis; identical to SEQ ID NO: 1459
  CDS (1)..(1074)

SEQ ID NO: 6339 - protein, 357 aa, Bordetella pertussis; identical to SEQ ID NO: 1460

SEQ ID NO: 6340 - DNA, 1119 bp, Bordetella bronchiseptica; identical to SEQ ID NO: 1461
  CDS (1)..(1119)

SEQ ID NO: 6341 - protein, 372 aa, Bordetella bronchiseptica; identical to SEQ ID NO: 1462

SEQ ID NO: 6342 - DNA, 1179 bp, Nitrosomonas europaea; identical to SEQ ID NO: 1463
  CDS (1)..(1179)

SEQ ID NO: 6343 - protein, 392 aa, Nitrosomonas europaea; identical to SEQ ID NO: 1464

SEQ ID NO: 6344 - DNA, 1083 bp, Coxiella burnetii; identical to SEQ ID NO: 1465
  CDS (1)..(1083)

SEQ ID NO: 6345 - protein, 360 aa, Coxiella burnetii; identical to SEQ ID NO: 1466

SEQ ID NO: 6346 - DNA, 834 bp, Vibrio anguillarum; identical to SEQ ID NO: 1467
  CDS (1)..(834)

SEQ ID NO: 6347 - protein, 277 aa, Vibrio anguillarum; identical to SEQ ID NO: 1468

SEQ ID NO: 6348 - DNA, 1143 bp, Xylella fastidiosa; identical to SEQ ID NO: 1469
  CDS (1)..(1143)

SEQ ID NO: 6349 - protein, 380 aa, Xylella fastidiosa; identical to SEQ ID NO: 1470

SEQ ID NO: 6350 - DNA, 1053 bp, Vibrio parahaemolyticus; identical to SEQ ID NO: 1471
  CDS (1)..(1053)

SEQ ID NO: 6351 - protein, 350 aa, Vibrio parahaemolyticus; identical to SEQ ID NO: 1472

SEQ ID NO: 6352 - DNA, 1053 bp, Vibrio parahaemolyticus; identical to SEQ ID NO: 1473
  CDS (1)..(1053)

SEQ ID NO: 6353 - protein, 350 aa, Vibrio parahaemolyticus; identical to SEQ ID NO: 1474

SEQ ID NO: 6354 - DNA, 1074 bp, Vibrio parahaemolyticus; identical to SEQ ID NO: 1475
  CDS (1)..(1074)

SEQ ID NO: 6355 - protein, 357 aa, Vibrio parahaemolyticus; identical to SEQ ID NO: 1476

SEQ ID NO: 6356 - DNA, 1083 bp, Pseudomonas syringae; identical to SEQ ID NO: 1477
  CDS (1)..(1083)

SEQ ID NO: 6357 - protein, 360 aa, Pseudomonas syringae; identical to SEQ ID NO: 1478

SEQ ID NO: 6358 - DNA, 1077 bp, Pseudomonas syringae; identical to SEQ ID NO: 1479
  CDS (1)..(1077)

SEQ ID NO: 6359 - protein, 358 aa, Pseudomonas syringae; identical to SEQ ID NO: 1480

SEQ ID NO: 6360 - DNA, 1062 bp, Pseudomonas putida; identical to SEQ ID NO: 1481
  CDS (1)..(1062)

SEQ ID NO: 6361 - protein, 353 aa, Pseudomonas putida; identical to SEQ ID NO: 1482

SEQ ID NO: 6362 - DNA, 1113 bp, Pseudomonas putida; identical to SEQ ID NO: 1483
  CDS (1)..(1113)

SEQ ID NO: 6363 - protein, 370 aa, Pseudomonas putida; identical to SEQ ID NO: 1484

SEQ ID NO: 6364 - DNA, 1086 bp, Bradyrhizobium japonicum; identical to SEQ ID NO: 1485
  CDS (1)..(1086)

SEQ ID NO: 6365 - protein, 361 aa, Bradyrhizobium japonicum; identical to SEQ ID NO: 1486

SEQ ID NO: 6366 - DNA, 1053 bp, Yersinia pestis; identical to SEQ ID NO: 1487
  CDS (1)..(1053)

SEQ ID NO: 6367 - protein, 350 aa, Yersinia pestis; identical to SEQ ID NO: 1488

SEQ ID NO: 6368 - DNA, 1077 bp, Yersinia pestis; identical to SEQ ID NO: 1489
  CDS (1)..(1077)

SEQ ID NO: 6369 - protein, 358 aa, Yersinia pestis; identical to SEQ ID NO: 1490

SEQ ID NO: 6370 - DNA, 1038 bp, Wigglesworthia glossinidia brevipalpis; identical to SEQ ID NO: 1491
  CDS (1)..(1038)

SEQ ID NO: 6371 - protein, 345 aa, Wigglesworthia glossinidia brevipalpis; identical to SEQ ID NO: 1492

SEQ ID NO: 6372 - DNA, 1053 bp, Vibrio vulnificus; identical to SEQ ID NO: 1493
  CDS (1)..(1053)

SEQ ID NO: 6373 - protein, 350 aa, Vibrio vulnificus; identical to SEQ ID NO: 1494

SEQ ID NO: 6374 - DNA, 1053 bp, Vibrio vulnificus; identical to SEQ ID NO: 1495
  CDS (1)..(1053)

SEQ ID NO: 6375 - protein, 350 aa, Vibrio vulnificus; identical to SEQ ID NO: 1496

SEQ ID NO: 6376 - DNA, 1071 bp, Vibrio vulnificus; identical to SEQ ID NO: 1497
  CDS (1)..(1071)

SEQ ID NO: 6377 - protein, 356 aa, Vibrio vulnificus; identical to SEQ ID NO: 1498

SEQ ID NO: 6378 - DNA, 1062 bp, Synechococcus elongatus; identical to SEQ ID NO: 1499
  CDS (1)..(1062)

SEQ ID NO: 6379 - protein, 353 aa, Synechococcus elongatus; identical to SEQ ID NO: 1500

SEQ ID NO: 6380 - DNA, 1032 bp, Streptococcus mutans; identical to SEQ ID NO: 1501
  CDS (1)..(1032)

SEQ ID NO: 6381 - protein, 343 aa, Streptococcus mutans; identical to SEQ ID NO: 1502

SEQ ID NO: 6382 - DNA, 1035 bp, Streptococcus mutans; identical to SEQ ID NO: 1503
  CDS (1)..(1035)

SEQ ID NO: 6383 - protein, 344 aa, Streptococcus mutans; identical to SEQ ID NO: 1504

SEQ ID NO: 6384 - DNA, 1008 bp, Streptococcus agalactiae; identical to SEQ ID NO: 1505
  CDS (1)..(1008)

SEQ ID NO: 6385 - protein, 335 aa, Streptococcus agalactiae; identical to SEQ ID NO: 1506

SEQ ID NO: 6386 - DNA, 1065 bp, Shewanella oneidensis; identical to SEQ ID NO: 1507
  CDS (1)..(1065)

SEQ ID NO: 6387 - protein, 354 aa, Shewanella oneidensis; identical to SEQ ID NO: 1508

SEQ ID NO: 6388 - DNA, 1092 bp, Shewanella oneidensis; identical to SEQ ID NO: 1509
  CDS (1)..(1092)

SEQ ID NO: 6389 - protein, 363 aa, Shewanella oneidensis; identical to SEQ ID NO: 1510

SEQ ID NO: 6390 - DNA, 1059 bp, Shewanella oneidensis; identical to SEQ ID NO: 1511
  CDS (1)..(1059)

SEQ ID NO: 6391 - protein, 352 aa, Shewanella oneidensis; identical to SEQ ID NO: 1512

SEQ ID NO: 6392 - DNA, 1053 bp, Escherichia coli O6; identical to SEQ ID NO: 1513
  CDS (1)..(1053)

SEQ ID NO: 6393 - protein, 350 aa, Escherichia coli O6; identical to SEQ ID NO: 1514

SEQ ID NO: 6394 - DNA, 1170 bp, Corynebacterium efficiens; identical to SEQ ID NO: 1515
  CDS (1)..(1170)

SEQ ID NO: 6395 - protein, 389 aa, Corynebacterium efficiens; identical to SEQ ID NO: 1516

SEQ ID NO: 6396 - DNA, 1134 bp, Bifidobacterium longum; identical to SEQ ID NO: 1517
  CDS (1)..(1134)

SEQ ID NO: 6397 - protein, 377 aa, Bifidobacterium longum; identical to SEQ ID NO: 1518

SEQ ID NO: 6398 - DNA, 1233 bp, Bifidobacterium longum; identical to SEQ ID NO: 1519
  CDS (1)..(1233)

SEQ ID NO: 6399 - protein, 410 aa, Bifidobacterium longum; identical to SEQ ID NO: 1520

SEQ ID NO: 6400 - DNA, 1221 bp, Phytophthora infestans; identical to SEQ ID NO: 1521
  CDS (20)..(1153)

SEQ ID NO: 6401 - protein, 377 aa, Phytophthora infestans; identical to SEQ ID NO: 1522

SEQ ID NO: 6402 - DNA, 1062 bp, Chlorobium tepidum; identical to SEQ ID NO: 1523
  CDS (1)..(1062)

SEQ ID NO: 6403 - protein, 353 aa, Chlorobium tepidum; identical to SEQ ID NO: 1524

SEQ ID NO: 6404 - DNA, 1074 bp, Xanthomonas campestris; identical to SEQ ID NO: 1525
  CDS (1)..(1074)

SEQ ID NO: 6405 - protein, 357 aa, Xanthomonas campestris; identical to SEQ ID NO: 1526

SEQ ID NO: 6406 - DNA, 1074 bp, Xanthomonas axonopodis; identical to SEQ ID NO: 1527
  CDS (1)..(1074)

SEQ ID NO: 6407 - protein, 357 aa, Xanthomonas axonopodis; identical to SEQ ID NO: 1528

SEQ ID NO: 6408 - DNA, 1080 bp, Ralstonia solanacearum; identical to SEQ ID NO: 1529
  CDS (1)..(1080)

SEQ ID NO: 6409 - protein, 359 aa, Ralstonia solanacearum; identical to SEQ ID NO: 1530

SEQ ID NO: 6410 - DNA, 1179 bp, Ralstonia solanacearum; identical to SEQ ID NO: 1531
  CDS (1)..(1179)

SEQ ID NO: 6411 - protein, 392 aa, Ralstonia solanacearum; identical to SEQ ID NO: 1532

SEQ ID NO: 6412 - DNA, 1065 bp, Synechococcus sp; identical to SEQ ID NO: 1533
  CDS (1)..(1065)

SEQ ID NO: 6413 - protein, 354 aa, Synechococcus sp; identical to SEQ ID NO: 1534

SEQ ID NO: 6414 - DNA, 1035 bp, Escherichia coli; identical to SEQ ID NO: 1535
  CDS (1)..(1035)

SEQ ID NO: 6415 - protein, 344 aa, Escherichia coli; identical to SEQ ID NO: 1536

SEQ ID NO: 6416 - DNA, 1200 bp, Stigmatella aurantiaca; identical to SEQ ID NO: 1537
  CDS (62)..(1147)

SEQ ID NO: 6417 - protein, 361 aa, Stigmatella aurantiaca; identical to SEQ ID NO: 1538

SEQ ID NO: 6418 - DNA, 1092 bp, Rhizobium loti; identical to SEQ ID NO: 1539
  CDS (1)..(1092)

SEQ ID NO: 6419 - protein, 363 aa, Rhizobium loti; identical to SEQ ID NO: 1540

SEQ ID NO: 6420 - DNA, 1083 bp, Amycolatopsis mediterranei; identical to SEQ ID NO: 1541
  CDS (1)..(1083)

SEQ ID NO: 6421 - protein, 360 aa, Amycolatopsis mediterranei; identical to SEQ ID NO: 1542

SEQ ID NO: 6422 - DNA, 1053 bp, Pasteurella multocida; identical to SEQ ID NO: 1543
  CDS (1)..(1053)

SEQ ID NO: 6423 - protein, 350 aa, Pasteurella multocida; identical to SEQ ID NO: 1544

SEQ ID NO: 6424 - DNA, 1086 bp, Pasteurella multocida; identical to SEQ ID NO: 1545
  CDS (1)..(1086)

SEQ ID NO: 6425 - protein, 361 aa, Pasteurella multocida; identical to SEQ ID NO: 1546

SEQ ID NO: 6426 - DNA, 1125 bp, Emericella nidulans; identical to SEQ ID NO: 1547
  CDS (1)..(1125)

SEQ ID NO: 6427 - protein, 374 aa, Emericella nidulans; identical to SEQ ID NO: 1548

SEQ ID NO: 6428 - DNA, 1089 bp, Emericella nidulans; identical to SEQ ID NO: 1549
  CDS (1)..(1089)

SEQ ID NO: 6429 - protein, 362 aa, Emericella nidulans; identical to SEQ ID NO: 1550

SEQ ID NO: 6430 - DNA, 1239 bp, Vibrio cholerae; identical to SEQ ID NO: 1551
  CDS (114)..(1175)

SEQ ID NO: 6431 - protein, 353 aa, Vibrio cholerae; identical to SEQ ID NO: 1552

SEQ ID NO: 6432 - DNA, 2184 bp, Candida albicans; identical to SEQ ID NO: 1553
  CDS (461)..(1573)

SEQ ID NO: 6433 - protein, 370 aa, Candida albicans; identical to SEQ ID NO: 1554

SEQ ID NO: 6434 - DNA, 1047 bp, Buchnera aphidicola; identical to SEQ ID NO: 1555
  CDS (1)..(1047)

SEQ ID NO: 6435 - protein, 348 aa, Buchnera aphidicola; identical to SEQ ID NO: 1556

SEQ ID NO: 6436 - DNA, 1047 bp, Buchnera aphidicola; identical to SEQ ID NO: 1557
  CDS (1)..(1047)

SEQ ID NO: 6437 - protein, 348 aa, Buchnera aphidicola; identical to SEQ ID NO: 1558

SEQ ID NO: 6438 - DNA, 1047 bp, Erwinia herbicola; identical to SEQ ID NO: 1559
  CDS (1)..(1047)

SEQ ID NO: 6439 - protein, 348 aa, Erwinia herbicola; identical to SEQ ID NO: 1560

SEQ ID NO: 6440 - DNA, 1047 bp, Salmonella typhimurium; identical to SEQ ID NO: 1561
  CDS (1)..(1047)

SEQ ID NO: 6441 - protein, 348 aa, Salmonella typhimurium; identical to SEQ ID NO: 1562

SEQ ID NO: 6442 - DNA, 23 bp, Artificial sequence
  Primer sequence
atgaacagaactgacgaactccg

SEQ ID NO: 6443 - DNA, 24 bp, Artificial sequence
  Primer sequence
ttagaagcgggtatctaccgcaga

SEQ ID NO: 6444 - DNA, 785 bp, Escherichia coli K12; identical to SEQ ID NO: 3693
  CDS (86)..(781)

SEQ ID NO: 6445 - protein, 231 aa, Escherichia coli K12; identical to SEQ ID NO: 3694

SEQ ID NO: 6446 - DNA, 1005 bp, Nostoc sp. PCC 7120; identical to SEQ ID NO: 3695
  CDS (1)..(1005)

SEQ ID NO: 6447 - protein, 334 aa, Nostoc sp. PCC 7120; identical to SEQ ID NO: 3696

SEQ ID NO: 6448 - DNA, 642 bp, Salmonella enterica subsp. enterica serovar Typhi; identical to SEQ ID NO: 3697
  CDS (1)..(642)

SEQ ID NO: 6449 - protein, 213 aa, Salmonella enterica subsp. enterica serovar Typhi; identical to SEQ ID NO: 3698

SEQ ID NO: 6450 - DNA, 942 bp, Nostoc sp. PCC 7120; identical to SEQ ID NO: 3699
  CDS (1)..(942)

SEQ ID NO: 6451 - protein, 313 aa, Nostoc sp. PCC 7120; identical to SEQ ID NO: 3700

SEQ ID NO: 6452 - DNA, 642 bp, Yersinia pestis; identical to SEQ ID NO: 3701
  CDS (1)..(642)

SEQ ID NO: 6453 - protein, 213 aa, Yersinia pestis; identical to SEQ ID NO: 3702

SEQ ID NO: 6454 - DNA, 1668 bp, Thermotoga maritima; identical to SEQ ID NO: 3703
  CDS (1)..(1668)

SEQ ID NO: 6455 - protein, 555 aa, Thermotoga maritima; identical to SEQ ID NO: 3704

SEQ ID NO: 6456 - DNA, 2056 bp, Arabidopsis thaliana (mouse-ear cress); identical to SEQ ID NO: 3705
  CDS (1)..(2025)

SEQ ID NO: 6457 - protein, 674 aa, Arabidopsis thaliana (mouse-ear cress); identical to SEQ ID NO: 3706

SEQ ID NO: 6458 - DNA, 624 bp, Staphylococcus aureus; identical to SEQ ID NO: 3707
  CDS (1)..(624)

SEQ ID NO: 6459 - protein, 207 aa, Staphylococcus aureus; identical to SEQ ID NO: 3708

SEQ ID NO: 6460 - DNA, 639 bp, Streptococcus pneumoniae; identical to SEQ ID NO: 3709
  CDS (1)..(639)

SEQ ID NO: 6461 - protein, 212 aa, Streptococcus pneumoniae; identical to SEQ ID NO: 3710

SEQ ID NO: 6462 - DNA, 642 bp, Mycoplasma genitalium; identical to SEQ ID NO: 3711
  CDS (1)..(642): transl_table=4

SEQ ID NO: 6463 - protein, 213 aa, Mycoplasma genitalium; identical to SEQ ID NO: 3712

SEQ ID NO: 6464 - DNA, 636 bp, Bacillus halodurans; identical to SEQ ID NO: 3713
  CDS (1)..(636)

SEQ ID NO: 6465 - protein, 211 aa, Bacillus halodurans; identical to SEQ ID NO: 3714

SEQ ID NO: 6466 - DNA, 1668 bp, Treponema pallidum subsp. pallidum (syphilis spirochete); identical to SEQ ID NO: 3715
  CDS (1)..(1668)

SEQ ID NO: 6467 - protein, 555 aa, Treponema pallidum subsp. pallidum (syphilis spirochete); identical to SEQ ID NO: 3716

SEQ ID NO: 6468 - DNA, 669 bp, Chlamydophila pneumoniae, Chlamydia pneumoniae; identical to SEQ ID NO: 3717
  CDS (1)..(669)

SEQ ID NO: 6469 - protein, 222 aa, Chlamydophila pneumoniae, Chlamydia pneumoniae; identical to SEQ ID NO: 3718

SEQ ID NO: 6470 - DNA, 621 bp, Lactococcus lactis subsp. lactis; identical to SEQ ID NO: 3719
  CDS (1)..(621)

SEQ ID NO: 6471 - protein, 206 aa, Lactococcus lactis subsp. lactis; identical to SEQ ID NO: 3720

SEQ ID NO: 6472 - DNA, 633 bp, Deinococcus radiodurans; identical to SEQ ID NO: 3721
  CDS (1)..(633)

SEQ ID NO: 6473 - protein, 210 aa, Deinococcus radiodurans; identical to SEQ ID NO: 3722

SEQ ID NO: 6474 - DNA, 1932 bp, Arabidopsis thaliana (mouse-ear cress); identical to SEQ ID NO: 3723
  CDS (1)..(1932)

SEQ ID NO: 6475 - protein, 643 aa, Arabidopsis thaliana (mouse-ear cress); identical to SEQ ID NO: 3724

SEQ ID NO: 6476 - DNA, 636 bp, Bacillus subtilis; identical to SEQ ID NO: 3725
  CDS (1)..(636)

SEQ ID NO: 6477 - protein, 211 aa, Bacillus subtilis; identical to SEQ ID NO: 3726

SEQ ID NO: 6478 - DNA, 624 bp, Borrelia burgdorferi (Lyme disease spirochete); identical to SEQ ID NO: 3727
  CDS (1)..(624)

SEQ ID NO: 6479 - protein, 207 aa, Borrelia burgdorferi (Lyme disease spirochete); identical to SEQ ID NO: 3728

SEQ ID NO: 6480 - DNA, 624 bp, Ureaplasma urealyticum; identical to SEQ ID NO: 3729
  CDS (1)..(624): transl_table=4

SEQ ID NO: 6481 - protein, 207 aa, Ureaplasma urealyticum; identical to SEQ ID NO: 3730

SEQ ID NO: 6482 - DNA, 642 bp, Haemophilus influenzae; identical to SEQ ID NO: 3731
  CDS (1)..(642)

SEQ ID NO: 6483 - protein, 213 aa, Haemophilus influenzae; identical to SEQ ID NO: 3732

SEQ ID NO: 6484 - DNA, 1470 bp, Spinacia oleracea (spinach); identical to SEQ ID NO: 3733
  CDS (49)..(1257)

SEQ ID NO: 6485 - protein, 402 aa, Spinacia oleracea (spinach); identical to SEQ ID NO: 3734

SEQ ID NO: 6486 - DNA, 1533 bp, Triticum sp. (wheat); identical to SEQ ID NO: 3735
  CDS (65)..(1279)

SEQ ID NO: 6487 - protein, 404 aa, Triticum sp. (wheat); identical to SEQ ID NO: 3736

SEQ ID NO: 6488 - DNA, 1240 bp, Arabidopsis thaliana (mouse-ear cress); identical to SEQ ID NO: 3737
  CDS (1)..(1188)

SEQ ID NO: 6489 - protein, 395 aa, Arabidopsis thaliana (mouse-ear cress); identical to SEQ ID NO: 3738

SEQ ID NO: 6490 - DNA, 2077 bp, Saccharomyces cerevisiae; identical to SEQ ID NO: 3739
  CDS (482)..(1987)

SEQ ID NO: 6491 - protein, 501 aa, Saccharomyces cerevisiae; identical to SEQ ID NO: 3740

SEQ ID NO: 6492 - DNA, 642 bp, Mycoplasma pneumoniae; identical to SEQ ID NO: 3741
  CDS (1)..(642): transl_table=4

SEQ ID NO: 6493 - protein, 213 aa, Mycoplasma pneumoniae; identical to SEQ ID NO: 3742

SEQ ID NO: 6494 - DNA, 1245 bp, Chlamydomonas reinhardtii; identical to SEQ ID NO: 3743
  CDS (28)..(1155)

SEQ ID NO: 6495 - protein, 375 aa, Chlamydomonas reinhardtii; identical to SEQ ID NO: 3744

SEQ ID NO: 6496 - DNA, 1520 bp, Mesembryanthemum crystallinum (common ice plant); identical to SEQ ID NO: 3745
  CDS (127)..(1320)

SEQ ID NO: 6497 - protein, 397 aa, Mesembryanthemum crystallinum (common ice plant); identical to SEQ ID NO: 3746

SEQ ID NO: 6498 - DNA, 690 bp, Caenorhabditis elegans; identical to SEQ ID NO: 3747
  CDS (1)..(690)

SEQ ID NO: 6499 - protein, 229 aa, Caenorhabditis elegans; identical to SEQ ID NO: 3748

SEQ ID NO: 6500 - DNA, 1668 bp, Caenorhabditis elegans; identical to SEQ ID NO: 3749
  CDS (1)..(1668)

SEQ ID NO: 6501 - protein, 555 aa, Caenorhabditis elegans; identical to SEQ ID NO: 3750

SEQ ID NO: 6502 - DNA, 1365 bp, Schizosaccharomyces pombe; identical to SEQ ID NO: 3751
  CDS (1)..(1365)

SEQ ID NO: 6503 - protein, 454 aa, Schizosaccharomyces pombe; identical to SEQ ID NO: 3752

SEQ ID NO: 6504 - DNA, 1647 bp, Homo sapiens; identical to SEQ ID NO: 3753
  CDS (1)..(1647)

SEQ ID NO: 6505 - protein, 548 aa, Homo sapiens; identical to SEQ ID NO: 3754

SEQ ID NO: 6506 - DNA, 738 bp, Debaryomyces hansenii; identical to SEQ ID NO: 3755
  CDS (1)..(738)

SEQ ID NO: 6507 - protein, 245 aa, Debaryomyces hansenii; identical to SEQ ID NO: 3756

SEQ ID NO: 6508 - DNA, 1521 bp, Debaryomyces hansenii; identical to SEQ ID NO: 3757
  CDS (1)..(1521)

SEQ ID NO: 6509 - protein, 506 aa, Debaryomyces hansenii; identical to SEQ ID NO: 3758

SEQ ID NO: 6510 - DNA, 1353 bp, Yarrowia lipolytica; identical to SEQ ID NO: 3759
  CDS (1)..(1353)

SEQ ID NO: 6511 - protein, 450 aa, Yarrowia lipolytica; identical to SEQ ID NO: 3760

SEQ ID NO: 6512 - DNA, 1380 bp, Kluyveromyces lactis; identical to SEQ ID NO: 3761
  CDS (1)..(1380)

SEQ ID NO: 6513 - protein, 459 aa, Kluyveromyces lactis; identical to SEQ ID NO: 3762

SEQ ID NO: 6514 - DNA, 642 bp, Erwinia carotovora subsp; identical to SEQ ID NO: 3763
  CDS (1)..(642)

SEQ ID NO: 6515 - protein, 213 aa, Erwinia carotovora subsp; identical to SEQ ID NO: 3764

SEQ ID NO: 6516 - DNA, 627 bp, Mesoplasma florum L1; identical to SEQ ID NO: 3765
  CDS (1)..(627)

SEQ ID NO: 6517 - protein, 208 aa, Mesoplasma florum L1; identical to SEQ ID NO: 3766

SEQ ID NO: 6518 - DNA, 1431 bp, Candida glabrata; identical to SEQ ID NO: 3767
  CDS (1)..(1431)

SEQ ID NO: 6519 - protein, 476 aa, Candida glabrata; identical to SEQ ID NO: 3768

SEQ ID NO: 6520 - DNA, 639 bp, Bacillus thuringiensis serovar konkukian str; identical to SEQ ID NO: 3769
  CDS (1)..(639)

SEQ ID NO: 6521 - protein, 212 aa, Bacillus thuringiensis serovar konkukian str; identical to SEQ ID NO: 3770

SEQ ID NO: 6522 - DNA, 834 bp, Homo sapiens; identical to SEQ ID NO: 3771
  CDS (1)..(834)

SEQ ID NO: 6523 - protein, 277 aa, Homo sapiens [sequence omitted]

SEQ ID NO: 6524 - DNA, 1965 bp, Oryza sativa; identical to SEQ ID NO: 3773
  CDS (257)..(1726)

SEQ ID NO: 6525 - protein, 489 aa, Oryza sativa; identical to SEQ ID NO: 3774

SEQ ID NO: 6526 - DNA, 747 bp, Photobacterium profundum; identical to SEQ ID NO: 3775
  CDS (1)..(747)

SEQ ID NO: 6527 - protein, 248 aa, Photobacterium profundum; identical to SEQ ID NO: 3776

SEQ ID NO: 6528 - DNA, 621 bp, Bdellovibrio bacteriovorus; identical to SEQ ID NO: 3777
  CDS (1)..(621)

SEQ ID NO: 6529 - protein, 206 aa, Bdellovibrio bacteriovorus; identical to SEQ ID NO: 3778

SEQ ID NO: 6530 - DNA, 624 bp, Bdellovibrio bacteriovorus; identical to SEQ ID NO: 3779
  CDS (1)..(624)

SEQ ID NO: 6531 - protein, 207 aa, Bdellovibrio bacteriovorus; identical to SEQ ID NO: 3780

SEQ ID NO: 6532 - DNA, 618 bp, Mycoplasma mycoides; identical to SEQ ID NO: 3781
  CDS (1)..(618)

SEQ ID NO: 6533 - protein, 205 aa, Mycoplasma mycoides; identical to SEQ ID NO: 3782

SEQ ID NO: 6534 - DNA, 2638 bp, Oryza sativa; identical to SEQ ID NO: 3783
  CDS (248)..(2206)

SEQ ID NO: 6535 - protein, 652 aa, Oryza sativa; identical to SEQ ID NO: 3784

SEQ ID NO: 6536 - DNA, 1494 bp, Oryza sativa; identical to SEQ ID NO: 3785
  CDS (20)..(1231)

SEQ ID NO: 6537 - protein, 403 aa, Oryza sativa; identical to SEQ ID NO: 3786

SEQ ID NO: 6538 - DNA, 1824 bp, Homo sapiens; identical to SEQ ID NO: 3787
  CDS (45)..(1232)

SEQ ID NO: 6539 - protein, 395 aa, Homo sapiens [sequence omitted]

SEQ ID NO: 6540 - DNA, 630 bp, Listeria monocytogenes; identical to SEQ ID NO: 3789
  CDS (1)..(630)

SEQ ID NO: 6541 - protein, 209 aa, Listeria monocytogenes; identical to SEQ ID NO: 3790

SEQ ID NO: 6542 - DNA, 636 bp, Thermus thermophilus; identical to SEQ ID NO: 3791
  CDS (1)..(636)

SEQ ID NO: 6543 - protein, 211 aa, Thermus thermophilus; identical to SEQ ID NO: 3792

SEQ ID NO: 6544 - DNA, 1653 bp, Treponema denticola; identical to SEQ ID NO: 3793
  CDS (1)..(1653)

SEQ ID NO: 6545 - protein, 550 aa, Treponema denticola; identical to SEQ ID NO: 3794

SEQ ID NO: 6546 - DNA, 636 bp, Lactobacillus johnsonii; identical to SEQ ID NO: 3795
  CDS (1)..(636)

SEQ ID NO: 6547 - protein, 211 aa, Lactobacillus johnsonii; identical to SEQ ID NO: 3796

SEQ ID NO: 6548 - DNA, 1497 bp, Ashbya gossypii; identical to SEQ ID NO: 3797
  CDS (1)..(1497)

SEQ ID NO: 6549 - protein, 498 aa, Ashbya gossypii; identical to SEQ ID NO: 3798

SEQ ID NO: 6550 - DNA, 651 bp, Vibrio vulnificus; identical to SEQ ID NO: 3799
  CDS (1)..(651)

SEQ ID NO: 6551 - protein, 216 aa, Vibrio vulnificus; identical to SEQ ID NO: 3800

SEQ ID NO: 6552 - DNA, 630 bp, Porphyromonas gingivalis; identical to SEQ ID NO: 3801
  CDS (1)..(630)

SEQ ID NO: 6553 - protein, 209 aa, Porphyromonas gingivalis; identical to SEQ ID NO: 3802

SEQ ID NO: 6554 - DNA, 642 bp, Photorhabdus luminescens; identical to SEQ ID NO: 3803
  CDS (1)..(642)

SEQ ID NO: 6555 - protein, 213 aa, Photorhabdus luminescens; identical to SEQ ID NO: 3804

SEQ ID NO: 6556 - DNA, 645 bp, Mycoplasma gallisepticum; identical to SEQ ID NO: 3805
  CDS (1)..(645): transl_table=4

SEQ ID NO: 6557 - protein, 214 aa, Mycoplasma gallisepticum; identical to SEQ ID NO: 3806

SEQ ID NO: 6558 - DNA, 930 bp, Gloeobacter violaceus; identical to SEQ ID NO: 3807
  CDS (1)..(930)

SEQ ID NO: 6559 - protein, 309 aa, Gloeobacter violaceus; identical to SEQ ID NO: 3808

SEQ ID NO: 6560 - DNA, 996 bp, Gloeobacter violaceus; identical to SEQ ID NO: 3809
  CDS (1)..(996)

SEQ ID NO: 6561 - protein, 331 aa, Gloeobacter violaceus; identical to SEQ ID NO: 3810

SEQ ID NO: 6562 - DNA, 1038 bp, Gloeobacter violaceus; identical to SEQ ID NO: 3811
  CDS (1)..(1038)

SEQ ID NO: 6563 - protein, 345 aa, Gloeobacter violaceus; identical to SEQ ID NO: 3812

SEQ ID NO: 6564 - DNA, 615 bp, Chromobacterium violaceum; identical to SEQ ID NO: 3813
  CDS (1)..(615)

SEQ ID NO: 6565 - protein, 204 aa, Chromobacterium violaceum; identical to SEQ ID NO: 3814

SEQ ID NO: 6566 - DNA, 2049 bp, Giardia lamblia ATCC 50803; identical to SEQ ID NO: 3815
  CDS (1)..(2049)

SEQ ID NO: 6567 - protein, 682 aa, Giardia lamblia ATCC 50803; identical to SEQ ID NO: 3816

SEQ ID NO: 6568 - DNA, 1425 bp, Neurospora crassa; identical to SEQ ID NO: 3817
  CDS (1)..(1425)

SEQ ID NO: 6569 - protein, 474 aa, Neurospora crassa; identical to SEQ ID NO: 3818

SEQ ID NO: 6570 - DNA, 612 bp, Synechococcus sp; identical to SEQ ID NO: 3819
  CDS (1)..(612)

SEQ ID NO: 6571 - protein, 203 aa, Synechococcus sp; identical to SEQ ID NO: 3820

SEQ ID NO: 6572 - DNA, 654 bp, Haemophilus ducreyi; identical to SEQ ID NO: 3821
  CDS (1)..(654)

SEQ ID NO: 6573 - protein, 217 aa, Haemophilus ducreyi; identical to SEQ ID NO: 3822

SEQ ID NO: 6574 - DNA, 1609 bp, Chlorarachnion sp; identical to SEQ ID NO: 3823
  CDS (10)..(1464)

SEQ ID NO: 6575 - protein, 484 aa, Chlorarachnion sp; identical to SEQ ID NO: 3824

SEQ ID NO: 6576 - DNA, 630 bp, Enterococcus faecalis; identical to SEQ ID NO: 3825
  CDS (1)..(630)

SEQ ID NO: 6577 - protein, 209 aa, Enterococcus faecalis; identical to SEQ ID NO: 3826

SEQ ID NO: 6578 - DNA, 648 bp, Coxiella burnetii; identical to SEQ ID NO: 3827
  CDS (1)..(648)

SEQ ID NO: 6579 - protein, 215 aa, Coxiella burnetii; identical to SEQ ID NO: 3828

SEQ ID NO: 6580 - DNA, 1659 bp, Clostridium tetani; identical to SEQ ID NO: 3829
  CDS (1)..(1659)

SEQ ID NO: 6581 - protein, 552 aa, Clostridium tetani; identical to SEQ ID NO: 3830

SEQ ID NO: 6582 - DNA, 1674 bp, Bacteroides thetaiotaomicron; identical to SEQ ID NO: 3831
  CDS (1)..(1674)

SEQ ID NO: 6583 - protein, 557 aa, Bacteroides thetaiotaomicron; identical to SEQ ID NO: 3832

SEQ ID NO: 6584 - DNA, 618 bp, Bacteroides thetaiotaomicron; identical to SEQ ID NO: 3833
  CDS (1)..(618)

SEQ ID NO: 6585 - protein, 205 aa, Bacteroides thetaiotaomicron; identical to SEQ ID NO: 3834

SEQ ID NO: 6586 - DNA, 630 bp, Streptococcus agalactiae; identical to SEQ ID NO: 3835
  CDS (1)..(630)

SEQ ID NO: 6587 - protein, 209 aa, Streptococcus agalactiae; identical to SEQ ID NO: 3836

SEQ ID NO: 6588 - DNA, 1524 bp, Galdieria sulphuraria; identical to SEQ ID NO: 3837
  CDS (77)..(1423)

SEQ ID NO: 6589 - protein, 448 aa, Galdieria sulphuraria; identical to SEQ ID NO: 3838

SEQ ID NO: 6590 - DNA, 1005 bp, Synechococcus vulcanus; identical to SEQ ID NO: 3839
  CDS (1)..(1005)

SEQ ID NO: 6591 - protein, 334 aa, Synechococcus vulcanus; identical to SEQ ID NO: 3840

SEQ ID NO: 6592 - DNA, 1831 bp, Arabidopsis thaliana; identical to SEQ ID NO: 3841
  CDS (116)..(1525)

SEQ ID NO: 6593 - protein, 469 aa, Arabidopsis thaliana; identical to SEQ ID NO: 3842

SEQ ID NO: 6594 - DNA, 1875 bp, Homo sapiens; identical to SEQ ID NO: 3843
  CDS (14)..(1273)

SEQ ID NO: 6595 - protein, 419 aa, Homo sapiens; identical to SEQ ID NO: 3844

SEQ ID NO: 6596 - DNA, 1644 bp, Thermoanaerobacter tengcongensis; identical to SEQ ID NO: 3845
  CDS (1)..(1644)

SEQ ID NO: 6597 - protein, 547 aa, Thermoanaerobacter tengcongensis; identical to SEQ ID NO: 3846

SEQ ID NO: 6598 - DNA, 1665 bp, Clostridium perfringens; identical to SEQ ID NO: 3847
  CDS (1)..(1665)

SEQ ID NO: 6599 - protein, 554 aa, Clostridium perfringens; identical to SEQ ID NO: 3848

SEQ ID NO: 6600 - DNA, 1258 bp, Odontella sinensis; identical to SEQ ID NO: 3849
  CDS (23)..(1213)

SEQ ID NO: 6601 - protein, 396 aa, Odontella sinensis; identical to SEQ ID NO: 3850

SEQ ID NO: 6602 - DNA, 606 bp, Homo sapiens; identical to SEQ ID NO: 3851
  CDS (1)..(606)

SEQ ID NO: 6603 - protein, 201 aa, Homo sapiens [sequence omitted]

SEQ ID NO: 6604 - DNA, 1299 bp, Vaucheria litorea; identical to SEQ ID NO: 3853
  CDS (8)..(1225)

SEQ ID NO: 6605 - protein, 405 aa, Vaucheria litorea; identical to SEQ ID NO: 3854

SEQ ID NO: 6606 - DNA, 1711 bp, Cryptosporidium parvum; identical to SEQ ID NO: 3855
  CDS (290)..(1549)

SEQ ID NO: 6607 - protein, 419 aa, Cryptosporidium parvum; identical to SEQ ID NO: 3856

SEQ ID NO: 6608 - DNA, 1492 bp, Arabidopsis thaliana; identical to SEQ ID NO: 3857
  CDS (1)..(1461)

SEQ ID NO: 6609 - protein, 486 aa, Arabidopsis thaliana; identical to SEQ ID NO: 3858

SEQ ID NO: 6610 - DNA, 1480 bp, Dictyostelium discoideum; identical to SEQ ID NO: 3859
  CDS (1)..(1479)

SEQ ID NO: 6611 - protein, 492 aa, Dictyostelium discoideum; identical to SEQ ID NO: 3860

SEQ ID NO: 6612 - DNA, 1545 bp, Synechococcus sp; identical to SEQ ID NO: 3861
  CDS (267)..(1268)

SEQ ID NO: 6613 - protein, 333 aa, Synechococcus sp; identical to SEQ ID NO: 3862

SEQ ID NO: 6614 - DNA, 1452 bp, Arabidopsis thaliana; identical to SEQ ID NO: 3863
  CDS (1)..(1452)

SEQ ID NO: 6615 - protein, 483 aa, Arabidopsis thaliana; identical to SEQ ID NO: 3864

SEQ ID NO: 6616 - DNA, 1398 bp, Arabidopsis thaliana; identical to SEQ ID NO: 3865
  CDS (1)..(1398)

SEQ ID NO: 6617 - protein, 465 aa, Arabidopsis thaliana; identical to SEQ ID NO: 3866

SEQ ID NO: 6618 - DNA, 1856 bp, Drosophila melanogaster; identical to SEQ ID NO: 3867
  CDS (77)..(1762)

SEQ ID NO: 6619 - protein, 561 aa, Drosophila melanogaster; identical to SEQ ID NO: 3868

SEQ ID NO: 6620 - DNA, 1869 bp, Synechocystis sp; identical to SEQ ID NO: 3869
  CDS (233)..(1231)

SEQ ID NO: 6621 - protein, 332 aa, Synechocystis sp; identical to SEQ ID NO: 3870

SEQ ID NO: 6622 - DNA, 834 bp, Mus musculus; identical to SEQ ID NO: 3871
  CDS (1)..(834)

SEQ ID NO: 6623 - protein, 277 aa, Mus musculus; identical to SEQ ID NO: 3872

SEQ ID NO: 6624 - DNA, 1200 bp, Homo sapiens; identical to SEQ ID NO: 3873
  CDS (180)..(965)

SEQ ID NO: 6625 - protein, 261 aa, Homo sapiens; identical to SEQ ID NO: 3874

SEQ ID NO: 6626 - DNA, 822 bp, Drosophila melanogaster; identical to SEQ ID NO: 3875
  CDS (40)..(822)

SEQ ID NO: 6627 - protein, 260 aa, Drosophila melanogaster; identical to SEQ ID NO: 3876

SEQ ID NO: 6628 - DNA, 1823 bp, Mus musculus; identical to SEQ ID NO: 3877
  CDS (6)..(1652)

SEQ ID NO: 6629 - protein, 548 aa, Mus musculus; identical to SEQ ID NO: 3878

SEQ ID NO: 6630 - DNA, 627 bp, Clostridium perfringens; identical to SEQ ID NO: 3879
  CDS (1)..(627)

SEQ ID NO: 6631 - protein, 208 aa, Clostridium perfringens; identical to SEQ ID NO: 3880

SEQ ID NO: 6632 - DNA, 630 bp, Clostridium tetani; identical to SEQ ID NO: 3881
  CDS (1)..(630)

SEQ ID NO: 6633 - protein, 209 aa, Clostridium tetani; identical to SEQ ID NO: 3882

SEQ ID NO: 6634 - DNA, 678 bp, Halobacterium sp; identical to SEQ ID NO: 3883
  CDS (1)..(678)

SEQ ID NO: 6635 - protein, 225 aa, Halobacterium sp; identical to SEQ ID NO: 3884

SEQ ID NO: 6636 - DNA, 630 bp, Lactobacillus plantarum; identical to SEQ ID NO: 3885
  CDS (1)..(630)

SEQ ID NO: 6637 - protein, 209 aa, Lactobacillus plantarum; identical to SEQ ID NO: 3886

SEQ ID NO: 6638 - DNA, 633 bp, Oceanobacillus iheyensis; identical to SEQ ID NO: 3887
  CDS (1)..(633)

SEQ ID NO: 6639 - protein, 210 aa, Oceanobacillus iheyensis; identical to SEQ ID NO: 3888

SEQ ID NO: 6640 - DNA, 651 bp, Pasteurella multocida; identical to SEQ ID NO: 3889
  CDS (1)..(651)

SEQ ID NO: 6641 - protein, 216 aa, Pasteurella multocida; identical to SEQ ID NO: 3890

SEQ ID NO: 6642 - DNA, 639 bp, Shewanella oneidensis; identical to SEQ ID NO: 3891
  CDS (1)..(639)

SEQ ID NO: 6643 - protein, 212 aa, Shewanella oneidensis; identical to SEQ ID NO: 3892

SEQ ID NO: 6644 - DNA, 624 bp, Staphylococcus epidermidis; identical to SEQ ID NO: 3893
  CDS (1)..(624)

SEQ ID NO: 6645 - protein, 207 aa, Staphylococcus epidermidis; identical to SEQ ID NO: 3894

SEQ ID NO: 6646 - DNA, 627 bp, Streptococcus pyogenes; identical to SEQ ID NO: 3895
  CDS (1)..(627)

SEQ ID NO: 6647 - protein, 208 aa, Streptococcus pyogenes; identical to SEQ ID NO: 3896

SEQ ID NO: 6648 - DNA, 642 bp, Vibrio cholerae; identical to SEQ ID NO: 3897
  CDS (1)..(642)

SEQ ID NO: 6649 - protein, 213 aa, Vibrio cholerae; identical to SEQ ID NO: 3898

SEQ ID NO: 6650 - DNA, 642 bp, Vibrio parahaemolyticus; identical to SEQ ID NO: 3899
  CDS (1)..(642)

SEQ ID NO: 6651 - protein, 213 aa, Vibrio parahaemolyticus; identical to SEQ ID NO: 3900

SEQ ID NO: 6652 - DNA, 816 bp, Xenopus laevis; identical to SEQ ID NO: 3901
  CDS (1)..(816)

SEQ ID NO: 6653 - protein, 271 aa, Xenopus laevis; identical to SEQ ID NO: 3902

SEQ ID NO: 6654 - DNA, 21 bp, Artificial sequence
  Primer sequence
atggcgcttcgtcgccccctt

SEQ ID NO: 6655 - DNA, 27 bp, Artificial sequence
  Primer sequence
ttattcaaagaactgacttattttcgc

SEQ ID NO: 6656 - DNA, 2374 bp, Escherichia coli K12; identical to SEQ ID NO: 1805
  CDS (86)..(2281)

SEQ ID NO: 6657 - protein, 731 aa, Escherichia coli K12; identical to SEQ ID NO: 1806

SEQ ID NO: 6658 - DNA, 2961 bp, Hafnia alvei; identical to SEQ ID NO: 1807
  CDS (185)..(2404)

SEQ ID NO: 6659 - protein, 739 aa, Hafnia alvei; identical to SEQ ID NO: 1808

SEQ ID NO: 6660 - DNA, 4341 bp, Escherichia coli; identical to SEQ ID NO: 1809
  CDS (660)..(2858)

SEQ ID NO: 6661 - protein, 732 aa, Escherichia coli; identical to SEQ ID NO: 1810

SEQ ID NO: 6662 - DNA, 1850 bp, Bacillus subtilis; identical to SEQ ID NO: 1811
  CDS (312)..(1784)

SEQ ID NO: 6663 - protein, 490 aa, Bacillus subtilis; identical to SEQ ID NO: 1812

SEQ ID NO: 6664 - DNA, 3091 bp, Lactobacillus sp; identical to SEQ ID NO: 1813
  CDS (572)..(2767)

SEQ ID NO: 6665 - protein, 731 aa, Lactobacillus sp; identical to SEQ ID NO: 1814

SEQ ID NO: 6666 - DNA, 1449 bp, Bacillus halodurans; identical to SEQ ID NO: 1815
  CDS (1)..(1449)

SEQ ID NO: 6667 - protein, 482 aa, Bacillus halodurans; identical to SEQ ID NO: 1816

SEQ ID NO: 6668 - DNA, 2196 bp, Sinorhizobium meliloti; identical to SEQ ID NO: 1817
  CDS (1)..(2196)

SEQ ID NO: 6669 - protein, 731 aa, Sinorhizobium meliloti; identical to SEQ ID NO: 1818

SEQ ID NO: 6670 - DNA, 1380 bp, Listeria innocua; identical to SEQ ID NO: 1819
  CDS (1)..(1380)

SEQ ID NO: 6671 - protein, 459 aa, Listeria innocua; identical to SEQ ID NO: 1820

SEQ ID NO: 6672 - DNA, 2307 bp, Yersinia pestis; identical to SEQ ID NO: 1821
  CDS (1)..(2307)

SEQ ID NO: 6673 - protein, 768 aa, Yersinia pestis; identical to SEQ ID NO: 1822

SEQ ID NO: 6674 - DNA, 2145 bp, Salmonella enterica subsp. enterica serovar Typhi; identical to SEQ ID NO: 1823
  CDS (1)..(2145)

SEQ ID NO: 6675 - protein, 714 aa, Salmonella enterica subsp. enterica serovar Typhi; identical to SEQ ID NO: 1824

SEQ ID NO: 6676 - DNA, 1467 bp, Nostoc sp. PCC 7120; identical to SEQ ID NO: 1825
  CDS (1)..(1467)

SEQ ID NO: 6677 - protein, 488 aa, Nostoc sp. PCC 7120; identical to SEQ ID NO: 1826

SEQ ID NO: 6678 - DNA, 2163 bp, Yersinia pestis; identical to SEQ ID NO: 1827
  CDS (1)..(2163)

SEQ ID NO: 6679 - protein, 720 aa, Yersinia pestis; identical to SEQ ID NO: 1828

SEQ ID NO: 6680 - DNA, 2271 bp, Salmonella enterica subsp. enterica serovar Typhi; identical to SEQ ID NO: 1829
  CDS (1)..(2271)

SEQ ID NO: 6681 - protein, 756 aa, Salmonella enterica subsp. enterica serovar Typhi; identical to SEQ ID NO: 1830

SEQ ID NO: 6682 - DNA, 2148 bp, Escherichia coli; identical to SEQ ID NO: 1831
  CDS (1)..(2148)

SEQ ID NO: 6683 - protein, 715 aa, Escherichia coli; identical to SEQ ID NO: 1832

SEQ ID NO: 6684 - DNA, 2835 bp, Escherichia coli; identical to SEQ ID NO: 1833
  CDS (571)..(2712)

SEQ ID NO: 6685 - protein, 713 aa, Escherichia coli; identical to SEQ ID NO: 1834

SEQ ID NO: 6686 - DNA, 1446 bp, Clostridium acetobutylicum; identical to SEQ ID NO: 1835
  CDS (1)..(1446)

SEQ ID NO: 6687 - protein, 481 aa, Clostridium acetobutylicum; identical to SEQ ID NO: 1836

SEQ ID NO: 6688 - DNA, 1464 bp, Clostridium acetobutylicum; identical to SEQ ID NO: 1837
  CDS (1)..(1464)

SEQ ID NO: 6689 - protein, 487 aa, Clostridium acetobutylicum; identical to SEQ ID NO: 1838

SEQ ID NO: 6690 - DNA, 2256 bp, Pseudomonas aeruginosa; identical to SEQ ID NO: 1839
  CDS (1)..(2256)

SEQ ID NO: 6691 - protein, 751 aa, Pseudomonas aeruginosa; identical to SEQ ID NO: 1840

SEQ ID NO: 6692 - DNA, 2853 bp, Mycobacterium leprae; identical to SEQ ID NO: 1841
  CDS (1)..(2853)

SEQ ID NO: 6693 - protein, 950 aa, Mycobacterium leprae; identical to SEQ ID NO: 1842

SEQ ID NO: 6694 - DNA, 2202 bp, Vibrio cholerae; identical to SEQ ID NO: 1843
  CDS (1)..(2202)

SEQ ID NO: 6695 - protein, 733 aa, Vibrio cholerae; identical to SEQ ID NO: 1844

SEQ ID NO: 6696 - DNA, 2163 bp, Vibrio cholerae; identical to SEQ ID NO: 1845
  CDS (1)..(2163)

SEQ ID NO: 6697 - protein, 720 aa, Vibrio cholerae; identical to SEQ ID NO: 1846

SEQ ID NO: 6698 - DNA, 2163 bp, Haemophilus influenzae; identical to SEQ ID NO: 1847
  CDS (1)..(2163)

SEQ ID NO: 6699 - protein, 720 aa, Haemophilus influenzae; identical to SEQ ID NO: 1848

SEQ ID NO: 6700 - DNA, 2844 bp, Mycobacterium tuberculosis; identical to SEQ ID NO: 1849
  CDS (1)..(2844)

SEQ ID NO: 6701 - protein, 947 aa, Mycobacterium tuberculosis; identical to SEQ ID NO: 1850

SEQ ID NO: 6702 - DNA, 1476 bp, Streptococcus pneumoniae; identical to SEQ ID NO: 1851
  CDS (1)..(1476)

SEQ ID NO: 6703 - protein, 491 aa, Streptococcus pneumoniae; identical to SEQ ID NO: 1852

SEQ ID NO: 6704 - DNA, 1476 bp, Bacillus halodurans; identical to SEQ ID NO: 1853
  CDS (1)..(1476)

SEQ ID NO: 6705 - protein, 491 aa, Bacillus halodurans; identical to SEQ ID NO: 1854

SEQ ID NO: 6706 - DNA, 2349 bp, Sinorhizobium meliloti; identical to SEQ ID NO: 1855
  CDS (1)..(2349)

SEQ ID NO: 6707 - protein, 782 aa, Sinorhizobium meliloti; identical to SEQ ID NO: 1856

SEQ ID NO: 6708 - DNA, 1476 bp, Streptococcus pneumoniae; identical to SEQ ID NO: 1857
  CDS (1)..(1476)

SEQ ID NO: 6709 - protein, 491 aa, Streptococcus pneumoniae; identical to SEQ ID NO: 1858

SEQ ID NO: 6710 - DNA, 2271 bp, Escherichia coli; identical to SEQ ID NO: 1859
  CDS (1)..(2271)

SEQ ID NO: 6711 - protein, 756 aa, Escherichia coli; identical to SEQ ID NO: 1860

SEQ ID NO: 6712 - DNA, 1443 bp, Bacillus subtilis; identical to SEQ ID NO: 1861
  CDS (1)..(1443)

SEQ ID NO: 6713 - protein, 480 aa, Bacillus subtilis; identical to SEQ ID NO: 1862

SEQ ID NO: 6714 - DNA, 1452 bp, Synechocystis sp; identical to SEQ ID NO: 1863
  CDS (1)..(1452)

SEQ ID NO: 6715 - protein, 483 aa, Synechocystis sp; identical to SEQ ID NO: 1864

SEQ ID NO: 6716 - DNA, 2307 bp, Yersinia pseudotuberculosis IP 32953; identical to SEQ ID NO: 1865
  CDS (1)..(2307)

SEQ ID NO: 6717 - protein, 768 aa, Yersinia pseudotuberculosis IP 32953; identical to SEQ ID NO: 1866

SEQ ID NO: 6718 - DNA, 1467 bp, Symbiobacterium thermophilum; identical to SEQ ID NO: 1867
  CDS (1)..(1467)

SEQ ID NO: 6719 - protein, 488 aa, Symbiobacterium thermophilum; identical to SEQ ID NO: 1868

SEQ ID NO: 6720 - DNA, 1410 bp, Symbiobacterium thermophilum; identical to SEQ ID NO: 1869
  CDS (1)..(1410)

SEQ ID NO: 6721 - protein, 469 aa, Symbiobacterium thermophilum; identical to SEQ ID NO: 1870

SEQ ID NO: 6722 - DNA, 2154 bp, Erwinia carotovora; identical to SEQ ID NO: 1871
  CDS (1)..(2154)

SEQ ID NO: 6723 - protein, 717 aa, Erwinia carotovora; identical to SEQ ID NO: 1872

SEQ ID NO: 6724 - DNA, 2790 bp, Acinetobacter sp; identical to SEQ ID NO: 1873
  CDS (1)..(2790)

SEQ ID NO: 6725 - protein, 929 aa, Acinetobacter sp; identical to SEQ ID NO: 1874

SEQ ID NO: 6726 - DNA, 1482 bp, Bacillus thuringiensis; identical to SEQ ID NO: 1875
  CDS (1)..(1482)

SEQ ID NO: 6727 - protein, 493 aa, Bacillus thuringiensis; identical to SEQ ID NO: 1876

SEQ ID NO: 6728 - DNA, 1422 bp, Bacillus thuringiensis; identical to SEQ ID NO: 1877
  CDS (1)..(1422)

SEQ ID NO: 6729 - protein, 473 aa, Bacillus thuringiensis; identical to SEQ ID NO: 1878

SEQ ID NO: 6730 - DNA, 2358 bp, Rhodopseudomonas palustris; identical to SEQ ID NO: 1879
  CDS (1)..(2358)

SEQ ID NO: 6731 - protein, 785 aa, Rhodopseudomonas palustris; identical to SEQ ID NO: 1880

SEQ ID NO: 6732 - DNA, 2837 bp, Shigella boydii; identical to SEQ ID NO: 1881
  CDS (165)..(2435)

SEQ ID NO: 6733 - protein, 756 aa, Shigella boydii; identical to SEQ ID NO: 1882

SEQ ID NO: 6734 - DNA, 1380 bp, Listeria monocytogenes; identical to SEQ ID NO: 1883
  CDS (1)..(1380)

SEQ ID NO: 6735 - protein, 459 aa, Listeria monocytogenes; identical to SEQ ID NO: 1884

SEQ ID NO: 6736 - DNA, 1482 bp, Bacillus cereus; identical to SEQ ID NO: 1885
  CDS (1)..(1482)

SEQ ID NO: 6737 - protein, 493 aa, Bacillus cereus; identical to SEQ ID NO: 1886

SEQ ID NO: 6738 - DNA, 1422 bp, Bacillus cereus; identical to SEQ ID NO: 1887
  CDS (1)..(1422)

SEQ ID NO: 6739 - protein, 473 aa, Bacillus cereus; identical to SEQ ID NO: 1888

SEQ ID NO: 6740 - DNA, 1458 bp, Mycobacterium paratuberculosis; identical to SEQ ID NO: 1889
  CDS (1)..(1458)

SEQ ID NO: 6741 - protein, 485 aa, Mycobacterium paratuberculosis; identical to SEQ ID NO: 1890

SEQ ID NO: 6742 - DNA, 2853 bp, Mycobacterium paratuberculosis; identical to SEQ ID NO: 1891
  CDS (1)..(2853)

SEQ ID NO: 6743 - protein, 950 aa, Mycobacterium paratuberculosis; identical to SEQ ID NO: 1892

SEQ ID NO: 6744 - DNA, 2100 bp, Lactobacillus johnsonii; identical to SEQ ID NO: 1893
  CDS (1)..(2100)

SEQ ID NO: 6745 - protein, 699 aa, Lactobacillus johnsonii; identical to SEQ ID NO: 1894

SEQ ID NO: 6746 - DNA, 3625 bp, Vibrio parahaemolyticus; identical to SEQ ID NO: 1895
  CDS (1451)..(3625)

SEQ ID NO: 6747 - protein, 724 aa, Vibrio parahaemolyticus; identical to SEQ ID NO: 1896

SEQ ID NO: 6748 - DNA, 2142 bp, Shigella flexneri; identical to SEQ ID NO: 1897
  CDS (1)..(2142)

SEQ ID NO: 6749 - protein, 713 aa, Shigella flexneri; identical to SEQ ID NO: 1898

SEQ ID NO: 6750 - DNA, 2181 bp, Vibrio vulnificus; identical to SEQ ID NO: 1899
  CDS (1)..(2181)

SEQ ID NO: 6751 - protein, 726 aa, Vibrio vulnificus; identical to SEQ ID NO: 1900

SEQ ID NO: 6752 - DNA, 2307 bp, Photorhabdus luminescens; identical to SEQ ID NO: 1901
  CDS (1)..(2307)

SEQ ID NO: 6753 - protein, 768 aa, Photorhabdus luminescens; identical to SEQ ID NO: 1902

SEQ ID NO: 6754 - DNA, 1404 bp, Gloeobacter violaceus; identical to SEQ ID NO: 1903
  CDS (1)..(1404)

SEQ ID NO: 6755 - protein, 467 aa, Gloeobacter violaceus; identical to SEQ ID NO: 1904

SEQ ID NO: 6756 - DNA, 2259 bp, Chromobacterium violaceum; identical to SEQ ID NO: 1905
  CDS (1)..(2259)

SEQ ID NO: 6757 - protein, 752 aa, Chromobacterium violaceum; identical to SEQ ID NO: 1906

SEQ ID NO: 6758 - DNA, 1251 bp, Chromobacterium violaceum; identical to SEQ ID NO: 1907
  CDS (1)..(1251)

SEQ ID NO: 6759 - protein, 416 aa, Chromobacterium violaceum; identical to SEQ ID NO: 1908

SEQ ID NO: 6760 - DNA, 2352 bp, Fusobacterium nucleatum subsp; identical to SEQ ID NO: 1909
  CDS (1)..(2352)

SEQ ID NO: 6761 - protein, 783 aa, Fusobacterium nucleatum subsp; identical to SEQ ID NO: 1910

SEQ ID NO: 6762 - DNA, 2196 bp, Shigella flexneri; identical to SEQ ID NO: 1911
  CDS (1)..(2196)

SEQ ID NO: 6763 - protein, 731 aa, Shigella flexneri; identical to SEQ ID NO: 1912

SEQ ID NO: 6764 - DNA, 2271 bp, Bordetella pertussis; identical to SEQ ID NO: 1913
  CDS (1)..(2271)

SEQ ID NO: 6765 - protein, 756 aa, Bordetella pertussis; identical to SEQ ID NO: 1914

SEQ ID NO: 6766 - DNA, 2271 bp, Bordetella parapertussis; identical to SEQ ID NO: 1915
  CDS (1)..(2271)

SEQ ID NO: 6767 - protein, 756 aa, Bordetella parapertussis; identical to SEQ ID NO: 1916

SEQ ID NO: 6768 - DNA, 1422 bp, Bacillus cereus; identical to SEQ ID NO: 1917
  CDS (1)..(1422)

SEQ ID NO: 6769 - protein, 473 aa, Bacillus cereus; identical to SEQ ID NO: 1918

SEQ ID NO: 6770 - DNA, 1422 bp, Bacillus anthracis; identical to SEQ ID NO: 1919
  CDS (1)..(1422)

SEQ ID NO: 6771 - protein, 473 aa, Bacillus anthracis; identical to SEQ ID NO: 1920

SEQ ID NO: 6772 - DNA, 2271 bp, Shigella flexneri; identical to SEQ ID NO: 1921
  CDS (1)..(2271)

SEQ ID NO: 6773 - protein, 756 aa, Shigella flexneri; identical to SEQ ID NO: 1922

SEQ ID NO: 6774 - DNA, 2136 bp, Shigella flexneri; identical to SEQ ID NO: 1923
  CDS (1)..(2136)

SEQ ID NO: 6775 - protein, 711 aa, Shigella flexneri; identical to SEQ ID NO: 1924

SEQ ID NO: 6776 - DNA, 2127 bp, Escherichia coli; identical to SEQ ID NO: 1925
  CDS (1)..(2127)

SEQ ID NO: 6777 - protein, 708 aa, Escherichia coli; identical to SEQ ID NO: 1926

SEQ ID NO: 6778 - DNA, 1563 bp, Oryza sativa; identical to SEQ ID NO: 1927
  CDS (1)..(1563)

SEQ ID NO: 6779 - protein, 520 aa, Oryza sativa; identical to SEQ ID NO: 1928

SEQ ID NO: 6780 - DNA, 2181 bp, Vibrio parahaemolyticus; identical to SEQ ID NO: 1929
  CDS (1)..(2181)

SEQ ID NO: 6781 - protein, 726 aa, Vibrio parahaemolyticus; identical to SEQ ID NO: 1930

SEQ ID NO: 6782 - DNA, 4026 bp, Vibrio parahaemolyticus; identical to SEQ ID NO: 1931
  CDS (1779)..(3914)

SEQ ID NO: 6783 - protein, 711 aa, Vibrio parahaemolyticus; identical to SEQ ID NO: 1932

SEQ ID NO: 6784 - DNA, 1461 bp, Clostridium tetani; identical to SEQ ID NO: 1933
  CDS (1)..(1461)

SEQ ID NO: 6785 - protein, 486 aa, Clostridium tetani; identical to SEQ ID NO: 1934

SEQ ID NO: 6786 - DNA, 1416 bp, Clostridium tetani; identical to SEQ ID NO: 1935
  CDS (1)..(1416)

SEQ ID NO: 6787 - protein, 471 aa, Clostridium tetani; identical to SEQ ID NO: 1936

SEQ ID NO: 6788 - DNA, 2766 bp, Bradyrhizobium japonicum; identical to SEQ ID NO: 1937
  CDS (1)..(2766)

SEQ ID NO: 6789 - protein, 921 aa, Bradyrhizobium japonicum; identical to SEQ ID NO: 1938

SEQ ID NO: 6790 - DNA, 2517 bp, Bradyrhizobium japonicum; identical to SEQ ID NO: 1939
  CDS (1)..(2517)

SEQ ID NO: 6791 - protein, 838 aa, Bradyrhizobium japonicum; identical to SEQ ID NO: 1940

SEQ ID NO: 6792 - DNA, 2181 bp, Vibrio vulnificus; identical to SEQ ID NO: 1941
  CDS (1)..(2181)

SEQ ID NO: 6793 - protein, 726 aa, Vibrio vulnificus; identical to SEQ ID NO: 1942

SEQ ID NO: 6794 - DNA, 2109 bp, Vibrio vulnificus; identical to SEQ ID NO: 1943
  CDS (1)..(2109)

SEQ ID NO: 6795 - protein, 702 aa, Vibrio vulnificus; identical to SEQ ID NO: 1944

SEQ ID NO: 6796 - DNA, 2163 bp, Shewanella oneidensis; identical to SEQ ID NO: 1945
  CDS (1)..(2163)

SEQ ID NO: 6797 - protein, 720 aa, Shewanella oneidensis; identical to SEQ ID NO: 1946

SEQ ID NO: 6798 - DNA, 1419 bp, Oceanobacillus iheyensis; identical to SEQ ID NO: 1947
  CDS (1)..(1419)

SEQ ID NO: 6799 - protein, 472 aa, Oceanobacillus iheyensis; identical to SEQ ID NO: 1948

SEQ ID NO: 6800 - DNA, 2154 bp, Escherichia coli O6; identical to SEQ ID NO: 1949
  CDS (1)..(2154)

SEQ ID NO: 6801 - protein, 717 aa, Escherichia coli O6; identical to SEQ ID NO: 1950

SEQ ID NO: 6802 - DNA, 2271 bp, Escherichia coli O6; identical to SEQ ID NO: 1951
  CDS (1)..(2271)

SEQ ID NO: 6803 - protein, 756 aa, Escherichia coli O6; identical to SEQ ID NO: 1952

SEQ ID NO: 6804 - DNA, 2370 bp, Escherichia coli O6; identical to SEQ ID NO: 1953
  CDS (1)..(2370)

SEQ ID NO: 6805 - protein, 789 aa, Escherichia coli O6; identical to SEQ ID NO: 1954

SEQ ID NO: 6806 - DNA, 2136 bp, Escherichia coli O6; identical to SEQ ID NO: 1955
  CDS (1)..(2136)

SEQ ID NO: 6807 - protein, 711 aa, Escherichia coli O6; identical to SEQ ID NO: 1956

SEQ ID NO: 6808 - DNA, 2208 bp, Escherichia coli O6; identical to SEQ ID NO: 1957
  CDS (1)..(2208)

SEQ ID NO: 6809 - protein, 735 aa, Escherichia coli O6; identical to SEQ ID NO: 1958

SEQ ID NO: 6810 - DNA, 2142 bp, Escherichia coli O6; identical to SEQ ID NO: 1959
  CDS (1)..(2142)

SEQ ID NO: 6811 - protein, 713 aa, Escherichia coli O6; identical to SEQ ID NO: 1960

SEQ ID NO: 6812 - DNA, 1488 bp, Thermoanaerobacter tengcongensis; identical to SEQ ID NO: 1961
  CDS (1)..(1488)

SEQ ID NO: 6813 - protein, 495 aa, Thermoanaerobacter tengcongensis; identical to SEQ ID NO: 1962

SEQ ID NO: 6814 - DNA, 1419 bp, Thermoanaerobacter tengcongensis; identical to SEQ ID NO: 1963
  CDS (1)..(1419)

SEQ ID NO: 6815 - protein, 472 aa, Thermoanaerobacter tengcongensis; identical to SEQ ID NO: 1964

SEQ ID NO: 6816 - DNA, 2352 bp, Fusobacterium nucleatum; identical to SEQ ID NO: 1965
  CDS (1)..(2352)

SEQ ID NO: 6817 - protein, 783 aa, Fusobacterium nucleatum; identical to SEQ ID NO: 1966

SEQ ID NO: 6818 - DNA, 1431 bp, Clostridium perfringens; identical to SEQ ID NO: 1967
  CDS (1)..(1431)

SEQ ID NO: 6819 - protein, 476 aa, Clostridium perfringens; identical to SEQ ID NO: 1968

SEQ ID NO: 6820 - DNA, 1455 bp, Clostridium perfringens; identical to SEQ ID NO: 1969
  CDS (1)..(1455)

SEQ ID NO: 6821 - protein, 484 aa, Clostridium perfringens; identical to SEQ ID NO: 1970

SEQ ID NO: 6822 - DNA, 2280 bp, Ralstonia solanacearum; identical to SEQ ID NO: 1971
  CDS (1)..(2280)

SEQ ID NO: 6823 - protein, 759 aa, Ralstonia solanacearum; identical to SEQ ID NO: 1972

SEQ ID NO: 6824 - DNA, 2271 bp, Salmonella typhimurium; identical to SEQ ID NO: 1973
  CDS (1)..(2271)

SEQ ID NO: 6825 - protein, 756 aa, Salmonella typhimurium; identical to SEQ ID NO: 1974

SEQ ID NO: 6826 - DNA, 2136 bp, Salmonella typhimurium; identical to SEQ ID NO: 1975
  CDS (1)..(2136)

SEQ ID NO: 6827 - protein, 711 aa, Salmonella typhimurium; identical to SEQ ID NO: 1976

SEQ ID NO: 6828 - DNA, 2199 bp, Salmonella typhimurium; identical to SEQ ID NO: 1977
  CDS (1)..(2199)

SEQ ID NO: 6829 - protein, 732 aa, Salmonella typhimurium; identical to SEQ ID NO: 1978

SEQ ID NO: 6830 - DNA, 2142 bp, Salmonella typhimurium; identical to SEQ ID NO: 1979
  CDS (1)..(2142)

SEQ ID NO: 6831 - protein, 713 aa, Salmonella typhimurium; identical to SEQ ID NO: 1980

SEQ ID NO: 6832 - DNA, 2136 bp, Vibrio vulnificus; identical to SEQ ID NO: 1981
  CDS (1)..(2136)

SEQ ID NO: 6833 - protein, 711 aa, Vibrio vulnificus; identical to SEQ ID NO: 1982

SEQ ID NO: 6834 - DNA, 2163 bp, Pasteurella multocida; identical to SEQ ID NO: 1983
  CDS (1)..(2163)

SEQ ID NO: 6835 - protein, 720 aa, Pasteurella multocida; identical to SEQ ID NO: 1984

SEQ ID NO: 6836 - DNA, 2139 bp, Moritella japonica; identical to SEQ ID NO: 1985
  CDS (1)..(2139)

SEQ ID NO: 6837 - protein, 712 aa, Moritella japonica; identical to SEQ ID NO: 1986

SEQ ID NO: 6838 - DNA, 1479 bp, Streptomyces coelicolor; identical to SEQ ID NO: 1987
  CDS (1)..(1479)

SEQ ID NO: 6839 - protein, 492 aa, Streptomyces coelicolor; identical to SEQ ID NO: 1988

SEQ ID NO: 6840 - DNA, 2130 bp, Eikenella corrodens; identical to SEQ ID NO: 1989
  CDS (1)..(2130)

SEQ ID NO: 6841 - protein, 709 aa, Eikenella corrodens; identical to SEQ ID NO: 1990

SEQ ID NO: 6842 - DNA, 2271 bp, Escherichia coli; identical to SEQ ID NO: 1859
  CDS (4)..(2271)

SEQ ID NO: 6843 - protein, 755 aa, Escherichia coli; identical to SEQ ID NO: 1992

SEQ ID NO: 6844 - DNA, 2196 bp, Lactobacillus sp; identical to SEQ ID NO: 1993
  CDS (1)..(2196)

SEQ ID NO: 6845 - protein, 731 aa, Lactobacillus sp; identical to SEQ ID NO: 1814

SEQ ID NO: 6846 - DNA, 1482 bp, Bacillus anthracis; identical to SEQ ID NO: 1995
  CDS (1)..(1482)

SEQ ID NO: 6847 - protein, 493 aa, Bacillus anthracis; identical to SEQ ID NO: 1996

SEQ ID NO: 6848 - DNA, 1383 bp, Bacillus cereus; identical to SEQ ID NO: 1997
  CDS (1)..(1383)

SEQ ID NO: 6849 - protein, 460 aa, Bacillus cereus; identical to SEQ ID NO: 1998

SEQ ID NO: 6850 - DNA, 20 bp, Artificial sequence
  Primer sequence
atggggcagggttttccacc

SEQ ID NO: 6851 - DNA, 25 bp, Artificial sequence
  Primer sequence
ttacttcaacacataaccgtacaac

SEQ ID NO: 6852 - DNA, 930 bp, Escherichia coli K12
  CDS (1)..(930)
atgaccacgaagaaagctgattacatttggttcaatggggagatggttcgctgggaagacgcgaaggtgcatgtgatgtcgcacgcgctgcactatggcacctcggtttttgaaggcatccgttgctacgactcgcacaaaggaccggttgtattccgccatcgtgagcatatgcagcgtctgcatgactccgccaaaatctatcgcttcccggtttcgcagagcattgatgagctgatggaagcttgtcgtgacgtgatccgcaaaaacaatctcaccagcgcctatatccgtccgctgatcttcgttggtgatgttggcatgggcgtaaacccgccagcgggatactcaaccgacgtgattatcgccgctttcccgtggggagcgtatctgggcgcagaagcgctggagcaggggatcgatgcgatggtttcctcctggaaccgcgcagcaccaaacaccatcccgacggcggcaaaagccggtggtaactacctctcttccctgctggtgggtagcgaagcgcgccgccacggttatcaggaaggtatcgcgttggatgtgaatggttacatctctgaaggcgcaggcgaaaacctgtttgaagtgaaagacggcgtgctgttcaccccaccgttcacctcatccgcgctgccgggtattacccgtgatgccatcatcaaactggcaaaagagctgggaattgaagtgcgtgagcaggtgctgtcgcgcgaatccctgtacctggcggatgaagtgtttatgtccggtacggcggcagaaatcacgccagtgcgcagcgtagacggtattcaggttggcgaaggccgttgtggcccggttaccaaacgcattcagcaagccttcttcggcctcttcactggcgaaaccgaagataaatggggctggttagatcaagttaatcaataa

SEQ ID NO: 6853 - protein, 309 aa, Escherichia coli K12
MTTKKADYIWFNGEMVRWEDAKVHVMSHALHYGTSVFEGIRCYDSHKGPVVFRHREHMQRLHDSAKIYRFPVSQSIDELMEACRDVIRKNNLTSAYIRPLIFVGDVGMGVNPPAGYSTDVIIAAFPWGAYLGAEALEQGIDAMVSSWNRAAPNTIPTAAKAGGNYLSSLLVGSEARRHGYQEGIALDVNGYISEGAGENLFEVKDGVLFTPPFTSSALPGITRDAIIKLAKELGIEVREQVLSRESLYLADEVFMSGTAAEITPVRSVDGIQVGEGRCGPVTKRIQQAFFGLFTGETEDKWGWLDQVNQ

SEQ ID NO: 6854 - DNA, 1032 bp, Haemophilus influenzae
  CDS (1)..(1032)
atgaaagacttagactggaataaccttggttttagttatattaaaacagattaccgcttcatcgctcactggaaagatggcaaatgggacgaaggaaaactcactacagatagcacattacatattcacgaaggttcaaccgctcttcactacggtcagcaatgttttgaaggattaaaggcttaccgttgcaaagatggttcaatcaacttattccgcccgcaagcaaatgcagagcgtatgcaacgtaccgcagaccgtcttttaatgccacgcgtaccaactgaattattcgtgcgtgcatgtaaagaagtggttaaagctaaccaagattggttgggtccttacggttctggtgcaaccttatacttacgtccattcttaattggcgtgggcgaaaatatcggcgtgaaaacggcaccagagtttattttctctgttttttgttgcccagtgggtgcttacttcaaaggtggtttggctccatcaaactttatcacgaccgattatgaccgtgctgcaccaatgggcactggtggtgtgaaagtgggtgggaactacgcagcaagcttacttccacacgaattagccgcagaacaaggtacgccagaacgtaaatttgcggatgcaatctatttagatccaaaaactcacaccaaaattgaagaagtcggtgcggcaaacttctttgggatcacaaaagacaataaattcatcacaccaaaatcagaatctattttaccaagtatcactaaatactctcttttacatatcgcaaaagagcgtttaggtatggaagctattgaaggcgatgtgtatatcgatcaactcgatcaattcgtagaagctggtgcgtgcggtacagcggcggtgattaccccagtgggcggcattcaacacaacggaaaattccacgtattcgattcagaaactgaagtaggccctgttacccgtcgtctttatgatgaattaacaggcattcaattcggtgatatcgaagcacctgaaggctggattgtgaaagtagaataa

SEQ ID NO: 6855 - protein, 343 aa, Haemophilus influenzae
MKDLDWNNLGFSYIKTDYRFIAHWKDGKWDEGKLTTDSTLHIHEGSTALHYGQQCFEGLKAYRCKDGSINLFRPQANAERMQRTADRLLMPRVPTELFVRACKEVVKANQDWLGPYGSGATLYLRPFLIGVGENIGVKTAPEFIFSVFCCPVGAYFKGGLAPSNFITTDYDRAAPMGTGGVKVGGNYAASLLPHELAAEQGTPERKFADAIYLDPKTHTKIEEVGAANFFGITKDNKFITPKSESILPSITKYSLLHIAKERLGMEAIEGDVYIDQLDQFVEAGACGTAAVITPVGGIQHNGKFHVFDSETEVGPVTRRLYDELTGIQFGDIEAPEGWIVKVE

SEQ ID NO: 6856 - DNA, 1089 bp, Xylella fastidiosa
  CDS (1)..(1089)
atgtccatttcgttcgatattgcccgctcattgtctaccacttctgatgaagcgctctctatgatcctgcaagcgccagggtttggtgttcatttcactgatcatatgattgctatcgcctgggataaggacaatggttggcacgacgcccaggtacgcgcctatgggccattgttgctggatcctgccgctgctgtgctgcactacgggcaagagattttcgaaggaatcaaagcatatcgccatgctgatggttcgatctggacgttccgcccagaggccaacgctcgccgcttgcagcgttcggccaaacgattagtgttgccagagttgccggtggaactgtttacagaatcgttgcgtcaactcattgcagtggatgcccgctgggttccttcagcaccagaagccagcctgtattttcgtcccttcatgattgccacagaagcgtacttaggcgtgcgggctgcgcagcacgccgcttactacctgatcgccagccctgctggcccgtatttcgctaaaggtgttgctcccgtgtcgatctggttgtcgacagactgtgcccgtgctgccctagggggcacgggtgcggtgaagtgcggcggcaattatgccgcctcgttgctgccgcaacaggtggcgcaggcccagggatgctctcaggtactgttccttgatccggttgagggcaaatatctggaggagctgggagggatgaatgtgtttctcgtctacacagacggcaccttggtcacaccagcgttgtctggcagcatcctcgaaggtatcacccgcgagagtatcttgcagcttgctcgtgatcgagggatgtgtgttgaggaacgtaaggtagcaattgaggagtggaaagagggcgtagtttccggtgcgatcagcgaggtattcgcttgtggtacggctgctgtgatcactccaattggtgaattgaaagcggagggtttttcggtcggaaacatcaacgcaccacctggcgaagttactctgtcgttgcgcaaggaactgaccgacatccagtacggccgtttgccagaccgttatgggtggatgacgtatttgaaggaataa

SEQ ID NO: 6857 - protein, 362 aa, Xylella fastidiosa
MSISFDIARSLSTTSDEALSMILQAPGFGVHFTDHMIAIAWDKDNGWHDAQVRAYGPLLLDPAAAVLHYGQEIFEGIKAYRHADGSIWTFRPEANARRLQRSAKRLVLPELPVELFTESLRQLIAVDARWVPSAPEASLYFRPFMIATEAYLGVRAAQHAAYYLIASPAGPYFAKGVAPVSIWLSTDCARAALGGTGAVKCGGNYAASLLPQQVAQAQGCSQVLFLDPVEGKYLEELGGMNVFLVYTDGTLVTPALSGSILEGITRESILQLARDRGMCVEERKVAIEEWKEGVVSGAISEVFACGTAAVITPIGELKAEGFSVGNINAPPGEVTLSLRKELTDIQYGRLPDRYGWMTYLKE

SEQ ID NO: 6858 - DNA, 924 bp, Pseudomonas aeruginosa
  CDS (1)..(924)
atgtcgatggccgatcgtgatggcgtgatctggtatgacggtgaactggtgcagtggcgcgacgcgaccacgcacgtgctgacccataccctgcactatggaatgggcgtgttcgagggcgtgcgcgcctacgacaccccgcagggcacggcgatcttccgcctgcaggcgcataccgaccggctgttcgactccgcgcacatcatgaacatgcagatcccgtacagccgcgacgagatcaacgaggcgacccgcgccgccgtgcgcgagaacaacctggaaagcgcctatatccgcccgatggtgttctacggaagcgaaggcatgggcctgcgcgccagcggcctgaaggtccatgtgatcatcgccgcctggagctggggcgcctacatgggcgaggaagccctgcagcaaggcatcaaggtgcgcaccagttccttcacccgccaccacgtcaacatctcgatgacccgcgccaagtccaacggcgcctacatcaactcgatgctggccctccaggaagcgatctccggcggcgccgacgaggccatgatgctcgatccggaaggctacgtggccgaaggctccggcgagaacatcttcatcatcaaggatggcgtgatctacaccccggaagtcaccgcctgcctgaacggcatcactcgtaacactatcctgaccctggccgccgaacacggttttaaactggtcgagaagcgcatcacccgcgacgaggtgtacatcgccgacgaggccttcttcactggcactgccgcggaagtcacgccgatccgcgaagtggacggtcgcaagatcggcgccggccgccgtggcccggtcaccgaaaagctgcagaaagcctatttcgacctggtcagcggcaagaccgaggcccacgccgagtggcgtaccctggtcaagtaa

SEQ ID NO: 6859 - protein, 307 aa, Pseudomonas aeruginosa
MSMADRDGVIWYDGELVQWRDATTHVLTHTLHYGMGVFEGVRAYDTPQGTAIFRLQAHTDRLFDSAHIMNMQIPYSRDEINEATRAAVRENNLESAYIRPMVFYGSEGMGLRASGLKVHVIIAAWSWGAYMGEEALQQGIKVRTSSFTRHHVNISMTRAKSNGAYINSMLALQEAISGGADEAMMLDPEGYVAEGSGENIFIIKDGVIYTPEVTACLNGITRNTILTLAAEHGFKLVEKRITRDEVYIADEAFFTGTAAEVTPIREVDGRKIGAGRRGPVTEKLQKAYFDLVSGKTEAHAEWRTLVK

SEQ ID NO: 6860 - DNA, 882 bp, Brucella melitensis
  CDS (1)..(882)
atggccgcttcagcagcagaacttgaaaaccgcatcgtatatgtcaacggcgaatacgtcgccgcccgcgatgcccgcatctccattttcgaccgtggctttctcttcggcgacggcatttacgaagtaactgccgttctggaaggcaagcttgtcaatagcgaaccgcatatgcaacgcttgcgccgctcgaccggcgaaatcggcattgcgatgccgatgagcgaagacgagatcgtcaccatcgaacgcgagctgatccgccgcaacaagctgaccgaaggtctggtctatctacaggtgacacgcggcaacggaggcgaccgcgattttgtgccagccgcaaacatgaagccttcggtggttctcttcacgcaggaagccaacctgctcgacaagccagcactcaagaccggcgcgcatgtgctttcactggacgatctgcgctggaagcgccgtgacatcaagacagtctgcctgctgccgcaggcgctcaccaaggaaattgccaagaatgccggttgcgacgaggcatggatgatcgaagacggttatgtgaccgaaggcgcatcttccacggcctatatcgtaaccagggacgatgttatcgtcacccggcccaacagcaatttcaccctgcccggttgcacgcggctttcgcttttgcaactgattacagagaccggcatgaagctggaagaacgcctcttcaccatcgatgaggcctatgcggcaaaagaagcctttcttacaagtgcgggaactttcgtcacgccgatcaccgttattgatggaaaaaccatcggcgacggaaagcccggcccgattgcccggcgcctgcgcgaagtctatctcgaccacgcccgccgcacggcaatctga

SEQ ID NO: 6861 - protein, 293 aa, Brucella melitensis
MAASAAELENRIVYVNGEYVAARDARISIFDRGFLFGDGIYEVTAVLEGKLVNSEPHMQRLRRSTGEIGIAMPMSEDEIVTIERELIRRNKLTEGLVYLQVTRGNGGDRDFVPAANMKPSVVLFTQEANLLDKPALKTGAHVLSLDDLRWKRRDIKTVCLLPQALTKEIAKNAGCDEAWMIEDGYVTEGASSTAYIVTRDDVIVTRPNSNFTLPGCTRLSLLQLITETGMKLEERLFTIDEAYAAKEAFLTSAGTFVTPITVIDGKTIGDGKPGPIARRLREVYLDHARRTAI

SEQ ID NO: 6862 - DNA, 870 bp, Listeria monocytogenes
  CDS (1)..(870)
atgaaagtattagtaaataaccatttagttgaaagagaagatgccacagttgacattgaagaccgcggatatcagtttggtgatggtgtatatgaagtagttcgtctatataatggaaaattctttacttataatgaacacattgatcgcttatatgctagtgcagcaaaaattgacttagttattccttattccaaagaagagctacgtgaattacttgaaaaattagttgccgaaaataatatcaatacagggaatgtctatttacaagtgactcgtggtgttcaaaacccacgtaatcatgtaatccctgatgatttccctctagaaggcgttttaacagcagcagctcgtgaagtacctagaaacgagcgtcaattcgttgaaggtggaacggcgattacagaagaagatgtgcgctggttacgctgtgatattaagagcttaaaccttttaggaaatattctagcaaaaaataaagcacatcaacaaaatgctttggaagctattttacatcgcggggaacaagtaacggaatgttctgcttcaaacgtttctattattaaagatggtgtattatggacgcatgcggcagataacttaatcttaaatggtatcactcgtcaagttatcattgatgttgcgaaaaagaatggcattcctgttaaagaagcggatttcactttaacagaccttcgtgaagcggatgaagtgttcatttcaagtacaactattgaaattacacctattacgcatattgacggagttcaagtagctgacggaaaacgtggaccaattacagcgcaacttcatcaatattttgtagaagaaatcactcgtgcatgtggcgaattagtgtttgcaaaataa

SEQ ID NO: 6863 - protein, 289 aa, Listeria monocytogenes
MKVLVNNHLVEREDATVDIEDRGYQFGDGVYEVVRLYNGKFFTYNEHIDRLYASAAKIDLVIPYSKEELRELLEKLVAENNINTGNVYLQVTRGVQNPRNHVIPDDFPLEGVLTAAAREVPRNERQFVEGGTAITEEDVRWLRCDIKSLNLLGNILAKNKAHQQNALEAILHRGEQVTECSASNVSIIKDGVLWTHAADNLILNGITRQVIIDVAKKNGIPVKEADFTLTDLREADEVFISSTTIEITPITHIDGVQVADGKRGPITAQLHQYFVEEITRACGELVFAK

SEQ ID NO: 6864 - DNA, 870 bp, Listeria innocua
  CDS (1)..(870)
atgaaagtactagtaaatgaccgtttagtagaaagaaatgatgctacagttgacgtagaagaccgtggataccaatttggtgatggagtatatgaagttgttcgtttatataatggtaaattttttacttataacgagcatatcgatcgtttatacgctagtgcagcaaaaattgacttagttattccttattccaaagaaacattacgagcgttattagacaaattagtagctgaaaataatatcaataccggaaatgtatatttacaagtaacaagaggagttcaaaatcctcgtaatcacgttcttccagatgatttccccttagaaggagtattaactgcagcagctcgtgaagtaccaagaaatgagcgtcaattcatagaaggcggctcagcaattaccgaagaagatgtacgctggttacgttgtgatattaaaagcttaaacttacttggaaatattttagcgaaaaacaaagcacatcaacaaaacgcgcttgaagctattttacatcgcggggagcaagttaccgagtgttctgcttctaacgtatccattattaaagatggggttttatggacacatgctgccgacaacctaattttaaatggtattactcgtcaagttattattgatgtagcgaaaaagaacggtattcctgtaaaagaagccgatttcactttaacagatttacgagaagcagatgaagtgtttatttccagtactacaattgaaatcacaccaattactcacattgatggagtacaagttgctgatggaaaacgtggtccaattaccgctcaacttcataattactttgtagaagaaatcgttcgcgcttgtggcgaattagaatatgcaaaataa

SEQ ID NO: 6865 - protein, 289 aa, Listeria innocua
MKVLVNDRLVERNDATVDVEDRGYQFGDGVYEVVRLYNGKFFTYNEHIDRLYASAAKIDLVIPYSKETLRALLDKLVAENNINTGNVYLQVTRGVQNPRNHVLPDDFPLEGVLTAAAREVPRNERQFIEGGSAITEEDVRWLRCDIKSLNLLGNILAKNKAHQQNALEAILHRGEQVTECSASNVSIIKDGVLWTHAADNLILNGITRQVIIDVAKKNGIPVKEADFTLTDLREADEVFISSTTIEITPITHIDGVQVADGKRGPITAQLHNYFVEEIVRACGELEYAK

SEQ ID NO: 6866 - DNA, 882 bp, Agrobacterium tumefaciens
  CDS (1)..(882)
atgagcgtcgataccgcaccccgatcaaccacctggacctatgttgacggtcaatggctgcccggcaatccgccgctcatcggcccgacctcgcatgccatgtggctggcctccacggtatttgacggcgcacgctggtttgatggcgtggcacccgatctcgatctgcattgccagcgtgtcaatcgctcagccaccaacatgggcatgaagccgaccatgacggcggaagagatcgagacgcttgcgcttgagggtgtgaggaaattcgacggcaggatggcgatctacatcaagccgatgtattgggccgaacacggcatgcccggcagcgttgtcgcgccggatgccagctccacccgttttgcgctctgcctgttcgaagcgccgatggacgccggcaagccgctgacgctcaccgtctcgccgctgcgtcgtccgtcgccggaaaccgcgatgaccgacgccaaggctggcagtctttatcccaatagcggccgcgccattctggaagcccgcgcacgcggtttcgacaatgccctgatgcgcgacatgaacggcaatgtcgccgaatccgcctcggccaacatcttcatggtcaaggacggtgtcgtcttcacgccggtgcccaaccgcacctttcttgccggcatcacccgttcgcgtgtgatcggtcttctgcgtcaggccggtttcgacgttcgggaagccacgctgtcggtcgaggatttcaacgaggctgatgaaatcttctgctcgggcaactattccaaggtttcgcctgtcgtgaagctggatgaccgcgaattgcaggcgggcccggtcgcgcgcaaggcgcttgatctctatatggattgggcacgtctcggcgcagacgtctga

SEQ ID NO: 6867 - protein, 293 aa, Agrobacterium tumefaciens
MSVDTAPRSTTWTYVDGQWLPGNPPLIGPTSHAMWLASTVFDGARWFDGVAPDLDLHCQRVNRSATNMGMKPTMTAEEIETLALEGVRKFDGRMAIYIKPMYWAEHGMPGSVVAPDASSTRFALCLFEAPMDAGKPLTLTVSPLRRPSPETAMTDAKAGSLYPNSGRAILEARARGFDNALMRDMNGNVAESASANIFMVKDGVVFTPVPNRTFLAGITRSRVIGLLRQAGFDVREATLSVEDFNEADEIFCSGNYSKVSPVVKLDDRELQAGPVARKALDLYMDWARLGADV

SEQ ID NO: 6868 - DNA, 1020 bp, Listeria innocua
  CDS (1)..(1020)
atgagtaaagatattgactggagtaatttagggtttagttatattaaaacggacaagcgttatatttcacattggaaagacggagcgtgggatgaaggtactttgacggaagataatacacttcatattagtgaaggttctactgcacttcattatggccaacaatgttttgaaggtttgaaagcatatcgttgtaaggatggttccattaacctttttcgtccagatcgtaatgctgctcgtattcaaaaaagttgtgaacgtttattaatgcctcatattccaacagaaaaatttattgatgcttgtatgcaagttgttcgtgcaaatgaagaatttgttccaccttatggtactggagcaactctttatttacgaccgtttgtaattggcgtaggtgataatattggcgttcatgcagctccagagtatattttctctgttttctgttcaccagttggtccttatttcaaaggcggaatggcaccaactaactttatcgtttctgactttgaccgtgccgctccaaatggaacaggtgcagcaaaagtaggcggtaactatgcagcaagtttacttccagggcaaaacgcaaaagatcgtaattttggggattgtatctacttggacccagctactcatacaaaaattgaagaagttggctcggctaatttctttggtattacaaaagacgataaatttattacgccgtattctccttctattttgccaagtatcacgaagtattcattactttatttggcagaacaccgtttaggtttaaaagcagaagaaggcgatgtatttattgataagttagatgaatttaaggaagcaggcgcatgtggaaccgccgcagttatcacaccaattggcggtattcaaacaaaagatgacttccatgtattttacagtgaaacagaagtagggccagtaacaaaacgcctatttgatgaactatgtggaattcaatttggagatgtagaagctccagaaggttggatttataaagtgaaataa

SEQ ID NO: 6869 - protein, 339 aa, Listeria innocua
MSKDIDWSNLGFSYIKTDKRYISHWKDGAWDEGTLTEDNTLHISEGSTALHYGQQCFEGLKAYRCKDGSINLFRPDRNAARIQKSCERLLMPHIPTEKFIDACMQVVRANEEFVPPYGTGATLYLRPFVIGVGDNIGVHAAPEYIFSVFCSPVGPYFKGGMAPTNFIVSDFDRAAPNGTGAAKVGGNYAASLLPGQNAKDRNFGDCIYLDPATHTKIEEVGSANFFGITKDDKFITPYSPSILPSITKYSLLYLAEHRLGLKAEEGDVFIDKLDEFKEAGACGTAAVITPIGGIQTKDDFHVFYSETEVGPVTKRLFDELCGIQFGDVEAPEGWIYKVK

SEQ ID NO: 6870 - DNA, 927 bp, Yersinia pestis
  CDS (1)..(927)
atgacgaagaaagcggattacatttggtttaacggcgaaatggttccatgggcagaagctaaagttcatgtgatgtctcacgcgttacactacggaacgtcagtcttcgaaggtgtccgttgctacgaatcccataaagggccggtagttttccgtcaccgtgagcatatgcagcgtttgcatgattccgccaaaatttatcgtatgcccgtctcccagtcagtggatgaactgatggaagcttgccgtgccacgctgcgcaaaaataatctgaccagtgcttatattcgcccgttagtctttattggtgatgtcggcatgggcgtgaatccaccggagggttataacactgacgtgatcattgccgctttcccatggggtgcttatctgggtgcagaagccttggagcaaggcattgatgctatggtgtcatcatggaaccgtgttgcacccaataccatcccaacggcggcgaaagcaggcggtaactacctttcatccttgctggtgggcagtgaagcacgtcgccacggctatcaggaagggattgcgctggatgttcatggttacctgtctgaaggtgccggtgagaacctgttcgaagtgaaagatggcatcctgttcacaccaccatttacctcgtctgccctgccgggtatcacccgtgatgccattatcaagctggcgaaagatatggggctggaagtgcgtgagcaagtgttgtcacgtgagtctctgtatctggccgatgaagtgtttatgtccggtactgcagcggaaattaccccagtacgcagcgtggatggtattcaggttggtattggcaagcgcggcccggtcacagccaaaattcaacaagcgttcttcggcttgtttaccggtgaaaccgaggacaaatggggctggctggatcaggttaatccataa

SEQ ID NO: 6871 - protein, 308 aa, Yersinia pestis
MTKKADYIWFNGEMVPWAEAKVHVMSHALHYGTSVFEGVRCYESHKGPVVFRHREHMQRLHDSAKIYRMPVSQSVDELMEACRATLRKNNLTSAYIRPLVFIGDVGMGVNPPEGYNTDVIIAAFPWGAYLGAEALEQGIDAMVSSWNRVAPNTIPTAAKAGGNYLSSLLVGSEARRHGYQEGIALDVHGYLSEGAGENLFEVKDGILFTPPFTSSALPGITRDAIIKLAKDMGLEVREQVLSRESLYLADEVFMSGTAAEITPVRSVDGIQVGIGKRGPVTAKIQQAFFGLFTGETEDKWGWLDQVNP

SEQ ID NO: 6872 - DNA, 927 bp, Halobacterium sp. NRC-1
  CDS (1)..(927)
atgcccagtttcagtgagatggacgtcgacaccatctggatggacggcgagttcgtcgactgggaggacgcacaagtacacgtcctcacccacgcactccactacgggtccggcatcttcgagggggtccgtgtctacgacaccgacaacggccccgcgatcttccggtgggacgaccacctccagcggttctacgaatcggcgaaaccctacgacctcgacatcgagttcacgcccgacgaactcaccgacgccaccgtcgagctcatccagcgccaagacctcgggtcctgttacatccgcccgctggcgtactacggctacgaatcactcggcgtctcccccggcgactgcccgaccgacgtcgccatcgccgcctggccgtggggcgcgtacctcggcgacgacgccctcgaaaacggcgtcgacgtgatggtgtcgacgtggcgcaagcacgcctccagccagatcccgacgaacgccaaaaccaccggcctctacgtcaacagcatgctcgccggcgaggaagcccggcgcaacggcttcaccgaagccatcgtcctcaacaaagagggcaacgtcgcggaaggccccggcgagaacatcttcctcgtgcgcgacggcgaactcttcacgcccggcctctccgagagcatcctcgacggcatcacccgcgacaccgtcatcacgctcgccgaggagcgcggctacaccgtccacgacgacgtctcgatctcgcgtggcgaactccacaccgccgacgagctcttcttcaccggctccgccgccgaagtcacgccgatcaagcaagtcgacaacgtcgaaatcggctccggaacccgcggcccggtcaccgaagagctccagaccgcgttcttcgacctcgtggaggccggcgaccgcgaggagtggttccactacgtctga

SEQ ID NO: 6873 - protein, 308 aa, Halobacterium sp. NRC-1
MPSFSEMDVDTIWMDGEFVDWEDAQVHVLTHALHYGSGIFEGVRVYDTDNGPAIFRWDDHLQRFYESAKPYDLDIEFTPDELTDATVELIQRQDLGSCYIRPLAYYGYESLGVSPGDCPTDVAIAAWPWGAYLGDDALENGVDVMVSTWRKHASSQIPTNAKTTGLYVNSMLAGEEARRNGFTEAIVLNKEGNVAEGPGENIFLVRDGELFTPGLSESILDGITRDTVITLAEERGYTVHDDVSISRGELHTADELFFTGSAAEVTPIKQVDNVEIGSGTRGPVTEELQTAFFDLVEAGDREEWFHYV

SEQ ID NO: 6874 - DNA, 849 bp, Staphylococcus aureus
  CDS (1)..(849)
atggaaaaaatttttttaaatggtgagtttgtaagtccaagtgaagcaaaggtttcatacaacgacagaggatacgtatttggcgatggtatttatgaatacattcgagtatataatggtaagttatttacagtaacagaacattatgaaagatttttacgtagtgccaatgagattggtttagatttaaattattctgtagaagaattaattgaactatctcgtaaattagttgatatgaatcaaattgaaactggggcaatttatattcaagcaacgcgtggtgtagctgaaaggaatcatagcttcccgacacctgaagtagaaccagcaattgttgcttatacaaagagttatgatcgtccttatgatcatttagaaaatggtgtgaatggtgttaccgttgaagatatccgatggttacgttgcgacattaaaagcttgaacttattaggaaatgtattagcaaaagaatatgctgtgaaatataatgcagttgaagcaattcaacatcgaggtgaaactgtaactgaaggatcttcaagtaatgcttatgcaattaaagacggtgtgatttatacacatccgattaacaactatattcttaatggtattacacgaattgtaattaaaaaaattgccgaagactataacatcccatttaaagaagaaacgtttactgtagatttcttgaaaaacgcagatgaagttattgtttcaagtacttcagctgaggttacacctgttattaaattagatggtgaaccaattaatgatggtaaagttggcccaattacacgtcaactacaagaaggatttgaaaagtatatagagtcacacagtatttaa

SEQ ID NO: 6875 - protein, 282 aa, Staphylococcus aureus
MEKIFLNGEFVSPSEAKVSYNDRGYVFGDGIYEYIRVYNGKLFTVTEHYERFLRSANEIGLDLNYSVEELIELSRKLVDMNQIETGAIYIQATRGVAERNHSFPTPEVEPAIVAYTKSYDRPYDHLENGVNGVTVEDIRWLRCDIKSLNLLGNVLAKEYAVKYNAVEAIQHRGETVTEGSSSNAYAIKDGVIYTHPINNYILNGITRIVIKKIAEDYNIPFKEETFTVDFLKNADEVIVSSTSAEVTPVIKLDGEPINDGKVGPITRQLQEGFEKYIESHSI

SEQ ID NO: 6876 - DNA, 936 bp, Aquifex aeolicus
  CDS (1)..(936)
atgctaaaatctttttccatggatttcgctttcttcgaaggcaaaatagtgcccgtggaagaggcaaaaataagcataatgaccaattccttccactacggcacggccatctttgaagggataagggcgtactggaacgaagaagaggaacaactctacatcctctttgcaaaggaacactacgaaagactcctcactaacgcaaggtgtctgtttatggaattaaactactctgctgaggaactcgttgaaattactaaagagatattaagaaaatctgagataagggaggacgtttacataagacctatagcttactttaaggacttgaaattaactcctaagttaatagactacacacccgaaatagcgatatacctctacaggttcggcaggtacctagacacttcaaagggtataagggcaaaggtttcttcttggaggaggaacgacgacaactcaataccatcccgctggaaggttgcgggggcctacgtgaacagtgcacttgcaaagactgaagccctcatgtctggatacgacgaggctatacttctcaactctcagggctacgttgcggaaggttcgggagaaaatatctttataataaaaaacggaaaggccataacaccttctcccaacgaacacatacttgaaggcataacgaggaacgcggtaataactcttttgaaaaaggaactagttgtggaggtggaggaaagaccaatagcgaggagtgagctttacaccgcggacgaggtgtttttgacggggacagctgccgaagtgactcccgtggtagagatagacaacaggaagataggaaacggagagataggtcctataacaaaacagcttcaggagttttactttaacgcagtaagggggaaaatccagaggtacaaaaagtggttaacgcccgtttatgataagtga

SEQ ID NO: 6877 - protein, 311 aa, Aquifex aeolicus
MLKSFSMDFAFFEGKIVPVEEAKISIMTNSFHYGTAIFEGIRAYWNEEEEQLYILFAKEHYERLLTNARCLFMELNYSAEELVEITKEILRKSEIREDVYIRPIAYFKDLKLTPKLIDYTPEIAIYLYRFGRYLDTSKGIRAKVSSWRRNDDNSIPSRWKVAGAYVNSALAKTEALMSGYDEAILLNSQGYVAEGSGENIFIIKNGKAITPSPNEHILEGITRNAVITLLKKELVVEVEERPIARSELYTADEVFLTGTAAEVTPVVEIDNRKIGNGEIGPITKQLQEFYFNAVRGKIQRYKKWLTPVYDK

SEQ ID NO: 6878 - DNA, 873 bp, Rickettsia prowazekii
  CDS (1)..(873)
atgacaatgataaaactagatcaaatttatgggtatatttggattaatggtgatttaatcccttatcaatttgcaaggattcatgttttaactcatagtctacattattcaggatcggtatttgagggtgagagagcttataacggaaaagtttttaaattaaaggaacataccgaaagattaatacaatcagcagaatcactaggtttgaaagtgccttatagtgtagatgagataataaaagctcatgaacttttaataatacaaaataatattaaggatgcgtatataagaccgcttatttggtgtggagatgagtcactaaatattactaatcctgatttgtctactaattttttgattgcaagtatttcatcaatgccaagatcttgcgaacaaagtgtgcatttgcatgtaagtagatggcgtaaagcaatgcctaatagcacaccggtacaatctaaatctgctgctcaatataatatggcaataacaagtaaaaaagaagctaaagctcttggctatgatgatgcattattactagattatgaagggtttattgctgaatgtactacaacaaatattttttttgttaaagataaaacattatatactcctattgctgataggtttttaaacggtatcacgcgcaagactattattgaaattgcaaaaagtttatgtctagaagtaaaagaagagcgtttaaaattagcgcaaatagaacattttactgggtgttttgtaacaggtacagcaattgaggtgcaaaatattagttctatagatcttggaaataaaaagattctttttgaagataataaaattgcagatctgttaaaaagagagtattggcgtattgttagaggatag

SEQ ID NO: 6879 - protein, 290 aa, Rickettsia prowazekii
MTMIKLDQIYGYIWINGDLIPYQFARIHVLTHSLHYSGSVFEGERAYNGKVFKLKEHTERLIQSAESLGLKVPYSVDEIIKAHELLIIQNNIKDAYIRPLIWCGDESLNITNPDLSTNFLIASISSMPRSCEQSVHLHVSRWRKAMPNSTPVQSKSAAQYNMAITSKKEAKALGYDDALLLDYEGFIAECTTTNIFFVKDKTLYTPIADRFLNGITRKTIIEIAKSLCLEVKEERLKLAQIEHFTGCFVTGTAIEVQNISSIDLGNKKILFEDNKIADLLKREYWRIVRG

SEQ ID NO: 6880 - DNA, 822 bp, Thermotoga maritima
  CDS (1)..(822)
atgctgatatggtggaggggaaagttccggcgcgcggatgaaatttcactggatttctctctgtttgaaaagtcgctccagggagcggtgtatgaaactctgagaacttacagtagggccccgtttgcggcttacaaacattacactaggctgaaaagatctgccgatttctttaatcttcctctttctctgagcttcgatgaattcacaaaggtgctgaaggcgggagctgatgagttcaaacaagaagtgagaatcaaagtctatcttttccctgattccggggaggttctctttgtgttctcaccgctcaatataccagacctggagacaggagtcgaggtgaaaatatcgaacgttcgaaggataccggatctttctactccaccagctctaaaaataactggacgcaccgacatagtgcttgcaagaagggaaatagtggactgctacgatgtgattttgctcggtttgaacgggcaggtctgtgagggaagtttcagcaatgtgtttctggtgaaagaaggcaaattgattacaccatcgcttgacagcggtattctggatggcatcacacgggaaaacgttataaagctcgcaaaaagtctcgagatacctgttgaagaaagagtagtgtgggtgtgggaactgttcgaagcggatgaaatgtttctcacacacacaagtgcgggagtggttcctgtcagaaggttgaacgagcactcgtttttcgaggaagagccaggacctgtgacagcgactttgatggaaaactttgagccttttgtcttaaatctggaggaaaactgggtgggaatatga

SEQ ID NO: 6881 - protein, 273 aa, Thermotoga maritima
MLIWWRGKFRRADEISLDFSLFEKSLQGAVYETLRTYSRAPFAAYKHYTRLKRSADFFNLPLSLSFDEFTKVLKAGADEFKQEVRIKVYLFPDSGEVLFVFSPLNIPDLETGVEVKISNVRRIPDLSTPPALKITGRTDIVLARREIVDCYDVILLGLNGQVCEGSFSNVFLVKEGKLITPSLDSGILDGITRENVIKLAKSLEIPVEERVVWVWELFEADEMFLTHTSAGVVPVRRLNEHSFFEEEPGPVTATLMENFEPFVLNLEENWVGI

SEQ ID NO: 6882 - DNA, 1077 bp, Deinococcus radiodurans
  CDS (1)..(1077)
atgcgccttacaatcctgggcatgaccgcgcacgacagccgccccgagcaggccaagaagctggccgacatcgactggagcaccctcggtttttcttacatccgtaccgacctgcgctacctcgcgcactggaaagacggcgagtgggacgcgggcacgctcaccgaggacaaccagattcatctggcggaaggctcgacggcgctgcactacggccagcagtgcttcgaggggctcaaggcgtaccgctgcgccgacggcagcatcaacctctttcgccccgaccagaacgcggcccggatgcggatgagctgccgccgcctgctgatgcccgaactcagcgacgagcagttcatcgacgcctgcttgcaagtcgtgcgcgccaacgagcattttttgccgccctacggcacgggcggaagcctctacctgcgccccttcgtcatcggcgtgggcgacaacatcggcgtgcgaacggcgcccgagttcattttcagcgtcttttgcgtgccggtcggcccctacttcaagggcgggctgacccccaccaacttcatcacctcggactatgaccgcgccgcgccgcacggcaccggggcggcgaaggtgggcggcaactacgccgcgagcctgctgcccggctacgaggccaaaaagcgcgactttgccgacgtgatttatctcgaccccgccacccacaccacaatcgaggaggcgggcgcggccaacttcttcgccatcacccaggacggccagaagttcgtgacgccgcagtcgccgtccattctgccgagcatcaccaagtacagcctgctgtggctcgccgagcaccggctcgggctggaagtcgaggaaggcgacattcgcatcgacgagctgggcaagttcagcgaggcgggcgcgtgcggcacggcggcggtcatcacgcccatcggcggcattcagcacggcgacgactttcacgtcttttattccgaaagcgagccggggccggtcacgcgccgcctgtacgacgaactggtcggcattcagtacggggataaggaagcgccggaaggctggattgtgaaggtgtag

SEQ ID NO: 6883 - protein, 358 aa, Deinococcus radiodurans
MRLTILGMTAHDSRPEQAKKLADIDWSTLGFSYIRTDLRYLAHWKDGEWDAGTLTEDNQIHLAEGSTALHYGQQCFEGLKAYRCADGSINLFRPDQNAARMRMSCRRLLMPELSDEQFIDACLQVVRANEHFLPPYGTGGSLYLRPFVIGVGDNIGVRTAPEFIFSVFCVPVGPYFKGGLTPTNFITSDYDRAAPHGTGAAKVGGNYAASLLPGYEAKKRDFADVIYLDPATHTTIEEAGAANFFAITQDGQKFVTPQSPSILPSITKYSLLWLAEHRLGLEVEEGDIRIDELGKFSEAGACGTAAVITPIGGIQHGDDFHVFYSESEPGPVTRRLYDELVGIQYGDKEAPEGWIVKV

SEQ ID NO: 6884 - DNA, 852 bp, Bacillus halodurans
  CDS (1)..(852)
atggattattgcctttaccaagaccagcttgttccacgtgagcaactaaaaattgatccagaggatagaggctatcattttggtgacggtatttacgaagtggtccacgtataccacgggaaagcttttgccttatctgatcatttaactcgctttaaagaaagtgccgaaaaacttgatctacctatgctctattccacagacaaactaggggagcttgttcagcaacttattgaaaaaaacaagctggagcatggaatggtctactttcagatgacccgggggatcagtccgcgaaaccatttgtacacgcgtaatgaaacacccgtccttaccggtttttcaaaaccattacctgatgaaaagagggaatccgttcgtctttatttgaccgatgatattcgctggcttcgttgcgacattaaaaccattaacttattaggaaatgtcttggccaagcgtgaagcaaccgatcatcaatgcgacgaagcgctcctccaccgtgacggaacagtgactgaaggctcgtcatcgaatgtgttccttattaaaaatgaaacactctacacacatccagcaacaaatctcatcttgaacgggattacacgacaaatcaccatccggctagccaaagcaaaagggtataccgtcgtggaagagccgttccctaaagaagtgataaaggatgctgatgaagcgttcattacgagcacgatccatgaaatcacaccagtaaccgaagtcatcggtgatgaaacggcacattttcctgttggacctgtcacgaaaatgttgcaacaggcatttgcagaagaaattgccaaacactctcaaacagcgatgaagcagtga

SEQ ID NO: 6885 - protein, 283 aa, Bacillus halodurans
MDYCLYQDQLVPREQLKIDPEDRGYHFGDGIYEVVHVYHGKAFALSDHLTRFKESAEKLDLPMLYSTDKLGELVQQLIEKNKLEHGMVYFQMTRGISPRNHLYTRNETPVLTGFSKPLPDEKRESVRLYLTDDIRWLRCDIKTINLLGNVLAKREATDHQCDEALLHRDGTVTEGSSSNVFLIKNETLYTHPATNLILNGITRQITIRLAKAKGYTVVEEPFPKEVIKDADEAFITSTIHEITPVTEVIGDETAHFPVGPVTKMLQQAFAEEIAKHSQTAMKQ

SEQ ID NO: 6886 - DNA, 1104 bp, Arabidopsis thaliana (mouse-ear cress)
  CDS (1)..(1104)
atggctccttctgtgcacccttcttcatcacctctttttacaagtaaagccgatgaaaagtatgcgaatgtaaaatgggatgagctcggattcgcactggttccaacagattatatgtatgtggcgaaatgcaaacaaggagagagcttttcaacaggagagattgttccttatggggatatttctataagcccttgtgctgggattctcaattatggccagggactatttgaaggtctcaaggcttacaggacagaagacggtcggatcacactcttccgacctgaccaaaacgctattcgtatgcaaacaggtgcagataggctttgtatgacacctccttccccggagcaattcgttgaagcagttaagcaaactgtgcttgccaacaacaaatgggtacctcctccggggaaaggagctttgtatattaggcctctactcataggtactggtgctgtccttggagtagcttcagctcctgaatatacgttcctcatttacacatctcccgtgggaaattatcacaaggcaagctcaggcttgaacctcaaagttgatcataaccatcgccgagcccacttcggtggaacagggggtgtgaagagctgcacaaattattctccagttgtaaaatcgttgatcgaagcaaagtcttcgggtttctctgatgtcttgttcctggatgcggcaactggtaaaaacatcgaagaggtttctacttgtaacatcttcattctaaagggaaacattgtatccactcccccaacttcaggaaccattttaccaggaatcacaaggaagagcatatgtgagctagcccgtgacattggctatgaggttcaagaacgtgatctttctgtggatgagctattagaggcagaggaagttttttgcacggggacggcagtggtcattaaagctgttgaaaccgtgacattccatgacaaaagggtaaaatatagaacaggagaagaagcattctctacgaagcttcacttgatattaactaatattcaaatgggagttgtcgaagataagaagggttggatgatggagatcgatcatttggttggaacagattcgtttcctgatgaaacataa

SEQ ID NO: 6887 - protein, 367 aa, Arabidopsis thaliana (mouse-ear cress)
MAPSVHPSSSPLFTSKADEKYANVKWDELGFALVPTDYMYVAKCKQGESFSTGEIVPYGDISISPCAGILNYGQGLFEGLKAYRTEDGRITLFRPDQNAIRMQTGADRLCMTPPSPEQFVEAVKQTVLANNKWVPPPGKGALYIRPLLIGTGAVLGVASAPEYTFLIYTSPVGNYHKASSGLNLKVDHNHRRAHFGGTGGVKSCTNYSPVVKSLIEAKSSGFSDVLFLDAATGKNIEEVSTCNIFILKGNIVSTPPTSGTILPGITRKSICELARDIGYEVQERDLSVDELLEAEEVFCTGTAVVIKAVETVTFHDKRVKYRTGEEAFSTKLHLILTNIQMGVVEDKKGWMMEIDHLVGTDSFPDET

SEQ ID NO: 6888 - DNA, 1092 bp, Helicobacter pylori
  CDS (28)..(1050)
tgaaactatccatttaaaggtgtgaaaatggcaaatttagaaaatttagactggaaaaatttaggctttagctacattaaaacggattttcgcttcatcgccacttataaaaacggctcttggtcgcaaggcggattggtgagcgaaaacatgttacaactcagcgaaggctcgccggtcttgcactacgggcaggcttgttttgaaggcttgaaggcttaccgctctcaaaaggggaaagctttactctttcgccctttagaaaacgccaaacgcttgcaaacttcatgcgaaagactgctcatgcccaaagtgagcgaagagctgtttttaagggcatgcgctgaagtggtgaaagcgaatcaaaaatggctcgctccttataaaagcggggcgagtttgtatttgcgcccttttgtcataggcgtaggggataatttgggggtgaagccggctaatgaatacctttttatcgtgttttgtgcgcctgtgggggcgtattttaaggggggtatagaaaaagggggggctaggtttatcactacgatttttgatagggccgcgcctaaaggcaccggtggggtgaaagtgggagggaattacgctgcaagcctgttagcccataaaatggccacagagcaaggctatgatgattgcatttatttagaccctactacgcacactaaaattgaagaagtgggggcggcgaatttttttggcatcacgcatgatgatgcctttatcaccccgcattcgccaagcattctgccaagcattaccaaaaaaagcttgatggttttggctaaagaatatttgaacctcaaagtagaagagagggaaatcctaatggatgagttggatgcgtttaaagaagctggagcgtgcgggacagctgcgatcattacgcccattaaagaaatcgtgcacaacaacaagtcttatttttttgaagcgccgggccatattactaaacgactctatgatttgcttttatccatccaacaaggcgaacaagaagcccccaaagattggatttttgaagttggctaaaaggttaaaatttatagctgtatgccgcataaaataagggcg

SEQ ID NO: 6889 - protein, 340 aa, Helicobacter pylori
MANLENLDWKNLGFSYIKTDFRFIATYKNGSWSQGGLVSENMLQLSEGSPVLHYGQACFEGLKAYRSQKGKALLFRPLENAKRLQTSCERLLMPKVSEELFLRACAEVVKANQKWLAPYKSGASLYLRPFVIGVGDNLGVKPANEYLFIVFCAPVGAYFKGGIEKGGARFITTIFDRAAPKGTGGVKVGGNYAASLLAHKMATEQGYDDCIYLDPTTHTKIEEVGAANFFGITHDDAFITPHSPSILPSITKKSLMVLAKEYLNLKVEEREILMDELDAFKEAGACGTAAIITPIKEIVHNNKSYFFEAPGHITKRLYDLLLSIQQGEQEAPKDWIFEVG

SEQ ID NO: 6890 - DNA, 1023 bp, Helicobacter pylori
  CDS (1)..(1023)
atgccaaatttagaaaatttagactggaaaaatctaggctttagctacattaaaacggattttcgcttcatcgctacttataaaaacggctcgtggtcgcaaggcgaattggttagcgaaaatgcgttacagctcagcgaaggctcaccggtcttgcattatgggcaggcttgttttgaaggcttgaaggcttaccgctctcaaaaggggaaagctcttctttttcgccctttagaaaacgccaaacgcttgcaaacttcatgcgaaagactgctcatgcccaaagtgagcgaagagctgtttttaaaggcatgcgctgaagtgattaaagcgaatcaaaaatggctcgctccttacaaaagtggggcgagtttgtatttgcgcccttttgtcataggcgtgggggataatttgggggtaaagccggccagtgaatacctttttatcgtgttttgcgcgcctgtgggggcgtattttaaggggggcatagaaaaagggggggctaggtttatcactacggcgtttgatagagccgcgcctaaaggcaccggtggggtgaaagtgggggggaattatgccgcaagcctgttagcccataaaatagccacagagcaaggctatgatgattgcatttatttagaccccaccacgcacactaaaattgaagaagtgggggcggcgaatttttttggcatcacgcatgatgatgcctttatcaccccgcattcgccaagcattctgccaagcgttaccagaaaaagcttgatggttttggctaaagaacacttgaaactcaaagtagaagagagggaaattttaattgatgagttgggcgcgtttaaagaagccggagcgtgcgggacagccgcaatcattacgcccattaaagaaatcgcgcacaacaacaagtcttattcttttgaagcgccgggcaatattactaaacaactctatgatttgcttttatccatccagcaaggcgaacaagaagcccctaaagattggatttttgaagttggctaa

SEQ ID NO: 6891 - protein, 340 aa, Helicobacter pylori
MPNLENLDWKNLGFSYIKTDFRFIATYKNGSWSQGELVSENALQLSEGSPVLHYGQACFEGLKAYRSQKGKALLFRPLENAKRLQTSCERLLMPKVSEELFLKACAEVIKANQKWLAPYKSGASLYLRPFVIGVGDNLGVKPASEYLFIVFCAPVGAYFKGGIEKGGARFITTAFDRAAPKGTGGVKVGGNYAASLLAHKIATEQGYDDCIYLDPTTHTKIEEVGAANFFGITHDDAFITPHSPSILPSVTRKSLMVLAKEHLKLKVEEREILIDELGAFKEAGACGTAAIITPIKEIAHNNKSYSFEAPGNITKQLYDLLLSIQQGEQEAPKDWIFEVG

SEQ ID NO: 6892 - DNA, 999 bp, Neisseria meningitidis
  CDS (1)..(999)
atgagcagacccgtacccgccgtattcggcagcgtttttcacagtcaaatgcccgtcctcgcctaccgcgaaggcaaatggcagccgaccgaatggcaatcttcccaagacctctccctcgcaccgggcgcgcacgccctgcactacggcagcgaatgtttcgagggactgaaagccttccgtcaggcagacggcaaaatcgtgctgttccgtccgactgccaatatcgcgcgtatgcggcaaagtgcggacattttgcacctgccgcgccccgaaaccgaagcttatcttgacgcgctaatcaaattggtcaaacgtgccgccgatgaaattcccgatgcgcctgccgccctgtacctgcgtccgaccttaatcggtaccgatcccgttatcggcaaggccggttctccttccgaaaccgccctgctgtatattttggcttcccccgtcggcgactatttcaaagtcggatcgcccgtcaaaattttggtggaaaccgaacacatccgctgcgccccgcatatgggccgcgtcaaatgcggcggcaactacgcttccgccatgcactgggtgctgaaggcgaaagccgaatatggcgcaaatcaagtcctgttctgcccgaacggcgacgtgcaggaaaccggcgcgtccaactttatcctgattaacggcgatgaaatcattaccaaaccgctgaccgacgagtttttgcacggcgtaacccgcgattccgtactgacggttgccaaagatttgggctataccgtcagcgaacgcaatttcacggttgacgaactcaaagctgcggtggaaaacggtgcggaagccattttgaccggtacggcagccgtcatctcgcccgttacttccttcgtcatcggcggcaaagaaatcgaagtgaaaagccaagaacgcggctatgccatccgtaaggcgattaccgacatccagtatggtttggcggaagacaaatacggctggctggttgaagtgtgctga

SEQ ID NO: 6893 - protein, 332 aa, Neisseria meningitidis
MSRPVPAVFGSVFHSQMPVLAYREGKWQPTEWQSSQDLSLAPGAHALHYGSECFEGLKAFRQADGKIVLFRPTANIARMRQSADILHLPRPETEAYLDALIKLVKRAADEIPDAPAALYLRPTLIGTDPVIGKAGSPSETALLYILASPVGDYFKVGSPVKILVETEHIRCAPHMGRVKCGGNYASAMHWVLKAKAEYGANQVLFCPNGDVQETGASNFILINGDEIITKPLTDEFLHGVTRDSVLTVAKDLGYTVSERNFTVDELKAAVENGAEAILTGTAAVISPVTSFVIGGKEIEVKSQERGYAIRKAITDIQYGLAEDKYGWLVEVC

SEQ ID NO: 6894 - DNA, 915 bp, Campylobacter jejuni
  CDS (1)..(915)
atgatctcagcagataaaatttggatggatggaaaattagttgattttaaagatgcaactttgcactttttaacccattctttgcattatggcaatgctgtttttgaaggaactagagcctataaaacagataaaggcttagcaattttcagacttgaagatcacaccaaaagacttttagagtctgcaaaaattactcttttaaattgtcctttttctcaaaaagagcttgaaaatgcacaaattgaactcttaaaagcaaacaattttaaaagcaatgtctatatccgccctttgattttcttaggcgatggagttatgggactttatcatataaaagctcctgtaagagttgggattgcagcttgggaatggggtgcttaccttggagaagaaggtttagaaaaaggtataaaagtaaaaatttcgtcttttgcaagaaatagtgttaaatcatgcatgggaaaagctaaagcaagtgcgaattatcttaactctcaaattgcaaaatttgaagctattgaagcaggctatgaagaagctttgatgcttgatgaagaaggttttatcgcagaaggaacaggagaatgtttctttattgtaaaagatggggttttaatcacacctccaaatgatttttctttaaaaagcattactcaagatacagtgcttaaaatcgctcatgatcttggtattactgtgcttcgccaaagaatttcaagagatgaagtttatactgctgatgaagcattttttaccggaacagccgctgaaatcacacctattaataatattgatgcaagaataataggaaatggtttaagaggatctgtaactaaaaaacttcaagatgcttattttgatgtagtttatggacgcaatgaaaaatacgcatctatgctaacttatatttaa

SEQ ID NO: 6895 - protein, 304 aa, Campylobacter jejuni
MISADKIWMDGKLVDFKDATLHFLTHSLHYGNAVFEGTRAYKTDKGLAIFRLEDHTKRLLESAKITLLNCPFSQKELENAQIELLKANNFKSNVYIRPLIFLGDGVMGLYHIKAPVRVGIAAWEWGAYLGEEGLEKGIKVKISSFARNSVKSCMGKAKASANYLNSQIAKFEAIEAGYEEALMLDEEGFIAEGTGECFFIVKDGVLITPPNDFSLKSITQDTVLKIAHDLGITVLRQRISRDEVYTADEAFFTGTAAEITPINNIDARIIGNGLRGSVTKKLQDAYFDVVYGRNEKYASMLTYI

SEQ ID NO: 6896 - DNA, 999 bp, Neisseria meningitidis
  CDS (1)..(999)
atgagcagacccgtacccgccgtattcggcagcgtttttcacagtcaaatgcccgtcctcgcctaccgcgaaggcaaatggcagccgaccgaatggcaatcttcccaagacctctccctcgtaccgggtgcgcacgccctgcactacggcagcgaatgtttcgagggactgaaagccttccgtcaggcagacggtaaaatcgtactgttccgtccgactgccaatatcgcgcgtatgcggcaaagtgcggacattttgcacctgccccgccccgaaacccaagcctatctcgatgctttggtcgaactggtcaaacgtgccgccgacgaaattcccgatgcgcctgccgccctgtacctgcgcccgaccttaatcggtaccgatcccgtcatcggcaaggccggttctccttccgaaaccgccctgctgtatattttggcttcccccgtcggcgactatttcaaagtcggctcgcccgtcaaaattttagtggaaaccgaacacatccgctgcgccccgcatatgggccgcgtcaaatgcggcggcaactacgcttccgccatgcactgggtgctgaaggcgaaagccgaatacggcgcaaaccaagtcctcttctgcccgaacggcgacgtgcaggaaaccggcgcgtccaactttatcctgattaacggcgatgaaatcattaccaaaccgctgaccgacgaatttttgcacggcgtaacccgcgattccgtactgacggttgccaaagatttgggctataccgtcagcgaacgcaatttcacggttgacgaactcaaagctgcggtggaaaacggtgcggaggcgattctgaccggtacggcagccgtcatctcgcccgttacttccttcgtcatcggcggcaaagaaatcgaagtgaaaagccaagaacgcggctatgccatccgtaaggcgattaccgacatccagtatggtttggcggaagacaaatacggctggctggttgaagtgtgctga

SEQ ID NO: 6897 - protein, 332 aa, Neisseria meningitidis
MSRPVPAVFGSVFHSQMPVLAYREGKWQPTEWQSSQDLSLVPGAHALHYGSECFEGLKAFRQADGKIVLFRPTANIARMRQSADILHLPRPETQAYLDALVELVKRAADEIPDAPAALYLRPTLIGTDPVIGKAGSPSETALLYILASPVGDYFKVGSPVKILVETEHIRCAPHMGRVKCGGNYASAMHWVLKAKAEYGANQVLFCPNGDVQETGASNFILINGDEIITKPLTDEFLHGVTRDSVLTVAKDLGYTVSERNFTVDELKAAVENGAEAILTGTAAVISPVTSFVIGGKEIEVKSQERGYAIRKAITDIQYGLAEDKYGWLVEVC

SEQ ID NO: 6898 - DNA, 888 bp, Bacillus halodurans
  CDS (1)..(888)
atgtacatgtacgttaatgacaaacttgtcaaggaagaggaggcgatcatctcgcctttcgatcacggttacatgtatggtctcggtctttttgaaacgtttcgactttatgaaggtcatccatttttattggatgaccattttgtccgtttagaggaggggctacgcgcccttgcgattgattggacgtataatcggtctcacgttttacaccagcttgccacgctttgtaataaaaatggtgtgagaaatgcttatattcgctggaacgtctctgctggtccgggtccgattgggctgtacacggacacttataaagagccgacagtcatcatctacatgaagtcattgccacaagggctatcgacgcgaaaaacggggacattgctggagctaagaaggaatacacctgaaggagatcgacgacttaagtcacaccactttctgaacaacgttcttggaaagcgtgaggtggcaaaggacccacaaacggaagggatctttttaacagaggatggcgtgttagcggaagggctgacttcgaacgtgttttgggtaaaaaacggggtcgtgtacacgccttctgttgatacaggaatcttgaatggcatcactcggcaatttgttctcaccttatgtgataaggaagggattccgtggcgggaagggcgctaccctaaagaagcattactgaaagcggatggggcgtttattacaaattccattcaagaaatcgtgactctcacttccgttggacaagctgaatttaaccaagatgaagcggtgattatgagtttgagaaaaagctatcagaaatactgcacaaaactatggtccaagaacgagataaaggagggaaaacaggatgtcaacaacacttgcaaataa

SEQ ID NO: 6899 - protein, 295 aa, Bacillus halodurans
MYMYVNDKLVKEEEAIISPFDHGYMYGLGLFETFRLYEGHPFLLDDHFVRLEEGLRALAIDWTYNRSHVLHQLATLCNKNGVRNAYIRWNVSAGPGPIGLYTDTYKEPTVIIYMKSLPQGLSTRKTGTLLELRRNTPEGDRRLKSHHFLNNVLGKREVAKDPQTEGIFLTEDGVLAEGLTSNVFWVKNGVVYTPSVDTGILNGITRQFVLTLCDKEGIPWREGRYPKEALLKADGAFITNSIQEIVTLTSVGQAEFNQDEAVIMSLRKSYQKYCTKLWSKNEIKEGKQDVNNTCK

SEQ ID NO: 6900 - DNA, 1077 bp, Bacillus halodurans
  CDS (1)..(1077)
atgattgatacggggcttcggatcgaacgatcaagtaatccaaagcaaaaaccagatccagagcagctgagttttggaaaagtatttaccgatcacatgtttgtgatggattatacagaggaaaaagggtggcacgacccaagaattgtcccatacggatcgattacgcttgatcccgccgcgatggtgttccattatggacaaacggtgtttgaagggttgaaggcttatcgtacaaacgatgatcgcattttgttgtttcgcccagaaaaaaacatccagcgtttgaatcgctcctgtcatcgtattagcatcccgcaaattccagaagaggcagccatcgactatttagtgaagcttctccaagttgatcgcgattgggttccgtccgctgaaggtacctcgctttatattcgtccgttcgtctttgcgaatgaaatcaacttatcagcggttccgtcaaccgaatacacctttatgattattttgtcaccggttggttcctattataaagaaggcattcaacctgtaaacatctacgtagaagatgagtttacgagagccgtgcgcggaggaacaggaacggccaagaccggaggaaattattcagcttcgtacatcgctcaagaaaaagcggcggaaaaaggatatgcacaagtaatgtggcttgatgggattgagaaaaagtacattgaagaagttggcagcatgaacgttttctttaaaattgatggtgaaattgtgacgccaattttaaacggcagcattttagagggtgtcacgcgtatgtcgatcatcgaactgcttcgtgattggggctatcctgttgcggaacgtaaaatctcgatggaagaattgtttgcagcctacgaaaaagggaagcttgaggaagcttttggtacaggaaccgccgctgttgtttcgccgattggccagcttaattggaaagagcatcagatggtgattaatgataaacgtattggcgagttatcgaaaaagttgtacgatacgttgacaggtattcaacgcggtcagctacctgatccgtttaattggaaccgagaagtgaacgaatag

SEQ ID NO: 6901 - protein, 358 aa, Bacillus halodurans
MIDTGLRIERSSNPKQKPDPEQLSFGKVFTDHMFVMDYTEEKGWHDPRIVPYGSITLDPAAMVFHYGQTVFEGLKAYRTNDDRILLFRPEKNIQRLNRSCHRISIPQIPEEAAIDYLVKLLQVDRDWVPSAEGTSLYIRPFVFANEINLSAVPSTEYTFMIILSPVGSYYKEGIQPVNIYVEDEFTRAVRGGTGTAKTGGNYSASYIAQEKAAEKGYAQVMWLDGIEKKYIEEVGSMNVFFKIDGEIVTPILNGSILEGVTRMSIIELLRDWGYPVAERKISMEELFAAYEKGKLEEAFGTGTAAVVSPIGQLNWKEHQMVINDKRIGELSKKLYDTLTGIQRGQLPDPFNWNREVNE

SEQ ID NO: 6902 - DNA, 858 bp, Halobacterium sp. NRC-1
  CDS (1)..(858)
atgcgataccacgtaaacggcgcgctcgtggacgccgccgacgcaaccgtcagcgtccgcgaccgcggcttccagtacggcgacgcagcgttcgaaaccatgcgcgcgtacggcggccagacgttcgcctggaccgcccactaccgccgcctgcaggccacctgtgactcgctgggcatcgaccacggcctctcggaggcggcgctgcgggggcgcgtccacgagacgctcgccgccaacgacctcgcggacgcctacgtccggctgtcgatcacccggggcgtccaggacggccggctcaccccgcgggacacgaccgatccgaccgtcgtcgtggtggtcgacgcgctcccccgcggcggcgtcgacggcgacccggtctggtcgatgcccgccaccgtcgaaaccacgacggtcacccaacaccgcgacaccaccatccccagcaccgcgaaaacccacaactacctgcccggcgtgctcgcccgccgcgacatcgccgccgacgccgacgaagcgctgttcgtcacgcccgacggccacctcacggagggcgctgcgagcaacctctttttcgtcgccgacggcaccctctacacgcccagcggcgatctcgacgtgttgcccgggatcacgcggtgggcggtcgccgaactcgccgccgagcacgggctcacggtgcacacgggcgcgtacacgccgtctcggctctacgacgccgacgaggcgttcctcacgaacaccacctgggaggtgcgccccatcgcgcgtgtcgacgacgccacgtacgacacgtgccggatcggggccgccctcgccagcgcgtacaacgccgagatcgaacgccgccactactag

SEQ ID NO: 6903 - protein, 285 aa, Halobacterium sp. NRC-1
MRYHVNGALVDAADATVSVRDRGFQYGDAAFETMRAYGGQTFAWTAHYRRLQATCDSLGIDHGLSEAALRGRVHETLAANDLADAYVRLSITRGVQDGRLTPRDTTDPTVVVVVDALPRGGVDGDPVWSMPATVETTTVTQHRDTTIPSTAKTHNYLPGVLARRDIAADADEALFVTPDGHLTEGAASNLFFVADGTLYTPSGDLDVLPGITRWAVAELAAEHGLTVHTGAYTPSRLYDADEAFLTNTTWEVRPIARVDDATYDTCRIGAALASAYNAEIERRHY

SEQ ID NO: 6904 - DNA, 1077 bp, Staphylococcus aureus
  CDS (1)..(1077)
atgtcacaagcagttaaagttgaacgacgagaaacattaaaacaaaaaccaaatacatctcaactaggttttggtaaatattttactgattatatgttgagttatgattatgatgcagataaaggatggcatgatttgaagatagtaccttatggtcctattgaaatttcacctgctgcacaaggtgttcattatggtcaatcggtattcgaaggattaaaagcatataaaagagatggggaagttgcacttttccgtcctgaagaaaattttaagcgtcttaataactcgttagcacgattagaaatgcctcaagtagacgaagcagaattgttagaggggctaaaacaattagttgatattgaaagagattggattcctgaaggggaaggtcaatcattatatattcgtccatttgtttttgcaacagaaggggcacttggcgttggtgcatcacatcagtataaattattaattattttatctccttcaggtgcatattatggtggtgaaactttaaaaccaactaaaatctatgtagaagatgaatatgtgcgtgctgttcgtggcggtgtaggctttgcaaaagttgcaggtaactatgcggcaagtttattagcacaaactaatgcaaataaattaggttatgaccaagtattatggcttgatggtgttgaacagaaatatatcgaagaagttggtagcatgaacattttcttcgttgaaaatggcaaagtaattacaccagagttgaatggcagtattttacctggtattacacgtaaatctattatcgaattagctaaaaacttaggatatgaagtcgaagagcgccgcgtttcaatcgatgaattattcgaatcatatgataaaggtgagttaacagaagtatttggtagtggtactgcagcagttatttcacctgtgggtacattgagatacgaagatcgtgaaatcgttattaataataatgagactggtgaaattactcaaaaattatacgacgtctatactggtattcaaaatggtactttagaagataaaaatggttggagagtcgttgtaccaaaatattag

SEQ ID NO: 6905 - protein, 358 aa, Staphylococcus aureus
MSQAVKVERRETLKQKPNTSQLGFGKYFTDYMLSYDYDADKGWHDLKIVPYGPIEISPAAQGVHYGQSVFEGLKAYKRDGEVALFRPEENFKRLNNSLARLEMPQVDEAELLEGLKQLVDIERDWIPEGEGQSLYIRPFVFATEGALGVGASHQYKLLIILSPSGAYYGGETLKPTKIYVEDEYVRAVRGGVGFAKVAGNYAASLLAQTNANKLGYDQVLWLDGVEQKYIEEVGSMNIFFVENGKVITPELNGSILPGITRKSIIELAKNLGYEVEERRVSIDELFESYDKGELTEVFGSGTAAVISPVGTLRYEDREIVINNNETGEITQKLYDVYTGIQNGTLEDKNGWRVVVPKY

SEQ ID NO: 6906 - DNA, 1196 bp, Arabidopsis thaliana (mouse-ear cress)
  CDS (9)..(1079)
ctccatagatggctccttcttcatcacctcttcgtactacaagtgaaacagatgaaaaatatgcgaatgtcaaatgggaagagcttggattcgctctgactccaatagattatatgtatgtagccaaatgcagacaaggagagagctttacacaagggaagattgttccttatggcgacatttcaattagcccttgttctccgattctcaattacggccagggactatttgaaggtctcaaagcttacagaacagaagacgaccggattaggattttccggcctgaccaaaacgctcttcgcatgcaaactggtgcggagaggctttgtatgacacctcctactctagaacaatttgtcgaggcagttaagcaaactgtgcttgccaacaagaaatgggttcctcctccgggtaaaggaactctgtatataaggcctctgctactagggagtggtgctacccttggagtagctccagcacctgaatacacttttctcatatatgcatctcccgtaggagattaccataaggtaagctcaggcttgaacctcaaagttgatcataagtatcaccgagcccattcaggtggaacggggggtgtcaagagctgcacaaactattctccagttgtgaaatcgttactcgaagcaaagtcagcgggtttctctgatgtcctgttcctggatgcagcaactggtagaaacatcgaagagcttactgcttgtaacatcttcattgtcaagggaaacattgtatccaccccaccaacttcaggaaccattttacctggagtcacgaggaaaagcataagtgagctggctcatgatattggctaccaggtcgaagaacgcgatgtatctgtggatgagctactagaggcagaagaagttttctgcacagggactgcagtggtcgttaaagctgttgaaactgtgaccttccatgacaaaaaggtaaaatacaggacaggagaagcagcattgtctacgaagcttcactcgatgttgaccaatattcagatgggagttgttgaagataagaaaggttggatggtggacattgatccttgtcaaggttgaaagaagaagtttagaaagctgatgattctatgtactcaaacgtgtatctttcttctcatgtgttggtttttattaggattcttctttttttatcatgggacttgtaataaataatgg

SEQ ID NO: 6907 - protein, 356 aa, Arabidopsis thaliana (mouse-ear cress)
MAPSSSPLRTTSETDEKYANVKWEELGFALTPIDYMYVAKCRQGESFTQGKIVPYGDISISPCSPILNYGQGLFEGLKAYRTEDDRIRIFRPDQNALRMQTGAERLCMTPPTLEQFVEAVKQTVLANKKWVPPPGKGTLYIRPLLLGSGATLGVAPAPEYTFLIYASPVGDYHKVSSGLNLKVDHKYHRAHSGGTGGVKSCTNYSPVVKSLLEAKSAGFSDVLFLDAATGRNIEELTACNIFIVKGNIVSTPPTSGTILPGVTRKSISELAHDIGYQVEERDVSVDELLEAEEVFCTGTAVVVKAVETVTFHDKKVKYRTGEAALSTKLHSMLTNIQMGVVEDKKGWMVDIDPCQG

SEQ ID NO: 6908 - DNA, 1026 bp, Clostridium acetobutylicum
  CDS (1)..(1026)
atggaaaagaaaaatatagattgggctaatctaggctttggatacgttaaaacagataaaagattcgtatctaactataaagatggaaaatgggatgatggtgcattagtttcagatgctaccattgctattagtgaatgtgcaggtgtacttcaatactctcaagcatgctttgaaggtatgaaagcttacacaactgaggatggacatattgttaccttccgtcctgacttaaatgcacagcgtatggaagattcatgtaaaagattagaaatgcctgcatttccaaaggaaagctttgtagatgctgttgtaaaaactatagaggcaaattctgaatgggtacctccatatggaagtggtgctacactttatattcgtccatttatgtttgcttctggaccagttattggagttaaaccagcagatgaatatcaattcagagtatttgctacaccagttggtccatactttaaaggaggagttaagcctttaactttacgtgttagtgattttgatcgtgctgctccaaatggtactggacacatcaaagctgggcttaattatgctatgagtcttcatgcaattgttactgcacatgaagaaggctttgatgaaaatatgtatttagacgcagctactagaacaaaggttgaagaaactggtggagctaacttcctatttgtaactaaagataataaggttgttacaccgaaatcaaatactattcttccttcaatcacacgtcgttctttaatgacagttgcaaaagattaccttggactagaaattgaggagagaactgtttaccttgatgaagtaaaagattttgcagaatgcggtctttgtggaacagctgctgttatctcaccagtaggaaagatagtagatcatggcaaagaaatttgttttccaagcggaatgtcagatatgggacctatcactaaaaaattacgtgatacattgacaggtattcaaatgggtcatattgaagcacctaagggatggcttaaaataatcaaataa

SEQ ID NO: 6909 - protein, 341 aa, Clostridium acetobutylicum
MEKKNIDWANLGFGYVKTDKRFVSNYKDGKWDDGALVSDATIAISECAGVLQYSQACFEGMKAYTTEDGHIVTFRPDLNAQRMEDSCKRLEMPAFPKESFVDAVVKTIEANSEWVPPYGSGATLYIRPFMFASGPVIGVKPADEYQFRVFATPVGPYFKGGVKPLTLRVSDFDRAAPNGTGHIKAGLNYAMSLHAIVTAHEEGFDENMYLDAATRTKVEETGGANFLFVTKDNKVVTPKSNTILPSITRRSLMTVAKDYLGLEIEERTVYLDEVKDFAECGLCGTAAVISPVGKIVDHGKEICFPSGMSDMGPITKKLRDTLTGIQMGHIEAPKGWLKIIK

SEQ ID NO: 6910 - DNA, 873 bp, Archaeoglobus fulgidus
  CDS (1)..(873)
atgctgtacgtttatatggatggtgagttcgtaccggaaaatgaagcgaaggtgagcatcttcgaccacggctttctttacggggatggcgtttttgaggggataagggcctacaacgggagagtcttcaggttaaaagagcacatagaccggctttacgattcggcaaaggccatcgacctcgaaataccaataacaaaggaggagttcatggagataatcctggaaacgctcaggaaaaacaacctcagagatgcttacatcagaccaatagtgacgagggggattggagacctcgggcttgatccgagaaagtgccagaatccgtcgataatagtcataacaaagccgtgggggaagctctacggggacctctacgagaaggggcttacggcgatcaccgttgccgtgagaaggaactccttcgacgcgctcccgccaaacataaagtcgctcaactacctgaacaacattctggcaaagatagaggcaaacgctaagggaggggacgaggccatattcctcgacagaaacggctacgtttcggaggggagcggagacaacattttcgtggtgaaaaatggagctatcacaaccccaccgacgataaacaacctgaggggaattacgagggaagctgtgatagagataataaacaggttaggaatacccttcaaggagacgaacataggcctctacgacctctacacggcagacgaggttttcgtaaccggcaccgctgctgaaattgcgcctattgttgttatcgacggcagaaaaatcggagacggaaagcccggagagattacgagaaagctaatggaggagttcagcaagctcaccgaaagcgaaggcgtaccaatatatgagtga

SEQ ID NO: 6911 - protein, 290 aa, Archaeoglobus fulgidus
MLYVYMDGEFVPENEAKVSIFDHGFLYGDGVFEGIRAYNGRVFRLKEHIDRLYDSAKAIDLEIPITKEEFMEIILETLRKNNLRDAYIRPIVTRGIGDLGLDPRKCQNPSIIVITKPWGKLYGDLYEKGLTAITVAVRRNSFDALPPNIKSLNYLNNILAKIEANAKGGDEAIFLDRNGYVSEGSGDNIFVVKNGAITTPPTINNLRGITREAVIEIINRLGIPFKETNIGLYDLYTADEVFVTGTAAEIAPIVVIDGRKIGDGKPGEITRKLMEEFSKLTESEGVPIYE

SEQ ID NO: 6912 - DNA, 849 bp, Bacillus subtilis
  CDS (1)..(849)
atgaaggttttagtcaatggccggctgattgggcgcagtgaagcatcaatcgatttggaagatcgcggttatcagtttggtgacggcatctatgaagtgatcagggtgtacaaaggagtattgttcggcttacgtgagcatgcagagcgttttttcagaagtgctgctgaaatcggaatttcactgccattcagtatagaagatctcgagtgggacctgcaaaagcttgtacaggaaaatgcggtcagtgagggagcggtatacattcagacaacaagaggtgtggccccgcgaaaacaccagtatgaagccggcctcgagccgcagactactgcctatacgtttacggtgaaaaaaccggagcaagagcaggcatacggagtggcggccattacagatgaggatcttcgctggttaagatgtgatatcaaaagtctgaatttactgtataatgtcatgacgaagcaaagggcctatgaagccggagcatttgaagccattttacttagggacggcgttgttacggagggtacatcctctaacgtttatgccgttatcaacggcacagtgcgaacacatccggctaatcggctcattctcaatggaattacacggatgaatattttaggactgattgagaagaatgggatcaaactggatgagactcctgtcagtgaagaagagttgaaacaggcggaagagatctttatttcgtcaacgacggcagaaattattccggtcgtgacgctcgatggacaatcgatcggaagcgggaaacccggaccggtgaccaaacagcttcaggctgcttttcaagaaagcattcaacaggctgctagcatttcataa

SEQ ID NO: 6913 - protein, 282 aa, Bacillus subtilis
MKVLVNGRLIGRSEASIDLEDRGYQFGDGIYEVIRVYKGVLFGLREHAERFFRSAAEIGISLPFSIEDLEWDLQKLVQENAVSEGAVYIQTTRGVAPRKHQYEAGLEPQTTAYTFTVKKPEQEQAYGVAAITDEDLRWLRCDIKSLNLLYNVMTKQRAYEAGAFEAILLRDGVVTEGTSSNVYAVINGTVRTHPANRLILNGITRMNILGLIEKNGIKLDETPVSEEELKQAEEIFISSTTAEIIPVVTLDGQSIGSGKPGPVTKQLQAAFQESIQQAASIS

SEQ ID NO: 6914 - DNA, 1023 bp, Streptococcus pneumoniae
  CDS (1)..(1023)
atgacagtaacgattgattgggaaaacctcggtttttcctatatgaaattaccttatcgctatcttgctcatttcaaaaatggacaatgggatcaaggagagcttacagaggatgcaactttgcatatttcagagtcttctccaagtcttcactatggacaacaagcatttgaaggtttgaaagcttatcgtactaaggatggcagtgttcaactgttccgtcctgatgaaaatgctaaacgcctgcaacgtacatgtgaccgtctcttgatgccacaagttccgacagacatgtttgtagaagcttgtaaagcagttgtccgtgcgaatgaagaatacgtaccactatacggaataggtggaaccttatatcttcgccctcttttgattggtgtcggagatattatcggggtaaaaccggcagaagagtacattttcaccatctttgctatgccagttggaaattactttaaaggtggtttggtcccaaccaacttcttgattcaggatgagtacgaccgtgcagcaccaaatggtacaggtgcggctaaggttggtggaaactatgctgcaagtctcttaccaggaaaaatggccaagtcacgccatttctcagatgttatctatctggacccatcaactcatacaaagattgaagaagtcggatcagctaatttctttggaattacagctgataatgaatttgtaacaccattgagtccatctatcttgccatctattaccaagtattccttgctttatttggcagaacatcgcttgggattaactcctattgagggtgatgttccaattgataatcttgaccgttttgtagaggcaggtgcctgtggtacagcagcggttatttctccaattggaggtattcaacatggtgatgatttccatgtattctatagtgaaacagaagtaggtcctgtgacgcgtaaattatataatgaattgacgggtattcagtttggcgatattgaagcgccagaaggttggattgtaaaagtagattaa

SEQ ID NO: 6915 - protein, 340 aa, Streptococcus pneumoniae
MTVTIDWENLGFSYMKLPYRYLAHFKNGQWDQGELTEDATLHISESSPSLHYGQQAFEGLKAYRTKDGSVQLFRPDENAKRLQRTCDRLLMPQVPTDMFVEACKAVVRANEEYVPLYGIGGTLYLRPLLIGVGDIIGVKPAEEYIFTIFAMPVGNYFKGGLVPTNFLIQDEYDRAAPNGTGAAKVGGNYAASLLPGKMAKSRHFSDVIYLDPSTHTKIEEVGSANFFGITADNEFVTPLSPSILPSITKYSLLYLAEHRLGLTPIEGDVPIDNLDRFVEAGACGTAAVISPIGGIQHGDDFHVFYSETEVGPVTRKLYNELTGIQFGDIEAPEGWIVKVD

SEQ ID NO: 6916 - DNA, 867 bp, Methanococcus jannaschii
  CDS (1)..(867)
atgaaaatctacttaaacggaaagtttgttgatgaaaaagatgcaaaggtttctgtgtttgaccacggtttattatatggagatggagtttttgaaggaattagggcttatgatggcgttgtttttatgttgaaggagcatatagacagattgtatgattcagcaaaatctctctgtatagatatcccactaacaaaagaagagatgattgatgttgttttagagacattgagagttaataatctgagagatgcatatataagattagttgttacaagaggagttggtgatttagggttagacccaagaaagtgtggaaagccaactattttctgtatagcaattcctatgcctcctttattaggggaggatggaatcagggctataaccgtttcagttagaagactgccagtagatgttttgaatccagcagttaaatccctcaactacttaaacagcgtcttagcaaagattcaggcaaactatgctggagttgatgaggcatttttattggatgataaaggttttgttgttgaaggaactggagataacatatttatagttaaaaatggagttttaaaaactcccccagtttatcagagtatcttaaaaggaatcacaagggatgttgtcataaaattagctaaggaagaaggaatagaggttgttgaagaacctttaactttacatgacttatacactgccgatgaactatttatcactggaacagctgctgaaatagtccctgtttttgagatagatggtagagtaataaataataaacaagttggagaaatcactaaaaaattaaaagagaagtttaaagatattagaaccaaatggggaataaaggtttatgatgaataa

SEQ ID NO: 6917 - protein, 288 aa, Methanococcus jannaschii
MKIYLNGKFVDEKDAKVSVFDHGLLYGDGVFEGIRAYDGVVFMLKEHIDRLYDSAKSLCIDIPLTKEEMIDVVLETLRVNNLRDAYIRLVVTRGVGDLGLDPRKCGKPTIFCIAIPMPPLLGEDGIRAITVSVRRLPVDVLNPAVKSLNYLNSVLAKIQANYAGVDEAFLLDDKGFVVEGTGDNIFIVKNGVLKTPPVYQSILKGITRDVVIKLAKEEGIEVVEEPLTLHDLYTADELFITGTAAEIVPVFEIDGRVINNKQVGEITKKLKEKFKDIRTKWGIKVYDE

SEQ ID NO: 6918 - DNA, 960 bp, Vibrio cholerae
  CDS (1)..(960)
atgcgcataaggaaggcaatcatggcaacaaaaactgctgattatatttggttcaatggcgagatgatcccatgggcgaatgcgaccgttcacgtactcacccatgcaatgcactacggcacttcggtgtttgaaggtgttcgctgctacaacaccccaaaaggccctatcatcttccgccatcgcgaacacgcgcagcgcctgcttgattcagccaaaatctaccgctttccaatcccttattcgatcgagaccatcatggaagcgacgcgcgaaaccttacgcgtcaacaaactcgataacgcttacattcgcccattggcgtatgtgggtaacgtgggtcttggcgtgtgcccgccagtcggcactgaaatggatctgatgattgccgctttcccttggggggcttacctcggtgaagaagcgctagaaaatggcgtggatgccatggtttcaagctggcatcgtgcggcaccgaacaccattccaaccgcggcaaaagctggcggtaattacctatcttctctactggttggtggcgaagcacgtcgccacggttacgcggaaggcattgcgctgagtgtggatggttatctctctgaaggcgcaggcgaaaacattttcgtggtgaaaaacggcgtgatcctgaccccaccgaccaccagctctatcctgccgggtatcacccgtgattcgatcatgacgctggcacgcgacatgggttatgaagtgcgcgaagccaacatctcccgtgaagcgctctatctggccgatgaaattttcatgacaggtaccgccgccgaagtggttcccgtgcgtagcgtggataagattaccgtaggcgcaggcaagcgcggccccatcaccaaggtagtacaagatgcttactttggtctgttcaaaggcaccacagaagataagtggggctggttggattacgtttacccagcagcgaagtaa

SEQ ID NO: 6919 - protein, 319 aa, Vibrio cholerae
MRIRKAIMATKTADYIWFNGEMIPWANATVHVLTHAMHYGTSVFEGVRCYNTPKGPIIFRHREHAQRLLDSAKIYRFPIPYSIETIMEATRETLRVNKLDNAYIRPLAYVGNVGLGVCPPVGTEMDLMIAAFPWGAYLGEEALENGVDAMVSSWHRAAPNTIPTAAKAGGNYLSSLLVGGEARRHGYAEGIALSVDGYLSEGAGENIFVVKNGVILTPPTTSSILPGITRDSIMTLARDMGYEVREANISREALYLADEIFMTGTAAEVVPVRSVDKITVGAGKRGPITKVVQDAYFGLFKGTTEDKWGWLDYVYPAAK

SEQ ID NO: 6920 - DNA, 891 bp, Caulobacter crescentus
  CDS (1)..(891)
atgtctctggttcccttcgatgatcgcgacggttggatctggcttgacgggcaatttgtgccctggcgcgaagcgaaggtgcatgttttgacccatggcctgcactatgcgtcgtcggtgttcgaaggcgagcgcatgtacggcggcgaaatcttcaaactgaccgagcataccgagcgcctgttcaagtcggccgagatcctcgattttgagatcccctacacggtggccgagatcgacgaggcctgcaaggcgacggcggccaagaacggtctgaaggactgctatgtgcgtccgatcgcctggcgcggcagcgaaatgatcggtgtttcggcgcagcagtccaagatccacgtggccatcgccgtctgggagtggcccagctacttcgatccggccaccaaggccaagggcatccgcctgacctgggccaagtaccagcgtcccgaccccaagaccgccccgatcgcggccaaggccgccggcctctacatgatctgcaccatctccaagcacgccgccgagaaggacggctatgccgacgcgatgatgctggactatcgcggctatgtcgccgaggcgaccggcgccaacgtgttcttcgtcaaggacggcgtgctgcacacgcccaagcccgactgcttcctggacggcatcacccgccgcacggtgatcgacctggccaaggccaaggggatcgaggtggtcgagcgccacatccagaaggaagaactggccaccttcaccgagtgcttcatcgtcggcaccgccgccgaggtgaccccagtctcggaagtgggcgagttcaagttcacgcccgccaagctgtcgctggatctgatggacacctacgccgccctggtgcgcggcgaggcgatggcgacggcctga

SEQ ID NO: 6921 - protein, 296 aa, Caulobacter crescentus
MSLVPFDDRDGWIWLDGQFVPWREAKVHVLTHGLHYASSVFEGERMYGGEIFKLTEHTERLFKSAEILDFEIPYTVAEIDEACKATAAKNGLKDCYVRPIAWRGSEMIGVSAQQSKIHVAIAVWEWPSYFDPATKAKGIRLTWAKYQRPDPKTAPIAAKAAGLYMICTISKHAAEKDGYADAMMLDYRGYVAEATGANVFFVKDGVLHTPKPDCFLDGITRRTVIDLAKAKGIEVVERHIQKEELATFTECFIVGTAAEVTPVSEVGEFKFTPAKLSLDLMDTYAALVRGEAMATA

SEQ ID NO: 6922 - DNA, 1071 bp, Bacillus subtilis
  CDS (1)..(1071)
atgaataagcttattgaacgagaaaaaactgtatattataaggaaaagcccgacccgtcttccttggggtttggacaatattttacagattatatgtttgtgatggactacgaagaggggattggatggcatcatccgagaattgcgccgtacgcaccgcttacgcttgatccgtcttcatctgtttttcattacggccaggctgtttttgaaggattaaaagcatacagaacagacgacggcagggtgctgctgttccgtccggatcaaaatatcaaacggctgaacagatcgtgtgagcgcatgagcatgccccctttagacgaagagctggtgcttgaggcattgacgcaattagttgagctggagaaagattgggttccaaaggaaaaaggaacgtcactgtatattcgtccttttgtcattgccacagaaccgagtctcggtgtgaaggcatccaggagctatacatttatgatcgtgctttcgcctgtcggctcctattatggcgacgatcagctgaagccggttagaatctatgtcgaagatgagtatgtgagggcggtcaacggaggagtcgggtttgcaaaaacggctggaaactatgccgccagtcttcaggcacagcggaaagcgaatgaactgggctatgaccaggtactgtggctggacgccatcgaaaagaaatatgtggaagaagtagggagcatgaacatctttttcgtcataaacggggaagctgtcacacctgctttaagcggaagcattttaagcggggttacacgtgcgtctgcgattgaattgattcgaagctggggcattccggttcgtgaagagagaatatcgattgatgaggtgtatgcggcctctgcacgcggagaattgacagaggtctttggcacaggcacggcagcagtcgttacgcctgtcggtgaactcaacatccatggaaaaacggtgattgtaggcgacgggcaaatcggggacctctcgaaaaagctgtatgaaacgataacagatattcagcttggcaaggtaaaaggcccgtttaactggacagtggaagtgtga

SEQ ID NO: 6923 - protein, 356 aa, Bacillus subtilis
MNKLIEREKTVYYKEKPDPSSLGFGQYFTDYMFVMDYEEGIGWHHPRIAPYAPLTLDPSSSVFHYGQAVFEGLKAYRTDDGRVLLFRPDQNIKRLNRSCERMSMPPLDEELVLEALTQLVELEKDWVPKEKGTSLYIRPFVIATEPSLGVKASRSYTFMIVLSPVGSYYGDDQLKPVRIYVEDEYVRAVNGGVGFAKTAGNYAASLQAQRKANELGYDQVLWLDAIEKKYVEEVGSMNIFFVINGEAVTPALSGSILSGVTRASAIELIRSWGIPVREERISIDEVYAASARGELTEVFGTGTAAVVTPVGELNIHGKTVIVGDGQIGDLSKKLYETITDIQLGKVKGPFNWTVEV

SEQ ID NO: 6924 - DNA, 1182 bp, Saccharomyces cerevisiae
  CDS (1)..(1182)
atgttgcagagacattccttgaagttggggaaattctccatcagaacactcgctactggtgccccattagatgcatccaaactaaaaattactagaaacccaaatccatccaagccaagaccaaatgaagaattagtgttcggccagacattcaccgatcatatgttgaccattccttggtcagccaaagaagggtggggcactccacacatcaagccttacggtaatctttctcttgacccatctgcttgtgtattccattatgcatttgaattatttgaaggtttgaaagcctacagaactcctcaaaatactatcaccatgttccgtccggataagaacatggcccgtatgaacaagtctgccgctagaatttgtttgccaactttcgaatctgaagaattgatcaaacttaccgggaaattgatcgaacaagataaacacttggttcctcaaggtaatggttactcattatacatcagaccaacaatgattggtacatccaagggtttaggtgttggcactccctccgaggctcttctttatgttattacttctccagtcggtccttattataagactggtttcaaagccgtacgtcttgaagcaacagactatgctacaagagcttggccaggtggtgttggcgacaaaaaattgggtgctaactatgccccatgcatcttacctcaactacaagctgccaaaagagggtaccaacaaaatctatggttgttcggcccagaaaagaacatcactgaggttggtactatgaacgtgttcttcgttttcctcaacaaagtcactggcaagaaggaattggttaccgctccattagatggtaccattttagaaggtgttaccagagactctgttttaacattggctcgtgacaaactagatcctcaagaatgggacatcaacgagcgttattacactattactgaagtcgccactagagcaaaacaaggtgaactattagaagccttcggttctggtactgctgctgtcgtttcacctatcaaggaaattggctggaacaacgaagatattcatgttccactattgcctggtgaacaatgtggtgcattgaccaagcaagttgctcaatggattgctgatatccaatacggtagagtcaattatggtaactggtcaaaaactgttgccgacttgaactaa

SEQ ID NO: 6925 - protein, 393 aa, Saccharomyces cerevisiae
MLQRHSLKLGKFSIRTLATGAPLDASKLKITRNPNPSKPRPNEELVFGQTFTDHMLTIPWSAKEGWGTPHIKPYGNLSLDPSACVFHYAFELFEGLKAYRTPQNTITMFRPDKNMARMNKSAARICLPTFESEELIKLTGKLIEQDKHLVPQGNGYSLYIRPTMIGTSKGLGVGTPSEALLYVITSPVGPYYKTGFKAVRLEATDYATRAWPGGVGDKKLGANYAPCILPQLQAAKRGYQQNLWLFGPEKNITEVGTMNVFFVFLNKVTGKKELVTAPLDGTILEGVTRDSVLTLARDKLDPQEWDINERYYTITEVATRAKQGELLEAFGSGTAAVVSPIKEIGWNNEDIHVPLLPGEQCGALTKQVAQWIADIQYGRVNYGNWSKTVADLN

SEQ ID NO: 6926 - DNA, 1131 bp, Saccharomyces cerevisiae
  CDS (1)..(1131)
atgaccttggcacccctagacgcctccaaagttaagataactaccacacaacatgcatctaagccaaaaccgaacagtgagttagtgtttggcaagagcttcacggaccacatgttaactgcggaatggacagctgaaaaagggtggggtaccccagagattaaaccttatcaaaatctgtctttagacccttccgcggtggttttccattatgcttttgagctattcgaagggatgaaggcttacagaacggtggacaacaaaattacaatgtttcgtccagatatgaatatgaagcgcatgaataagtctgctcagagaatctgtttgccaacgttcgacccagaagagttgattaccctaattgggaaactgatccagcaagataagtgcttagttcctgaaggaaaaggttactctttatatatcaggcctacattaatcggcactacggccggtttaggggtttccacgcctgatagagccttgctatatgtcatttgctgccctgtgggtccttattacaaaactggatttaaggcggtcagactggaagccactgattatgccacaagagcttggccaggaggctgtggtgacaagaaactaggtgcaaactacgccccctgcgtcctgccacaattgcaagctgcttcaaggggttaccaacaaaatttatggctatttggtccaaataacaacattactgaagtcggcaccatgaatgcttttttcgtgtttaaagatagtaaaacgggcaagaaggaactagttactgctccactagacggtaccattttggaaggtgttactagggattccattttaaatcttgctaaagaaagactcgaaccaagtgaatggaccattagtgaacgctacttcactataggcgaagttactgagagatccaagaacggtgaactacttgaagcctttggttctggtactgctgcgattgtttctcccattaaggaaatcggctggaaaggcgaacaaattaatattccgttgttgcccggcgaacaaaccggtccattggccaaagaagttgcacaatggattaatggaatccaatatggcgagactgagcatggcaattggtcaagggttgttactgatttgaactga

SEQ ID NO: 6927 - protein, 376 aa, Saccharomyces cerevisiae
MTLAPLDASKVKITTTQHASKPKPNSELVFGKSFTDHMLTAEWTAEKGWGTPEIKPYQNLSLDPSAVVFHYAFELFEGMKAYRTVDNKITMFRPDMNMKRMNKSAQRICLPTFDPEELITLIGKLIQQDKCLVPEGKGYSLYIRPTLIGTTAGLGVSTPDRALLYVICCPVGPYYKTGFKAVRLEATDYATRAWPGGCGDKKLGANYAPCVLPQLQAASRGYQQNLWLFGPNNNITEVGTMNAFFVFKDSKTGKKELVTAPLDGTILEGVTRDSILNLAKERLEPSEWTISERYFTIGEVTERSKNGELLEAFGSGTAAIVSPIKEIGWKGEQINIPLLPGEQTGPLAKEVAQWINGIQYGETEHGNWSRVVTDLN

SEQ ID NO: 6928 - DNA, 1092 bp, Bacillus subtilis
  CDS (1)..(1092)
atgactaaacaaacaattcgcgttgaattgacatcaacaaaaaaaccgaaaccagacccaaatcagctttcgttcggaagagtgtttacagaccacatgtttgtaatggactatgccgcagataaaggttggtacgatccaagaatcattccttatcaacccttatcaatggatccaactgcaatggtctatcactacggccaaaccgtgtttgaagggttaaaggcttacgtgtcagaggatgaccatgttctgcttttcagaccggaaaaaaatatggaacgcctgaatcaatcaaacgaccgcctctgcatcccgcaaattgatgaagaacaggttcttgaaggcttaaagcagcttgtcgcaattgataaagactggattccaaatgcggagggcacgtccctttacatccgtccgttcatcatcgcaaccgagcctttccttggtgttgcggcatctcatacgtataagctcttgatcattctttctccggtcggctcttattacaaagaaggcattaagccggtcaaaatcgctgttgaaagtgaatttgtccgtgcggtaaaaggcggaacaggaaatgccaaaaccgcaggaaactatgcttcaagcttaaaagcgcagcaggtagccgaagagaaaggattttctcaagtactctggctggacggcattgagaagaaatacatcgaagaagtcggaagcatgaacatcttcttcaaaatcaacggtgaaatcgtaacaccgatgctgaacgggagcatcctggaaggcattacgcgcaattcagtcatcgccttgcttaagcattggggccttcaagtttcagaacgaaaaattgcgatcgatgaggtcatccaagcccataaagacggcatcctggaagaagccttcggaacaggtacagcagctgttatttccccagtcggcgagctgatctggcaggatgaaacactttcgatcaacaacggtgaaacaggagaaatcgcaaaaaaactatatgacacgattacaggcattcaaaaaggcgctgtcgcagacgaattcggatggacgaccgaagtcgcagcgctgactgaaagcaagtaa

SEQ ID NO: 6929 - protein, 363 aa, Bacillus subtilis
MTKQTIRVELTSTKKPKPDPNQLSFGRVFTDHMFVMDYAADKGWYDPRIIPYQPLSMDPTAMVYHYGQTVFEGLKAYVSEDDHVLLFRPEKNMERLNQSNDRLCIPQIDEEQVLEGLKQLVAIDKDWIPNAEGTSLYIRPFIIATEPFLGVAASHTYKLLIILSPVGSYYKEGIKPVKIAVESEFVRAVKGGTGNAKTAGNYASSLKAQQVAEEKGFSQVLWLDGIEKKYIEEVGSMNIFFKINGEIVTPMLNGSILEGITRNSVIALLKHWGLQVSERKIAIDEVIQAHKDGILEEAFGTGTAAVISPVGELIWQDETLSINNGETGEIAKKLYDTITGIQKGAVADEFGWTTEVAALTESK

SEQ ID NO: 6930 - DNA, 918 bp, Synechocystis sp
  CDS (1)..(918)
atgcacaagtttttgccgatcgcctactttgaagataagtttgtcccgtttgaggatgccaaaatttccgttgctacccatgccctccactatgggacggcggcctttgggggtttgcggggtattcccgacccggaagatccgggcaccattctactattccgtctggaccgccatggcgatcgcctgagtaagagtgccaagtttttgcactacgacatcagtgcagaaaaaatcaaggaagttattgttgattttgttaagaaaaatcagcccgataaatccttttacatccgtccattggtgtacagttccggtttgggcattgccccccgtttgcacaatctggagaaggatttcctggtttatggcttggaaatgggggattacctcgccgccgacggagttagctgccgtatcagttcctggtatcgccaagaagaccggagttttcccctaaggggcaaaatcagcgccgcctacattacctctgctttggctaaaacggaagcggtggaatcgggctttgatgaggctattttgatgaattcccaaggtaaggtctgtgaagccaccggcatgaatgttttcatggtacggaatgggcaaattgttacccccggcaatgagcaggacatcctcgaagggattactagggatagtattctcaccattgcagcggatttgggcattcccacctgccaacgccccatcgataaatcggaattgatgattgccgacgaggtatttttgagtggtactgcggccaaaatcaccccggttaaaaggattgagaactttaccctgggcggcgatcgcccgattacagaaaagttacgctccgtgttgacagcggtgacggaaaaccgggaacccaaatatcaagattgggtatttaaaattcctttgaatggctaa

SEQ ID NO: 6931 - protein, 305 aa, Synechocystis sp
MHKFLPIAYFEDKFVPFEDAKISVATHALHYGTAAFGGLRGIPDPEDPGTILLFRLDRHGDRLSKSAKFLHYDISAEKIKEVIVDFVKKNQPDKSFYIRPLVYSSGLGIAPRLHNLEKDFLVYGLEMGDYLAADGVSCRISSWYRQEDRSFPLRGKISAAYITSALAKTEAVESGFDEAILMNSQGKVCEATGMNVFMVRNGQIVTPGNEQDILEGITRDSILTIAADLGIPTCQRPIDKSELMIADEVFLSGTAAKITPVKRIENFTLGGDRPITEKLRSVLTAVTENREPKYQDWVFKIPLNG

SEQ ID NO: 6932 - DNA, 1155 bp, Arabidopsis thaliana (mouse-ear cress)
  CDS (1)..(1155)
atggctcttcgtcgctgcttacctcaatattcaacaacttcatcttatctctccaagatctggggatttcgtatgcatgggaccaaggcagcagcttctgttgtagaagaacatgtctcgggggcagaacgtgaggatgaagaatatgctgatgtagattgggacaaccttggattcagtcttgtacggacagatttcatgttcgccaccaaaagttgcagagacggaaacttcgaacagggttaccttagccgttacggcaacatcgagctcaaccctgctgctggaattctcaactatggccagggactaatagaggggatgaaagcgtacagaggagaagacggtagggttcttctcttccgtccagagctaaacgcgatgcgtatgaagataggagctgagagaatgtgtatgcattctccttctgttcatcagtttattgaaggtgttaagcagaccgttcttgcaaacaggcgttgggttcctcctccgggcaaaggctcgttgtatctcagaccgttgttgttcggaagtggagcaagcttgggtgtggctgcagcatcagagtacacgtttcttgtgtttggctctcctgttcaaaactacttcaaggaaggcacagcggcgttgaacctgtatgtggaggaggtgattccacgcgcttatcttggaggaactggtggtgtaaaggcaatatccaattacggtccagtgcttgaagtgatgagaagagcaaaatcaagagggttttcggatgttttgtatcttgatgcagatactgggaagaacatagaagaagtctctgctgctaatatattccttgtgaagggcaatacaatagtgacaccagctacgagcggaacgattctcggagggatcacacgtaagagcataatcgaaatcgcccttgatcttggttacaaagtggaagaacgaagtgttccggtagaagaactgaaggaagctgaagaagttttctgcactggaactgccgctggagttgcttctgttggaagcatcacttttaagaacacaaggactgagtacaaagttggagatgggattgttacacagcaacttcgatctattcttgtcggaatacaaactggttctatccaagacactaaagattgggttttgcagattgcctaa

SEQ ID NO: 6933 - protein, 384 aa, Arabidopsis thaliana (mouse-ear cress)
MALRRCLPQYSTTSSYLSKIWGFRMHGTKAAASVVEEHVSGAEREDEEYADVDWDNLGFSLVRTDFMFATKSCRDGNFEQGYLSRYGNIELNPAAGILNYGQGLIEGMKAYRGEDGRVLLFRPELNAMRMKIGAERMCMHSPSVHQFIEGVKQTVLANRRWVPPPGKGSLYLRPLLFGSGASLGVAAASEYTFLVFGSPVQNYFKEGTAALNLYVEEVIPRAYLGGTGGVKAISNYGPVLEVMRRAKSRGFSDVLYLDADTGKNIEEVSAANIFLVKGNTIVTPATSGTILGGITRKSIIEIALDLGYKVEERSVPVEELKEAEEVFCTGTAAGVASVGSITFKNTRTEYKVGDGIVTQQLRSILVGIQTGSIQDTKDWVLQIA

SEQ ID NO: 6934 - DNA, 1167 bp, Arabidopsis thaliana (mouse-ear cress)
  CDS (211)..(1167)
atgatcaaaacaatcacatctctacgcaaaactctggttctacctcttcatttacatattcgtacgctacaaactttcgccaagtacaacgcacaagctgcatcggctttgcgagaagagcgtaagaaacctctttatcaaaatggagatgatgtatatgcggatttggattgggataatctcgggtttggtctaaatccagctgattacatgtatgtcatgaaatgctcaaaagacggcgaattcactcaaggagaacttagtccctatgggaatattcagctaagtccttctgctggagtcttaaactatggacaggcgatatacgaaggtacaaaagcatacaggaaagaaaatgggaagcttcttttgtttcgtccggatcacaacgctatccggatgaagcttggcgctgaacggatgctcatgccttctccttcggttgatcagtttgttaatgcagttaaacaaaccgctcttgcaaacaaacgttgggttcctcctgcagggaaagggactttgtacattaggcctttgttgatgggaagtggtccaatacttggtttaggtcctgcacctgaatatacattcattgtctatgcatctccagttggtaactacttcaaggaagggatggctgctcttaacctctatgttgaggaagaatatgtccgagcggctcctggtggagctggaggcgtcaagagcatcacaaattatgcgccagttttgaaagcactgagcagagccaagagtcgggggttttcagacgttctttatctcgactctgtcaagaagaagtacttagaggaggcttcttcttgcaacgtctttgttgtcaagggtcggacaatctcaactcctgcaactaatggaacaattcttgaagggattacgcggaaaagtgtgatggagatcgcaagtgatcaaggttatcaggtagtagagaaggcagttcatgtggatgaagtaatggatgcagatgaagttttttgcaccggaactgctgtagtagttgctcccgtgggcactatcacatatcaggaaaaaagagtagagtataaaaccggggatgaatctgtctgccagaaactgcgttcagtcctcgtaggtatccagacaggattgattgaagataacaagggatgggtcacagatatcaactga

SEQ ID NO: 6935 - protein, 318 aa, Arabidopsis thaliana (mouse-ear cress)
MYVMKCSKDGEFTQGELSPYGNIQLSPSAGVLNYGQAIYEGTKAYRKENGKLLLFRPDHNAIRMKLGAERMLMPSPSVDQFVNAVKQTALANKRWVPPAGKGTLYIRPLLMGSGPILGLGPAPEYTFIVYASPVGNYFKEGMAALNLYVEEEYVRAAPGGAGGVKSITNYAPVLKALSRAKSRGFSDVLYLDSVKKKYLEEASSCNVFVVKGRTISTPATNGTILEGITRKSVMEIASDQGYQVVEKAVHVDEVMDADEVFCTGTAVVVAPVGTITYQEKRVEYKTGDESVCQKLRSVLVGIQTGLIEDNKGWVTDIN

SEQ ID NO: 6936 - DNA, 4266 bp, Arabidopsis thaliana (mouse-ear cress)
  CDS (1)..(4266)
atggcaacttcttctcgttcggagcgatttccgataacgccgagtacggcggctactaatagattgacgattacgcctaattctagggttttgaaaagccctctcactgaagaaatcatgtggaagcggctcaaagatgctgggtttgatgaacaatcgatcaagaatagggataaagctgccttaatcgcttacatcgccaagctagaatctgaggtttatgattaccaacacaacatgggtcttctccttttggagaaaaacgaattgtcttcgcagtatgaagagattaaggcctctgtggatgagtctgacctaacacatatgcgagagaaatcagcatatgtctcggctctagctgaagcaaagaaacgagaagagagtttgaagaaggatgtagggattgcgaaggagtgcatttctagtttggagaagactctgcatgagatgcgcgcagaatgtgccgaaacaaaagtttctgctgggagtactatgtcggaagcacatgttatgatcgaggatgcgctgaagaaacttgcagatgctgaagcaaaaatgcgcgcagcagaggctttacaagcagaagctaaccggtatcaccgaattgcagagagaaagttgaaagaagttgaaagtcgtgaagatgatcttactcggcgtcttgcatctttcaagtctgagtgtgaaacgaaagagaacgaaatggttattgagcgacagactttaaatgagaggcggaagagcttgcagcaagagcatgaaagattattggatgcacaagtttcactaaatcaaagagaagatcacatttttgctagatcccaagaattagctgaacttgaaaaggggttagatactgcaaagaccacatttgaggaggaacgcaaagccttcgaagacaaaaaatccaacttggagattgcgttagccttgtgtgctaaaagagaagaggtttgtttttattcacacaattctctgttatttttggttttgcattataggtcatcaaaaaaatttctgggagacaagatagctgtctctgaaagggaatcttcgctacttaagaaggagcaagaactgcttgttgctgaagaaaaaattgccagcaaggaatctgaactaattcagaacgtcttagcgaatcaagaagttatcctgaggaaaagaaaatctgatgtggaagctgaattggaatgtaagagcaaatcggtggaagttgaaattgagagcaagagacgggcttgggaattaagggaggttgatatcaagcagagggaagacctagttggtgaaaaagaacatgacttggaagttcaatcaagagcattggcagagaaagaaaaagatataacagagaagtcttttaaccttgatgagaaagagaagaatttggttgctacagaggaagatattaaccgtaagactactatgctggaggatgagaaggaacggcttagaaaattggacctggagctgcagcagtctttgacgtcattagaagacaagagaaaacgggttgattctgcaacacaaaaacttgaagccttgaagagtgagacaagcgaattatctactctggagatgaaacttaaggaggaattagatgatttgagggcccaaaagcttgaaatgctggctgaagctgatagattgaaggtggagaaagctaaatttgaggctgagtgggaacacattgatgtgaaaagggaagagttaagaaaagaagcagagtatataactcggcaaagagaggctttttcaatgtatctcaaggacgagcgtgataacatcaaagaggaaagagatgcattgagaaatcagcacaaaaacgatgtggagtcgctaaaccgagagcgtgaagaattcatgaataagatggtggaggaacattctgaatggcttagcaagatacagcgtgagcgtgctgacttcttgttgggcattgagatgcagaaacgagagttggagtattgcatcgaaaacaaacgagaagaattggaaaattcttcaagggatagagaaaaggcttttgagcaagagaagaagttagaagaggagcgtatacagtcgcttaaggaaatggcagagaaagagttagaacatgtccaagtggaactaaagaggttggatgctgagaggttggagatcaaattggatcgtgaaagaagagagagggagtgggcagagttaaaggattcggttgaggagctaaaggtgcaacgagaaaaactagagacgcaaaggcatatgcttcgtgctgaaagagatgaaatccgacatgagattgaagaactgaagaaattagagaatctgaaagttgcattagatgatatgtccatggctaaaatgcagctgtccaatttagagcgtagctgggaaaaggtttctgctttgaagcagaaggttgtgtctcgggatgatgaacttgacctgcaaaatggagtcagcactgtgagtaatagcgaagatggctacaactcttcaatggaaagacagaacggcttaaccccttcatctgccactccattttcatggataaaacgatgtactaatctgattttcaagacttctccagagaaatccaccctaatgcatcattatgaagaagaaggaggagtgccttcagaaaagttgaagctagaatcgtcgagaagagaagaaaaggcttacactgagggactgtctattgcggttgaaagacttgaagcaggaaggaaaagaagaggtaacacatctggagatgagactagcgaaccaagcaataacaaaaagaggaaacatgatgttacccaaaaatattctgatgaagctgatacccagagtgtcatatcaagcccgcaaaatgtgcctgaggacaaacatgaactaccatcaagccaaacccagacgccaagtggtatggtagtcatcagtgaaaccgttaagatcacaagagtaacgtgtgagacagaggtgaccaacaaagtcacaacccttgactgctcagaaagtccttcggaagcagggagaaagatgggagaggagacagaagatggtgattgcaatcagactgggataaacgcgtctgaaacagtgattcataatgaagctgcaacagaagatatatcacataagaaactctatgaatccttttgggcttggtttctagagaagataagggtattgagtgagagagaggctacagtgctccacattgacatcaacaaggttgaagaagaacaacatcattcaacatcagcatcacgaatattttcgagtcatggagagaagcgccgttgcctcagcaccaccgatgtgactgaattagccgaaattgattgggacaagattgattttgggcttaaaccaacggattacatgtacgccatgaaatgtagccgtgatggtgaattctctcaaggtcaattgcaaccttttggtaacattgacattaacccagcagctggtgttctcaactatggacaaggtttgtttgaaggtctaaaagcttacagaaaacaagatgggaatattctactcttccgtcctgaggagaatgcgatccgaatgagaaatggcgctgaaagaatgtgtatgccttctccaaccgttgaacagtttgttgaggctgtgaaaactactgtattagctaacaaacgctgggtaatttggataaggcttttgaatttgtttcttttatgtattccacctccaggtaaaggatcattatacataaggccattgctaatgggaactggagctgttcttggtcttgctcctgctcctgaatacactttccttatctttgtttcacctgtcgggaactacttcaaggaaggtgttgcgccgatcaacttaattgttgaaactgaattccatcgtgcaactcccggcggtactggaggtgttaaaaccatcggtaattatgctgcagtcttgaaggctcagtcgattgcgaaagctaaagggtattctgatgttttataccttgattgccttcacaaaagatatcttgaggaggtttcatcgtgcaatattttcattgtgaaggataatgtgatatctactcctgaaattaaaggaaccatcttgcctggaattacccggaagagtatcatcgaagtagctcgtagccaaggtttcaaggtggaggaacgaaatgtgacagttgatgaattggtagaagcagacgaggttttctgcacaggaaccgccgttgttttatctccggttggaagcatcacttacaaaagccaaaggtacaagaccttttcttttaccagttaa

SEQ ID NO: 6937 - protein, 1421 aa, Arabidopsis thaliana (mouse-ear cress)
MATSSRSERFPITPSTAATNRLTITPNSRVLKSPLTEEIMWKRLKDAGFDEQSIKNRDKAALIAYIAKLESEVYDYQHNMGLLLLEKNELSSQYEEIKASVDESDLTHMREKSAYVSALAEAKKREESLKKDVGIAKECISSLEKTLHEMRAECAETKVSAGSTMSEAHVMIEDALKKLADAEAKMRAAEALQAEANRYHRIAERKLKEVESREDDLTRRLASFKSECETKENEMVIERQTLNERRKSLQQEHERLLDAQVSLNQREDHIFARSQELAELEKGLDTAKTTFEEERKAFEDKKSNLEIALALCAKREEVCFYSHNSLLFLVLHYRSSKKFLGDKIAVSERESSLLKKEQELLVAEEKIASKESELIQNVLANQEVILRKRKSDVEAELECKSKSVEVEIESKRRAWELREVDIKQREDLVGEKEHDLEVQSRALAEKEKDITEKSFNLDEKEKNLVATEEDINRKTTMLEDEKERLRKLDLELQQSLTSLEDKRKRVDSATQKLEALKSETSELSTLEMKLKEELDDLRAQKLEMLAEADRLKVEKAKFEAEWEHIDVKREELRKEAEYITRQREAFSMYLKDERDNIKEERDALRNQHKNDVESLNREREEFMNKMVEEHSEWLSKIQRERADFLLGIEMQKRELEYCIENKREELENSSRDREKAFEQEKKLEEERIQSLKEMAEKELEHVQVELKRLDAERLEIKLDRERREREWAELKDSVEELKVQREKLETQRHMLRAERDEIRHEIEELKKLENLKVALDDMSMAKMQLSNLERSWEKVSALKQKVVSRDDELDLQNGVSTVSNSEDGYNSSMERQNGLTPSSATPFSWIKRCTNLIFKTSPEKSTLMHHYEEEGGVPSEKLKLESSRREEKAYTEGLSIAVERLEAGRKRRGNTSGDETSEPSNNKKRKHDVTQKYSDEADTQSVISSPQNVPEDKHELPSSQTQTPSGMVVISETVKITRVTCETEVTNKVTTLDCSESPSEAGRKMGEETEDGDCNQTGINASETVIHNEAATEDISHKKLYESFWAWFLEKIRVLSEREATVLHIDINKVEEEQHHSTSASRIFSSHGEKRRCLSTTDVTELAEIDWDKIDFGLKPTDYMYAMKCSRDGEFSQGQLQPFGNIDINPAAGVLNYGQGLFEGLKAYRKQDGNILLFRPEENAIRMRNGAERMCMPSPTVEQFVEAVKTTVLANKRWVIWIRLLNLFLLCIPPPGKGSLYIRPLLMGTGAVLGLAPAPEYTFLIFVSPVGNYFKEGVAPINLIVETEFHRATPGGTGGVKTIGNYAAVLKAQSIAKAKGYSDVLYLDCLHKRYLEEVSSCNIFIVKDNVISTPEIKGTILPGITRKSIIEVARSQGFKVEERNVTVDELVEADEVFCTGTAVVLSPVGSITYKSQRYKTFSFTS

SEQ ID NO: 6938 - DNA, 1182 bp, Caenorhabditis elegans
  CDS (1)..(1182)
atgcagaaaatatcgtctggtcttctgaaaagatctttcatctcttcatccctcagatgtactcacagcttccaatatgcaaatttggtggtcgaaaaaagcaccaaaaagcaacgaattcctagtgatccagcaaaacttggattcggtcgctacttttccgaccatatgattgatattgattgggatgtgaaagagggatggattgctccaaagatctgcccatttcaaaatttctccattcatccggcggctaaagttcttcattatgcgattgagatatttgaaggcatgaaagcatatcacggggtcgatggcaagatccgtctatttcgcccggagctgaatatggagcgaatgagaagatctgctcgtcgttcctcgctcccagattttgatgctcgtcaggcatgtctactcatcgatgaactcattcgaatcgatgcagacattgttccgaaaaccgatcaagcctccttgtacattcgccccatgatgtttgcaactgaacaacatatcggagtttcggaaagtacacaagccaaatgggcgtgttttacatcgatcactggtagttatttcaattatgagaaaggtattcgtctgttggcagatcctgaaatggtacgctcgtggaaaggaggtgtcggacaatacaaaatggggtgcaactatgcaccaactatttttgttggaaagatggctgcgttgcacggatgtgatcaagctatgtggctttctggagataatcgcctgatcactgaagccggcgcgatgaatgtgttcatgctttggacaaatgaagacaatgaattggagctcataactccacctacagattctggtcttcttcttcccgggataactagacagtctatcgtagagttggcacaggaaatgaacctgatgaaagtctccgagaagaacttcacaatggcgcaactgtcacgcgcagttcacgagaaacgagttcacgaattctttgtatcaggtactgctgccaacgttggaccagtctctgaaattgtgtactgcgataaagaactggacgttatggagaacttgcagattcccacattgagtagcaaaatgcagttgcacacgagactcaacaagacgctttctgacattcactttgggcgtatcgagaaaaaggaatggcagcatattgtggaactgtaa

SEQ ID NO: 6939 - protein, 393 aa, Caenorhabditis elegans
MQKISSGLLKRSFISSSLRCTHSFQYANLVVEKSTKKQRIPSDPAKLGFGRYFSDHMIDIDWDVKEGWIAPKICPFQNFSIHPAAKVLHYAIEIFEGMKAYHGVDGKIRLFRPELNMERMRRSARRSSLPDFDARQACLLIDELIRIDADIVPKTDQASLYIRPMMFATEQHIGVSESTQAKWACFTSITGSYFNYEKGIRLLADPEMVRSWKGGVGQYKMGCNYAPTIFVGKMAALHGCDQAMWLSGDNRLITEAGAMNVFMLWTNEDNELELITPPTDSGLLLPGITRQSIVELAQEMNLMKVSEKNFTMAQLSRAVHEKRVHEFFVSGTAANVGPVSEIVYCDKELDVMENLQIPTLSSKMQLHTRLNKTLSDIHFGRIEKKEWQHIVEL

SEQ ID NO: 6940 - DNA, 1089 bp, Streptomyces coelicolor
  CDS (1)..(1089)
atgacgacgcccacgatcgagctcaagccctctgcccacccgctctcggactccgagcgcgcggcgattctggccaaccccgggttcggccgccacttcaccgaccacatggtgacgatcaagtggaccgagggccgcggctggcacgacggccagctggtgccgtacgccccgctctccctcgacccggccaccatggtcctgcactacgcgcaggagatcttcgagggcctgaaggcctaccggcggcccgacggctccgtcgccaccttccgcccggagaagaacggcgcccgcttccaggcgtcctcgcgccgcctgggcatgcccgagcttcccgtggacaccttcatcgaggcctgcgacgcgctggtcgcgcaggacgagaagtgggtgccggcgcacggcggcgaggagtccctgtacctgcgccccttcatgatcgcgaccgaggtcggcctgggcgtcaggccggccaacgagtacctcttcatcgtcatcgcctccccggccggcgcctacttcccgggcggggtcaagccggtctccatctgggtctccgaggaccgcgtccgcgccgtccccggcggcatgggcgacgccaagaccggcggcaactacgcggcctccctgctcgcccaggccgaggccgccgccaagggctgcgaccaggtctgctacctcgacgccatcgagcgcaagtgggtcgaggaactgggcggcatgaacctgtacttcgtgtacggcaacaagatcgtcacgccctccctcaccggctccatcctggagggcgtcacccgcgactccctgctcaccgtcgcccgcgacctcggttacgaggccgaggagggccgcgtctcggtcgaccagtggcagcgcgactcggagaacggcaccctcaccgaggtcttcgcctgcggcaccgcggccgtgatcacccccgtcggcacggtcaagcgggccggcgcgcagtggcagcagagcgggggcgagacgggtgaggtgacgcagcggctgcgggacgcgctgctcgacattcagcgcgggacggtcgccgacccgcacgggtggatgcacacgctggcctga

SEQ ID NO: 6941 - protein, 362 aa, Streptomyces coelicolor
MTTPTIELKPSAHPLSDSERAAILANPGFGRHFTDHMVTIKWTEGRGWHDGQLVPYAPLSLDPATMVLHYAQEIFEGLKAYRRPDGSVATFRPEKNGARFQASSRRLGMPELPVDTFIEACDALVAQDEKWVPAHGGEESLYLRPFMIATEVGLGVRPANEYLFIVIASPAGAYFPGGVKPVSIWVSEDRVRAVPGGMGDAKTGGNYAASLLAQAEAAAKGCDQVCYLDAIERKWVEELGGMNLYFVYGNKIVTPSLTGSILEGVTRDSLLTVARDLGYEAEEGRVSVDQWQRDSENGTLTEVFACGTAAVITPVGTVKRAGAQWQQSGGETGEVTQRLRDALLDIQRGTVADPHGWMHTLA

SEQ ID NO: 6942 - DNA, 1143 bp, Schizosaccharomyces pombe
  CDS (1)..(1143)
atggttcaaactgctgctctccatggcccaaagcccatggatagctcccatataaaagttactaatgttaaggagcttaaacctttgcccgaatggaagagtttgaagtttggtgagaattttactgatcatatgcttattatgaaatggaacagagaaaagggttggagtactcctgagatcgttccatttggtaaactttgctttcaccctgcttcctccgttttccattatggttttgagtgctttgaaggcatgaaagctttccgtgacgaaaagggtgtcccacgtcttttccgtcccatcaagaatgctgagcgtatgctttcaactggtactcgtatatctcttccttccttcgaccctgctgagcttgctgaaattatcagaaagttcgtcgctcacgaaaaccgttgggtccctgatcagcgtggttactctttgtacattcgtcctactttcattggtactgatgaagccttaggtgtccaccattgtgacaacgctatgctttatgttattgcctctcccgttggcccctactacagctctggtttcaaggccgttaagctttgttgctccgaagaatccgttcgtgcttggcctggcggtactggtcactacaagcttggtggtaactatgctcctagtgttttgcctcaaaaagaggctgccaagaaggggtatgctcagattctctggctttatggagacgaggactacattactgaggttggtactatgaactgctttactgtttggattaacaagaatggcgaaaaagaaatcattactgcccctcttgacggtatgatcttacctggtgtcactcgtgattctattttggaaatttgccgtgaacgtctcgcacctaaaggctggaagattactgagggcaagtattccatgaaagaggttgctcaagcttctaaggaaggtcgccttttggaagtctttggagctggtactgctgcccttgtttcccccgtcaaggctattaactacaagggtactgagtatgaaattcccatgcctgagggtcaggaagctggtcccatcacttctgaaatcagcaaatggattttggatatccaatacggcaaggaacctaacaacccttggagcgttcctgctttgccttaa

SEQ ID NO: 6943 - protein, 380 aa, Schizosaccharomyces pombe
MVQTAALHGPKPMDSSHIKVTNVKELKPLPEWKSLKFGENFTDHMLIMKWNREKGWSTPEIVPFGKLCFHPASSVFHYGFECFEGMKAFRDEKGVPRLFRPIKNAERMLSTGTRISLPSFDPAELAEIIRKFVAHENRWVPDQRGYSLYIRPTFIGTDEALGVHHCDNAMLYVIASPVGPYYSSGFKAVKLCCSEESVRAWPGGTGHYKLGGNYAPSVLPQKEAAKKGYAQILWLYGDEDYITEVGTMNCFTVWINKNGEKEIITAPLDGMILPGVTRDSILEICRERLAPKGWKITEGKYSMKEVAQASKEGRLLEVFGAGTAALVSPVKAINYKGTEYEIPMPEGQEAGPITSEISKWILDIQYGKEPNNPWSVPALP

SEQ ID NO: 6944 - DNA, 1107 bp, Mycobacterium leprae
  CDS (1)..(1107)
atgaccagcggcttcctcgagttcacggtgtcactctcggcccatccggtgactgatgcggaacgtgaatcgatcctggctgagccgggcttcggtaagtaccacactgaccacatggtgtcgatcgattacattgatggccgaggttggcacgatgcgcgggtcattccctacggcccgattcagctggatccgtccgcgatagtgctgcactacgcgcaggaagtttttgagggactcaaggcttaccgctgggcggacgggtcgatcgtgtcttttcgccctgatgctaacgcggccaggttgcgttcgtcggcgcggagaatcgcgattcccgagctgcccgacgagttattcattgactctctgtgtcagctcatcgctgtcgacaatgcttgggtgccccgggtcggcggtgaagaggcgctttatctgcggcccttcatcttcgcgaccgagccggggctgggggtacggccagccaagcagtatcggtacctgttgatcgcctcgccggtcggggcgtatttcaaaggcggcatcaaccctgtcacggtctgggtgtcgatggagtacgtgcgagctagcccgggcggcaccggtgcggccaaatttggcggcaactacgctgcgtcgctgctggctcagaccgaagccgcagccaacgggtgcgaccaggtggtgtggctagacgccgtcgagcgccgcttcgtcgaagaaatgggcgggatgaacatcttctttgtgctcggcagcggcgggtcggcacgcctggtcaccccggagctgtctggctcactgctgcccggggtcacacgcgcttcgttgctgcagttggctattgatgccggattcagtgtcgaagaacgtaagatcgatatcgacgagtggcagaagaaagctgctgctggcgagatcaccgaggtgtttgcctgcggcactgccgccttcattaccccggtctcgcgggtgaaatacggtgataccgagtttaccatcgccggtggcgcaccaggtgaggtgactatggcgttgcgcgacacgctaactggaatccagcgcggtacttttgccgacacccacggctggatggcccggctgggatag

SEQ ID NO: 6945 - protein, 368 aa, Mycobacterium leprae
MTSGFLEFTVSLSAHPVTDAERESILAEPGFGKYHTDHMVSIDYIDGRGWHDARVIPYGPIQLDPSAIVLHYAQEVFEGLKAYRWADGSIVSFRPDANAARLRSSARRIAIPELPDELFIDSLCQLIAVDNAWVPRVGGEEALYLRPFIFATEPGLGVRPAKQYRYLLIASPVGAYFKGGINPVTVWVSMEYVRASPGGTGAAKFGGNYAASLLAQTEAAANGCDQVVWLDAVERRFVEEMGGMNIFFVLGSGGSARLVTPELSGSLLPGVTRASLLQLAIDAGFSVEERKIDIDEWQKKAAAGEITEVFACGTAAFITPVSRVKYGDTEFTIAGGAPGEVTMALRDTLTGIQRGTFADTHGWMARLG

SEQ ID NO: 6946 - DNA, 1065 bp, Arabidopsis thaliana (mouse-ear cress)
  CDS (1)..(1065)
atggctccttctgcgcaacctcttcctgtgagtgtttcggatgaaaaatatgcgaatgtcaagtgggaagagttggcattcaagtttgttcgtacggattatatgtatgttgcgaagtgcaatcatggagagagttttcaagaggggaagattcttccttttgctgatttgcaacttaacccttgcgctgctgttcttcagtatggccagggtttatatgaaggactgaaagcttacaggacagaagatggtcggattctgctattccgaccagaccaaaacggtctccgccttcaagccggagctgacagactctatatgccttatccttcggtcgatcaattcgtctccgccatcaaacaagttgctcttgccaacaagaaatggattcctcctccggggaaaggaacattgtatattaggcctatcttgtttgggagtggtccgattcttggttcatttcccattcctgagaccaccttcacagcttttgcctgtcctgttggacgttatcataaggataactctggtttgaatctgaaaatcgaagatcagtttcgtcgagcttttcctagtggaactggtggtgtgaagagcatcacaaactattgtcctgtttggataccattggcagaggcgaaaaaacaaggtttctctgatattttgtttttggatgctgcaactggcaaaaacattgaagaacttttcgcagctaatgtttttatgctcaagggcaatgttgtatcgacaccaacaattgcaggaactattttgcccggagtcactcgaaactgcgtaatggaattgtgtcgtgatttcggctaccaggtcgaggaacgtacgattcctctagtggactttctcgatgcggacgaagctttctgtactggcactgcttccattgtgactagtattgcatccgtaacctttaaagacaaaaagaccggattcaaaacaggggaagaaacattggctgcgaagctatacgagacgttaagtgatatccagacgggtcgggtcgaggataccaagggatggacggtggagattgaccgccagggctga

SEQ ID NO: 6947 - protein, 354 aa, Arabidopsis thaliana (mouse-ear cress)
MAPSAQPLPVSVSDEKYANVKWEELAFKFVRTDYMYVAKCNHGESFQEGKILPFADLQLNPCAAVLQYGQGLYEGLKAYRTEDGRILLFRPDQNGLRLQAGADRLYMPYPSVDQFVSAIKQVALANKKWIPPPGKGTLYIRPILFGSGPILGSFPIPETTFTAFACPVGRYHKDNSGLNLKIEDQFRRAFPSGTGGVKSITNYCPVWIPLAEAKKQGFSDILFLDAATGKNIEELFAANVFMLKGNVVSTPTIAGTILPGVTRNCVMELCRDFGYQVEERTIPLVDFLDADEAFCTGTASIVTSIASVTFKDKKTGFKTGEETLAAKLYETLSDIQTGRVEDTKGWTVEIDRQG

SEQ ID NO: 6948 - DNA, 1062 bp, Mus musculus
  CDS (1)..(1062)
atgaccaaagaaccacagaagaagccagcccctagccaggcattgctgtttgggaagaccttcacagaccacatgctgatggtagagtggaataacaaggctggatggggccctccaaggatccagcccttccagaacctcacgctacacccagcctgctctggtctgcactactctctgcagctctttgagggcttgaaagcatacaaaggtggagaccagcaggtacgcctcttccggccctggctcaacatggacaggatgctacgttctgctaggcgcctctgcctgccagactttgacaagcaggagctgttggagtgtatccgccagctcattgaagtagacaaagactgggttcccgatggcaacggaacgagcctctacgtgcggcccgtgctgatcgggaatgagccctcgctgggtgttggtatggtcacacaagccctcctgtacgtcattctgtgccctgtgggctcctacttccctggagactccatgacacctgtctccctcctggcggacccttcattcgtcagagcctggataggcggagtcggtgactgcaagttgggggggaactatggacccactgtggctgtgcagcgagaagcccagaagagaggctgcgagcaggtcctctggctgtacgggccagaccaccagctcactgaggtgggcaccatgaacatctttgtctactggacccatgaagacggagtactggagctggtaacccccccactgaatggcgtcatcttgcctggagtagttcgacaaagtctgctggatctggccaggacttggggtgagttccgggtggcagaacgcaaggtcactatgaaggaattgaagcgggcgctggaggaaggccgagtgcgagaagtcttcggctcaggcactgcttgtcaggtctgcccggtgcaccaaatcctgtatgaaggcaagcaactccacatacctaccatggagaacggcccagagctcatcctgcgcttccagaaggaactgaaggctattcagtacggagccagtgcccacgattggatgtttcgggtgtga

SEQ ID NO: 6949 - protein, 353 aa, Mus musculus
MTKEPQKKPAPSQALLFGKTFTDHMLMVEWNNKAGWGPPRIQPFQNLTLHPACSGLHYSLQLFEGLKAYKGGDQQVRLFRPWLNMDRMLRSARRLCLPDFDKQELLECIRQLIEVDKDWVPDGNGTSLYVRPVLIGNEPSLGVGMVTQALLYVILCPVGSYFPGDSMTPVSLLADPSFVRAWIGGVGDCKLGGNYGPTVAVQREAQKRGCEQVLWLYGPDHQLTEVGTMNIFVYWTHEDGVLELVTPPLNGVILPGVVRQSLLDLARTWGEFRVAERKVTMKELKRALEEGRVREVFGSGTACQVCPVHQILYEGKQLHIPTMENGPELILRFQKELKAIQYGASAHDWMFRV

SEQ ID NO: 6950 - DNA, 876 bp, Symbiobacterium thermophilum
  CDS (1)..(876)
atgtccatccaggtctacgtggacggcgagtggtactcccgggacgaggccaaggtgtccgtgtttgaccacggcttcctgtacggcgacggcgtcttcgagggcatccgggcctacggcgggcgggtcttccggctgaccgagcacctggaccggctgtacgactccgccagggcgatctggctggagatcccgctgtcgtggcgggagatggagggggtcgtgctggagacgctgcgccgctcgaacctgcgcgatgcctacatccggctggtggtgtcccggggccggggcgacctggggctggatccccgcaagtgcccccggccgacggtggtctgcatcgccgactccatcgccctctacccggaggaggtctacacccgggggatgcaggtgatctccgtctccacccggcggaacccgccggatacggtctggccgcaggtgaagagcctcaactacctgaccagcatcatcgccaagatcagcgccgccacccaggggtatcccgaggtcatcatgctgaacaaggaaggctacgtctgcgagggcaccggcgacaacatcttcatcgtgaagaagggccggctgatcaccccggcggtccatctgggcatcctgcccggcatcacccgggcggcggtgatggagtacgcccgggacctgggctacgcggtggaggagggcaccttcaccctatacgacctgtacaccgcggacgagtgcttcctcacgggcaccgcggcggagatcgtgccggtggtggagtgcgatgcccggaagatcggctcgggccagcccggcgagatcaccaggcagctcatcgccgagttccgccggcgggtgcaggtcgaaggcacgccgatcggctga

SEQ ID NO: 6951 - protein, 291 aa, Symbiobacterium thermophilum
MSIQVYVDGEWYSRDEAKVSVFDHGFLYGDGVFEGIRAYGGRVFRLTEHLDRLYDSARAIWLEIPLSWREMEGVVLETLRRSNLRDAYIRLVVSRGRGDLGLDPRKCPRPTVVCIADSIALYPEEVYTRGMQVISVSTRRNPPDTVWPQVKSLNYLTSIIAKISAATQGYPEVIMLNKEGYVCEGTGDNIFIVKKGRLITPAVHLGILPGITRAAVMEYARDLGYAVEEGTFTLYDLYTADECFLTGTAAEIVPVVECDARKIGSGQPGEITRQLIAEFRRRVQVEGTPIG

SEQ ID NO: 6952 - DNA, 846 bp, Symbiobacterium thermophilum
  CDS (1)..(846)
atgtacctgaacggtcagtacgtcccgtatgaagaggcgaagatcccggtggaggaccgggccttcctgttcgccgacggcatctacgaggtggtgcgggtctacggcggccggccgttcgacctggagccgcacctccggcggctcgcccgcagcgcccgggagctccgtctgcctgagcccgacctggaggggctgacccgggtgacccacgagctcatccgccgcaacggcgtggatgaggggaccgtctactaccagatcagccggggcgtgcacgccccccgtgcccacgcctttcctggccagccggtggaaccgacggtgctcgtgctcacccacccgctgacgcccgaggcggtggcggcgggcgagcggcgtcggcaggaaggggtcacggccatcacggtgcctgagcagcggtgggcccggtgcgacatcaagagcgtttcgctcctgcccaacgtcctggccaagcagcaggccgccgagcagggggcctacgaggcgctcttcgtccgggacggcttcgtcatcgagggcagcagcagcaacgtgttcgcggtcatcgacggggccatcgtcacctatccggcctgcaactatatcctgaacggcatcgcccgccagcgggtcatccgggacgcccggtcgctggggtacaccgtgctggagcaggggattccgctggcggccctggatcgctgccaggaactgttcgtgacctcgaccacatccgaagtgacgccggtggtcgccgtggacggcaggcccatcggcgacggcaaggtggggccggtggtgcgggccctgcagcaggcctaccgcgccgcggcgcgggggtaa

SEQ ID NO: 6953 - protein, 281 aa, Symbiobacterium thermophilum
MYLNGQYVPYEEAKIPVEDRAFLFADGIYEVVRVYGGRPFDLEPHLRRLARSARELRLPEPDLEGLTRVTHELIRRNGVDEGTVYYQISRGVHAPRAHAFPGQPVEPTVLVLTHPLTPEAVAAGERRRQEGVTAITVPEQRWARCDIKSVSLLPNVLAKQQAAEQGAYEALFVRDGFVIEGSSSNVFAVIDGAIVTYPACNYILNGIARQRVIRDARSLGYTVLEQGIPLAALDRCQELFVTSTTSEVTPVVAVDGRPIGDGKVGPVVRALQQAYRAAARG

SEQ ID NO: 6954 - DNA, 1092 bp, Propionibacterium acnes
  CDS (1)..(1092)
atgagtttgcgctttgcttctgctgacgatctgacgtggtcctccgacgagcggatcgcgctggaacatgccaatccacgatttggtgcggtccttgccgaccatatggctgttgctacctggcaggccggtgaaggctggggagacgacgccgtggtcaactaccacggacttgatatcaatcctggcagcgctgtgctgcattatgcccaggagattttcgagggcctgaaggcttaccgccacgctgacggttctatctggctcttccgccctgatcagagcggtgagcgttttgttcggtcggccgagcgtctcgccctgcccacgctgcgagtcgaagacttcgttactgcttgtatgcgcttggttgaggtcgactcccgttgggtccctgagcccggtgagggtggagagaagtccctctacctgcggccgttcatgatcgcctaccaggatttcctcggtcttgccgcggcaagtaccgtgctgttttccgttattggttctcccgttggcgcttactttgtcagcggggtgaaaccgctgcggctcctcgtcgagcgtcgtcaagctcgaacggcccccggcggtaccggtgaggcgaagtgcggtggcaattacgcagcttcgctgcgttcccagatcgatgccaagacccgtggctgcaacgaggtgctctttgtcgatgcagttgaacatcgctggatcgaggaactgggtggtatgaacttcatggccatcagcaaggacggtcagctcgtcacccccgagttagctggcaccatcctacgtggcgtgactcgcagatccattctggaagttgcccccgacctcggtcttgaaccagtggagcgcaagatcgatgttgacgagctccttgatggcgttcgctctggcgagttcccggaagtcttcgcctgcggtaccgccgcggttgtcacaccgatcggctctttcctagatggagataccgacgtgaaggtctctgagcccaccggaaagaccacgatggagatccgtcgccgtctgctggatatccagttcggacgcgctgaggacacccgtggctggttgaagcgagtctgctga

SEQ ID NO: 6955 - protein, 363 aa, Propionibacterium acnes
MSLRFASADDLTWSSDERIALEHANPRFGAVLADHMAVATWQAGEGWGDDAVVNYHGLDINPGSAVLHYAQEIFEGLKAYRHADGSIWLFRPDQSGERFVRSAERLALPTLRVEDFVTACMRLVEVDSRWVPEPGEGGEKSLYLRPFMIAYQDFLGLAAASTVLFSVIGSPVGAYFVSGVKPLRLLVERRQARTAPGGTGEAKCGGNYAASLRSQIDAKTRGCNEVLFVDAVEHRWIEELGGMNFMAISKDGQLVTPELAGTILRGVTRRSILEVAPDLGLEPVERKIDVDELLDGVRSGEFPEVFACGTAAVVTPIGSFLDGDTDVKVSEPTGKTTMEIRRRLLDIQFGRAEDTRGWLKRVC

SEQ ID NO: 6956 - DNA, 1134 bp, Leifsonia xyli
  CDS (1)..(1134)
atgaacgcttcgaccagcatctccctcaccagcggccccaccgagacttccggcctgctctggaacgtcgccaggaacgaggcggcgcgcaccgctgctgagcgcgcggagatcctcgcggaccccggtttcggcaactacttcaccgatcacatggtcgatctgtgctggtccgcgaagggcggctggcaccggccgcgcgtctccccttacggacccatcccgctcgacccgtctgccgctgtgctgcactacgctcaggagatcttcgaggggctgaaggcgtaccgccacgaggacggttcgatctggagcttccgaccggaggccaatgcggcccgcatgcagcgttcgtcctaccggctcgcgctgccccagctgccagtcgagcacttcctcgactcgctcaagcagctcatcgcggtcgacggcgactgggttccggatacggaggagacgagcctgtacctgcggccgttcatgttcgccaaagaagccttcctgggggtgcgcccggcgaacaaggtggcgtattacctgatcgcgagcccggcggcagcctacttcccgtccggtgtcgctccggtttccatctggctctccgatcgctggtcgcgtgctgggaaaggcggaaccggagcggcgaagaccggcggcaactacgcatcgagtctcttgccgcaagccgaagcgcacgagcacgggtgcgcccaggtgcttttcctcgattcggtggagtctacgtacatcgaggagctcggcgggatgaacgtggtgctcgtgtacaaggacggcaccctcgtgacccccgactccgacagcatcctcgaaggcatcaccctcgactcggtgctccagctcgcccgcgaccgcggccaccgggtggagcgccggcgcgtgaccatcggcgaatggcgggacggtgtggagtccggcgacatcgtcgaggtgttcgcctgcggcacagccgccgtcatcaccccgatcggcgaactcaagtcggacacgttcgcggtcggcgacatcaccgcagcgccgggtgcgctcaccctgtctctgcgcaaggaactgaccgacatccagtacggccgcgagcgcgaccgccacggctggatgtaccgcctcgatgcctga

SEQ ID NO: 6957 - protein, 377 aa, Leifsonia xyli
MNASTSISLTSGPTETSGLLWNVARNEAARTAAERAEILADPGFGNYFTDHMVDLCWSAKGGWHRPRVSPYGPIPLDPSAAVLHYAQEIFEGLKAYRHEDGSIWSFRPEANAARMQRSSYRLALPQLPVEHFLDSLKQLIAVDGDWVPDTEETSLYLRPFMFAKEAFLGVRPANKVAYYLIASPAAAYFPSGVAPVSIWLSDRWSRAGKGGTGAAKTGGNYASSLLPQAEAHEHGCAQVLFLDSVESTYIEELGGMNVVLVYKDGTLVTPDSDSILEGITLDSVLQLARDRGHRVERRRVTIGEWRDGVESGDIVEVFACGTAAVITPIGELKSDTFAVGDITAAPGALTLSLRKELTDIQYGRERDRHGWMYRLDA

SEQ ID NO: 6958 - DNA, 1083 bp, Desulfotalea psychrophila
  CDS (1)..(1083)
atgtgggaaaatcttgatgttgcacttgaaaaagtatctgtcgaaaatttaaaggaaaaaccttcaagtgagaacctttgttttggtagtgactttaccgatcacatgtttgcgatgacatggagcagagagaacgggtggcatgacgcaaaaatttgtccatatcataatttggtccttgatcctgcggcaatggtcttccattacggccaggcaatttttgaggggatgaagggctataagggtaaggatgggcagacctatatgtttcgtccgacggataaccttgagcggatgaatcaatctgcagtacgtctctgtatgccccgcctgcccgtggacaaggtgttgaagagcttgaaggcccttctctatctcgaaaaggattggattcccgaggcccccggttcatctctctatattcgtccgaccatgattgcggtagagcccagtcttggtgtccgtccttccgagaagtactacttctttgttattatgagtcccgtgggcgcatactataaggagggttgtaaccctaccaagatctacgtaagtgatgagcaggcccgtgcagttcccggtggcgttggcaatattaagactgccggaaattatgcagcatctctctatactgctgagattgcaaggaaaaaaggttgtagccaagtcctctggctcgatgcgaaagagtttaagtatgtggaagaggtgggcaccagtaatatcttcttccgtattggcgatgagcttatcactcctccgcttggaggttcaattcttggcggtatcaccagagattctattttgaaacttgccagaagctggggcctcaatgtctccgagcgcaagatcaccatagaggaagttttacgggcaagtgaagacggtactctgctggaatcctttggcacaggaacggctgctgtaatctcccctgtaggtgaaattgtctataaggataagagctatatcattaatgctggtaaggctggagaactctcgcagagactctatgccgagcttcagggtattcagtatggcgagctggaagatccattcaaatgggttgagcgtgtgggttag

SEQ ID NO: 6959 - protein, 360 aa, Desulfotalea psychrophila
MWENLDVALEKVSVENLKEKPSSENLCFGSDFTDHMFAMTWSRENGWHDAKICPYHNLVLDPAAMVFHYGQAIFEGMKGYKGKDGQTYMFRPTDNLERMNQSAVRLCMPRLPVDKVLKSLKALLYLEKDWIPEAPGSSLYIRPTMIAVEPSLGVRPSEKYYFFVIMSPVGAYYKEGCNPTKIYVSDEQARAVPGGVGNIKTAGNYAASLYTAEIARKKGCSQVLWLDAKEFKYVEEVGTSNIFFRIGDELITPPLGGSILGGITRDSILKLARSWGLNVSERKITIEEVLRASEDGTLLESFGTGTAAVISPVGEIVYKDKSYIINAGKAGELSQRLYAELQGIQYGELEDPFKWVERVG

SEQ ID NO: 6960 - DNA, 852 bp, Desulfotalea psychrophila
  CDS (1)..(852)
atgaggaacaagaagatgagcatatactgcctagacgggaatttcattgctgaagagaaggccacaatttcggtacatgacctctccctgctccgcggctatggcgtttttgatttcctccgcagttataatggtcatcccttccaactacaggcccatatagatcgccttgcccgatctgcgcagctcgtaggccttagcctcccggtctcctgtgaagagatcttccgactcaccatggagaccatcgcccacaataaccatcaggagtatcagatccgccttgtcatcaccggcggagagagccttggtggatttctcccggaaaggggtgcggcaaggcttatcattatggtcagccccctacacccgttacctgagcagtggtacagcaatggggttaaggtgaccacctgtagaaccagccgttttcttcccggggcaaagaccaccaactacatcccggccatcctggccatgcaggaggccacggcccggggggcagttgagtccatctacctcgacgcgggaggctttctccaagagggaacaacctcaaatttctttgccttttttggctcgacccttgttaccccaccaagtagccgcatactccctggaatcaccagggaagcggtacttgatctggcccaaggagagttcaatatcgaaattcgtcccatccatcaggatgaaatccgccttatggacgaggccgtgatcacggcctccaacaaggagatattacccgtctgcgccataaactccgagcaaatctcacagaaagtcggcctgcacagcaaaaagctcatgcagctctttaagagtttcactcgtaaataccagggttag

SEQ ID NO: 6961 - protein, 283 aa, Desulfotalea psychrophila
MRNKKMSIYCLDGNFIAEEKATISVHDLSLLRGYGVFDFLRSYNGHPFQLQAHIDRLARSAQLVGLSLPVSCEEIFRLTMETIAHNNHQEYQIRLVITGGESLGGFLPERGAARLIIMVSPLHPLPEQWYSNGVKVTTCRTSRFLPGAKTTNYIPAILAMQEATARGAVESIYLDAGGFLQEGTTSNFFAFFGSTLVTPPSSRILPGITREAVLDLAQGEFNIEIRPIHQDEIRLMDEAVITASNKEILPVCAINSEQISQKVGLHSKKLMQLFKSFTRKYQG

SEQ ID NO: 6962 - DNA, 1104 bp, Debaryomyces hansenii CBS767
  CDS (1)..(1104)
atgtcattagattcaacgaaattagaaatcactaaaactaccacaccaaaggaaaaattgccaaatgatcaattgatatttggtaaaactttcactgaccatatgttggaaattgaatggactcaagaaaatggatggggcgtaccaaagatttcaccttaccataacttttcgtttgatccatcaaccgtagtcttccactatgcgttcgaattgttcgaaggtatgaaggcatatcgtgataccaacaaccagattagaacattcagatctgataagaatatgataagaatgaaccaatctgcggaaagaattgctttgccaactttcgatggggaagaactcatgaagttgattgacaagtttttgattactgacgaaagttttgttcctcaaggtgctggttactcattatacttgagaccaaccttgataggtaccactgcctcgttaggtgttggaaccccagacaaggccttattatatgttattgcttctccagtcggtccatactacggtaccggtttcaagccggtttcattagaagctactgactacgctgtcagagcttggccaggtggtgttggtaaccgtaaattaggtgccaactacgccccatgtattttacctcaattagaagcagctcaaagaggctaccaacaaaacttgtggttattcggtgacgaaggttatgtcaccgaagtcggaaccatgaatgttttctttgctttcaaggattctgagggaaagaaggaattagtcactgccccattagatggtaccattttagaaggtgtcaccagagattccatcttgcagttatgtaaggaaagattaccttccgaatggactgttgtcgaacgtaaatttacaatccacgaaattgaagaaagagccgcaaagggtgaattaatcgaagctttcggtgctggtaccgctgctgtcgtttctccaatcgagagaattggttggaagggtaaggatatctcagttccaattactgctggtgatgctggtgaattaactacacaggttgctgaatggattagaaagattcaatacggtgaagaagaatacaaaaactggtcaagagttgctaaatag

SEQ ID NO: 6963 - protein, 367 aa, Debaryomyces hansenii CBS767
MSLDSTKLEITKTTTPKEKLPNDQLIFGKTFTDHMLEIEWTQENGWGVPKISPYHNFSFDPSTVVFHYAFELFEGMKAYRDTNNQIRTFRSDKNMIRMNQSAERIALPTFDGEELMKLIDKFLITDESFVPQGAGYSLYLRPTLIGTTASLGVGTPDKALLYVIASPVGPYYGTGFKPVSLEATDYAVRAWPGGVGNRKLGANYAPCILPQLEAAQRGYQQNLWLFGDEGYVTEVGTMNVFFAFKDSEGKKELVTAPLDGTILEGVTRDSILQLCKERLPSEWTVVERKFTIHEIEERAAKGELIEAFGAGTAAVVSPIERIGWKGKDISVPITAGDAGELTTQVAEWIRKIQYGEEEYKNWSRVAK

SEQ ID NO: 6964 - DNA, 1167 bp, Yarrowia lipolytica CLIB99
  CDS (1)..(1167)
atgcttcgaaacaacttgagatcgctttcgcgggccttcagcacctcctccatgcgtctgggcgccggaatggacgcctccaagctccagatcaccaagaccaagtcccccaaggaaaagcaggcccccaaggatctcattttcggccataccttcaccgaccacatgctgactgtcgagtggactgccaaggacggctgggctgctccccagatcaccccctacggtcctcttgagctggatccctccgccgtcgtcctgcactatgcctttgagtgtttcgagggcctcaaggcttacaaggacgagtctggaaacgtgcgtctgttccgagtcgacaagaacatgcaccgaatgaacacatcggccgagcgaatctgcctgcccgagtttgatggcgccgaggctgccaagctgattggccaattggccaagcttgattccgcttggatccccgagggacgaggctactccatgtacctccgaccttctctgattggaaccaccgccgctctcggcgtcggaacccccgataaggcgctcttttacgtcattgcatcccccgtcggcccctactaccctaccggattcaaggccgtcaagctggaggctactgactacgctgtccgagcctggcctggaggagtcggaaacaagaagctgggagccaactacgctccctgtatcaagcctcagcagcaggccgcttctcgaggctaccagcagaacctgtggctgtttggcgacgagggcaacatcaccgaggtcggtaccatgaacgccttctttgtgtttgagcgaaacggcaagaaggagcttgtcactgctcctttggacggtactattctcgagggtgtcactcgagactccattctggagctggctcgagaacgattgccttctgctgactggatcgtttccgagcgatactgcactattaaagaggtcgcggaggctgccgagaagggcgagcttgttgaggcctttggagctggtactgccgctgttgtctcgcctatcaaggagattggatggggagagaagactattaacattcctctccagcctggcaaggaggccggtaagctgactgagactgttaatgagtggattggagatatccagtacggtaaggatgaatacaagggatggtctaaggtggtctaa

SEQ ID NO: 6965 - protein, 388 aa, Yarrowia lipolytica CLIB99
MLRNNLRSLSRAFSTSSMRLGAGMDASKLQITKTKSPKEKQAPKDLIFGHTFTDHMLTVEWTAKDGWAAPQITPYGPLELDPSAVVLHYAFECFEGLKAYKDESGNVRLFRVDKNMHRMNTSAERICLPEFDGAEAAKLIGQLAKLDSAWIPEGRGYSMYLRPSLIGTTAALGVGTPDKALFYVIASPVGPYYPTGFKAVKLEATDYAVRAWPGGVGNKKLGANYAPCIKPQQQAASRGYQQNLWLFGDEGNITEVGTMNAFFVFERNGKKELVTAPLDGTILEGVTRDSILELARERLPSADWIVSERYCTIKEVAEAAEKGELVEAFGAGTAAVVSPIKEIGWGEKTINIPLQPGKEAGKLTETVNEWIGDIQYGKDEYKGWSKVV

SEQ ID NO: 6966 - DNA, 918 bp, Erwinia carotovora
  CDS (1)..(918)
atgcaaccgacattatccaaccaaagcagtcaggcctatttgcaagatccgcgtaacaacgacgtacaggtgtatgtgaatggggaatttgttcatcgcgacaacgcggtggtgtcgatctttgattccggctacgtgtgcggtgacggcgtatgggaaggattgcgcttggttaacggccgcctgattgcgctggacgcccatctggatcgcctgttcgagggtgctgcatcaatccaactggatatcggccatagccgggaggcgctgaccgctattctctataacacgctagccatcaacgggatgaccgatggcgcacatattcgcctgatgattacccgtgggaaaaagcatacgccgaatcaggatcctcgcttcatcatcggcggtgcaaccatcgtgtgcgtggcggaatacaaggtcgtcgatacagcggcgaaaaagcgcgggctgacgttgtttacgtccacttatcgcaccagcacaccggacgtcttcgatctgcgactcaattcgcacagccgacttaatcttattcaagcgctactacaggcgttgcaggctggtgcagacgaagcgttgatgctggatccgcacggttttgtcgccagttgcaactccaccaacttttttatcgtccgccgcggtgaactgtggacgtcatcggggcgctactgcttcaacggcattactcgccagacccttatcgatctcgctcacgccaacggactcacggtcaagactcaggactttacgctggcagaagcgctcaccgccgatgaagcctttgtcaccggcacgctggcgggtatcaccccagtaaaagcattggatggccacccatttagcgccgaacatcgcccagttacagagcagcttagccagtggtatgaggcatatctaaacgcacagtga

SEQ ID NO: 6967 - protein, 305 aa, Erwinia carotovora
MQPTLSNQSSQAYLQDPRNNDVQVYVNGEFVHRDNAVVSIFDSGYVCGDGVWEGLRLVNGRLIALDAHLDRLFEGAASIQLDIGHSREALTAILYNTLAINGMTDGAHIRLMITRGKKHTPNQDPRFIIGGATIVCVAEYKVVDTAAKKRGLTLFTSTYRTSTPDVFDLRLNSHSRLNLIQALLQALQAGADEALMLDPHGFVASCNSTNFFIVRRGELWTSSGRYCFNGITRQTLIDLAHANGLTVKTQDFTLAEALTADEAFVTGTLAGITPVKALDGHPFSAEHRPVTEQLSQWYEAYLNAQ

SEQ ID NO: 6968 - DNA, 936 bp, Acinetobacter sp
  CDS (1)..(936)
atgtgtgccatgaatttggctgatcgtgatggttttatttggcaagatggacaattggttgactggcgtgatgcaaaaattcacgttttaactcatacgctacactacagtatgggtgtctttgaaggtgtccgtgcctatgaaactcctaaaggcactgcaatttttcgtctccaagatcacactaagcgtttgttaaactctgcaaaaatttatcaaatgaaagttccatttgatcaagcgacacttgagcaagctcaaattgatgtggttcgtgaaaataaattagcatcttgttacttgcgtccattgatctggatcggttctgaaaaattaggtattgctgccactgaaaatagtattcatgctgccgttgcggcatggggctggggtgcttaccttggtgaagaggcaatggcacgtggtattcgtgtaaaaacatcttcgtttacgcatcatcatccaaacgtgacgatgtgtaaggcaaaagcatgtggcaactatactgtgtcgatcttggcacatcaggaagtagcgcgttcaggttatgatgaagcgatgttgctagatccacaaggctttgtgtgtcaaggtgcaggcgagaacgtgttcttgattaaagatggcgtgttgcatacccctgatttggctggtggtgcattagaagggattacccgtcaaacagttattaccattgcaaaagatttaggatacgaagtggttgagcgtcgtattacccgtgatgaattctacattgcagatgaagcattctttactggtactgccgcagaagtgacgccaattcgtgaatacgatgaccgtgaaattggtgaaggatgccgtggcccaattaccacagaaatccagaaaacctttttcgatgcggttcagggcaaaaatgcaaaatatgaacactggttaacttacgtgaagtaa

SEQ ID NO: 6969 - protein, 311 aa, Acinetobacter sp
MCAMNLADRDGFIWQDGQLVDWRDAKIHVLTHTLHYSMGVFEGVRAYETPKGTAIFRLQDHTKRLLNSAKIYQMKVPFDQATLEQAQIDVVRENKLASCYLRPLIWIGSEKLGIAATENSIHAAVAAWGWGAYLGEEAMARGIRVKTSSFTHHHPNVTMCKAKACGNYTVSILAHQEVARSGYDEAMLLDPQGFVCQGAGENVFLIKDGVLHTPDLAGGALEGITRQTVITIAKDLGYEVVERRITRDEFYIADEAFFTGTAAEVTPIREYDDREIGEGCRGPITTEIQKTFFDAVQGKNAKYEHWLTYVK

SEQ ID NO: 6970 - DNA, 1116 bp, Candida glabrata CBS138
  CDS (1)..(1116)
atggacgcatcaaggttgaagatcacaaaagtttccactccaagtgaaagaaagccaaatgaccagctagtctttggtaagacttttaccgatcatatgctgaccattgaatggacctctgagaatggttgggacgctccggagatcaaaccatatggcaaattatgtcttgatccttcatcaattgtattccattatgccttcgagctgtttgaaggtatgaaagcatacagaacaaaggatggtaaaattgcaatgttcagacctgaaaaaaacatggaaagaatgaacaagtctgcagcaagaatttgcctgccaacatttgacggggaagaattgatcaaactgatcgggaagctgatcgaattagataagcacttgattcctgaaggtgagggatactctctctatattagacccactttgatcggtacatctgaaggccttggtgtaaaagagccagacagagccctactttttgtcatttgttctcctgttggcccttattataaaactggatttaaggcagttcgcttggatgctacagactatgcaacaagagcatggccaggtggcgtcggtgacaaaaaactgggcgctaattatgctccttgtgtattaccccagacgcaggctgccgctaagggtttccagcaaaatttgtggttatttggtccggagcactatgtcacggaagttggtacaatgaacgcattttttgcatttaattgtaaggaaaccggtaagaaagaattggtcactgcgccattagatggaactattttggaaggtgttactagagactccatcttaactcttgctagaaagtatttggatcctaatgaatgggagattaatgaaagatatttcactattcatgaggtccaagaaaaggctcataaaggtgaattattagaggcatttggaagtggtacagcagctattgtttcccctatcaaggagattggatggaaagacactattatcaatgttcctttgattcctggagaacaaagcggaccacttacaaaacaaatagcatcatggatgatggatatccaatatggtaaagtagaacttgataactggttaagaattgttgcagacattaattaa

SEQ ID NO: 6971 - protein, 371 aa, Candida glabrata CBS138
MDASRLKITKVSTPSERKPNDQLVFGKTFTDHMLTIEWTSENGWDAPEIKPYGKLCLDPSSIVFHYAFELFEGMKAYRTKDGKIAMFRPEKNMERMNKSAARICLPTFDGEELIKLIGKLIELDKHLIPEGEGYSLYIRPTLIGTSEGLGVKEPDRALLFVICSPVGPYYKTGFKAVRLDATDYATRAWPGGVGDKKLGANYAPCVLPQTQAAAKGFQQNLWLFGPEHYVTEVGTMNAFFAFNCKETGKKELVTAPLDGTILEGVTRDSILTLARKYLDPNEWEINERYFTIHEVQEKAHKGELLEAFGSGTAAIVSPIKEIGWKDTIINVPLIPGEQSGPLTKQIASWMMDIQYGKVELDNWLRIVADIN

SEQ ID NO: 6972 - DNA, 1188 bp, Candida glabrata CBS138
  CDS (1)..(1188)
atgatgctgaactctagactagcgtttgctagtataagcagaaatttcggccttgctagaaggtcaattgccagcttggatgcctctaaactgaaagttacaaagaaaacaccaccatcacaacccagacctaatgatgagcttgtttttggtcagacatttactgatcacatgcttacaattgaatggactaaagagaaaggttgggatatcccggaaatcaagccatatggaaacttgaccctagatccatcttcttgtgtattccactacgcctttgagctttttgaaggtttaaaagcttacaggaccccagacaataagattactatgtttagaccagatatgaatatgattcgtatgaacaaatctgcagctcgaatctgtttacctacatttgatagcgaagagttgatcaaattaatgggcaagctaattgaacaggacaaacatttggttccaactggaactggctactcattgtacatcagaccaactttgattggtaccacaaatggcctaggtgtcggtactccagacagagcattgctttttgtcataacctctccagttggtccttattataagactggtttcaaagctgtcaggctagaagctactgactacgcaaccagagcttggccaggtggtgttggtgacaagaagttgggtgcaaactatgctccatgtattcttccacaacttcaagcggcagaaagaggttatcaacaaaacctttggttattcggtcccgaaaaacatgtgacagaagtcggtactatgaatgtattctttgccttcaaaaattctgttaccggaaagaaagaacttgtgacggctccattagatggtactattttggaaggtgttacaagagactccatattgacacttacaagacaaaacttagatccaaacgaatgggaaattaatgaacgttactatagcattaatgaagttgctgaaagagctgcgaagggtgagctattagaagcttttggcgccggtaccgctgctgttgtttcaccaattaaggctatcggatggcaaggaaaagatattgatgtgccattgatacctggtgaacaatctggtccaataactaaacaagtggcccaatggattgctgatattcaatatggaagagtaaaacatggtaactggtcaagagtagtagctcaattatag

SEQ ID NO: 6973 - protein, 395 aa, Candida glabrata CBS138
MMLNSRLAFASISRNFGLARRSIASLDASKLKVTKKTPPSQPRPNDELVFGQTFTDHMLTIEWTKEKGWDIPEIKPYGNLTLDPSSCVFHYAFELFEGLKAYRTPDNKITMFRPDMNMIRMNKSAARICLPTFDSEELIKLMGKLIEQDKHLVPTGTGYSLYIRPTLIGTTNGLGVGTPDRALLFVITSPVGPYYKTGFKAVRLEATDYATRAWPGGVGDKKLGANYAPCILPQLQAAERGYQQNLWLFGPEKHVTEVGTMNVFFAFKNSVTGKKELVTAPLDGTILEGVTRDSILTLTRQNLDPNEWEINERYYSINEVAERAAKGELLEAFGAGTAAVVSPIKAIGWQGKDIDVPLIPGEQSGPITKQVAQWIADIQYGRVKHGNWSRVVAQL

SEQ ID NO: 6974 - DNA, 1107 bp, Bartonella henselae
  CDS (1)..(1107)
atgaaatctcctacatcatcaattccatttaaaatagaaaaacatccatcacctttatcagacgaagaacgtgagcatattctcaaaaatcctggttttggtcaattttttacagatcacatggtgatcattaaatggactaaagataaaggttggcataatgctgtcatctctcaatacaaatctttagaaattaatccagcaagtaccgttctgcattatgggcaagagatttttgaaggtttaaaagcgtatcgtgcaaaagatgggcgtattttgttatttcgtcctgatgccaatgcgcaacgttttatagaatcagcaagacgattagctatgcctgaattgccaaaggacatttttttagatgctgttcataaattggtaagaattgatcaaaattggatttctggaaatcccaatgctagcctttacatacgtccgtttatgtttggtaatgaaaactttttgggagttcgcccttctgaaaaatatattttctgtattatagcatctcctgttgaatcctattttaaaggagaagaaaaacctgtcagtgtatggcttgaaacagattacagccgtgctggtccaggcggaacaggtgtagcaaaatgtggtggtaactatgcagcaagtttacttgcacaaaagaatgcagaacaaaataattgtagtcaagtactcttccttgacatggttgaacataagtggattgaagaactcggcggtatgaatgtttgttttattatggaaaataatacgcttgtaacacccgcacttaatggcacaattcttgcaggaataacacgtcattcaattttgaagttggcccaaaaaatgggtttaaaaatagaagaacgcccttattcttttgaatcgcttcaggaagatgcaagaagtaatcacctgaaagaagtttttgcttgcggtactgctgctgttgtcacatcaatcggccgttttaaatataaaggtggtgaattcgttatcggaaatggaatgattggtgaggtcacgaaaaaacttcgcacacaacttgttgatcttcaaaaaggcaatagagaagataaaaatggctgggtccattctgttcagctctcataa

SEQ ID NO: 6975 - protein, 368 aa, Bartonella henselae
MKSPTSSIPFKIEKHPSPLSDEEREHILKNPGFGQFFTDHMVIIKWTKDKGWHNAVISQYKSLEINPASTVLHYGQEIFEGLKAYRAKDGRILLFRPDANAQRFIESARRLAMPELPKDIFLDAVHKLVRIDQNWISGNPNASLYIRPFMFGNENFLGVRPSEKYIFCIIASPVESYFKGEEKPVSVWLETDYSRAGPGGTGVAKCGGNYAASLLAQKNAEQNNCSQVLFLDMVEHKWIEELGGMNVCFIMENNTLVTPALNGTILAGITRHSILKLAQKMGLKIEERPYSFESLQEDARSNHLKEVFACGTAAVVTSIGRFKYKGGEFVIGNGMIGEVTKKLRTQLVDLQKGNREDKNGWVHSVQLS

SEQ ID NO: 6976 - DNA, 1077 bp, Staphylococcus aureus
  CDS (1)..(1077)
atgtcacaagcagttaaaattgaattacgcgaaacattaaaagaaaaaccagatacatctcaattaggatttggtaagtattttacagattatatgttgagttatgattatgatgcggataaaggatggcatgatttgaagattgtaccttatggtccaattgaaatttcgccagcagcacaaggtgttcactatggacaatcagtgttcgaaggtttaaaagcatataaaaaagatggagaggttgcacttttccgtccagatgaaaactttaagcgtcttaataactcgttagcacgcttagaaatgcctcaagtcaatgaaggtgaattgctagaaggacttaagcaattagttgatttagagagagaatgggttccggaaggtgaaggtcaatcattatatattcgtccttttgtttttgcgacagaaggggtacttggcgttggtgcatcacatcagtataaattattaattattttatctccttcaggtgcatattatggtggtgaaactttaaaaccaactaaaatctatgtagaagatgaatatgtacgtgctgttcgtggcggtgtaggctttgcgaaagttgcaggtaactatgcggcaagtttattagcacaaactaatgcaaataaattaggttatgaccaagtattatggcttgatggtgttgaacagaaatatatcgaagaagttggtagcatgaacattttcttcgttgaaaatggcaaagtaattacaccagagttgaatggcagtattctacctggtattacacgtaaatctattatcgaattagctaaaaacttaggatatgaagtcgaagagcgccgcgtttcaatcgatgaattattcgaatcatatgataaaggtgagttaacagaagtatttggtagtggtactgcagcagttatttcacctgtaggtacattgagatatgaagatcgtgaaatcgttattaataataatgagactggtgaaattactcaaaaattatacgacgtctatactggtattcaaaatggtactttagaagataaaaatggttggagagtcgttgtaccaaaatattaa

SEQ ID NO: 6977 - protein, 358 aa, Staphylococcus aureus
MSQAVKIELRETLKEKPDTSQLGFGKYFTDYMLSYDYDADKGWHDLKIVPYGPIEISPAAQGVHYGQSVFEGLKAYKKDGEVALFRPDENFKRLNNSLARLEMPQVNEGELLEGLKQLVDLEREWVPEGEGQSLYIRPFVFATEGVLGVGASHQYKLLIILSPSGAYYGGETLKPTKIYVEDEYVRAVRGGVGFAKVAGNYAASLLAQTNANKLGYDQVLWLDGVEQKYIEEVGSMNIFFVENGKVITPELNGSILPGITRKSIIELAKNLGYEVEERRVSIDELFESYDKGELTEVFGSGTAAVISPVGTLRYEDREIVINNNETGEITQKLYDVYTGIQNGTLEDKNGWRVVVPKY

SEQ ID NO: 6978 - DNA, 885 bp, Bacillus thuringiensis
  CDS (1)..(885)
atgggatcgaaattggcatatgaaagatttgtactttggaatgatgcagttattgatacaacgaaacaaaaaacatacatagaacttgaagaaagaggcttgcagtttggagatggtgtctacgaagttattcgtctatataaagggaactttcacttattagatccgcatatcacaagattatatcgctccatggaagaaatagaattaacactccctttctcaaaagcagaactgattaccctactttataaactaatcgaaaataataatttccacgaagatggaacgatttatttgcaagtatctcgtggtgtacaagctcgtacccatacgttctcatatgacgtccctccgacaatctatgcttatattacaaagaaagaaagaccagcgttatggattgaatatggtgtacgtgctatatcagaaccggatacacgctggctacgctgtgatatcaaatcattaaatttattaccaaatatattagctgctacgaaagcggaacgaaaaggttgtaaagaagcccttttcgtacgaaatggtactgtaactgagggaagtcactctaacttctttctcattaaaaacggaactctttacacacatccagctaatcaccttattttaaatggcattattcgtcaatatgtcctttctttagcgaaaacccttcgtattccagtacaagaagagcttttcagcattcgtgatgtttatcaagcggatgaatgtttctttacaggaacgacgattgaaattttgccgatgactcaccttgatggaaccgcaatccaagatggtcaagttggccctatcactaaaatgctgcaaagatcattttctcaaagtttgttacaatccaacatgtcatcctcttaa

SEQ ID NO: 6979 - protein, 294 aa, Bacillus thuringiensis
MGSKLAYERFVLWNDAVIDTTKQKTYIELEERGLQFGDGVYEVIRLYKGNFHLLDPHITRLYRSMEEIELTLPFSKAELITLLYKLIENNNFHEDGTIYLQVSRGVQARTHTFSYDVPPTIYAYITKKERPALWIEYGVRAISEPDTRWLRCDIKSLNLLPNILAATKAERKGCKEALFVRNGTVTEGSHSNFFLIKNGTLYTHPANHLILNGIIRQYVLSLAKTLRIPVQEELFSIRDVYQADECFFTGTTIEILPMTHLDGTAIQDGQVGPITKMLQRSFSQSLLQSNMSSS

SEQ ID NO: 6980 - DNA, 876 bp, Bacillus thuringiensis
  CDS (1)..(876)
atgaaagctactcataaagattggattttatttaacggaagaattgtaaatacgaaggaagaacaaccgatgattccattagaggagagaggctttcaatttggtgatggtatatacgaggtattcagactatatgatgggaagccacatttattagatttacatttagaacgattctttcattctatggaagaaataaaattaattccaccatttactaaggaagagttggcggaagagttacatcaaatgattgaaaaaaatcaatttcaagaagatgggaatgtatatttgcaaatatcaagaggcgcccaagcacgtaatcatgtatatgagtcaaatatgcaaccaacatattttgcaaatattgtttcgtttccacgaccaattgctactatggaacaaggaataaaagttactgtagaagaggatatacgctggaagttttgtcatataaaatctttaaatctgctacctaatattatgattaaaaataaaataaacgaacaaggctatcaagaagcgatattagtgcgagatggaattgtaacggaaggttgtcattcaaatttctttatggtgaaaaataataaattgattacacatccggctgacaatttcattctacacggcattacacgtcattatgttattacattagcgaaggagttacatattgaagtagaagaaagagaattttcacttcaagaagtatatgaggccgatgagtgcttcttcacagcgacaccacttgaaatattcccagtcgttcaaattggtgacgagcagtttggaaacggagaaagagggccaattacaaagagactccaagttgcatatgaagaaagtattcgtttgtttaaagttacgaactaa

SEQ ID NO: 6981 - protein, 291 aa, Bacillus thuringiensis
MKATHKDWILFNGRIVNTKEEQPMIPLEERGFQFGDGIYEVFRLYDGKPHLLDLHLERFFHSMEEIKLIPPFTKEELAEELHQMIEKNQFQEDGNVYLQISRGAQARNHVYESNMQPTYFANIVSFPRPIATMEQGIKVTVEEDIRWKFCHIKSLNLLPNIMIKNKINEQGYQEAILVRDGIVTEGCHSNFFMVKNNKLITHPADNFILHGITRHYVITLAKELHIEVEEREFSLQEVYEADECFFTATPLEIFPVVQIGDEQFGNGERGPITKRLQVAYEESIRLFKVTN

SEQ ID NO: 6982 - DNA, 873 bp, Bacillus thuringiensis
  CDS (1)..(873)
atgttaatttacgtaaacggtcagtatgtaaaagcgagtgaagcgagaatttcgccgtatgaccacggttatttatatggtcttggagtttttgagacgtttcgtatttataatggccatcctttcttattggatgatcattatgaccgtttaatagatgcgctggatacattgcaaataaaatggacaatgacaaaagatgaagtactgcttattttgaagaatttactcattaagaataaattagagaatgcgtatgtccgttttaatgtatcggcgggtatagatgaaattggattgcaaacggaaatgtatgaagagccgtctgttattgtttttataaaacctttagcagccccaggagaggtagcggaaaaagaaggggttgttttaaaacaagttcgaaatacaccagagggtgcggctcgtttgaagtctcatcattatttaaataacattttaggaaaacgtgaaattggaaatgttgtgaataaggaaggtatttttcttactgaaacaggttatgttgcagagggtattgtttcgaatctcttttttgtgaaaggtgatattttatatacaccttctctcgaaacagggattttaaatggtatcactcgtgcgtttattataaaagttgctgaagagctaggtataaaagtaaaggaaggtttctttacaaaagatgaattactttcagctgatgaagtcttcgtaacaaactcgattcaagaaattgttccgcttaatcgtatagaggaacgggatttcccgggtaaagtaggtatggttacaaaaagatttataaatctttatgaaatgcagagagagaaattgtggagcagaaatgaattgcgaagaggagatgtgtag

SEQ ID NO: 6983 - protein, 290 aa, Bacillus thuringiensis
MLIYVNGQYVKASEARISPYDHGYLYGLGVFETFRIYNGHPFLLDDHYDRLIDALDTLQIKWTMTKDEVLLILKNLLIKNKLENAYVRFNVSAGIDEIGLQTEMYEEPSVIVFIKPLAAPGEVAEKEGVVLKQVRNTPEGAARLKSHHYLNNILGKREIGNVVNKEGIFLTETGYVAEGIVSNLFFVKGDILYTPSLETGILNGITRAFIIKVAEELGIKVKEGFFTKDELLSADEVFVTNSIQEIVPLNRIEERDFPGKVGMVTKRFINLYEMQREKLWSRNELRRGDV

SEQ ID NO: 6984 - DNA, 939 bp, Photobacterium profundum
  CDS (1)..(939)
atggcaaacacagcagattacatttggtttaatggtgaaatggttccttgggctgaggcaaatgttcacgtattaactcatgctatgcactatggtacgtcggtttttgaaggtattcgctgctataacacccctaatggccccattgtttttcgtcataaagaacacatggatcgcttaaaaaattcagcaaagatttaccgcttcccaattccatactcatctgaagaattaatggaaatttgtcgtgagacgattcgcgtcaacgaactagaatctgcttatattcgtccattaggctatgtcggtaatgtcggtctaggtgtttgcccaccggttgatactgaaatggatcttatcgtcgcggcttttccttgggggtcataccttggtgaggaagcattagaaagtggtgtcgatgccatgatttcaagctggaatcgtgcagcacccaataccattccaaccgccgccaaagcgggcggtaactacctttcatcattattagtcggtagtgaagcacgccgccacggttatgccgaaggcatcgcactgagtgttgatggttacctctctgaaggcgctggcgagaatatttttgtggttcgtaatggaatattatctacaccaccagcaacgtgtgcaatcttacctggcatcacgcgtgattcaatcatggtgctagccaaagagatgggctatgaaattcgtgaagaaaatatcgcgcgtgaagcactctacctcgcagatgaagtcttcatgacaggcactgcggcagagattgtgcctgttcgtagtgttgaccaaatctcggtaggtgaaggtaaacgcggccctatcaccaaagaaattcaagcggcttactttggtctattcaatggaacaacagaagataagtggggctggttagattacgtttaccctaaatctgacaagtaa

SEQ ID NO: 6985 - protein, 312 aa, Photobacterium profundum
MANTADYIWFNGEMVPWAEANVHVLTHAMHYGTSVFEGIRCYNTPNGPIVFRHKEHMDRLKNSAKIYRFPIPYSSEELMEICRETIRVNELESAYIRPLGYVGNVGLGVCPPVDTEMDLIVAAFPWGSYLGEEALESGVDAMISSWNRAAPNTIPTAAKAGGNYLSSLLVGSEARRHGYAEGIALSVDGYLSEGAGENIFVVRNGILSTPPATCAILPGITRDSIMVLAKEMGYEIREENIAREALYLADEVFMTGTAAEIVPVRSVDQISVGEGKRGPITKEIQAAYFGLFNGTTEDKWGWLDYVYPKSDK

SEQ ID NO: 6986 - DNA, 864 bp, Methanococcus maripaludis
  CDS (1)..(864)
atgaaaatttatctcgatggaaacttcgtagagaaagaagatgcgaaagtatccgtatatgaccacgggttgctttatggtgacggggtttttgaaggaattagggcatatgatggagtagtatttaaattagaagagcatattgaacgtttatatgattcagcagactctatcgctatgaaaatccctgcttcaaaagtagaaatggaagaaattgttattgaaactttaaaatcaaacaacttaaaagacgcatacataagacttgtagttacaaggggagttggggatttaggacttgatccaagaaaatgtccaaaagcaacgattttctgtattgcagagaatatgaaaccacttcttggagaagatggaataaaggttataacctcatcaataagaagactgcctgtggatgttttaaatcctgctgtaaaatctttaaattatttaaacagtattttagcaaaaattcaggccaattacgcgggagtagacgaagcttttttactcgacagtgaaggatacgtcgcagaaggaactggtgacaatgtatttgttattaaaaatggtaaaataaaaacaccccctctttcatcaagtgttttaaagggaattacaagagacactgttgtagatcttgcaaaagaagcaggttatacaattatagaggaaaaaatgacgttacacgatttatttgttgcagatgagatatttatcacgggaaccgcggcagaattaatccatgttgttgaaatcgatggaagaataattaacaacggaaaattaggccctgttacaaaagatttaagcgatagattcaaagaaataaggtctaaaatcggtaaaaaatatatcgagtaa

SEQ ID NO: 6987 - protein, 287 aa, Methanococcus maripaludis
MKIYLDGNFVEKEDAKVSVYDHGLLYGDGVFEGIRAYDGVVFKLEEHIERLYDSADSIAMKIPASKVEMEEIVIETLKSNNLKDAYIRLVVTRGVGDLGLDPRKCPKATIFCIAENMKPLLGEDGIKVITSSIRRLPVDVLNPAVKSLNYLNSILAKIQANYAGVDEAFLLDSEGYVAEGTGDNVFVIKNGKIKTPPLSSSVLKGITRDTVVDLAKEAGYTIIEEKMTLHDLFVADEIFITGTAAELIHVVEIDGRIINNGKLGPVTKDLSDRFKEIRSKIGKKYIE

SEQ ID NO: 6988 - DNA, 975 bp, Bdellovibrio bacteriovorus
  CDS (1)..(975)
atgaatctacccattctttcttctgcggatgttcaggcccaacttttaaagcgacaataccaggctcaaggcagctatctggcgatgtacagcagctggtatggcggggtgattaaagacccggggctgatgatggtgccggtggatgatcaccttgtgcaccgcggggatggtgtctttgaggcgatcaaagtcgtggatggtcaggtgtttttgatgcaagagcatctggagcgtctgcagtcttccgcccagcagatcggtatcagtctgccgcacagcctggaagacatgaaaaagattattctcgaaaccacgcgcattgccggcgcgccttatgcagttttgcgcctgtatatttcccgtggtccggggtattttacgacaaatccttacgattccatcagctcgcagatgtatttgattgtgacttcgtttacgccgttaacagatgaaaagtacttgaagggcgtgaaggtcgggcgcagtcagattgttcccaaagacccgtggctggctcggattaagacctgcaattatttgccgaacgtaatgatgaaaaaagaaagtgtggaccgcaagatcgacttcaccatcggcattgatccgcaagggttcatcacggaaggcagcacggaaaacatcgttctgattgataaagacaaaaacctgcttcgcccaaaactgcgccaaattctgaaaggcacaaccatgatgcgcacctttgatctggctgaaagcctgttggcgtcgggggagttaaagtccatccaggaaaaggatctgaccgagcaggatattctcagcgcatctgaagccatgatgatcggaacaactttggatgtgttgccagtgaccgaatacgaaggtcagcagattggcgagggcaaacaaggagcgctcgcgtttaagcttttgcagctgctccgcgaggatatgaaaaaggggccgaaaacgacccctgtaaagttctaa

SEQ ID NO: 6989 - protein, 324 aa, Bdellovibrio bacteriovorus
MNLPILSSADVQAQLLKRQYQAQGSYLAMYSSWYGGVIKDPGLMMVPVDDHLVHRGDGVFEAIKVVDGQVFLMQEHLERLQSSAQQIGISLPHSLEDMKKIILETTRIAGAPYAVLRLYISRGPGYFTTNPYDSISSQMYLIVTSFTPLTDEKYLKGVKVGRSQIVPKDPWLARIKTCNYLPNVMMKKESVDRKIDFTIGIDPQGFITEGSTENIVLIDKDKNLLRPKLRQILKGTTMMRTFDLAESLLASGELKSIQEKDLTEQDILSASEAMMIGTTLDVLPVTEYEGQQIGEGKQGALAFKLLQLLREDMKKGPKTTPVKF

SEQ ID NO: 6990 - DNA, 1068 bp, Bdellovibrio bacteriovorus
  CDS (1)..(1068)
atgaccacaattacgaagaatctaaccaacactccgaaagcccttccaccctctgatcagcttggattcgggcagcatttttctgaccacatgtttgtggctaaatacactgaaggcaagggctggtctgaagccagcgtcgtcccttatgggccgctttctttggatcccggggcttcggtgtttcattatggtcaggctttgtttgaaggcatgaaggccttccgcaaagaaagcggcgaagtggtcttcttccgtcctgagttcaattatcaccgtttggctgaaggcgctgctcgtttgtgcctggaagctccgccaatggaccttttcatggaaggtctgcaccaggtggtggcggctgatgagcgctggattccaaaagggccgaacacgtctttgtatatccgtccgaccttgattgggtctgagccgttcctgggggttcgtccttcccgtgaaacgttgttctttattctgttgtctccggtgggttcttattattctgaaggcacaaaaccaatcaagatttggaccgaggaaaagtacctccgtgcagctccagggggcctgggtgcggtgaaggccggggcgaactatgcctcgagtttaaaggcggccttggaagccaagaagaagggctatgcccaagttctgtggctggatgtcgagcaccagggtattgaggaggtcggcacaatgaacgtgttcttcgtcttcgataatgaaatcgtcacgccggcattgaatggcagcattctttctggtggcacccgcgatgcgattctgcagttgttgcgctctaaaaatctgccagtggtggaaagacgtatcacgatcacggaagtggtggatcgtctggcaaaaggtgaattgaaagaagctttcggcacgggtacggcggcggtgatttccccagtgggtgttttgcactatcaggggaaagactggacaatcaacaacaacgaaaacggacctctgagcacacagttgtacaacgagataacggcgatccagcgtggcgctcaagccgataccttgaactggcttgttcctttgaagaagtaa

SEQ ID NO: 6991 - protein, 355 aa, Bdellovibrio bacteriovorus
MTTITKNLTNTPKALPPSDQLGFGQHFSDHMFVAKYTEGKGWSEASVVPYGPLSLDPGASVFHYGQALFEGMKAFRKESGEVVFFRPEFNYHRLAEGAARLCLEAPPMDLFMEGLHQVVAADERWIPKGPNTSLYIRPTLIGSEPFLGVRPSRETLFFILLSPVGSYYSEGTKPIKIWTEEKYLRAAPGGLGAVKAGANYASSLKAALEAKKKGYAQVLWLDVEHQGIEEVGTMNVFFVFDNEIVTPALNGSILSGGTRDAILQLLRSKNLPVVERRITITEVVDRLAKGELKEAFGTGTAAVISPVGVLHYQGKDWTINNNENGPLSTQLYNEITAIQRGAQADTLNWLVPLKK

SEQ ID NO: 6992 - DNA, 885 bp, Rhodopseudomonas palustris
  CDS (1)..(885)
atggatccgacgacgatgcccgctcctgcaccgatcaactactcccagacctggaccttcttcgagggcgagtggcatgacggcaacgtgccgatcatggggcctcgcacgcacgcagcgtggctcggctccatggtgttcgacggcgcgcgcgcattcgagggcgtgacgccggatctcgaccaacatttggcgcggatcaactggtcggcgaccaacttcaagctcaacgcactggtggacaaggcgacttggcttggcttggtacaggacggcctgaagcgattcgccggcaatgccgagctttacatccggccgatgtattgggcgcaaaacggcgttggcggcggcgtgctgttcgatccggacaccaccaattggtgcctgtgcatctatgaagcgccgatgccgaagccgaccggcctgtcgattacgctgtcgccgttccgccgcccgaccgccgaatgtgcgccggtggaagccaaagccggatgcctgtacccgaacaattcacgggccatgatggaagccaagagtcgcggcttcgacaactgcctgctgcgcgacatgctcgggcatatcgccgagctcggcaactccaatatcttcatggctaaagacggcgtggtctatacgccggcggccaacggcaccttcctgagcggcatcacccggcagcgggtgatcgagctgctgcgcggcgatggcatcaccgtgctcgaaacttcgctgagttatcgcgactttgagaccgccgacgagatcttcgccagcggcaatttcgccaaggtgcagccgatcatccggatcgacgaccgctcgctgcagccgggcccgttctacgccaaggcgcgcaagctgtattgggagttcgcacacggctga

SEQ ID NO: 6993 - protein, 294 aa, Rhodopseudomonas palustris
MDPTTMPAPAPINYSQTWTFFEGEWHDGNVPIMGPRTHAAWLGSMVFDGARAFEGVTPDLDQHLARINWSATNFKLNALVDKATWLGLVQDGLKRFAGNAELYIRPMYWAQNGVGGGVLFDPDTTNWCLCIYEAPMPKPTGLSITLSPFRRPTAECAPVEAKAGCLYPNNSRAMMEAKSRGFDNCLLRDMLGHIAELGNSNIFMAKDGVVYTPAANGTFLSGITRQRVIELLRGDGITVLETSLSYRDFETADEIFASGNFAKVQPIIRIDDRSLQPGPFYAKARKLYWEFAHG

SEQ ID NO: 6994 - DNA, 1113 bp, Rhodopseudomonas palustris
  CDS (1)..(1113)
atgggagtttcgttcgacaagatggacggctcgctctggctggatttcgacgtgcagcctaccgccagcccgacgccggacgccgatcgcgccgccaagctggaaaatccgggcttcggccgggtgtttaccgaccacatggccgtggtccgctatgaccagaccaatggctggcacgctgcgcgcgtcgaggctcgtgccaatttcccgctgcacaccgcgaccgccgtgctgcactacgcgcaggaaatcttcgagggcctgaaggcttacaagcgcgaggacggcggcgtgaacctgttccgccccgacgccaacgccaagcgcttccgcgactcggccgaccgcatggcgatggcgccgcttccggaagcggtgttcatcgaagcggtcgagcaggtcgtcaagatcgaccgcaactggattccgggcggcgaaggcagcctgtatctgcgcccgttcatgatcgccagcgaagtgttcctcggcgtcaagccgtcggcggaatacatcttcgcggtgatcgcctcgccggtcggctcgtacttcaagggcggcccggccccggtctcgatctgggtgtcggaaacctacacccgcgcggcgatcggcggcaccggcggcgtcaaatgcggcggcaactacgcggcgtcgttgcgcgcgcaggccgaggcgatcgagcgcggctgcgatcaggtggtgttcctcgacgcgatcgagcgccgctacgtcgaagagctcggcggcatgaacgtgttcttcgtgttcgaagacggttcgctgtcgacgccgccgctcggcaccatcctgcccggcatcacccgcgactcgatcatcgcgctggcccgcgaggccggccgcaaggtgcgcgaggaggcttacaccatcgatcagtggcgtgccgatgcggccagcggcaagctcaaggaagcgttcgcctgcggcaccgccgcggtgatctcgccgatcggcaaggtgtgctcgaaccacggcgacttcgtcatcaacggcggccaagccggcgaagtggcgatgggcctgcgcaagcagctcgtcgacatccaatacggccgcgccgccgacacccacggctggatcaagaaggtgttctga

SEQ ID NO: 6995 - protein, 370 aa, Rhodopseudomonas palustris
MGVSFDKMDGSLWLDFDVQPTASPTPDADRAAKLENPGFGRVFTDHMAVVRYDQTNGWHAARVEARANFPLHTATAVLHYAQEIFEGLKAYKREDGGVNLFRPDANAKRFRDSADRMAMAPLPEAVFIEAVEQVVKIDRNWIPGGEGSLYLRPFMIASEVFLGVKPSAEYIFAVIASPVGSYFKGGPAPVSIWVSETYTRAAIGGTGGVKCGGNYAASLRAQAEAIERGCDQVVFLDAIERRYVEELGGMNVFFVFEDGSLSTPPLGTILPGITRDSIIALAREAGRKVREEAYTIDQWRADAASGKLKEAFACGTAAVISPIGKVCSNHGDFVINGGQAGEVAMGLRKQLVDIQYGRAADTHGWIKKVF

SEQ ID NO: 6996 - DNA, 1116 bp, Corynebacterium diphtheriae
  CDS (1)..(1116)
atgaagtccatgagctctattacgtttaagaaaatcgatcatccgaacccaactccagcagacaaagtacaagaaattgttgccaaccccggctttggcaagtatttcaccgaccacatggtcactatcgattggaacgaaactgaaggctggcacaatgcacaggtacagccatatgcgccagtgtccttggaccctgctgcctcggtgttccactacggacaagcaattttcgaaggcctgaaagcctaccgccatgccgatggcaccatccgtaccttccgtccggaagcaaatgcggcgcgtttccagcgctccgctcagcgtttggctatgccagagcttcctatcgaggtctttatcgagtcaatccagcagcttgtctcagtagaccacgactgggttccagcagccggtggtgaggaatcgctctatctgcgcccattcatgatcgctaccgagaccacgttgggtgttcattcctcgaagtcttaccgctattttgttattgcttcgccagccggtgcctatttctctggtggcatcaagcctgtgtccgtatggctgtctgaagattacgttcgtgcagctcctggtggtactggtgcggctaagttcgcaggtaactacgcagcatcgctcatcgcacaaacccaggcagcagaaaaaggctgcgatcaggttgtatggctcgatgcaatcgagcacaactacatcgaagagatgggcggaatgaacctcttcttcgtcatgggcaaaggggatcaggctcacgtgattaccccgaagctgtccggttcactgcttcctggtgttacccgtgattctttgcttcaggttgctcgcgatcttggctacaccactgaagaacgcttggtgtctaagggcgagtgggaagaaaccgctacgagcggagctatgagcgaagcatttgcttgcggtactgcggccgtgattaccccagttggatctgtgaagtccacccatggtgagttcttggtaaacaacaacgaggcaggttcgatcaccatgcagcttcgtgaggcacttactggaatccagcgcggcagcgttgctgatactcacggatggatgcacactctcgtagaggcgtag

SEQ ID NO: 6997 - protein, 371 aa, Corynebacterium diphtheriae
MKSMSSITFKKIDHPNPTPADKVQEIVANPGFGKYFTDHMVTIDWNETEGWHNAQVQPYAPVSLDPAASVFHYGQAIFEGLKAYRHADGTIRTFRPEANAARFQRSAQRLAMPELPIEVFIESIQQLVSVDHDWVPAAGGEESLYLRPFMIATETTLGVHSSKSYRYFVIASPAGAYFSGGIKPVSVWLSEDYVRAAPGGTGAAKFAGNYAASLIAQTQAAEKGCDQVVWLDAIEHNYIEEMGGMNLFFVMGKGDQAHVITPKLSGSLLPGVTRDSLLQVARDLGYTTEERLVSKGEWEETATSGAMSEAFACGTAAVITPVGSVKSTHGEFLVNNNEAGSITMQLREALTGIQRGSVADTHGWMHTLVEA

SEQ ID NO: 6998 - DNA, 2014 bp, Brachydanio rerio
  CDS (20)..(1177)
cagacggcgcacattcatcatggcgagcgttgcatcagccacgagcgcaccatcatctcacaaggaaaacggcatggctgacagtgcctctagctttaaggctgcagacacagtgatacagttagcacaaacccataagccaaaacctgacccaaatggcctggtgtttgggtcagtcttcactgaccacatgttgaccattaagtggagtcttcaagaaggttggcagaagccacacatccagccttttgggaacctgtccatgcatccaggctgttctgccctgcattacgctatacagctttttgagggtatgaaggcatatcgggggccggacaacaaagtgcgtctcttcagacccatgttgaacatgaagcggatgttgaagtctgctcatcgggcctgtctgcctagttttgattgtgctgagttgatggagtgcatcaagaagttagtggacttggatcaggactgggttcctcactcagactctgccagtctctacattcgtcccacattactgggcacagaacccaccctcggtgtgaagaagccctccagtgcattgctgtttgtcattctcagtcctgtgggctcgtacttcagcacaggagctaaaccagtgtctctgtgggccgactccaaatacattagagcctggagaggaggaacaggagactgcaagatgggagggaactatggctcatctatctatgcccagtacgaggcggtggattttggctgtcaacaggttttgtggctttacggggatgatcatcagatcacagaggtcggcactatgaaccttttcctctactggatcaatgagaaaggagaggaggagcttgcaacaccacctctagatggtattattctgccaggtgttacacggcaaagcatcttagaacttgctcgccaatggagtgggtttaaagtgtcggagcgatatctgaccatgtctgacctgcggcgagctctggaggagaaccgagtaaaagagatgtttggttctggaacagcttgtgttgtcagtccagtcggcaggatcttatatcagggagaaaatctgcatattccatgcgagggaagctttcctccacttgcctccagactactaaaggagctcacagatattcagtatggacgaaccccaagtgactggtcttgcatcatataaaggatcctcactatcaccaacataaacaagttctccaaaaaagctttatttgtggcttcatggaaaaatgatcccgccacatttaagtatgttttgtttttatacgaagtttaccaactaactaaaacctagagtagcaataatgtgttgttcttttccgaacataaccacccagatgcctcttcattgtcacattttctcaaatattttaaaatataaccagattatcacagttcatcaccagctgtttcatgaacactaccagagatatctgaaatatttcctcagtgtatagtttgtttcaacgttcagtggaactataaatgcacttcattgttgataatatgaaaaaatgcagctaatgtcatattgcacaagctcttgaaacttctgaaagacatttatagatatttaagatagtttgttttttgccgtagagctttattttttaaagaatcgtaactgtttcaaacaattaacatttgaagaatactaactgataatagtgaataggtgttgttgttgctgctgttgtttttgaaatgctgccattccaagcacacaaagagggagaggggttatttaatagagatcatttttgcacccaacgggaaccattattgttattgtttgtaggtgtttgtatgatcgaacaaactgatccctgtgtacacctttgttgatataggaataagattttaacagttatgaaagcacaaagacatgaaatgatagagatttgtgtaacaatttagatactgtttattgcaaagatctgggtattttgtaaatgtgataacaggaataaaacagatgcaaaaaaaaaaaaaaaaaaaa

SEQ ID NO: 6999 - protein, 385 aa, Brachydanio rerio
MASVASATSAPSSHKENGMADSASSFKAADTVIQLAQTHKPKPDPNGLVFGSVFTDHMLTIKWSLQEGWQKPHIQPFGNLSMHPGCSALHYAIQLFEGMKAYRGPDNKVRLFRPMLNMKRMLKSAHRACLPSFDCAELMECIKKLVDLDQDWVPHSDSASLYIRPTLLGTEPTLGVKKPSSALLFVILSPVGSYFSTGAKPVSLWADSKYIRAWRGGTGDCKMGGNYGSSIYAQYEAVDFGCQQVLWLYGDDHQITEVGTMNLFLYWINEKGEEELATPPLDGIILPGVTRQSILELARQWSGFKVSERYLTMSDLRRALEENRVKEMFGSGTACVVSPVGRILYQGENLHIPCEGSFPPLASRLLKELTDIQYGRTPSDWSCII

SEQ ID NO: 7000 - DNA, 915 bp, uncultured crenarchaeote
  CDS (1)..(915)
atgaataataaaggcaaaatatggatggatggagagttcgttgagtggaataacgcgaaaattcacatcttgacacatgcgatgcattatggcactgcagtgtttgaagggatccgctgctatgatacgaaaaacggccctgctatctttcgattgaaagaccacgtcaggagacttgctaatagttgtaaaatgtatcatatgactatacaattttctgagaaagatcttgcagatgcgatcgttcagactgtcagagttaataatgtcaaggaatgctacatacgacctttatgctactatggatatggaaaaatgggagtcaatcctttacctaacaaagtatcagcatctattgccctgtgggattgggaggaccatataaaaactgaagaaaacaagggcatgagagttattgtttcttcgtggaccaggatagattcaagaagcttacctatgcatgcaaaggccacagcaaattatgcaaattccgctttggctagaattgaggctataaaatcaggggctgacgaagccatcatgctgaatatgagtggaatggtggtggaaggaaccgctgaaaatatttttttggtaagagacaacaccctcatcacaccgcctctttcatcaggcgcattggacggcataacccgctcaacggtactatctattgcacaggacttgggtgtcagatctcaaatttgcgacattacacgggatgaaatgtattatgcagatgaggtattcttgactggtacagctgctggaattaagtcaatcggagaaatcgataaaataataattgccaatggaaaggtcggaaaaattgctgcacaattacaagacagttactatcaaatagtacatggcgaaattgcaaaatttgacaaatggctcacgtacgtcaattga

SEQ ID NO: 7001 - protein, 304 aa, uncultured crenarchaeote
MNNKGKIWMDGEFVEWNNAKIHILTHAMHYGTAVFEGIRCYDTKNGPAIFRLKDHVRRLANSCKMYHMTIQFSEKDLADAIVQTVRVNNVKECYIRPLCYYGYGKMGVNPLPNKVSASIALWDWEDHIKTEENKGMRVIVSSWTRIDSRSLPMHAKATANYANSALARIEAIKSGADEAIMLNMSGMVVEGTAENIFLVRDNTLITPPLSSGALDGITRSTVLSIAQDLGVRSQICDITRDEMYYADEVFLTGTAAGIKSIGEIDKIIIANGKVGKIAAQLQDSYYQIVHGEIAKFDKWLTYVN

SEQ ID NO: 7002 - DNA, 1194 bp, Hordeum vulgare
  CDS (1)..(1194)
atggctgtgctgtcttctgcgaagcgcgtcctcccgtgcgcctcggccggcggggtcagcggcggcctccgagctctactcgggacggacggaggcggccgctctcttctcccgtcccggtggaagtcgtcgctgccgcagctggaccccgtcgacaggtccgacgaggagagcggcggcgacatcgactgggacaacctcggcttcgggctcacccggacggactacatgtacgtcatgcggtgctcgcgggaggagggcggcttctcccgcggcgagctcgcccgctacggcaacatcgagctcagcccctcctccggcgtcctcaactacggccaggggctgttcgaggggctgaaggcgtacaggcggtcggacggggccgggtacatgctgttccggccggaggagaacgcgcggcggatgcagcacggcgcgggccgcatgtgcatgccgtccccgtctgtcgagcagttcgtgcacgccgtcaagcagaccgtcctcgccaacaggcgctgggtgccgccgcaaggcaagggagcgctgtacatcaggccgctgctcatcgggagcggggcgatcctcgggctggcgccggcccccgagtacaccttcatgatctacgccgcgcctgtggggacatatttcaaggaaggcatggcggcgataaacctgctggtcgaggaggagatccaccgcgcgatgccgggcggcaccggcggggtcaagaccatctccaactacgcgccggtgctcaagccgcagatggacgcgaaaagcaaggggttcgcggacgtgctgtacctggacgcggtccacaagaggtacgtcgaggaggcctcctcctgcaacctcttcgtcgtcaagggcggcgccgtcgcgacgccggcgacgacggcagggaccatcctgccgggtgtcacgcgcaggagcatcatcgagctcgccagggatgacggctaccaggtcgaagagcgcctcgtctccatcgacgatctcgtcggcgcagacgaagtgttctgcacgggaacggccgtcggcgtcaccccggtgtcgaccatcacctaccaagggacaaggcacgagttcaggactggggaagacacgttgtcgaggaaattgtacacgactctcacatcgatccagatggggctggcagaggacaagaaaggatggacggtagcgattgattga

SEQ ID NO: 7003 - protein, 397 aa, Hordeum vulgare
MAVLSSAKRVLPCASAGGVSGGLRALLGTDGGGRSLLPSRWKSSLPQLDPVDRSDEESGGDIDWDNLGFGLTRTDYMYVMRCSREEGGFSRGELARYGNIELSPSSGVLNYGQGLFEGLKAYRRSDGAGYMLFRPEENARRMQHGAGRMCMPSPSVEQFVHAVKQTVLANRRWVPPQGKGALYIRPLLIGSGAILGLAPAPEYTFMIYAAPVGTYFKEGMAAINLLVEEEIHRAMPGGTGGVKTISNYAPVLKPQMDAKSKGFADVLYLDAVHKRYVEEASSCNLFVVKGGAVATPATTAGTILPGVTRRSIIELARDDGYQVEERLVSIDDLVGADEVFCTGTAVGVTPVSTITYQGTRHEFRTGEDTLSRKLYTTLTSIQMGLAEDKKGWTVAID

SEQ ID NO: 7004 - DNA, 870 bp, Listeria monocytogenes
  CDS (1)..(870)
atgaaagtattagtaaataaccatttagtggaaagagaagatgccacagttgacattgaagaccgcggatatcagtttggtgatggtgtatatgaagtagttcgtctatataatggaaaattcttcacttataatgaacacattgatcgtttatatgcgagtgcagcaaaaattgacttagttattccttattcgaaagaagagttacgagcgttacttgaaaaattagttgctgaaaataatattaatacaggaaatgtctatttacaagtgactcgaggtgttcaaaacccgcgtaatcacgttatgccagatgatttcccgctggaaggcgttttaacagcagcagctcgtgaagtaccaagaaatgaacaacaatttgtgcaaggtggaccagtaattacagaagaagatgttcgttggttacgctgtgacatcaagagtttgaatttacttggaaacattttagcaaaaaacaaagcacatcaacaaaatgcgttagaagctgttttacaccgcggagagcaagtaactgagtgttcagcttccaatatttctattattaaagacggtgtgttatggactcacgcggcagataatttaatcttaaatggtattactcgtcaagtaattattgctgttgcgaaaaagaatggtattccggtcaaagaagctgattttactttaacagatcttcgtgaagccgatgaagtattcatttcaagcacaacaatcgaaattaccccagttacccatatcgacggagtgcaagtagctgacggaaaacgcggacctattaccgcaaaacttcatcaatattttgtagaagaaatcgttcaagcatgtggcgaattagaatttgcaaaataa

SEQ ID NO: 7005 - protein, 289 aa, Listeria monocytogenes
MKVLVNNHLVEREDATVDIEDRGYQFGDGVYEVVRLYNGKFFTYNEHIDRLYASAAKIDLVIPYSKEELRALLEKLVAENNINTGNVYLQVTRGVQNPRNHVMPDDFPLEGVLTAAAREVPRNEQQFVQGGPVITEEDVRWLRCDIKSLNLLGNILAKNKAHQQNALEAVLHRGEQVTECSASNISIIKDGVLWTHAADNLILNGITRQVIIAVAKKNGIPVKEADFTLTDLREADEVFISSTTIEITPVTHIDGVQVADGKRGPITAKLHQYFVEEIVQACGELEFAK

SEQ ID NO: 7006 - DNA, 1020 bp, Listeria monocytogenes
  CDS (1)..(1020)
atgagtaaagatattgactggagtaatttaggatttagttatattaaaacggataagcgttacatttcttattggaaagacggggaatgggatgaaggtacgctaacagaagataatacgctacatattagtgagggttcaacagcgcttcattacggacaacaatgttttgaaggtttaaaagcatatcgttgtaaggacggttcaattaatcttttccgcccagatcggaatgctgctcgtattcaaaaaagctgtgagcgtttattaatgcctcacatcccaactgaaaaatttattgatgctgttatgcaagttgttcgtgccaatgaagaatttgtaccgccgtatggaacaggtgcaacactttatttacgtccatttgttattggtgtaggtgacaatattggtgttcatgcagccccagagtatattttctctgttttctgttcaccagtcggcccttacttcaaaggtggaatggcgccaactaactttattgtttccgattttgaccgtgctgctccaaatggtacgggtgccgcaaaagtaggcggaaactatgctgcaagtttacttccaggccaggctgcaaaagaacgcaattttggtgattgtatttatttagatccagctactcatacaaaaatagaagaagttggttctgctaatttctttggtattacaaaagatgataaatttgttacgccgtattctccttctattttgccaagtatcacgaagtattcgttactttatttggcagagcatcgtctaggtttagaagcattagaaggtgatgtatatattgataaattagatgagtttaaagaagctggagcatgtggaacggcagcggttattacaccaattggtggtattcaaaccaaagatgatttccatgtattccatagtgaaacagaagtggggccagtaacgaagcgtttattcgatgaactatgtggcattcaatttggagatgtagaagctccagaaggttggatttataaagtgaaataa

SEQ ID NO: 7007 - protein, 339 aa, Listeria monocytogenes
MSKDIDWSNLGFSYIKTDKRYISYWKDGEWDEGTLTEDNTLHISEGSTALHYGQQCFEGLKAYRCKDGSINLFRPDRNAARIQKSCERLLMPHIPTEKFIDAVMQVVRANEEFVPPYGTGATLYLRPFVIGVGDNIGVHAAPEYIFSVFCSPVGPYFKGGMAPTNFIVSDFDRAAPNGTGAAKVGGNYAASLLPGQAAKERNFGDCIYLDPATHTKIEEVGSANFFGITKDDKFVTPYSPSILPSITKYSLLYLAEHRLGLEALEGDVYIDKLDEFKEAGACGTAAVITPIGGIQTKDDFHVFHSETEVGPVTKRLFDELCGIQFGDVEAPEGWIYKVK

SEQ ID NO: 7008 - DNA, 930 bp, Desulfovibrio vulgaris
  CDS (1)..(930)
atgagcatggtccagaaatcggaaaccatctggttcgacggcaagcaggttccgtgggatgaggccaacgtgcatgtgctcacccacgccctgcactacggcgtgggtgtcttcgaaggcattcgcgcctaccgttgcgccgatggttcttcggccgtcttccgtctgcgcgaacacgtgcagcgcctgttctcgtcggccaagatcctgcgcatggagattcccttcaccgaagacgccatcttcgacgccatcgtggagacgctgcaacgcaacaggctcgccgaaggctacatccgtcccctttcgttcgtcggcgcaggggccatgggcgtctaccccggcgacaaccccgttcagaccatcatcgccgtatggccttggggtgcgtacctcggtgccgaggccctcgaaaagggcatccgcgtcaagaccagttcgttcgcccgccaccacgtcaatgccatgatgaccaaggccaaggcctcgggcaactatgtcaactcggtgctggccaagatggaggccaaggcggacggctacgacgaggccctgatgctggacgtgagcggcttcgtctccgaagccacgggcgagaacatcttcatggtccgcaacggcgtcatcaagaccacgccgctgacctccatcctcgacggcatcacccgcaacagcctcatgacgctggcacgcgacctcggctacgaagtggtcgaacagcagttcacccgcgacgaactctatgtcgccgacgaagcgttcttctgcggtaccgccgccgaggtgacgcccatccgcgaagtcgaccgccgcgtcatcggcaagggaagtgccgggcctgtcaccaagcatctccagcaggaatatttcaaggccgtcaagggcgacaaccccagctacgaccactggctgcaccgctacgcgctgtag

SEQ ID NO: 7009 - protein, 309 aa, Desulfovibrio vulgaris
MSMVQKSETIWFDGKQVPWDEANVHVLTHALHYGVGVFEGIRAYRCADGSSAVFRLREHVQRLFSSAKILRMEIPFTEDAIFDAIVETLQRNRLAEGYIRPLSFVGAGAMGVYPGDNPVQTIIAVWPWGAYLGAEALEKGIRVKTSSFARHHVNAMMTKAKASGNYVNSVLAKMEAKADGYDEALMLDVSGFVSEATGENIFMVRNGVIKTTPLTSILDGITRNSLMTLARDLGYEVVEQQFTRDELYVADEAFFCGTAAEVTPIREVDRRVIGKGSAGPVTKHLQQEYFKAVKGDNPSYDHWLHRYAL

SEQ ID NO: 7010 - DNA, 957 bp, Thermus thermophilus
  CDS (1)..(957)
atgaccaaggctgaggccaagggcggcgacgtgcagatcaaggccgggctcatctggatgaacggggcctttgtcccccaggaggaggccaagaccagcgtcctaagccacgccctccactacggcaccagcgtctttgaggggataagggcctacgagacccccaaaggccccgccgtcttccggctcaaggagcacgtgcggcgcttctacaactcggccaaggtgctccgcatggagatccccttcgccccggaggagctggaggaggccatcaaggaggtggtgcggagaaacggctacaggagctgctacatccgccctctggcctggatgggggcgaaggccctaggggtcaatcccctgcccaacaaccccgccgaggtgatggtggccgcctgggaatggggggcctacctgggggaggaggcggtgcgcaagggggccaggctcatcaccagctcctgggcccgcttccccgcgaacgtgatgcccggcaaggccaaggtgggcggcaactacgtgaactcggccctcgccaagatggaggcggtggccgccggggccgacgaggccctcctcctggacgaggaggggtacgtggccgaggggagcggggagaacctcttcttcgtgcgggacggggtgatctacgccctggagcactcggtgaacctcgagggcatcacccgcgactcggtgatccgcatcgccaaggacctcggctacgaggtccaggtggtgcgggccacccgcgaccagctctacatggcggacgaggtcttcatgaccgggaccgccgccgaggtgaccccggtgtccatgattgactggaggcccatcgggaagggcacggccgggcccgtggccttgaggctccgggaggtctacctcgaggccgtcaccgggcggcggccggagtacgagggctggctcacgtacgtgaatgggcaatag

SEQ ID NO: 7011 - protein, 318 aa, Thermus thermophilus
MTKAEAKGGDVQIKAGLIWMNGAFVPQEEAKTSVLSHALHYGTSVFEGIRAYETPKGPAVFRLKEHVRRFYNSAKVLRMEIPFAPEELEEAIKEVVRRNGYRSCYIRPLAWMGAKALGVNPLPNNPAEVMVAAWEWGAYLGEEAVRKGARLITSSWARFPANVMPGKAKVGGNYVNSALAKMEAVAAGADEALLLDEEGYVAEGSGENLFFVRDGVIYALEHSVNLEGITRDSVIRIAKDLGYEVQVVRATRDQLYMADEVFMTGTAAEVTPVSMIDWRPIGKGTAGPVALRLREVYLEAVTGRRPEYEGWLTYVNGQ

SEQ ID NO: 7012 - DNA, 957 bp, Leptospira interrogans
  CDS (1)..(957)
atggaattatatcacttatcaggttcctgttctatggcagaatccatcaagaaactatcctatttcgaaggaaaaatcgttcccgagtccgaagcgaaaattagcattcaaactcatgcgcttcaatatggaacaaccgtctttggtgggcttcgcggctactacgataaagacacggataatatttatctttttcgtatcttagatcattatcaaagattaatcaactcaactcgaatcatgcagttgaagttagataagataaaagaagagttgagagacataacgattgatttgatccgccagtgtggctacaaagaaaatatttatcttcgtcccttcgtttatacatcggcactgcagctttcacctcgttttcatgatgttccgacacaactcgcgatctacattcttcagttgaacgactacttagatacaaaacgaggattaaaaacgatggtatctagttggagaagatttgacgacgcagtaatcccaactctttccaaagtatccggaggatatgtaaattcagctcttgcaaaatcggaagcagttcaaaatggatttgatgaagcaatttttttagattcgagaggatttgtaagcgaaggttctgctgaaaatatttttttagttcgagatggaaagatcattacacccggaatcaactcctctttattagaaggaattactcgaagaagtgtacttcaaatcgcaaaagataatgggatcgaagtaatcgaaagagatatatccagaagcgaactttatattgctgacgaagttttcttttctggaactggggttcaaattgcttgggtttcagaaatcgatcatagaaaaatcggaaattcagctattggcccaattactcaaaagattcaaaacttattttttaatctagtgattaacaaagaagaaaaatacagacattggttaactccagtatattag

SEQ ID NO: 7013 - protein, 318 aa, Leptospira interrogans
MELYHLSGSCSMAESIKKLSYFEGKIVPESEAKISIQTHALQYGTTVFGGLRGYYDKDTDNIYLFRILDHYQRLINSTRIMQLKLDKIKEELRDITIDLIRQCGYKENIYLRPFVYTSALQLSPRFHDVPTQLAIYILQLNDYLDTKRGLKTMVSSWRRFDDAVIPTLSKVSGGYVNSALAKSEAVQNGFDEAIFLDSRGFVSEGSAENIFLVRDGKIITPGINSSLLEGITRRSVLQIAKDNGIEVIERDISRSELYIADEVFFSGTGVQIAWVSEIDHRKIGNSAIGPITQKIQNLFFNLVINKEEKYRHWLTPVY

SEQ ID NO: 7014 - DNA, 873 bp, Bacillus cereus
  CDS (1)..(873)
atggcatatgaaagatttgtactttggaatgatacagttattgatacaacgaaacagaaaacgtacatagaccttgaagagagaggcttgcagtttggggatggtgtctacgaggttattcgtctatataaagggaactttcacttattagatccgcatatcacaagattatatcgctccatggaagaaatagaattaacactccctttctcaaaagcggaactgattaccctactttataaactaatcgaaaataataatttccacgaagatggaacgatttatttacaagtatctcgtggtgtacaagctcgtacccatacgttctcatatgacgtccctccaacaatctatgcctatattacaaagaaagaaagaccagcgttatggattgaatatggtgtacgtgccatatcagaaccggatacgcgctggctacgctgtgatattaaatcattaaatttattaccgaatatattagctactacgaaagcggaacgaaaaggttgtaaagaggcccttttcgtacgaaatggtactgtaactgagggaagccactctaacttctttctaattaaaaacggaactctttacacacatccagctaatcaccttattttaaatggcattattcgtcaatatgttctttctttagcgaaaacccttcgtattccagtacaagaagagcttttcagcgttcgtgatgtttatcaagcggatgaatgcttttttacaggaacgacgattgaaattttgccgatgactcatcttgatggaaccgccatccaagatggtcaagttggccctatcactaaaatgctgcaacgatcattttctcagagtttgttacaatccaatatgtcatcttcttaa

SEQ ID NO: 7015 - protein, 290 aa, Bacillus cereus
MAYERFVLWNDTVIDTTKQKTYIDLEERGLQFGDGVYEVIRLYKGNFHLLDPHITRLYRSMEEIELTLPFSKAELITLLYKLIENNNFHEDGTIYLQVSRGVQARTHTFSYDVPPTIYAYITKKERPALWIEYGVRAISEPDTRWLRCDIKSLNLLPNILATTKAERKGCKEALFVRNGTVTEGSHSNFFLIKNGTLYTHPANHLILNGIIRQYVLSLAKTLRIPVQEELFSVRDVYQADECFFTGTTIEILPMTHLDGTAIQDGQVGPITKMLQRSFSQSLLQSNMSSS

SEQ ID NO: 7016 - DNA, 876 bp, Bacillus cereus
  CDS (1)..(876)
atgaaagctactcataaagattgggttttatttaacggaagaattgtaaatacgaaggaagaacagccgatgattccattagaggagagaggctttcaatttggtgatggtatatacgaggtattcagactatatgatgggaagccacatttattagatttacatttagaacgattctttcattctatggaagaaataaaattaattccaccgtttactaaggaagagttagtggaagagttatatcaaatgattgaaaaaaatcaatttcaagaagatggtaatgtatatttgcaaatatcaagaggtgctcaagcacgtaatcatgtatatgagtcaaatatgcaaccaacatattttgcaaacattgtttcttttccaaggccaatcacggctatggaacgaggaataaaagttactgtagaagaggatatacgctggaagttttgtcatataaaatccttaaatctgctacctaatattatgattaaaaataaaataaacgaacaaggctatcaagaagcgatattagtacgagaaggaattgtaacggaagggtgtcattcaaatttctttatggtgaaaaataataaattgattacacatccggctgacaatttcattctacacggcattacacgtcactacgttattacattagcgaaagagttacatattgaagtagaagaaagagaattttcacttcaagaagtgtatgaggccgatgaatgcttcttcacagcgacgccacttgaaatattcccagtcgttcaaattggtgacgagcagttcggaaaaggcgaaagaggaccgattacaaagaaactccaagttgcatatgaagaaagtattcgtttgtttaaagttacgaactaa

SEQ ID NO: 7017 - protein, 291 aa, Bacillus cereus
MKATHKDWVLFNGRIVNTKEEQPMIPLEERGFQFGDGIYEVFRLYDGKPHLLDLHLERFFHSMEEIKLIPPFTKEELVEELYQMIEKNQFQEDGNVYLQISRGAQARNHVYESNMQPTYFANIVSFPRPITAMERGIKVTVEEDIRWKFCHIKSLNLLPNIMIKNKINEQGYQEAILVREGIVTEGCHSNFFMVKNNKLITHPADNFILHGITRHYVITLAKELHIEVEEREFSLQEVYEADECFFTATPLEIFPVVQIGDEQFGKGERGPITKKLQVAYEESIRLFKVTN

SEQ ID NO: 7018 - DNA, 900 bp, Bacillus cereus
  CDS (1)..(900)
atgggaaatcagtacatttatatgaatggggaatttgtagaaaaagaaaaggcagttgtttcagtatatgatcacggttttttatacggagacggtgtatttgaagggattcgtagttacggtggaaatgtattttgtttaaaagaacatgtaaaacgattatatgaatcggcaaaatctattttacttacaatcccgctgacggttgacgaaatggaagaagcggttttacagacacttcaaaaaaatgagtatgcagatgcttatattcggttaattgtttcaagaggaaaaggggacttagggctcgatccgagaagttgtgtgaaaccgagcgttattatcattgcagaacaattaaagttattcccacaggaattttacgataatggattaagcgttgtatctgttgcatcaagacgtaatacaccagatgcattagacccacgcattaagtcgatgaactacttaaataacgtacttgtaaaaattgaagcggcacaagcaggagtgctagaggctcttatgttaaatcaacaaggatatgtttgtgaaggatctggagataatgttttcgttgtgaaagatggaaaagtattaaccccgccatcctatttaggagcattagaaggtattacaagaaatagtgttattgagctatgtgaacgactgaatattccgtgtgaggaaagaccattcactcgccatgacgtatatgtagcagatgaagtgtttttaacaggaacggcagcggagttaattccagttgtaaaagttgattcaagagaaattggagatgggaaaccaggaagtgtaacgaaacaattgaccgaagaatttaaaaaattaacgagagaaagaggagtacgtgtccccgggctgacggaaagcttagcataa

SEQ ID NO: 7019 - protein, 299 aa, Bacillus cereus
MGNQYIYMNGEFVEKEKAVVSVYDHGFLYGDGVFEGIRSYGGNVFCLKEHVKRLYESAKSILLTIPLTVDEMEEAVLQTLQKNEYADAYIRLIVSRGKGDLGLDPRSCVKPSVIIIAEQLKLFPQEFYDNGLSVVSVASRRNTPDALDPRIKSMNYLNNVLVKIEAAQAGVLEALMLNQQGYVCEGSGDNVFVVKDGKVLTPPSYLGALEGITRNSVIELCERLNIPCEERPFTRHDVYVADEVFLTGTAAELIPVVKVDSREIGDGKPGSVTKQLTEEFKKLTRERGVRVPGLTESLA

SEQ ID NO: 7020 - DNA, 897 bp, Bacillus cereus
  CDS (1)..(897)
atgaacgagcaatggattttcttaaatggagaatttgttccaaaagacgaggcaaaagtatcagtatatgatcatggttatttatatggagatggagtatttgaaggaattagagtctatagcggtaatgttttccgtttgagagagcatcttgtccggttatatgaatcagcaaaatccatcatgttagaaattccatattctttagatgaagtaacgaatattgttgttgagacgattcgacaaaataaattatctaatggatacattcgcctagttgtatcgagaggagcaggaaatcttgggttagatcctgattcttgtaaaaaaccgaatgtagtagtaattgcagagcaactatctttattcccgcaagaatattatgaaaaagggattccagttgtaacagttgcaacgcgccgaaaccgtccagatgtattgtcgcctcaagtaaaatctttaaattacttaaacaatattttagttcgcatcgaagcgaaattggctggagtacaagaagcgcttatgttaaatgatcaaggatacgtagctgaaggctcaggggataacgtatttattgtaaaaggaaataaattaattacaccaccaagttctgctggagcgttagaaggcattacacgaaacgctattttagaaattggtgaaaaacttggatatgacgttagagaagagttatttacaagacatgacgtatatgtagctgatgaagtatttttaacaggaacagcagctgaagtaattgctgttacgacagtagatggtagaacgattggtttagggcaaacgggtccacatacgaatcgtttactagaagaatttcgaaagttagttatagaagatggagagaaaatttacgaagaaaataaagttggataa

SEQ ID NO: 7021 - protein, 298 aa, Bacillus cereus
MNEQWIFLNGEFVPKDEAKVSVYDHGYLYGDGVFEGIRVYSGNVFRLREHLVRLYESAKSIMLEIPYSLDEVTNIVVETIRQNKLSNGYIRLVVSRGAGNLGLDPDSCKKPNVVVIAEQLSLFPQEYYEKGIPVVTVATRRNRPDVLSPQVKSLNYLNNILVRIEAKLAGVQEALMLNDQGYVAEGSGDNVFIVKGNKLITPPSSAGALEGITRNAILEIGEKLGYDVREELFTRHDVYVADEVFLTGTAAEVIAVTTVDGRTIGLGQTGPHTNRLLEEFRKLVIEDGEKIYEENKVG

SEQ ID NO: 7022 - DNA, 873 bp, Bacillus cereus
  CDS (1)..(873)
atgttaatttacgtaaatggtcagtatgtagaagcgagtgaagcgagaatttcgccgtatgaccacggttatttatatggacttggagttttcgagacgtttcgtatttataatggtcatcctttcttattggatgatcattatgaccgtttaatagatgcgctggatacgttgcaaattaaatggtcgatgacgaaagatgaagtaatgcttattttgaagaatttactcgttaagaacaaattagagcatgcgtatgtccgttttaatgtatcggcgggtatagatgaaattggattgcaaacagaaatgtatgaagagccgtctattattgtttttataaaacctttagcggccccgggagatgtagtggaaaaagaaggggttgtcttaaatcaagtgagaaatacaccagagggtgcatctcgcttgaagtctcaccattatttaaataacattttggggaaacgcgaaataggcaatgttgtgaataaggaaggtattttccttactgaaacaggttatgttgcagagggcattgtttcgaatctcttttttgtaaaaggtgatattttatatacaccttctttaaaaacggggattttaaatggtatcactcgtgcgtttattataaaggttgctgaaaagatgggtatagaagtaaaggaaggtctctttacaaaagatgaattactttcagccgatgaagtcttcgtaacaaactcgattcaagaaattgttccgcttaattgtatagaggggcgagatttcccgggtaaagtaggtgtggttacaaaaagatttatgaatctttatgaaatgcagagagagaaattgtggagcagaaatgaattacgaagaggagatgtgtag

SEQ ID NO: 7023 - protein, 290 aa, Bacillus cereus
MLIYVNGQYVEASEARISPYDHGYLYGLGVFETFRIYNGHPFLLDDHYDRLIDALDTLQIKWSMTKDEVMLILKNLLVKNKLEHAYVRFNVSAGIDEIGLQTEMYEEPSIIVFIKPLAAPGDVVEKEGVVLNQVRNTPEGASRLKSHHYLNNILGKREIGNVVNKEGIFLTETGYVAEGIVSNLFFVKGDILYTPSLKTGILNGITRAFIIKVAEKMGIEVKEGLFTKDELLSADEVFVTNSIQEIVPLNCIEGRDFPGKVGVVTKRFMNLYEMQREKLWSRNELRRGDV

SEQ ID NO: 7024 - DNA, 1116 bp, Mycobacterium paratuberculosis
  CDS (1)..(1116)
atgaccagtggctccctcgagttcacggtttcgcgctcgacacgtccggcgaccggcgccgaacgcgaaaccatcctggccgagccgggtttcggcaaatacttcaccgaccacatggtgtcgatcgagtacgacgagaccgaggccggacggggctggcatgacgcgcgcgtcatcccgtacggcccgatcgagctggacccgtcggcgatcgtgttgcactacgcgcaggagatcttcgaagggctcaaggcctaccgctgggcggacggctccatcgtgtcgtttcgcgcccaggccaacgccgcccggttgcggtcctcggcgcggcggctggcgattcccgagctgcccgaggagctgttcctggaatcgctgcgccagctgatcgccgtcgacaacgcctgggtgccggccgccggcggcgaagaggcgctgtacctgcggccgttcgtcatcgccaccgagcccgggctcggggtgcggccctccaagcaataccgctacctgctgatcgcctccccggccggcgcctacttcaagggcggcatcagtccggtcaccgtctgggtgtcgacggagtacgtgcgggccagcccgggcggcaccggggcggccaagttcggcggcaactacgcggcgtcgctgtccgcgcaagccgaggccgcggccaacgggtgcgaccaggtggtgtggctggacgccgtcgagcggcgctttgtcgaggagatgggcgggatgaacatcttcttcgtgttcggcagcggcggctcggcacggctggtcacccccgagctgtccggctcgctgctgcccggtatcacgcgagattcgttgctgcagttggcaattgacgccggcttcgccgtcgaggaacgcaagatcgacatcgacgagtggcagaagaaggccgccgccggtgagatcaccgaggtgttcgcctgcggcaccgccgccgtcatcacgccggtgtcgcacgtcaagtacggcgagacggagttcaccatcgccgacggccagcccggcgaagtgacgatggcattgcgcgacacgctcaccgggatccagcggggcaccttcgccgacacccacggctggatgacccggctcggctga

SEQ ID NO: 7025 - protein, 371 aa, Mycobacterium paratuberculosis
MTSGSLEFTVSRSTRPATGAERETILAEPGFGKYFTDHMVSIEYDETEAGRGWHDARVIPYGPIELDPSAIVLHYAQEIFEGLKAYRWADGSIVSFRAQANAARLRSSARRLAIPELPEELFLESLRQLIAVDNAWVPAAGGEEALYLRPFVIATEPGLGVRPSKQYRYLLIASPAGAYFKGGISPVTVWVSTEYVRASPGGTGAAKFGGNYAASLSAQAEAAANGCDQVVWLDAVERRFVEEMGGMNIFFVFGSGGSARLVTPELSGSLLPGITRDSLLQLAIDAGFAVEERKIDIDEWQKKAAAGEITEVFACGTAAVITPVSHVKYGETEFTIADGQPGEVTMALRDTLTGIQRGTFADTHGWMTRLG

SEQ ID NO: 7026 - DNA, 1074 bp, Geobacter sulfurreducens
  CDS (1)..(1074)
atggaaatcagagttgcaccacttcccgctgagcagaagaagcacaaggccactgacgaaacagctctaggctttggtcgtctttttaccgaccggatgcttgttgccgaatggaaagtcgggcagggctgggtcgatgcgcgaattgagccctatgctccgttttcgctggatcctgcctgtgcggtatttcactatgcccaggagatttttgaaggactcaaggcgtataagtgggcggatggttccatagcactctttcgccctgaaatgaatgcccgccgcttcaatcattcagcagagcgtctctgcatgcccgaggtgccggaagatcttttcatcggcggcatcgagcaactggtggcgctcgagcgcgactggataccggcctccgcggggacttccctgtatatccgccccgcaatgattgccgtggagccggctctcggcgtgaaacctgccgatcattactacttttttgtgattctttcaccggtgggcgcctattacgcctctggattcaatccggtgaaaatcatggtggaagaccagtatgtccgcgccgtgcccggcggcaccggtgaagccaagacaggcggcaattatgcttcgtcgctcagggccggccttgaggcaaaaaagaaggggtttgaccaggtcctctggcttgacggggtccaccgtcgctacatcgaggaggttggggctatgaatatgctgtttgcctacggcaagaccatagtcacctcgcctctcacgggcaccattctgaacggcgttacccgcgactcggttctgaaactggccgcgagccgcggttacaccattgaagagcggttgattgacgtgaacgatctcatggccgatattcgtgccggcaaggtgaccgaggctttcggcagtggcactgccgctgtcgtcagtcccgttggaatcctggcgtacaagggcgagagcgtgaccgtaggcgacggtggcgtagggccgatcacccgggaactctatgatacccttaccggcatccagacgggccggattcccgacaccttcggctggacccgcaaaattgcctga

SEQ ID NO: 7027 - protein, 357 aa, Geobacter sulfurreducens
MEIRVAPLPAEQKKHKATDETALGFGRLFTDRMLVAEWKVGQGWVDARIEPYAPFSLDPACAVFHYAQEIFEGLKAYKWADGSIALFRPEMNARRFNHSAERLCMPEVPEDLFIGGIEQLVALERDWIPASAGTSLYIRPAMIAVEPALGVKPADHYYFFVILSPVGAYYASGFNPVKIMVEDQYVRAVPGGTGEAKTGGNYASSLRAGLEAKKKGFDQVLWLDGVHRRYIEEVGAMNMLFAYGKTIVTSPLTGTILNGVTRDSVLKLAASRGYTIEERLIDVNDLMADIRAGKVTEAFGSGTAAVVSPVGILAYKGESVTVGDGGVGPITRELYDTLTGIQTGRIPDTFGWTRKIA

SEQ ID NO: 7028 - DNA, 897 bp, Nanoarchaeum equitans
  CDS (1)..(897)
atgctattgctctataatatgaaggtatggttcaatggccaaatcttagattacgaagatgtaagaataccaatagatacacatgctttacattatggctcttcagtattcgaaggaattaggtcctataaagcaaaaaagggagtagcagtatttagaaatgaagaccacgtaaaaaggtttttctattcgatgcaaactcttagaatgaaaataaaatttgacgaaaacactattagagaggctataaaagaagttgttagggtaaacaatttagaagattcatatataaggccaattgccttttattctaaaggaggaataggattagacccaagaaaaaatgaagtggatatagctatatttgctataccatggggcaaatatctaaaagaagaagcaagggtaacaattgtttcttatgctaggcctaatactttaataacaaatcccaaagccaaaattggcggtatgtatgttaattctattttagctactttagaagcaaaagaaagaggttttgacgaagctattatgttggatttaaatgggtttgtcgctgaaggccctggagaaaacatatttttaatatacaaagatagcaaaactgcggtaactccaatagaaggttctatattacctgggataactagagatacagtaaaacatttattgagagacctaggttataatgtaatagaaagaaatgttttagtcgatgaactatttatcgcagatgagttattttttgttggcactgcagcggaggttacaccaataaaagaattagatggacaaaccttcgatacaagttttggtaaaaaagtttatgaagaatatatgaaagttgttagaggagaaaacaaaaaatatgaatattggttagattatatataa

SEQ ID NO: 7029 - protein, 298 aa, Nanoarchaeum equitans
MLLLYNMKVWFNGQILDYEDVRIPIDTHALHYGSSVFEGIRSYKAKKGVAVFRNEDHVKRFFYSMQTLRMKIKFDENTIREAIKEVVRVNNLEDSYIRPIAFYSKGGIGLDPRKNEVDIAIFAIPWGKYLKEEARVTIVSYARPNTLITNPKAKIGGMYVNSILATLEAKERGFDEAIMLDLNGFVAEGPGENIFLIYKDSKTAVTPIEGSILPGITRDTVKHLLRDLGYNVIERNVLVDELFIADELFFVGTAAEVTPIKELDGQTFDTSFGKKVYEEYMKVVRGENKKYEYWLDYI

SEQ ID NO: 7030 - DNA, 1140 bp, Corynebacterium glutamicum
  CDS (1)..(1140)
atgtatctgtcaggtagcaggtgtaccttaaaatccatgacgtcattagagttcacagtaacccgtaccgaaaatccgacgtcacccgatcgtctgaaggaaattcttgccgcaccgaagttcggtaagttcttcaccgaccacatggtgaccattgactggaacgagtcggaaggctggcacaacgcccaattagtgccatacgcgccgattcctatggatcctgccaccaccgtattccactacggacaggcaatttttgagggaattaaggcctaccgccattcggacgaaaccatcaagactttccgtcctgatgaaaacgccgagcgtatgcagcgttcagcagctcgaatggcaatgccacagttgccaaccgaggactttattaaagcacttgaactgctggtagacgcggatcaggattgggttcctgagtacggcggagaagcttccctctacctgcgcccattcatgatctccaccgaaattggcttgggtgtcagcccagctgatgcctacaagttcctggtcatcgcatccccagtcggcgcttacttcaccggtggaatcaagcctgtttccgtctggctgagcgaagattacgtccgcgctgcacccggcggaactggtgacgccaaatttgctggcaactacgcggcttctttgcttgcccagtcccaggctgcggaaaagggctgtgaccaggtcgtatggttggatgccatcgagcacaagtacatcgaagaaatgggtggcatgaaccttgggttcatctaccgcaacggcgaccaagtcaagctagtcacccctgaactttccggctcactacttccaggcatcacccgcaagtcacttctacaagtagcacgcgacttgggatacgaagtagaagagcgaaagatcaccaccaccgagtgggaagaagacgcaaagtctggcgccatgaccgaggcatttgcttgcggtactgcagctgttatcacccctgttggcaccgtgaaatcagctcacggcaccttcgaagtgaacaacaatgaagtcggagaaatcacgatgaagcttcgtgaaaccctcaccggaattcagcaaggaaacgttgaagaccaaaacggatggctttacccactggttggctag

SEQ ID NO: 7031 - protein, 379 aa, Corynebacterium glutamicum
MYLSGSRCTLKSMTSLEFTVTRTENPTSPDRLKEILAAPKFGKFFTDHMVTIDWNESEGWHNAQLVPYAPIPMDPATTVFHYGQAIFEGIKAYRHSDETIKTFRPDENAERMQRSAARMAMPQLPTEDFIKALELLVDADQDWVPEYGGEASLYLRPFMISTEIGLGVSPADAYKFLVIASPVGAYFTGGIKPVSVWLSEDYVRAAPGGTGDAKFAGNYAASLLAQSQAAEKGCDQVVWLDAIEHKYIEEMGGMNLGFIYRNGDQVKLVTPELSGSLLPGITRKSLLQVARDLGYEVEERKITTTEWEEDAKSGAMTEAFACGTAAVITPVGTVKSAHGTFEVNNNEVGEITMKLRETLTGIQQGNVEDQNGWLYPLVG

SEQ ID NO: 7032 - DNA, 1300 bp, Lactococcus lactis
  CDS (154)..(1176)
ctcctttgttcagtaattttctaattcatttatagaaaattgactatatttgaaaaaattgtttgaaattttactgaatttcatgaatattttcttgttttatgttacagaaaataatataatctattataacaaaaaaatttggaggatgttatggcaattaatttagactgggaaaatttaggttttagttatcgaaacttaccttttcgttatatcgctcgttttaaagatggaaaatggagcgctggagagctgacaggagataatcagcttcatattagtgaatcttcacctgctttgcattatggtcaacaaggttttgaaggattgaaggcttatcggacaaaagatgggtcaatccaactttttcgtccagaccaaaatgctgctcgtttgcaaaaaacggctcgccgtctttgtatggcagaagtttcaactgaaatgtttattgacgcagttaaacaagtagttaaagccaataaagattttgttcctccttatggaacgggtgccacgctctatcttcgtccacttttgattggggttggtgatgttattggggttaaacctgcggatgaatatatttttaaagtttttgccatgcctgttggctcttattttaaaggtggattagcaccttcaaaatttgttatttcaagagagtatgatagagcggctcctcttggtaccggtggtgctaaagttggtgggaactatgcggcttctttgcaagcagaagttggagccaaagcctcaggttatgcggatgcaatttatctcgacccaagcacgcatactaaaattgaagaagttggggcagcgaatttctttggtatcactgcagataatgaatttattaccccattaagtccttctatcttaccttcaattactaaatattctttgttgtatttagctgaacatcgtttgggattaaaagcaatcgaaggtgaagtttatgctaaagatttaggtaaatttgttgaagcaggagcttgtgggacagcagcaattatctccccaattggacgaattgacgatggagaagattcttatatttttcattctgaaacagaagtgggaccaacggttaaacgtttatatgacgagttggtcggcattcaatttggtgatgttgaagctccagaaggctggattgttaaagttgattaatttaaaaagctaaagaatattctttagcttttttattttggaatgaatattttatcctttttaatccattcttggtctttggttcggattggccgaattacctggcaaggatttccggcggcaa

SEQ ID NO: 7033 - protein, 340 aa, Lactococcus lactis
MAINLDWENLGFSYRNLPFRYIARFKDGKWSAGELTGDNQLHISESSPALHYGQQGFEGLKAYRTKDGSIQLFRPDQNAARLQKTARRLCMAEVSTEMFIDAVKQVVKANKDFVPPYGTGATLYLRPLLIGVGDVIGVKPADEYIFKVFAMPVGSYFKGGLAPSKFVISREYDRAAPLGTGGAKVGGNYAASLQAEVGAKASGYADAIYLDPSTHTKIEEVGAANFFGITADNEFITPLSPSILPSITKYSLLYLAEHRLGLKAIEGEVYAKDLGKFVEAGACGTAAIISPIGRIDDGEDSYIFHSETEVGPTVKRLYDELVGIQFGDVEAPEGWIVKVD

SEQ ID NO: 7034 - DNA, 918 bp, Wolinella succinogenes
  CDS (1)..(918)
atgaaagaatcgcaatttatttggatggatgggaagcttatcccttggcatgaggccaaaatccatgtcctttcccacacccttcactacggaaacggcgtttttgagggcactcgagcctacaagacagacaaaggattggcgatttttcgcctccaagatcacaccaagcgacttctcaattccgctaaaattgtcgctatcgactgcccctacactcaagaggagctagagaaagcccaagtggagcttctgcgccacaatacctttgagggaaatgtctatcttcgccccatcatcttcctcggatatggcgtgatgggggtctaccataaaaaagctcccgtaaacgtggctattgccgcttgggagtggggcgcctatttaggcgatgagggattagagaagggaattagagtcaaaacctcctcgtttgtgcgaaactctatcaaatcaagctttggaaaggccaaggcgagtgccaactatctcaactcccagatggccaaatatgaggcgatctcttgtggatttgaagaggctttgctcgtggatgacaacggctttgtggccgagggaagcggggagtgcttcttcatcgtgcgcgatggcgtgatcatcactccgccccatgataactctctagagagcatcacccaagccacggtgatcgaacttgctcgaagccttggctacgaggtgattgagagaagaatcacacgagatgaggtctatatcgccgatgaagccttcttcactggcacggccgccgaggtcactcccgtgcgggaacttgacttccgaatcatcggagaaggaagacgagggcccctcacgaccctcttgcaaaaaacctattttgatgtggtgaacggacgagatccaaagttcgccaaatatctcgcctatatccaataa

SEQ ID NO: 7035 - protein, 305 aa, Wolinella succinogenes
MKESQFIWMDGKLIPWHEAKIHVLSHTLHYGNGVFEGTRAYKTDKGLAIFRLQDHTKRLLNSAKIVAIDCPYTQEELEKAQVELLRHNTFEGNVYLRPIIFLGYGVMGVYHKKAPVNVAIAAWEWGAYLGDEGLEKGIRVKTSSFVRNSIKSSFGKAKASANYLNSQMAKYEAISCGFEEALLVDDNGFVAEGSGECFFIVRDGVIITPPHDNSLESITQATVIELARSLGYEVIERRITRDEVYIADEAFFTGTAAEVTPVRELDFRIIGEGRRGPLTTLLQKTYFDVVNGRDPKFAKYLAYIQ

SEQ ID NO: 7036 - DNA, 939 bp, Vibrio vulnificus
  CDS (1)..(939)
atggcaacgaaaacagcagattatatctggtttaatggcaagatggttccctgggcagaagcgaatgtacacgttctgactcacgccatgcactacggcacctcggtatttgaaggggttcgctgttacaacacgccaaaagggccgattgtcttccgtcaccaagaacatgcgcagcgtctgaaagattctgccaaaatttaccgcttcccaatcccctattcagtagaagagatcatggaagcgactcgcgaaactctgcgtcaaaacaagctggataacgcctacattcgcccactggcgtttgttggcaacgtaggcttgggcgtttgtcctcccacagataccgaaatggatctgatcattgccgccttcccttggggctcttacttaggggaagaagcgttggaaaatggcgttgatgccatggtatccagctggaaccgcgctgcgccaaacacgattccaaccgcagcgaaagcaggcggtaactacctctcttctctattggttggtggtgaagcacgtcgacatggctatgccgaagggattgcattaagtgttgatggttacctttcagaaggtgccggtgaaaacatttttgtgatcaaaaatggcgtcatcacaaccccaccagcgacggctgcaattctccctggcatcactcgtgactcaatcatgacgctggcgcgagagatgggttatgaagtccgtgaagccaacatcgcacgtgaagccctctacttggcagacgaagtgtttatgacgggtactgccgcagaagtggttccggtacgtagtgtcgatcaaattcaagtgggcgcaggcaaacgcggcccaatcaccaaagcggtgcaagaagcgtactttggtttattcaatggcaccaccgaagataagtggggctggttagattacgtgtacccagagaagaagtag

SEQ ID NO: 7037 - protein, 312 aa, Vibrio vulnificus
MATKTADYIWFNGKMVPWAEANVHVLTHAMHYGTSVFEGVRCYNTPKGPIVFRHQEHAQRLKDSAKIYRFPIPYSVEEIMEATRETLRQNKLDNAYIRPLAFVGNVGLGVCPPTDTEMDLIIAAFPWGSYLGEEALENGVDAMVSSWNRAAPNTIPTAAKAGGNYLSSLLVGGEARRHGYAEGIALSVDGYLSEGAGENIFVIKNGVITTPPATAAILPGITRDSIMTLAREMGYEVREANIAREALYLADEVFMTGTAAEVVPVRSVDQIQVGAGKRGPITKAVQEAYFGLFNGTTEDKWGWLDYVYPEKK

SEQ ID NO: 7038 - DNA, 1020 bp, Porphyromonas gingivalis
  CDS (1)..(1020)
atggaaaatatcgattggtcatcgctctcattcggttataggaagaccgactacaacgtgcgctgttactatcgcaacggcaagtggggagagcttgaagtatcctcagaggaaacgatcacgatgcacatggctgccacttgtctccactacggacaggaagcattcgaagggatgaaggctttccgtggcaaagatggcaagatccgcctcttccgcatggatgagaatgccaagcgcatgaacagatcatgccaaggtgtggtaatggccgagctgccgcaggaaatcttcgaagcagctgtaatcaaggccgtaaagatgaacgagcgtttcgttcctccttacgaaagcggagcttctctttacatccgtccgcttgttatcggactgggtgcacaagtgggtgtgaagccggctcccgagtatctcttcatcgtctttgtaacgcccgtagggccgtatttcaaagaaggattcaaaccgaccaagatggccatcttccgcgactatgaccgtgcagctcctctgggtacgggtacgatcaaagtgggcggtaactatgcagccggtatgatccccacagtgaaagctcacgaaatgggctactctgcagctatcttcttggatgccaaagaaaagaagtacatagacgaagccggtccggccaacttcttcgccatcaagaacaatacttatatcactcccgaatccagctctatcctgccctctatcacaaacaagagtctgatgcaggtggctcaggatctgggtctgaaggtagagcgtcgtccggtagccgaagaagagcttgctactttcgaagaagcaggtgcttgtggtacggcagccgtgatcagccctatctccgagattgacgacttggagaacaacaaacagtacgtcatcagcaaggacggcaaaccgggtccgtggtgtgaaaagctctatcacgaacttcgtgccatccagtatggcgacaagcccgacattcatggttgggtgacaatcctcgactaa

SEQ ID NO: 7039 - protein, 339 aa, Porphyromonas gingivalis
MENIDWSSLSFGYRKTDYNVRCYYRNGKWGELEVSSEETITMHMAATCLHYGQEAFEGMKAFRGKDGKIRLFRMDENAKRMNRSCQGVVMAELPQEIFEAAVIKAVKMNERFVPPYESGASLYIRPLVIGLGAQVGVKPAPEYLFIVFVTPVGPYFKEGFKPTKMAIFRDYDRAAPLGTGTIKVGGNYAAGMIPTVKAHEMGYSAAIFLDAKEKKYIDEAGPANFFAIKNNTYITPESSSILPSITNKSLMQVAQDLGLKVERRPVAEEELATFEEAGACGTAAVISPISEIDDLENNKQYVISKDGKPGPWCEKLYHELRAIQYGDKPDIHGWVTILD

SEQ ID NO: 7040 - DNA, 927 bp, Photorhabdus luminescens
  CDS (1)..(927)
atgacgaagcaatccgattacatttggttcaatggtgagatggttccttgggcagatgctaaagttcacgtaatgtcccatgctttacattacggcacatctgtttttgagggaattcgctgctatgactctcataaagggccagtggtttttcgccatcgtgagcatatgcagcgtttacatgactctgcaaagatttatcgtatgccgttgaaccagagtgtcgatgaattaatggaggcgtgtcgggcaactcttcgtaaaaataatttagtcagtgcttatatacgtccattggtctttatcggtgatgttggcatgggggttaatccacctgctggttataaaactgatgtcattattgccgcctttccgtggggagcttatttgggagaaggcgcattggatcaaggaattgatgcgatggtttcttcatggaatcgtgcggcaccaaacacaatgccaactgcggctaaagccggtggtaactacctgtcttcgcttttagtcggtagtgaagctcgtcgtcgtgggtatcaggaaggtattgcactggatgtttctggttatatctctgagggtgcgggtgaaaatctatttgaagtaaaagatggcatattatttaccccaccatttacctctgctgcattaccaggaattactcgtgatgccattattaaactggcgaaagatttagggctggaagtgcgtgagcaggtattgtcgcgcgaatcattgtacctggctgatgaagtttttatgtctggcacagcggctgaaatcacacccgttcgtagtgttgatgatattcaggttggtatcggtagatgtggacctattaccaaaaaaattcaacaagctttctttggcttgtttgatggcacgacagatgataaatggggctggttagatccagtcaatccttaa

SEQ ID NO: 7041 - protein, 308 aa, Photorhabdus luminescens
MTKQSDYIWFNGEMVPWADAKVHVMSHALHYGTSVFEGIRCYDSHKGPVVFRHREHMQRLHDSAKIYRMPLNQSVDELMEACRATLRKNNLVSAYIRPLVFIGDVGMGVNPPAGYKTDVIIAAFPWGAYLGEGALDQGIDAMVSSWNRAAPNTMPTAAKAGGNYLSSLLVGSEARRRGYQEGIALDVSGYISEGAGENLFEVKDGILFTPPFTSAALPGITRDAIIKLAKDLGLEVREQVLSRESLYLADEVFMSGTAAEITPVRSVDDIQVGIGRCGPITKKIQQAFFGLFDGTTDDKWGWLDPVNP

SEQ ID NO: 7042 - DNA, 948 bp, Photorhabdus luminescens
  CDS (1)..(948)
atgacaaacaatatcgttagcccagttaataaagattggatcgtatttctagacggggaatatctcaattttagcaatgcgacctttcttgccaatacacaagctttaaattatggcaccggtacatttgaggggatccgggcttattgggatcaagacaataaccaacttaatctatttagagtgcatgagcactatgaacggttaattcaatcagctaaaacattaaaaattgaattaccctataccagtcaggagttaaccgatattactaaaaacatcattattaaaaatggtttcaagcaagatatttatatcaggccattagtgcttaaaaagtcgttaatgccgggtgagaaatttggcgttaagctaagtggtgtaaattcaaccctctgtattaacgctttacctatgggcgcttatgccaaaaaagcagagtttacatgtcttatttcaaaatggcgacgtgtatcaaatgcggcaattccatcatctgccaaaattaccggcacttatgttaattccgcacttgctcatgaagatgccaaagaaaacggatttgatgatgctatcatgttgaatgaacaaggcatgtgcgcagaagcaagtacatcaaatgtttttattgtaaaagataattgcgttattacaccatcgcttagcgctggcattcttaatggaataaccagacaatctgttttcgatatttgtcaattccgcaatattccttgtattgagtcagaaattcaacaaaaggatctctatgaagcagatggctgttttttaacaggcactggccttgaaatatcaatcgtttcacaaatagacgatgtgtcatatagacaaaaagaagattctatagccaatgttattgcccaagattaccaagaaataatcagaggcagagtagataagttctcacattggttaaatccggtttattag

SEQ ID NO: 7043 - protein, 315 aa, Photorhabdus luminescens
MTNNIVSPVNKDWIVFLDGEYLNFSNATFLANTQALNYGTGTFEGIRAYWDQDNNQLNLFRVHEHYERLIQSAKTLKIELPYTSQELTDITKNIIIKNGFKQDIYIRPLVLKKSLMPGEKFGVKLSGVNSTLCINALPMGAYAKKAEFTCLISKWRRVSNAAIPSSAKITGTYVNSALAHEDAKENGFDDAIMLNEQGMCAEASTSNVFIVKDNCVITPSLSAGILNGITRQSVFDICQFRNIPCIESEIQQKDLYEADGCFLTGTGLEISIVSQIDDVSYRQKEDSIANVIAQDYQEIIRGRVDKFSHWLNPVY

SEQ ID NO: 7044 - DNA, 876 bp, Gloeobacter violaceus
  CDS (1)..(876)
atgggtcttctggtgaacttcaacggcaccatcgcgccggaagccagagtttcggtcctcgaccgcggttttctctacggcgacggtgtctacgaggtcgtgcgcacgatcgggggaagacccttcgctttgcaggagcacctcgaccggctgcgtgcctccgcgaactatctctatctcgacattccctggagcgacgcgcagattgccgccgaagtcgagcgcaccctggccgccgccggcagcggcgacttttacattcgtatcgtcgtcagccgcggcgcggaagaagaaatcagcctgctgcccgggccgcaacttgtccccgatctggtgatcatcgtgcggtccatttcttcccaactggctttgaacgagcagggggtgcacctggcagtgctgccccgcttgcgcaacgacgcgcgggcgctctctccagccgccaagaccggcaattatctgaacaacatcttggcgctcatcgaagcgcgccgcctgggggccgacgacgccctgctgctcaacagccgcggcgaggtgaccgaggccaccaccagcaatctctggttggccaaaggcggcacagtttatacccctgctgtcgaagcgggcatcctgcacggcatcacccggcattttttgctgaagttgctgggtgattggcagattccttgcatcgagactgcacttaccaagacagatttgttcgctgtcgaagaagcctttttgagttcgtcggtgcgtctgatcgctccggtgcgccgcatcgatgattatgaactgccctactgtccgggggcgcttacccgccgactgttcgatgggttggtcgtgctgatgcaagatgccgtcgcagccccgaaggtgccagtgtag

SEQ ID NO: 7045 - protein, 291 aa, Gloeobacter violaceus
MGLLVNFNGTIAPEARVSVLDRGFLYGDGVYEVVRTIGGRPFALQEHLDRLRASANYLYLDIPWSDAQIAAEVERTLAAAGSGDFYIRIVVSRGAEEEISLLPGPQLVPDLVIIVRSISSQLALNEQGVHLAVLPRLRNDARALSPAAKTGNYLNNILALIEARRLGADDALLLNSRGEVTEATTSNLWLAKGGTVYTPAVEAGILHGITRHFLLKLLGDWQIPCIETALTKTDLFAVEEAFLSSSVRLIAPVRRIDDYELPYCPGALTRRLFDGLVVLMQDAVAAPKVPV

SEQ ID NO: 7046 - DNA, 960 bp, Gloeobacter violaceus
  CDS (1)..(960)
atgacccagccatcttccgaacccgtcatctacctgcgcggtcgcttcgtcccggacagcgaggcttctttgagcgtgcgcacccatgcttttttgtacggcaccgccgtcttcgagggcatcaaggcgtactgggcgcccgagcgcgagacgatgttcatctttcgcgccgaggagcattttcgcaggctggtgcaaagctgccgcatccttcgcctcaaggcacccctggatatccggcggatggtggagttgagtgcggagattgttgtgcgcaacggctgccgcgaggacacttacttgcgcccgattgtctacaaagccgaccggcgcatcggtccaatcctggagattcccgatacggtcgacgacttttgtctgtttaccgccccgatgagcgcctacctggatacgcacaaaggtctgcacgtctgcgtctcctcctggcgccgcatcgacgacaacatgatcccggcgcgcgccaagtgcaacggcgcctacgtcaacaccgcgctgatcaagaccgacgccgctctggccggtttcgacgacgccatcgccctatcggatgacggccacgtcgccgaaggcagtgcgatgaatttgttcctggtgcgcgacggccgactggtcaccccagcggtgagcaacaacatcctcgaagggatcacccgcgccacggtcatcgaactagcccggaaagaactggggatcccagtcgaatcgcggcaggtggaccgtactgaactctatgttgccgaggagatgttcctgtgcggcacggccaccgaggtggcggcggtcacccgcatcgaccaccgcgccatcggcgacggcaccgtgggaccgatcacccgggcgattcaagatctcttcgaccaggccatccacggccgtctgcccgactatatgcactggctgacccccgctggcaccccagtgctgagcagccaggactga

SEQ ID NO: 7047 - protein, 319 aa, Gloeobacter violaceus
MTQPSSEPVIYLRGRFVPDSEASLSVRTHAFLYGTAVFEGIKAYWAPERETMFIFRAEEHFRRLVQSCRILRLKAPLDIRRMVELSAEIVVRNGCREDTYLRPIVYKADRRIGPILEIPDTVDDFCLFTAPMSAYLDTHKGLHVCVSSWRRIDDNMIPARAKCNGAYVNTALIKTDAALAGFDDAIALSDDGHVAEGSAMNLFLVRDGRLVTPAVSNNILEGITRATVIELARKELGIPVESRQVDRTELYVAEEMFLCGTATEVAAVTRIDHRAIGDGTVGPITRAIQDLFDQAIHGRLPDYMHWLTPAGTPVLSSQD

SEQ ID NO: 7048 - DNA, 924 bp, Chromobacterium violaceum
  CDS (1)..(924)
atgtcgatggctgatcgcgacggatatatctggtatgacggcaagctggtggactggcgcgacgccaccactcatgtgctgacccacaccctgcactacggcatgggcgtgttcgaaggcgtgcgcgcctacgaaacgccgaagggtccggccatcttccgcctgcaggaccataccgagcgcctgttccgctccgccaagattctgggcatcgccctgcccttcactccggaagacatcaaccaggcccacctggacgtggtcaaggccaacggcctgaaatcctgctacttccgtccgatggccttctacggctccggcaagctgggcgtggcgccgatgaagaacgacgtgcgcgtgatcgtggctgcctggccctggggcgcctacctgggcgaagaaggcctggagaaaggcatccgcgtgaagaccagctccttcacccgccaccacgtcaacatcaccatgtgcaaggccaaggccaacggcaactacatgaactccatcctggccaacaacgaggccaccgccgacggctacgacgaggcgctgctgctggacgtggacggcttcgtcgccgaaggctcgggcgaaaacatcttcatcgtgcgcaagggcaagctttatactccggacctgaccagcgcgctggaaggcatcacccgcgacaccgtggtgcagatcgccaaggagatgggcctggagctgatcgagaagcgcatcacccgcgacgaggtctacagcgccgacgaggccttcttcaccggcaccgccgccgaggtgaccccgatccgcgagctggaccgccgcccgatcggcgccggcagccgcggcccgatcaccgcggaaatccagaagcgctacttcaatatcgtcaagggtctggacgccgaacacgaacactggctcacatacgtgaaataa

SEQ ID NO: 7049 - protein, 307 aa, Chromobacterium violaceum
MSMADRDGYIWYDGKLVDWRDATTHVLTHTLHYGMGVFEGVRAYETPKGPAIFRLQDHTERLFRSAKILGIALPFTPEDINQAHLDVVKANGLKSCYFRPMAFYGSGKLGVAPMKNDVRVIVAAWPWGAYLGEEGLEKGIRVKTSSFTRHHVNITMCKAKANGNYMNSILANNEATADGYDEALLLDVDGFVAEGSGENIFIVRKGKLYTPDLTSALEGITRDTVVQIAKEMGLELIEKRITRDEVYSADEAFFTGTAAEVTPIRELDRRPIGAGSRGPITAEIQKRYFNIVKGLDAEHEHWLTYVK

SEQ ID NO: 7050 - DNA, 1284 bp, Neurospora crassa
  CDS (1)..(1284)
atgttccgcacctccctccgcagggctgcggccttccagcccgcgaggccatgcttcggtgccttctccgccactgctgcccgccagtacagcgctgccactggcactgccgacatcaacccttccaagctcaaggtcgagaagaccacccagcccaagggcctcttgaagcccgaggagctcgtcttcggtcgcaacttcactggtactgtccaaaacctcccctccaaaaatgcgcaatcagctttgactaactttcgtgccacaccagaccacatgctcaccatcgaatggaccaaggagaacggctggaacgcgcccgagatcaagccctaccagaacctctcgctcgaccccgccacctgcgtcttccactacgcctttgagtgcttcgagggcatgaaggcctacaaggacaaggccggcaagatccgcctcttccgccccgacaagaacatggcgcgcttcaacaagtcggccgcccgcattgctctgcccaccttcgactcgcccgccctgatcgacctgatcgccaagctggtcaagctcgacagccgcttcatccccgagcagcgcggctactcgctgtacctgcgcccgaccatgatcggcacccaaaagacgcttggcgtcggccctcccggctccgccctgctctacgtcatcgcctcccccgtcggcccttactaccccacgggcttcaaggccgtctcgctcgaggcgaccgactacgccgtgcgcgcctggcccggcggtgtcggcgacaagaagctcggcgccaactacgccccctgcatcgtgccccaagtcgaggctatgagccgtggattccagcagaacctgtggctgtttggcgaggaggagtacgtcaccgaggtcggcaccatgaacttctttgtggccatcaaggacaagaagacgggccagaagaccctggtcactgcgccgctcgacggcaccatcctcgagggcgtcacgcgtgattccgtcctcgcgctggctcgcgagaagctggcgcctgagggctggaagatcgaggagcgcaagttcaccatgaaggagcttgccgaggcggcgaacgagggccgtctgattgaggctttcggcgccggtactgctgctattgtgagccccgtccgctccatcagctggaagggccagctcgtcaactgcggtcttaagcccgaggaggagtcgggtgagcttacgatgcaggtcaagaactggatggaggccaggcagtatggtgatgaggagcatgagtggagctatgtttgcgagtag

SEQ ID NO: 7051 - protein, 427 aa, Neurospora crassa
MFRTSLRRAAAFQPARPCFGAFSATAARQYSAATGTADINPSKLKVEKTTQPKGLLKPEELVFGRNFTGTVQNLPSKNAQSALTNFRATPDHMLTIEWTKENGWNAPEIKPYQNLSLDPATCVFHYAFECFEGMKAYKDKAGKIRLFRPDKNMARFNKSAARIALPTFDSPALIDLIAKLVKLDSRFIPEQRGYSLYLRPTMIGTQKTLGVGPPGSALLYVIASPVGPYYPTGFKAVSLEATDYAVRAWPGGVGDKKLGANYAPCIVPQVEAMSRGFQQNLWLFGEEEYVTEVGTMNFFVAIKDKKTGQKTLVTAPLDGTILEGVTRDSVLALAREKLAPEGWKIEERKFTMKELAEAANEGRLIEAFGAGTAAIVSPVRSISWKGQLVNCGLKPEEESGELTMQVKNWMEARQYGDEEHEWSYVCE

SEQ ID NO: 7052 - DNA, 1242 bp, Neurospora crassa
  CDS (1)..(1242)
atggcgaacttccctcctcctccggtcagcaccatcgactggtccaacgtcggattcaaggtccgcgaagtcaacggtcatatcgagtcttcctactccgtcaagacgggaaaatggtccccgctcaagttcgtcagcgacccctacttgcgcatgcacggtatggcgcccgccctcaactacggccagcaagcgtacgaagggctcaaggccttccgtcttcccggcaacgactcgattgccattttccgcgccgacaagaatgcgagccgcatgcagcactcggccgagtacatcagcattccgcccgtgccggtcgacttgttcattgacgccgtgaaagcggccgtggctctcaacgccgagttcgtcccaccccacgagacgggcgcggccctctacatccgccctcagatctttggaagctccgcgcagctcggtctcagcccgcctgaggagtatctcttctccgtctttgtcatccctacgggcgtgtaccatggtactcaccccgtcaaggcgctcatcctggaggagtttgatcgtgccgcgcccaacggtaccggtagcgccaaggttggtggcaactatgcgcctgtgctccgctggagcgacaaggcccgcaaggaagggtatgatatcaccctccatctggatagtgcgaggcacgaggaggtcgacgagtttagcaccagtgggttcattggcgttcttcgtggcgatgggggagaggatgacgttactgttgttgtgcccagctccaaggccgtgattgatagtgtcacgagcgacagtatccaggagattggcaggagctttggctggaaggttgagaagagaccgatcaagtactctgaactcccctccttctccgaggtcatggccgctggtaccgccgccgctctcgtccccattcgctcaatcactagacgcgttaagacgtcatctccccagtcactcgcttccagcactgctacccaagagcacgctcgtgtctccttcaacaaagaggccgaagaggagacagtcacatacctccccgataaccaggaggacgccggggacctttgcctcaagctgctctcccagcttaagggaattcagctcggaaagatcgaggataagctcggctggcgctttgcggttaccgaggaggatggaaagaaggcagagggtgcggagaaggctcgttctagtgagggtcagggcaaggaggcgcagaccgttgaccagatggattag

SEQ ID NO: 7053 - protein, 413 aa, Neurospora crassa
MANFPPPPVSTIDWSNVGFKVREVNGHIESSYSVKTGKWSPLKFVSDPYLRMHGMAPALNYGQQAYEGLKAFRLPGNDSIAIFRADKNASRMQHSAEYISIPPVPVDLFIDAVKAAVALNAEFVPPHETGAALYIRPQIFGSSAQLGLSPPEEYLFSVFVIPTGVYHGTHPVKALILEEFDRAAPNGTGSAKVGGNYAPVLRWSDKARKEGYDITLHLDSARHEEVDEFSTSGFIGVLRGDGGEDDVTVVVPSSKAVIDSVTSDSIQEIGRSFGWKVEKRPIKYSELPSFSEVMAAGTAAALVPIRSITRRVKTSSPQSLASSTATQEHARVSFNKEAEEETVTYLPDNQEDAGDLCLKLLSQLKGIQLGKIEDKLGWRFAVTEEDGKKAEGAEKARSSEGQGKEAQTVDQMD

SEQ ID NO: 7054 - DNA, 915 bp, Prochlorococcus marinus subsp
  CDS (1)..(915)
atgcaagaatttcttccatatgcctggtttgaaggtaagtgtataccctttaaagatgcaaaagtgtcaatagcaactcatgcacttcattatggaacagcagcctttggaggaatgagagctattccaaatccatctaataaggatgaatttcttttatttagaacagataaacacgtaaaaaggttatctcaaagtgcaagattgcttttaacagaaatatctgaagaatatatatttaatgcactaaaaacaatattaaaaaaaaataaaccttcaaaaccgatctacataaggccttttgtttatacaagtgatttaggtattgctccaagattacataatatagaaactgatttcttcatttattgtattgaactaggagactatttatctcccgatggtgtgtcttgtaggatgagtagttggacaagacaagaagatagatctctacctttaagaggtaagataagcggtgcttacattaccagttcattagccaaaacagaggctagtttatcaggatttgacgaagcattgctgttaaattctagtggtaaagtaagtgaagctagtggaatgaacttatttatagtaagaaatggtgaactgattactccaggagttgatcaagacatcctagaaggaattactagagctagtgttattgaattggcgaaatcgtttggtataaatgttattgaaagacctgttgataaaacagaattacttattgctgatgaagtatttctaactggtacagcagctaaaattacacctgtaaagcaaatagaatcaacaaatattaataattatcgtcccataatgacaaaattgaaaaataagcttatcgaaataacggaaggccgttcacaagactatgatgattggataacacgcattgatattagttaa

SEQ ID NO: 7055 - protein, 304 aa, Prochlorococcus marinus subsp
MQEFLPYAWFEGKCIPFKDAKVSIATHALHYGTAAFGGMRAIPNPSNKDEFLLFRTDKHVKRLSQSARLLLTEISEEYIFNALKTILKKNKPSKPIYIRPFVYTSDLGIAPRLHNIETDFFIYCIELGDYLSPDGVSCRMSSWTRQEDRSLPLRGKISGAYITSSLAKTEASLSGFDEALLLNSSGKVSEASGMNLFIVRNGELITPGVDQDILEGITRASVIELAKSFGINVIERPVDKTELLIADEVFLTGTAAKITPVKQIESTNINNYRPIMTKLKNKLIEITEGRSQDYDDWITRIDIS

SEQ ID NO: 7056 - DNA, 921 bp, Prochlorococcus marinus
  CDS (1)..(921)
atgcatcagttcctgccttatgcctggttccagggagcttgtgttccattcgaagaggccaagatttctgttgccacacatgctttgcactacggcacaggcgctttcggaggcatgcgtgccatacctgatccccaaaacagcaacaccatgttgctctttagggcagaccgtcatgccaaaagactcagtcaaagtgctcgattgttgctgacggaactcagcgagacaagaattctctcagcgcttgaagcaatgttgcaggcgaatcgaccaaccactcccatttatctacgacctttcgtctacacgagtgatctaggcattgcgcctcgactccacaatattgaaactgacttccttatctatggtctagaacttggcgactacctatctccagaaggcgtgagctgccggatcagtagctttacgcgccaagaggatcgctcactgccgctacgaggcaagatcagtggtgcttacatcacaagctctctcgcgaaaacggaagcggtcttaagtggattcggtgaagcattgttgctcaatagcagaggcaagatcagtgaagcaagtggcatgaacctattcctggtcagggatggtcagttgattacccccggtgttgatcaagacattttggaagggatcacgcgatccagtgtccttgaactggcacgggtgatgggcttatctgtgattgaacgccctgtggacaaaacggaactatttattgctgatgaggtgttccttaccggaacagctgcaaaaatcacgccaatacgtcagattgaatcaaccatattggctacagaacgaccgattatgaatgctcttcgagaccgtctaatcgagataactcaaggacgtgataaggattatgagcactggataacacgtatttgtatgactaatgactga

SEQ ID NO: 7057 - protein, 306 aa, Prochlorococcus marinus
MHQFLPYAWFQGACVPFEEAKISVATHALHYGTGAFGGMRAIPDPQNSNTMLLFRADRHAKRLSQSARLLLTELSETRILSALEAMLQANRPTTPIYLRPFVYTSDLGIAPRLHNIETDFLIYGLELGDYLSPEGVSCRISSFTRQEDRSLPLRGKISGAYITSSLAKTEAVLSGFGEALLLNSRGKISEASGMNLFLVRDGQLITPGVDQDILEGITRSSVLELARVMGLSVIERPVDKTELFIADEVFLTGTAAKITPIRQIESTILATERPIMNALRDRLIEITQGRDKDYEHWITRICMTND

SEQ ID NO: 7058 - DNA, 1107 bp, Mycobacterium bovis
  CDS (1)..(1107)
atgaccagcggctcccttcaattcacggtgttacgtgcggtcaatccggccaccgacgcgcagcgtgaatcgatgctgcgggcgccgggtttcggcaaataccacaccgaccatatggtgtcgatcgactatgccgagggccgtggttggcacaacgcgcgggtaatcccttatggcccgatcgagctggatccctcggcgatcgtgctgcactatgcgcaggaggtgttcgaagggctcaaagcctaccgctgggccgacgggtccatcgtgtcgtttcgcgccgacgccaacgccgccaggttgcgttcgtcggcgcggcggttggcgattcccgaactgcccgacgcggtgttcatcgaatccctgcgccagctaatcgctgtcgacaaagcttgggtgcccggtgccggcggtgaggaggcgctgtatctgcggccgttcatcttcgccaccgagccgggactgggcgtgcggcctgccacccaataccgttacctgttgatcgcctcgccggccggtgcgtacttcaagggcggcatcgcccctgtcagcgtctgggtttcgacggagtatgtacgggcctgtccgggcggcaccggtgcggccaagttcggcggcaactacgccgcctcgttgctggcgcaggccgaagccgccgagaacggatgcgaccaggtggtgtggctggacgctgtggaacgccgctatatcgaagagatgggtggcatgaacatcttcttcgtgctcggcagcggcggatcggcgcggctggtcaccccggagctgtccggttccctgctgcccgggatcacacgggattcgttgttgcagttggctattgatgccggatttgcggtcgaggaacgcaggattgatatcgacgagtggcagaagaaagccgccgccggcgagatcaccgaggtgtttgcgtgcggcaccgccgctgtcatcaccccggtcgcgcgggtgcggcacggtgccagcgagttcagaatcgccgacggtcagccgggtgaggtgaccatggcactacgcgatacgctgaccggcatccagcggggcaccttcgcggacacccacggctggatggcgcggctggggtag

SEQ ID NO: 7059 - protein, 368 aa, Mycobacterium bovis
MTSGSLQFTVLRAVNPATDAQRESMLRAPGFGKYHTDHMVSIDYAEGRGWHNARVIPYGPIELDPSAIVLHYAQEVFEGLKAYRWADGSIVSFRADANAARLRSSARRLAIPELPDAVFIESLRQLIAVDKAWVPGAGGEEALYLRPFIFATEPGLGVRPATQYRYLLIASPAGAYFKGGIAPVSVWVSTEYVRACPGGTGAAKFGGNYAASLLAQAEAAENGCDQVVWLDAVERRYIEEMGGMNIFFVLGSGGSARLVTPELSGSLLPGITRDSLLQLAIDAGFAVEERRIDIDEWQKKAAAGEITEVFACGTAAVITPVARVRHGASEFRIADGQPGEVTMALRDTLTGIQRGTFADTHGWMARLG

SEQ ID NO: 7060 - DNA, 915 bp, Synechococcus sp
  CDS (1)..(915)
atgcatcagttcctgccctacgcctggtttcagggtcagtgcgtgcctttcgaggaggccaggatctccatcgcaacccatgccctgcattacggcacaggtgcgttcggcggcatgcgcgccattcctgatccgcagagcagcggatcgatgctgttgtttcgtgccgatcgccatgcacggcggttgagccgaagcgcacggttgctgctcactgatctgagcgaagcaacgattctcgaagcgttgacggcgatgctgcaggcgaacaaaccgcagcaacccatttatctgcgaccgtttgtttacaccagtgatctcggcatcgcgccgcggttgcacgacatcgagaccgacttcctgatttacgggttgccgctgggggattacctctcaccggacggcgtcagttgccgcatcagcagttggacgcgacaggaggaccgttccctccccctgcgcggcaagatctcaggggcctacattaccagttctctggccaagaccgaggccgtccagagcggattcgacgaagctctgctgttgaacagtcgcggcaagatcagcgaagccagcggcatgaatctgttcctggttcgtgacggtcaactgatcacgccaggcgttgaccaggacattcttgagggcatcacccgggcaagcgtgatcgaactggccaaggccatgcagattcctgtagtggaacgccctgtggacaaaacagagctgttcatcgccgatgaggtcttcctcaccggcacggcagcgaagatcactccgatccgccagatcgaatcaacgcagatgaacacggatcgaccggtgatgaccgcactgaagacgcggttggtgtcgatcaccgaaggccgagatacggcctatgaacactgggtgacccgaattcctatcgcgtga

SEQ ID NO: 7061 - protein, 304 aa, Synechococcus sp
MHQFLPYAWFQGQCVPFEEARISIATHALHYGTGAFGGMRAIPDPQSSGSMLLFRADRHARRLSRSARLLLTDLSEATILEALTAMLQANKPQQPIYLRPFVYTSDLGIAPRLHDIETDFLIYGLPLGDYLSPDGVSCRISSWTRQEDRSLPLRGKISGAYITSSLAKTEAVQSGFDEALLLNSRGKISEASGMNLFLVRDGQLITPGVDQDILEGITRASVIELAKAMQIPVVERPVDKTELFIADEVFLTGTAAKITPIRQIESTQMNTDRPVMTALKTRLVSITEGRDTAYEHWVTRIPIA

SEQ ID NO: 7062 - DNA, 858 bp, Rhodopirellula baltica
  CDS (1)..(858)
atgacccaagccatctacatcaacggtgaatacttctcacgcgaagacgccaagatcagtgtctacgatcacggactgctgtacggcgacggcgtgttcgaagggatgcggatctactcgggcaaagtgttcgcactcgaagaccacatgacacggctctacgaaagcgctcgtgcgatcatgctggacattcccatcgcaatcgatgctttgacgactgcagtgaacgaaaccgttgcaaaaaatggtttgacagaaggctacattcgcttggtcgtcacccgtggtggcaaccaattggggctcaacccgttctcgtgtgaagatccccaagtgatcatcatcgcggatacgatctcgttgtaccctgagaagttctacaccgaaggtttggaactgatcaccgcgtcgacgatccgcaaccatcccgccgcgctcagcccccgcgtgaagtcgttgaactacctcaacaacatcatggcgaagatcgaagccattcgcgccgggtgcattgaagcggtgatgctgaacaccaaaggcgaagttgccgagtgcaccggcgacaacattttcatcgtccgtggcggccggttgatcaccccaccaatcgatgcaggaatccttgaagggatcacgcgtaacaccgtgattgatctcgctcgcgaaaatgggatcgaagtggccgaggaagccatgacccgtcacgacatctttgtcgccgatgaatgcttcctaaccggcagtgccgccgaagtcatccccgcggtcaaactcgatgggcgagtcattggcgatggcaaacccggcccaatgactcaaaagctcaacgcggccttccgtgcatttgtggctcgttag

SEQ ID NO: 7063 - protein, 285 aa, Rhodopirellula baltica
MTQAIYINGEYFSREDAKISVYDHGLLYGDGVFEGMRIYSGKVFALEDHMTRLYESARAIMLDIPIAIDALTTAVNETVAKNGLTEGYIRLVVTRGGNQLGLNPFSCEDPQVIIIADTISLYPEKFYTEGLELITASTIRNHPAALSPRVKSLNYLNNIMAKIEAIRAGCIEAVMLNTKGEVAECTGDNIFIVRGGRLITPPIDAGILEGITRNTVIDLARENGIEVAEEAMTRHDIFVADECFLTGSAAEVIPAVKLDGRVIGDGKPGPMTQKLNAAFRAFVAR

SEQ ID NO: 7064 - DNA, 915 bp, Prochlorococcus marinus
  CDS (1)..(915)
atgcatgattttctcccatatgcatggtttaaaggtaaatgtgttccttttgacgaagcaaaaatatctatagcaactcatgcacttcattatggaacagcagcttttggaggtatgagagctatacccgatccaagtgataatggtaattttttactcttcagagctgataagcatgcaaaaaggctcagccaaagtgcaaaacttctacttacagaactcagtgagcgctatattttacagagcatagaaacttggctcaaagccaataaacctagtaaaccaatttatataagaccttttgtttataccagtgatttaggcattgctccaaggctacataatatagaaactgactttttcatatacggactggaattaggtgattacttatctcccgaaggcgtttcatgtcgcataagtagctggaaacggcaagaagattgttctctcccactaaggggaaagattagtggtgcctatataacaagctcacttgctaaaacagaggccgttttaacaggctttgatgaagctttattattaaattcacaaggcaaagtaagtgaagctagtggtatgaacctattcattgtcagagatggaaatctaattactccggggaccgaccaagatattctagaaggaataactagagctagtgttatagaaatagctaattatctaggaattaatgtcattgaaaggccagtggataaaacagagttgtttatagcagatgaagtattccttactggaacagcggctaagataacaccaatcaaacagattgaatctaccctattaaatacagaactgcctataatgaataaactaagggattatctaatttcaataacagaaaataaggaagataaatttagtaactggataacctccataaaaataagttaa

SEQ ID NO: 7065 - protein, 304 aa, Prochlorococcus marinus
MHDFLPYAWFKGKCVPFDEAKISIATHALHYGTAAFGGMRAIPDPSDNGNFLLFRADKHAKRLSQSAKLLLTELSERYILQSIETWLKANKPSKPIYIRPFVYTSDLGIAPRLHNIETDFFIYGLELGDYLSPEGVSCRISSWKRQEDCSLPLRGKISGAYITSSLAKTEAVLTGFDEALLLNSQGKVSEASGMNLFIVRDGNLITPGTDQDILEGITRASVIEIANYLGINVIERPVDKTELFIADEVFLTGTAAKITPIKQIESTLLNTELPIMNKLRDYLISITENKEDKFSNWITSIKIS

SEQ ID NO: 7066 - DNA, 933 bp, Helicobacter hepaticus
  CDS (1)..(933)
atgaaagaagcgcaatttatttggaaagatggtgttcttgtgccgtgggctgaagctacgacacacgttttaagccatacattacattatggtaatgccttatttgaaggcacaagagcatatatgacaaaacaaggactagccatttttcgcttaaaggaccataccaaacgacttttagattctgctaaaattgtatgtattaagtctccttatacacaagaagaattagaaaaagcccaaatagagcttttgagggcaaataaaagtgattataatggcaatgtttatattcgtcctctcatatatttagggtatggtgtaatgggtgttagtcatattaatgcacctgtaaatgtagcgattgctgcgtgggaatggggtgcatatcttggcgaagagggcattaataatggcattaaagtgaaaacaagttcttttgtccgcaatcctgcaaaagcttttatgggtaaggcaaaggtagctgctaattatctcaactctcaaatggcaaagcacgaggcgctttcttgcggttgcgatgaggcgttgctccttgatgataatggttttgtagcggaagggagtggtgagtgcttttttatcgtgcgaaatggtaagcttattacaccaccacacgcaaatactttagaatctattactcaagcaacaaccatagaaattgctaaggatatgggaataccatttgaggagcgaaatattacacgcgatgaggtatatatcgctgatgaagctttttttacaggcacagcagcagagattacgcctgtgcgtgagcttgatgcgcgtgtcattggaaatggcacagcaggagagattacaaaatcacttcaaaaagcatattttgctattgtaaatggagagaatcctcgttatcaacactatttgacttatattgacaaggagaaataa

SEQ ID NO: 7067 - protein, 310 aa, Helicobacter hepaticus
MKEAQFIWKDGVLVPWAEATTHVLSHTLHYGNALFEGTRAYMTKQGLAIFRLKDHTKRLLDSAKIVCIKSPYTQEELEKAQIELLRANKSDYNGNVYIRPLIYLGYGVMGVSHINAPVNVAIAAWEWGAYLGEEGINNGIKVKTSSFVRNPAKAFMGKAKVAANYLNSQMAKHEALSCGCDEALLLDDNGFVAEGSGECFFIVRNGKLITPPHANTLESITQATTIEIAKDMGIPFEERNITRDEVYIADEAFFTGTAAEITPVRELDARVIGNGTAGEITKSLQKAYFAIVNGENPRYQHYLTYIDKEK

SEQ ID NO: 7068 - DNA, 924 bp, Candidatus Blochmannia floridanus
  CDS (1)..(924)
atgaaaaaatctgattttatttggtttaatggaaatatggtaccttgggataaagcaaaggtacatgttatgtctcatgcattgcattatggatcgtcagtttttgaaggaatgcgttgttatgattcttataaagggccagtgatatttagaggtcaagatcatattcaaagattgatgaattctgcaaagatttatcgtatacctgtttctagaagtaaattggagttaatgcaagcgtgtagaatgctaattcaaaaaaataatttggttaatgcatatattcgtcctttgatttttattggaaatgttggtggaatggagattaatcctattattgaatatactgctgacgttgttatagctgcttttttttggaaagcgtatttaggggaagattctttaaattctggagttgatgttgtagtatcttcttggcgtagagttccaacggatactattcctaatttagctaaggcaggtggtaattatttatcatctatgttaattagcaatgaagccaataggtatggttatcatgaaggtattgctttagatatatatggttatgtttcggaaggtgctggagagaatttatttgtgattaaagataatattgtattaactccacctattagcgcttctattttgtcaggtattactcgtgattctgttataaatttattgaaggatgttggattcgagataaaagaagaattattatctcgtgaatttttatatatagcagatgaaatatttatgtgtggaactgccgctgaaattactccaatacgtagtgtggatggtattaaaattgggtcaggatcaagaggtcctattactaaaaaattgcaagaattattttttaatttgtttacgggaaaaactgaagataaatggggttggttagatgcaatgatttga

SEQ ID NO: 7069 - protein, 307 aa, Candidatus Blochmannia floridanus
MKKSDFIWFNGNMVPWDKAKVHVMSHALHYGSSVFEGMRCYDSYKGPVIFRGQDHIQRLMNSAKIYRIPVSRSKLELMQACRMLIQKNNLVNAYIRPLIFIGNVGGMEINPIIEYTADVVIAAFFWKAYLGEDSLNSGVDVVVSSWRRVPTDTIPNLAKAGGNYLSSMLISNEANRYGYHEGIALDIYGYVSEGAGENLFVIKDNIVLTPPISASILSGITRDSVINLLKDVGFEIKEELLSREFLYIADEIFMCGTAAEITPIRSVDGIKIGSGSRGPITKKLQELFFNLFTGKTEDKWGWLDAMI

SEQ ID NO: 7070 - DNA, 921 bp, Bordetella parapertussis
  CDS (1)..(921)
atgtcgatgtcggaccgcgacggcttcatctggtatgacggcaagctggtgccttggcgcgaggccaccacgcacgtgctgacccactccctccactacggactgtccgtcttcgaaggcgtgcgcgcctacgaaaccgcggccggcaccgccatcttccggctgcaggaccacaccaaccgcctgttcaattcggcccacatctaccagatcccgctgccgtacgaccgcgacaccctcaacgaggcccagcgcgaagtggtgcgcgccaacggcctggcatcgtgttacctgcgcccgctggccttctatggctcggaaaaaatgggggtctcgcccaagggcgcccaggtgcacgtggccatcgccgcctggccctggggcgcctatctgggcgagaccgccctggcgcagggcatccgcgtcaaggtgtcctcgttcgcgcgccagcacgtcaacgtcaccatgccgcgcgccaaggtggccaccacgtacgccaattccatcatcgccaatgccgaagcgctgcaggatggctacgacgaggccctgctgctcgataccgagggtttcgtggccgaaggcgccggcgagaacattttcatcgtcaaggacggcgtgctgtgcgagcccgagatcgcctcggcgctgacgggcatcacccgctccaccatccatgcgctggccgccgacctcggcctgcgcgtcgtcaccaagcgcctcacacgcgatgacgtctacattgccgacgaagccttcttcactggcaccgcggccgaggtcacgccgatccgcgaggtcgacaaccggcagatcggcgccggccgccgcggcccggtcaccgagaagctgcagcaggccttcttcgacctggtcaacggccgcaaccccaaataccagcattggctgaccccggtatga

SEQ ID NO: 7071 - protein, 306 aa, Bordetella parapertussis
MSMSDRDGFIWYDGKLVPWREATTHVLTHSLHYGLSVFEGVRAYETAAGTAIFRLQDHTNRLFNSAHIYQIPLPYDRDTLNEAQREVVRANGLASCYLRPLAFYGSEKMGVSPKGAQVHVAIAAWPWGAYLGETALAQGIRVKVSSFARQHVNVTMPRAKVATTYANSIIANAEALQDGYDEALLLDTEGFVAEGAGENIFIVKDGVLCEPEIASALTGITRSTIHALAADLGLRVVTKRLTRDDVYIADEAFFTGTAAEVTPIREVDNRQIGAGRRGPVTEKLQQAFFDLVNGRNPKYQHWLTPV

SEQ ID NO: 7072 - DNA, 903 bp, Bordetella parapertussis
  CDS (1)..(903)
atgtcgcgcagcgcgtccaggcggcgctgtaggcgcaccccgatcaccaaggaagaccgcggtatggaagccctttactggtacgacggccaatggctgaccgagaatcccaagctgctcggcccgtccgaccacgcattctggatggccagcatggtgttcgacggcgcgcgcgccttcgccggcctgacgcccgacctcgacctgcattgccagcgcgtggtgcgctcggctgagaagatgctgatgaaaccggcgctgccgtggcaacgcatccaggaactatgcctggaagcggtggccaggttccctgccggcagcgagctctacatcaagccgatgttcttctgcgccgacggcttcctgctgcccgacgccgagcagacgcagttcgtgctgcacgtattcaaggtgcccctgcccggcgaacaaggcttctcggcctgcttctccagcttcgcgcgttcctggcccaacatggcgcccaccgacgccaaggcgtcgtgcctgtaccccaatggccagcgcgccatccgcgaggccaacctcaagggcttcgacaacgccatcatgctcgacggcgcgggccatgtcgcggaattcgccaccagcaacctgtggatcgcgcgcaacggccggatcgccacgccggtcgacaacggcacgttcctcaacggcattacgcgccagcgcgtgctggcgctgctgcacgccgatggggtgaccgtggacgagcgcgccctgacccgcgccgacgtcgaagaagcggacgaggtgttttctaccggcaactacggcaaggtcgtgcacgtcaaccgggtggaagcgcgcagcctgtcgtacgggccgctggcgcggcacgcctaccggctgtacatggactacgcggcgggcgggcgctga

SEQ ID NO: 7073 - protein, 300 aa, Bordetella parapertussis
MSRSASRRRCRRTPITKEDRGMEALYWYDGQWLTENPKLLGPSDHAFWMASMVFDGARAFAGLTPDLDLHCQRVVRSAEKMLMKPALPWQRIQELCLEAVARFPAGSELYIKPMFFCADGFLLPDAEQTQFVLHVFKVPLPGEQGFSACFSSFARSWPNMAPTDAKASCLYPNGQRAIREANLKGFDNAIMLDGAGHVAEFATSNLWIARNGRIATPVDNGTFLNGITRQRVLALLHADGVTVDERALTRADVEEADEVFSTGNYGKVVHVNRVEARSLSYGPLARHAYRLYMDYAAGGR

SEQ ID NO: 7074 - DNA, 945 bp, Bordetella bronchiseptica
  CDS (1)..(945)
atgaaagccgcgccgcaggcggcgcggcggcaccggcgggctgccatgcccgcccctatcctctccaaggagctccccatgattccgggcatgccgggcgacagccaggtatatctcaacggcgaattcacgcgcctcgacgaagccaagatttccgtgctcgaccgcggtttcatcttcggcgatggtatctatgaagtcgtgccggtctatgacggcaaggtgttccgcatgaccgaacacctgaatcgcctggatcgcagcctggcggcgctgcgcatcgccgcgccgatggaccgcgcgggatgggagtcggtgatcgccgggttgatcgcccgctcggcccagcccacctgcatcatctacctgcaggtcacgcgcggcgtctgcaagcgcgatcacgcctttcccaccgagccgatcacgcccacggtgttcggcatggccgcggccttcagtccgccgggggccgcgcagcgcacccagggcctgagcgcgattgccatcgacgacgagcgctggctgcattgcgagatcaagtcggtttcgctgctgggcaacgtgctggccaagcagcaggcggtggacgccggcgtggatgaagtggtgcagtttcgcgatggctggctgaccgagggctcgtcgaccaatatctgggtggtttccggcggcaagctgctggccccgcccaagaacaacctgatcctggaaggcatccgctacggcctgatgggcgagctggccgaggcggccggcctgccgttcgaggcacggcggatctcgcgcgaggaagtgctcgccgccgacgaattgatgctgacctcggccaccaaggaagtgctgcccatcgtgcgcctggacggcaaggcggtgggcgcgggcaagcccggccccgtttatgagcagttgcgcgcgggttatgatgcgcgtatcgccgccctgtag

SEQ ID NO: 7075 - protein, 314 aa, Bordetella bronchiseptica
MKAAPQAARRHRRAAMPAPILSKELPMIPGMPGDSQVYLNGEFTRLDEAKISVLDRGFIFGDGIYEVVPVYDGKVFRMTEHLNRLDRSLAALRIAAPMDRAGWESVIAGLIARSAQPTCIIYLQVTRGVCKRDHAFPTEPITPTVFGMAAAFSPPGAAQRTQGLSAIAIDDERWLHCEIKSVSLLGNVLAKQQAVDAGVDEVVQFRDGWLTEGSSTNIWVVSGGKLLAPPKNNLILEGIRYGLMGELAEAAGLPFEARRISREEVLAADELMLTSATKEVLPIVRLDGKAVGAGKPGPVYEQLRAGYDARIAAL

SEQ ID NO: 7076 - DNA, 1233 bp, Oryza sativa
  CDS (1)..(1233)
atggagctcctcccgcgtgtgggtgtggccgcccccggtcccggacgcggcggcgcgtcgccgtccccgacgcgccgtcatcgcgcgccctctcaccccattctgaagcgatcggcggcggtttgcggcgcagtcgccgtctgcagaggaggggctgtcgccaggaggagccggtggtcaactctggtgaccgcagcatattacacaggaactgctgaactggtcgactttaactgggaaactcttgggtttcaacccgtgccgactgactttatgtatgtgatgagatgttccgaggaaggggtgttcaccaagggtgaattggtgccatatgggccaatagaactgaacccagcagctggagtgttgaattatggtcagggtttacttgaaggtctgcgagcacatagaaaagaggatggatcagtccttctatttcgtcctgatgaaaatgctttacggatgagagtaggcgcagaccggttatgtatgcctgcaccaagtgtagagcagttcctagaagctataaagctaacaattttagcaaacaagcgctgggtaccccctactggcaaaggttctttatatatcagaccgctgctgattggaagtggggctatcctcggtgttgcaccagccccagagtacacatttgttgtctttgcttgcccagttgggcactattttaaggatggcttatctccaatcagcttgttaaccgaggaagaatatcagtgtgcggcaccaggtggaactggtgatataaagactatcggaaattatgcttcagccgtttatgctaaagaaagagctaaggagagaggtcattctgatgttctttacttggatccagtgcataaaaagtttgttgaggaactttcgtcctgtaatatattcatggtgaaggacaacattatttctactccactattaacgggaacagttcttcctggcatcacaagaagaagtataattgaatacgcccgtagccttggatttcaggttgaagagtgtcttattacaatagatgagttgcttgacgctgatgaagttttctgtactggaacttctgtggtactatcctctgttggttgcatagtgtaccaggggagaagagtggagtatgggaaccagaagttcagaactgtgtctcagcaactctattcagcacttacggctatccagaaaggcctcgtggaggacagtatgggatggactgtgcaactgaattag

SEQ ID NO: 7077 - protein, 410 aa, Oryza sativa
MELLPRVGVAAPGPGRGGASPSPTRRHRAPSHPILKRSAAVCGAVAVCRGGAVARRSRWSTLVTAAYYTGTAELVDFNWETLGFQPVPTDFMYVMRCSEEGVFTKGELVPYGPIELNPAAGVLNYGQGLLEGLRAHRKEDGSVLLFRPDENALRMRVGADRLCMPAPSVEQFLEAIKLTILANKRWVPPTGKGSLYIRPLLIGSGAILGVAPAPEYTFVVFACPVGHYFKDGLSPISLLTEEEYQCAAPGGTGDIKTIGNYASAVYAKERAKERGHSDVLYLDPVHKKFVEELSSCNIFMVKDNIISTPLLTGTVLPGITRRSIIEYARSLGFQVEECLITIDELLDADEVFCTGTSVVLSSVGCIVYQGRRVEYGNQKFRTVSQQLYSALTAIQKGLVEDSMGWTVQLN

SEQ ID NO: 7078 - DNA, 1104 bp, Trypanosoma brucei
  CDS (1)..(1104)
atgactttcctcgccaaaaaaatttttgttcaacgcgtggcaaatccaccgccacttccttcactgcagggagttatgtttggtactcttttcagcccacatatgttggtaattgatgcagatgggaatgggaaatggggcaaaccacgtattgttccctttgagaacctttcattgccgccgcagactgcttgcttacattatgccattcaatgcttcgagggcatgaaggcgtatcgcgacagtcacggcaatatccgactcttccgcccggatcgtaactgtcgacggctactggacagcacacgacgcttatgtctccctggatttgaccctgacgaactgcaaaagttaattgaggagtttgtgaaagtggaacgtgattacgtcccaagtgagcgtggttactctctatacttgagacccactgtaattgggactggaagcaaactctccgcagtggcaggttctgcagcgaagttattcgtgattgcttcacctgttggaccatattatccctctgggatgaaacctgtgagacttcatgtggaggaggagcggcgccgtgcctggcctggtggggtcggcaacgtgaagcttggcgcgaactacgctgcgcctatgctggtgcagcaggaagcgtctgagcttggctttcagcaagtgttatggctgggcgctggagaagaagtgcaagaagtgggagcaatgaatttcatgtgtctttggcgtccttctgcaaattcaaatgaagtggaacttgtaactgcgccgttggatggcacgatcctccccggtgtgacgcgagattccattttgtcgctggtgcggcagtggggtgaggcacgtgtatctgaacgctcctttaccattcacgagctcactgctgcgctacgggagaaacgtgtgcttgagtgctttggctgtgggacggctgctattgtgtcccctgtggaagcactgtcatataagggagagttgcttaatgttccatgcccggctccaggggcttcgctcacacatcgggttctaaaggcgattacagatattcaatatggtgatgtggaacatgagtggtcacgcattgttggtaccacttcttaa

SEQ ID NO: 7079 - protein, 367 aa, Trypanosoma brucei
MTFLAKKIFVQRVANPPPLPSLQGVMFGTLFSPHMLVIDADGNGKWGKPRIVPFENLSLPPQTACLHYAIQCFEGMKAYRDSHGNIRLFRPDRNCRRLLDSTRRLCLPGFDPDELQKLIEEFVKVERDYVPSERGYSLYLRPTVIGTGSKLSAVAGSAAKLFVIASPVGPYYPSGMKPVRLHVEEERRRAWPGGVGNVKLGANYAAPMLVQQEASELGFQQVLWLGAGEEVQEVGAMNFMCLWRPSANSNEVELVTAPLDGTILPGVTRDSILSLVRQWGEARVSERSFTIHELTAALREKRVLECFGCGTAAIVSPVEALSYKGELLNVPCPAPGASLTHRVLKAITDIQYGDVEHEWSRIVGTTS

SEQ ID NO: 7080 - DNA, 1104 bp, Trypanosoma brucei
  CDS (1)..(1104)
atgactttcctcgccaaggacctcactgttcaacgcgtggcaaatccaccgccacttccttcactgcagggagttatgtttggtactcttttcagcccacatatgttggtaattgatgcagatgggaatgggaaatggggcaaaccacgtattgttccctttgagaacctttcattgccgccgcagactgcttgcttacattatgccattcaatgcttcgagggcatgaaggcgtatcgcgacagtcacggcaatatccgactcttccgcccggatcgtaactgtcgacggctactggacagcacacgacgcttatgtctccctggatttgaccctgacgaactgcaaaagttaattgaggagtttgtgaaagtggaacgtgattacgtcccaagtgagcgtggttactctctatacttgagacccactgtaattgggactggaagcacactctccgcagtggcaggttctgcagcgaagttattcgtgattgcttcacctgttggaccatattatccctctgggatgaaacctgtgagacttcatgtggaggaggagcggcgccgtgcctggcctggtggggtcggcaacgtgaagcttggcgcgaactacgctgcgcctatgctggtgcagcgggaagcgtctgagcttggctttcagcaagtgttatggctgggcgctggagaagaagtgcaagaagtgggagcaatgaatttcatgtgtctttggcgtccttctgcaaattcaaatgaagtggaacttgtaactgcgccgttggatggcacgatcctccccggtgtgacgcgagattccattttgtcgctggtgcggcagtggggtgaggcacgtgtatctgaacgctcctttaccattcacgagctcactgctgcgctacgggagaaacgtgtgcttgagtgctttggctgtgggacggctgctattgtgtcccctgtggaagcactgtcatataagggagagttgcttaatgttccatgcccggctccaggggcttcgctcacacatcgggttctaaaggcgattacagatattcaatatggtgatgtggaacatgagtggtcacgcattgttggtaccacttcttaa

SEQ ID NO: 7081 - protein, 367 aa, Trypanosoma brucei
MTFLAKDLTVQRVANPPPLPSLQGVMFGTLFSPHMLVIDADGNGKWGKPRIVPFENLSLPPQTACLHYAIQCFEGMKAYRDSHGNIRLFRPDRNCRRLLDSTRRLCLPGFDPDELQKLIEEFVKVERDYVPSERGYSLYLRPTVIGTGSTLSAVAGSAAKLFVIASPVGPYYPSGMKPVRLHVEEERRRAWPGGVGNVKLGANYAAPMLVQREASELGFQQVLWLGAGEEVQEVGAMNFMCLWRPSANSNEVELVTAPLDGTILPGVTRDSILSLVRQWGEARVSERSFTIHELTAALREKRVLECFGCGTAAIVSPVEALSYKGELLNVPCPAPGASLTHRVLKAITDIQYGDVEHEWSRIVGTTS

SEQ ID NO: 7082 - DNA, 879 bp, Bacillus cereus
  CDS (1)..(879)
atgaatggggaatttgtagaaaaagaaaaggcagttgtttcagtatatgatcacggttttttatacggagacggtgtatttgaagggattcgtagttacggaggaaatgtattttgtttaaaagaacatgtgaaacgattgtatgaatcagcgaaatctattttactaacaattccaatgacggtagaagaaatggaagaagcagttttacatacactccaaaaaaacgaatatactgatgcttacattcgcttaattgtctcaagaggaaaaggtgacttagggctcgatccgagaagttgtgtgaagccgagcgtaattatcattgcagaacaattaaagttattcccacaagaattttatgataatgggctaagcgttgtatctgttgcatcaagacgtaatacgccagatgcgttagatccacgtattaagtcaatgaattatttaaataacgtacttgtaaaaattgaagcagcacaagcaggggtgttagaggctcttatgttaaatcaacaaggatatgtttgtgaaggttctggtgataatgttttcgttgtgaaagatggaaaagtattaaccccgccatcctatttaggagcattagaaggtattacgagaaatagtgttatcgagctatgtgagcgactgagtattccgtgtgaggaaagaccgttcactcgccatgatgtatatgtagcggatgaagtatttttaacaggaacagcagcggagttaattccagttgtaaaagttgattccagagaaattggagatgggaaaccaggaagtgtaacgaaacaattgaccgaagaatttaaaaaattaacgagagaaagaggagtacgtgttcccaggctgacggaaagcttagcataa

SEQ ID NO: 7083 - protein, 292 aa, Bacillus cereus
MNGEFVEKEKAVVSVYDHGFLYGDGVFEGIRSYGGNVFCLKEHVKRLYESAKSILLTIPMTVEEMEEAVLHTLQKNEYTDAYIRLIVSRGKGDLGLDPRSCVKPSVIIIAEQLKLFPQEFYDNGLSVVSVASRRNTPDALDPRIKSMNYLNNVLVKIEAAQAGVLEALMLNQQGYVCEGSGDNVFVVKDGKVLTPPSYLGALEGITRNSVIELCERLSIPCEERPFTRHDVYVADEVFLTGTAAELIPVVKVDSREIGDGKPGSVTKQLTEEFKKLTRERGVRVPRLTESLA

SEQ ID NO: 7084 - DNA, 873 bp, Bacillus cereus
  CDS (1)..(873)
atgttaatttacgtaaatggtcagtatgtagaagcaagtgaagcgagaatttctccttatgatcatggttatttatatggtcttggagtttttgaaacgtttcgtatttataatggtcatcctttcttattggatgatcattataaccgtttaatagaggcgctggatacattgcaaattaaatggacaatgacaaaaaatgatgtgatgcttattttgaaagatttactcgctaagaatgaattgaagcatgcatatgtacgttttaatgtatcggcgggtatagatgaaataggattacaaacggaaatgtatgaagagccttctgttattgtttttataaaacctttaacagctccaggggatgtagtggaaaaagaaggtgttattctaaaacaagtgcgaaatacaccggaagggacatttcgcctgaagtctcatcactatttaaataatattttagggaagcgtgaaattggaaatgttgtgagtaaggaaggtattttccttactgaagcaggttatgttgcagagggcattgtttcgaatctattttttgtgaaaggtgatgttttatatacaccttcgttagagacagggattttaaatggtatcactcgtgcgtttattataaagagtgctgaagaattaaatatagaagtaaaggaaggtttctttacaaaagatgagctactttcagcggatgaagtcttcgtaacaaactccattcaagaaattgttccgctttatcgtatagaagcgcaggatttcccgggtaaagtaggagtggttacaaaaagtttaatgtacctttatggaatgcaaagagagaaattatggagcagaaatgaactacgaagaggagatgtgtag

SEQ ID NO: 7085 - protein, 290 aa, Bacillus cereus
MLIYVNGQYVEASEARISPYDHGYLYGLGVFETFRIYNGHPFLLDDHYNRLIEALDTLQIKWTMTKNDVMLILKDLLAKNELKHAYVRFNVSAGIDEIGLQTEMYEEPSVIVFIKPLTAPGDVVEKEGVILKQVRNTPEGTFRLKSHHYLNNILGKREIGNVVSKEGIFLTEAGYVAEGIVSNLFFVKGDVLYTPSLETGILNGITRAFIIKSAEELNIEVKEGFFTKDELLSADEVFVTNSIQEIVPLYRIEAQDFPGKVGVVTKSLMYLYGMQREKLWSRNELRRGDV

SEQ ID NO: 7086 - DNA, 873 bp, Bacillus anthracis
  CDS (1)..(873)
atggcatatgaaagatttgtactttggaatgatgcaattattgatacaacgaagcaaaaaacgtacatagaacttgaagaaagaggcttgcagtttggagatggtgtctacgaggttattcgtctatataaagggaacttccacttattagatccccatatcacaagattatatcgcttcatggaagaaatagaattaacactccctttctcaaaagcagaactgattaccctactttataaactaatcgaaaataataatttccacgaagatggaacgatttatttgcaagtatctcgtggtgtacaagctcgtacccatacgttctcatatgacgtccctccgacaatctatgcttatattacaaagaaagaaagaccagcgctatggattgaatatggtgtacgtgctatatcagaaccggatacacgctggctacgctgtgatatcaaatcattaaatttattaccaaatatattagctgctacgaaagcggaacgaaaaggttgtaaagaagcccttttcgtacgaaatggtactgtaactgagggaagtcactctaacttctttctcattaaaaacggaactctttacacacatccagctaatcaccttattttaaatggcattattcgtcaatatgtcctttctttagcgaaaacccttcgtattccagtacaagaagagcttttcagcattcgtgatgtttatcaagcggatgaatgtttctttacaggaacgacgattgaaattttgccgatgactcaccttgatggaaccgcaatccaagatggtcaagttggccctatcactaaaatgctgcaaagatcattttctcaaagtttgttacaatccaacatgtcatcctcttaa

SEQ ID NO: 7087 - protein, 290 aa, Bacillus anthracis
MAYERFVLWNDAIIDTTKQKTYIELEERGLQFGDGVYEVIRLYKGNFHLLDPHITRLYRFMEEIELTLPFSKAELITLLYKLIENNNFHEDGTIYLQVSRGVQARTHTFSYDVPPTIYAYITKKERPALWIEYGVRAISEPDTRWLRCDIKSLNLLPNILAATKAERKGCKEALFVRNGTVTEGSHSNFFLIKNGTLYTHPANHLILNGIIRQYVLSLAKTLRIPVQEELFSIRDVYQADECFFTGTTIEILPMTHLDGTAIQDGQVGPITKMLQRSFSQSLLQSNMSSS

SEQ ID NO: 7088 - DNA, 822 bp, Streptomyces avermitilis
  CDS (1)..(822)
atgaagatctggctcgacggcgggctgcaggactccgagaccgcccgcgtctccgtcttcgaccacgggctgaccgtgggtgacggcatcttcgagaccgtcaaggcggccgaggggcggccgttcgcgctgacccgccacctcgaccggctggcgcgttcggcgcggggcctcgggctgcccgagcccgacctggacgaggtacgccgcgcctgcgccgccgtcctggacgccaatccgatgccgctcggccggctgcgcatcacgtacaccggcggctacggtccgctcggctccgaccgcggcgagaaggggccgaccctggtcgtcgccgtcggcgagtccgcccgccgccccgattccaccgccgtgatcaccgtgccgtggacgcgcaacgagcgcggcgcgctcaccggtctcaagaccacctcgtacgccgagaacgtcgtcgccctcgcccgcgcgcgcgaacagggcgcgtccgaggcgctgttcgccaacacggtcggccggctgtgcgagggcaccgggtcgaacgtcttcgtcgtgctcgacggcgagatccacaccccgccggtcgactccggctgcctcgcgggcatcacccgcgcgctcaccgtcgagtggaccggcgccaaggagaccgacctgcccctcgacgtcctggacagcgccgaggaggtgttcctcacgtccacgctgcgcgatgtgcagggcgtgcaccgggtcgactcccgcgaactcccgggcgcgccgggcccggtgaccgccaaggccatgcggctcttcgacgagcaggccggggacgacctcgacccgtag

SEQ ID NO: 7089 - protein, 273 aa, Streptomyces avermitilis
MKIWLDGGLQDSETARVSVFDHGLTVGDGIFETVKAAEGRPFALTRHLDRLARSARGLGLPEPDLDEVRRACAAVLDANPMPLGRLRITYTGGYGPLGSDRGEKGPTLVVAVGESARRPDSTAVITVPWTRNERGALTGLKTTSYAENVVALARAREQGASEALFANTVGRLCEGTGSNVFVVLDGEIHTPPVDSGCLAGITRALTVEWTGAKETDLPLDVLDSAEEVFLTSTLRDVQGVHRVDSRELPGAPGPVTAKAMRLFDEQAGDDLDP

SEQ ID NO: 7090 - DNA, 1089 bp, Streptomyces avermitilis
  CDS (1)..(1089)
atgacgacgcccacgatcgagctcaagccctccgccagtccgctctccgacgcggagcgcgaggcgatcctggccagccccggattcggccgccacttcaccgaccacatggtgacgatcaagtggacggagggacgcggctggcacgacggccagctcgttccgtacgccccgctctccctcgacccggccaccatggtcctgcactacgcgcaggagatcttcgagggcctgaaggcgtaccgccagcccgacggctcggtggcctccttccgccccgacatgaacgccaagcgcttccaggcctcggcccgccgcctcggaatgccggagctgccggtcgagacgttcatcgaggcgtgcgacgtgctggtccagcaggacgcgtcgtgggtgccggcgcacggcggcgaggaatccctctatctgcgcccgttcatgatcgcgaccgaggtcggcctgggcgtgaagcccgccaacgagtacctcttcctcgtcatcgcgtccccggcgggcgcgtacttcccgggcggcgtgaagccggtctcgatctggctctccgaggaccgcgtgcgcgccgtccccggcggcatgggtgacgccaagaccggcggcaactacgccgcgtcgctgctcgcgcaggccgaggccgccgagaagggctgcgcccaggtcgcgtacctcgacgcggtcgagcacaagtgggtggaggagctcggcggcatgaacctgtacttcgtgtacgggaacaagatcatcacgcccgccctgaccggctccctcctcgcgggcgtcacccgcgactccctgctctcggtcgcccgtgacctgggctacgagtccgaggagggccgcgtctccatcgaccagtggcaggccgacaccgagaacggcacgctgaccgaggtcttcgcctgcggtacggccgcggtcatcacgccggtcggcacggtcaagcgcagcagcgccgagtggcagcactcgggcggtgagccgggcgaggtcaccctgaagctgcgcgaggccctcctcgacatccagcgcggcatcggcgaggacaagcacggctggatgcacccgctgggctag

SEQ ID NO: 7091 - protein, 362 aa, Streptomyces avermitilis
MTTPTIELKPSASPLSDAEREAILASPGFGRHFTDHMVTIKWTEGRGWHDGQLVPYAPLSLDPATMVLHYAQEIFEGLKAYRQPDGSVASFRPDMNAKRFQASARRLGMPELPVETFIEACDVLVQQDASWVPAHGGEESLYLRPFMIATEVGLGVKPANEYLFLVIASPAGAYFPGGVKPVSIWLSEDRVRAVPGGMGDAKTGGNYAASLLAQAEAAEKGCAQVAYLDAVEHKWVEELGGMNLYFVYGNKIITPALTGSLLAGVTRDSLLSVARDLGYESEEGRVSIDQWQADTENGTLTEVFACGTAAVITPVGTVKRSSAEWQHSGGEPGEVTLKLREALLDIQRGIGEDKHGWMHPLG

SEQ ID NO: 7092 - DNA, 924 bp, Nitrosomonas europaea
  CDS (1)..(924)
atgtcgatggcggaccgtgacggggttatctggtatgacggagagatggttccgtggcgcaatgccacgacccacgtacttacccataccctgcattatggaatgggtgtattcgaagggttgcgcgcctatcagacacccggggggccggccattttccgtctgcccgagcatacggaacgtctgttctactcggcacatgtcttcagaatgaaaatcccttttgatcagcccacgctgatacaggcacagctggatgtcgtccggcagaacaggttaacctccggctatattcgtccaatcgtcttctacgggtcggaagccatgggattatccgccaagaacctgtccgtccacgtcgccatcgctgcctggtcatggggaacctacctgggcgcagatgcgctggaaaacgggattcgcgtcaaaacctcctcgttcacccgccaccacgtcaatatcaacatgtgccgtgccaagtcggtcgccacttataccaactcgatcctggcgcatcaggaagttgcacaggacggctatgaggaagccttgctgctggacgtggatggttatgtcgcggaaggttccggtgaaaacattttcatcatcaaaaaaggcaagatttacacacctgatctgacagcctgtctggaaggcatcacgcgtgcatcggtcattcaactggcgcaagaagccggtatcgaggtcattcagaaacggattacccgtgatgaagtctactgcgcggatgaagccttttttaccggtacggcagcagaaatcacgccgatccgtgaactggattgtcgtatgattggtaacggtaaacgcggtcctgtcaccgaacaactgcaaaccgcattttttgactgcgtcaacggcaaatcagacaaacatgcagattggctgcattacgccgattag

SEQ ID NO: 7093 - protein, 307 aa, Nitrosomonas europaea
MSMADRDGVIWYDGEMVPWRNATTHVLTHTLHYGMGVFEGLRAYQTPGGPAIFRLPEHTERLFYSAHVFRMKIPFDQPTLIQAQLDVVRQNRLTSGYIRPIVFYGSEAMGLSAKNLSVHVAIAAWSWGTYLGADALENGIRVKTSSFTRHHVNINMCRAKSVATYTNSILAHQEVAQDGYEEALLLDVDGYVAEGSGENIFIIKKGKIYTPDLTACLEGITRASVIQLAQEAGIEVIQKRITRDEVYCADEAFFTGTAAEITPIRELDCRMIGNGKRGPVTEQLQTAFFDCVNGKSDKHADWLHYAD

SEQ ID NO: 7094 - DNA, 861 bp, Nitrosomonas europaea
  CDS (1)..(861)
atgatttacctcaatggcaaatttctgccgatggaacaggctaccgttccagtgctggatagaggcttcatcttcggtgatggtgtctatgaagtcataccggtttattcacgtaaaccgttccggctgggcgaacatctttcccggctgcagcacagtctggatggcatacgtctccagaatccgcacactgaagaacaatgggctggtctgatcgaacgcatcatcgagctgaatgaaggtgatgatcagtacctttacctgcacattacacgcggggtggcaaaacgtgaccatgcctttcctcgcgaagtaacgcccactgtcttcatcatgagcaacccgcttccggctccacctgcaaaattgctcgtttccggagtttcagcgattaccgccagggataatcgctgggggcgctgtgatatcaaagccatttcactgttgccaaatatcttattgcgccagcttgccgtggacgcacaagccatggaaacgatcctgttacgcgatggtctgttgaccgaaggggccgccagcaatattttcatcgtaaaagacgacctgctgctgaccccccccaaagatcaccgtatattgcctggcattacttatgatgtagtactggaactggctgaaacacatggtgttccacatgcgacaagagaaatatcagagcttgagttacgtactgcacgggaaatcatgctgacttcttccaccaaagaaattctcccgatcacacagctggatggacaaccgatcggtaatggcaccccagggccagtatttcagcaactggatcggctctatcaggcatataagctggaagtcatgcgcgggcatgctccacgccagtaa

SEQ ID NO: 7095 - protein, 286 aa, Nitrosomonas europaea
MIYLNGKFLPMEQATVPVLDRGFIFGDGVYEVIPVYSRKPFRLGEHLSRLQHSLDGIRLQNPHTEEQWAGLIERIIELNEGDDQYLYLHITRGVAKRDHAFPREVTPTVFIMSNPLPAPPAKLLVSGVSAITARDNRWGRCDIKAISLLPNILLRQLAVDAQAMETILLRDGLLTEGAASNIFIVKDDLLLTPPKDHRILPGITYDVVLELAETHGVPHATREISELELRTAREIMLTSSTKEILPITQLDGQPIGNGTPGPVFQQLDRLYQAYKLEVMRGHAPRQ

SEQ ID NO: 7096 - DNA, 1020 bp, Enterococcus faecalis
  CDS (1)..(1020)
atggaaaaagccaatcttgattggaataatttaggattttcttacattaaaacgccctttcgttatattagttattggcgagatggcaagtgggaagaaggcacgctaacagataacaatcagttaacgattagtgaaggttcgcctgctctacattatggccaacaatgttttgaaggattaaaagcgtatcaatgtgcagatggttctgtcaatttgtttcgtccagatgaaaatgccaaacggctacaaaaaagttgtgcgcgtctactgatgccacaagtgccagtagaaacctttgtttctgcatgccaagaagtggtgaaagccaaccttgcttatttaccgccatatggaacgggcggtacgttgtatcttcgcccttatatgattggtgtcggcgataatattggcgtagcacctgccaaagaatacattttttctattttttgcgtgccggttggttcgtattttaaaaatggtttagcaccaaccaactttatcgtttctgaatatgatcgagcagcgggtcgaggaactggggcagctaaagtggggggcaattatgcagctagtcttttaccaggtgcagaagcacatgagaaagaatttagtgattgcatttatttagatccgtatacgcatacgaaaattgaagaagttggtgcagccaatttctttggcataaccaaagatggtacttttattacgccgaaatcagcgtctattttgccaagtattactaaatattcattattgacgctagcaaaagaacgtttagggatgacggcgcttgaaggagacgtttacattgatcgattagcggacttctccgaagcgggtgcttgtggcacagcggcgattatttctcctattggtgggattcaaaacggcacagatttccatgtattttatagtgaaacggaagttggaccagtgactaagcaactatatgatgaactggttggcatacagtttggtgacaaagaagcgccagaaggctggattgtaaaagtttag

SEQ ID NO: 7097 - protein, 339 aa, Enterococcus faecalis
MEKANLDWNNLGFSYIKTPFRYISYWRDGKWEEGTLTDNNQLTISEGSPALHYGQQCFEGLKAYQCADGSVNLFRPDENAKRLQKSCARLLMPQVPVETFVSACQEVVKANLAYLPPYGTGGTLYLRPYMIGVGDNIGVAPAKEYIFSIFCVPVGSYFKNGLAPTNFIVSEYDRAAGRGTGAAKVGGNYAASLLPGAEAHEKEFSDCIYLDPYTHTKIEEVGAANFFGITKDGTFITPKSASILPSITKYSLLTLAKERLGMTALEGDVYIDRLADFSEAGACGTAAIISPIGGIQNGTDFHVFYSETEVGPVTKQLYDELVGIQFGDKEAPEGWIVKV

SEQ ID NO: 7098 - DNA, 846 bp, Coxiella burnetii
  CDS (1)..(846)
atgaaaattatttttaataaaaaaattctttctgctgatacacccatcatttattccaatgatcgaggttttttgtttggcgatggattatttgaaactatcaaagcggaaaaaaacgagttgctctttttcgctgaacattataaccgattggcgacttcggccaagaaattattcattccgcttaatttttccttgcttgaactcaaaactcaatgcgaaagcctattagaaataaataaactcgacgaagcagccgtacgaatcacattaactcgaggaagctcggaaagggggatcgccattgaatctgctgtctctcctaatttactgattacgactatcccctataaaaaacaagccgatatttatccaactctttgcatcactgctattagacgtaacgaatattcccccttgtctcaacttaaaacgcttaattttttagagcctattttaactagacaacaagccataaaaaatggatctgctgaaggcgttatgctaaatacgaaaggcgctgtaactgagacgagcgtcggtaacttatttgctgttattcatcagaaaatatttacaccaaaaattgaggatggtttattacccgggattgtgcgccagatagttatcgatatcgccaccaaaaccgacatacctattaaagaaaaaactttatctccagaagaccttttagaggccgacgaaatatttcacaccaatagcctcattgaaattcaatccttcgcgaaaattaatgaacgccctttagccaccggcgaacaagctttattaaccaggaaaattttagaaacctacgaatggtataaaaataaacgaaaaaaatga

SEQ ID NO: 7099 - protein, 281 aa, Coxiella burnetii
MKIIFNKKILSADTPIIYSNDRGFLFGDGLFETIKAEKNELLFFAEHYNRLATSAKKLFIPLNFSLLELKTQCESLLEINKLDEAAVRITLTRGSSERGIAIESAVSPNLLITTIPYKKQADIYPTLCITAIRRNEYSPLSQLKTLNFLEPILTRQQAIKNGSAEGVMLNTKGAVTETSVGNLFAVIHQKIFTPKIEDGLLPGIVRQIVIDIATKTDIPIKEKTLSPEDLLEADEIFHTNSLIEIQSFAKINERPLATGEQALLTRKILETYEWYKNKRKK

SEQ ID NO: 7100 - DNA, 1086 bp, Tropheryma whipplei
  CDS (1)..(1086)
atgagtgccaagaattataaaaaaacactgctagtaaaccccatttcgcaggatgaattacaaaagaggctttctgccccagggttcgggtctgttttttctgagcatatggtctccgcggattggcatcgcgatcttggttggcatgattatcgtgtcgaaccgtatggtccaattagtcttgccccctcggccatggtatttcattatggacaggaaattttcgaggggctgaaaatttttcgccattcacaggatagttctgtgcgcgcatttaggccactggaaaatgcaaagaggtttcaaaaatcctccgagagaatcgcgcttcccgttttaccggttgaggattttctgcaatcgcttcgtgagtgggtgatggttgacggccgctgggttccgaatgcaccgtcatgtgtttatgcaagaccatttatgatagcaaccgaggaggcgctcggtcttcgggcaacgtgcagcgccagatataccctaatttgctgtccggttggtgatttgtttggccaaataaggcccattagggtacgggtttcttctaagtattcgagggcgtccaggggtgggaccgggtccgttaaatttggtggtaattatgcggcatctattttgccccaggtcgaggctgggaatgatgggtttgaccaggttctttttttggactcggcatcttataaaaatattgaagagctgtccgcatcgaatatattctttgtactctccagtaagactttgattacgccgagtcttggtggaactattcttccgggtgttactcgtgacagtatcataagaatagccgaggatttggggtttgttgttgagcaaagacaaatcagtcttgacgaggtaacacatctatttagtcaggacaaagtaacggaaatgttttgctgcggaaccgcggcgtctgtaacccccattgggtccgtgtcttttgatggaggcaccctgggctcggggcaggcgggtcctgttacgatgctccttcgtgaatatctgcgggatatacagtttggtaatcgtccggataaatacaactggatggtcaatcttgaggatacttag

SEQ ID NO: 7101 - protein, 361 aa, Tropheryma whipplei
MSAKNYKKTLLVNPISQDELQKRLSAPGFGSVFSEHMVSADWHRDLGWHDYRVEPYGPISLAPSAMVFHYGQEIFEGLKIFRHSQDSSVRAFRPLENAKRFQKSSERIALPVLPVEDFLQSLREWVMVDGRWVPNAPSCVYARPFMIATEEALGLRATCSARYTLICCPVGDLFGQIRPIRVRVSSKYSRASRGGTGSVKFGGNYAASILPQVEAGNDGFDQVLFLDSASYKNIEELSASNIFFVLSSKTLITPSLGGTILPGVTRDSIIRIAEDLGFVVEQRQISLDEVTHLFSQDKVTEMFCCGTAASVTPIGSVSFDGGTLGSGQAGPVTMLLREYLRDIQFGNRPDKYNWMVNLEDT

SEQ ID NO: 7102 - DNA, 837 bp, Legionella pneumophila
  CDS (1)..(837)
atgagtatcgcatttgttaacggcaagtattgttgtcaatctgaagcaaaaatttcaatatttgatcgagggtttctttttggtgactcggtttatgaagtgctgcctgtttaccatgggcagccttactttgtagaccaacatcttgaccgattattctcaaatatgaaaaaaattaagatgattataccaaattatgattggcatggtttaattcatagactaatatcagaaaataatggcggtaatttacaagtatatatccaagtcacacgagggaatcaaggggtgcgcaagcatgatatccctacttccatcacaccttctgttatcgcattcactatgcataatccatttcccaccctcgaagataaggaacagggaatgtcagcaaaactggttgaagattttcggtggatgagatgtgatataaaaactacttctttaattgccaatatattactgaatgatgaggctgtatctgcaggattccacactgcaattcttgcccggaacggtctaattacagagggaagtagtaccaacgtatttattgtcgcacaggatggtgttattaagacaccacccatgaataatttctgtttaccaggaattactcggcaagttgttattgaaataattaaaaaattagatttaaagttcagagaaatagaaattagcatttcagagcttttttctgctcaggaagtttggataacaagtacgacaaaagaagtattccctattacaaagattaatgactctttgattaatggcggaaaagttggcgaatattggcggataattaatgattcctaccaacaactagtaaactag

SEQ ID NO: 7103 - protein, 278 aa, Legionella pneumophila
MSIAFVNGKYCCQSEAKISIFDRGFLFGDSVYEVLPVYHGQPYFVDQHLDRLFSNMKKIKMIIPNYDWHGLIHRLISENNGGNLQVYIQVTRGNQGVRKHDIPTSITPSVIAFTMHNPFPTLEDKEQGMSAKLVEDFRWMRCDIKTTSLIANILLNDEAVSAGFHTAILARNGLITEGSSTNVFIVAQDGVIKTPPMNNFCLPGITRQVVIEIIKKLDLKFREIEISISELFSAQEVWITSTTKEVFPITKINDSLINGGKVGEYWRIINDSYQQLVN

SEQ ID NO: 7104 - DNA, 921 bp, Bacillus cereus
  CDS (1)..(921)
atgaaagtttcacattacttacgtacttacgaaaggatgggatggaaattggcatacgaaaaatttgtactttggaatgatgaagttattgatacaacaaaacaacaaacgtacatagaacttgaagagagaggttcgcagttcggagatggtgtctacgaggttattcgcctatataaagggaactttcacttattagatccgcacataacgagattatatcgatccatggaagaagtagaattatcgctccctttctcaaaagctgagctcatcactttactttacaaattaattgaacgaaaccatttccacgaagatggcacaatttatttgcaagtatctcgtggtgtacaagctcgcacacatgtattttcgtatgacacccctccgacaatttatgcctatattacaaaaaaagaaagaccagccttatggattgaatatggtatacgcgctatatcagaacccgatactcgatggctacgctgtgacattaaatcattaaatttattaccaaacgtactagctgctacgaaagctgaacgaaaaggctgtaaagaggcacttctcgtaaggaatggtattgtaacggaaggaagccattccaacttctttttaattaaaaacggaactctttacacacatccagccaatcaccttattttaaatggcattattcgtcaatatgtcctttctttagcgaatactcttcacattcctgtacaggaagaacttttcagcgttcgtgacgtttatcaagcagatgaatgcttttttacaggcacaacaattgaaattttaccaatgacccaccttgatggaaccgcgattcaagatgggcaagttggagctatcaccaaaaaactgcaaaaatcttttaataaaatcttgttacaatccaatatgtcatcttcttaa

SEQ ID NO: 7105 - protein, 306 aa, Bacillus cereus
MKVSHYLRTYERMGWKLAYEKFVLWNDEVIDTTKQQTYIELEERGSQFGDGVYEVIRLYKGNFHLLDPHITRLYRSMEEVELSLPFSKAELITLLYKLIERNHFHEDGTIYLQVSRGVQARTHVFSYDTPPTIYAYITKKERPALWIEYGIRAISEPDTRWLRCDIKSLNLLPNVLAATKAERKGCKEALLVRNGIVTEGSHSNFFLIKNGTLYTHPANHLILNGIIRQYVLSLANTLHIPVQEELFSVRDVYQADECFFTGTTIEILPMTHLDGTAIQDGQVGAITKKLQKSFNKILLQSNMSSS

SEQ ID NO: 7106 - DNA, 897 bp, Bacillus cereus
  CDS (1)..(897)
atgaatgagcaatggattttcttaaatggagaatttgttccaaaagatgaggcaaaagtttcagtatatgatcatggctatttatatggcgatggagtgtttgaaggaattagagtttatagcggtaatgttttccgtttgagagagcatcttgtccggttgtatgaatcagcaaaatcaatccttttagaaattccatattcattagatgaagtaacaaatattgttgttgagacgattcgacacaataaattatctaatggatacattcgccttgttgtatcaagaggagcagggaatcttggattggatcccgattcatgtaggaagccgaatgtagtagtgattgcagtgcctatttctttattcccgcaagaatattatgagatagatattccagttgtaacagttgcaacgcgccgaaatcgtcccgatgttttatcccctcaagtaaaatctttaaattacttaaacaatattttagttcgtattgtagcgaaattggctggagtacaagaagcgcttatgttaaatgatcaaggatatgtagctgaaggatcaggagataacgtgtttattgttaaaggaaataaattaattacaccaccaagttctgctggagcgttagaaggtattacacgaaacgccattttagaaatcggcgaaaaacttgggtatgacgtaagagaagagttatttacaagacatgatgtatatgtagctgatgaagtgtttttaacaggaacagctgctgaagtgattgctgttacgacagtagatggtagaacgattggcttagggcaaacaggtccacatacgaaccgtttattagaagagtttcgtaagttagttgtagaagatggagagaaaatttacgaagaaaataaagttggataa

SEQ ID NO: 7107 - protein, 298 aa, Bacillus cereus
MNEQWIFLNGEFVPKDEAKVSVYDHGYLYGDGVFEGIRVYSGNVFRLREHLVRLYESAKSILLEIPYSLDEVTNIVVETIRHNKLSNGYIRLVVSRGAGNLGLDPDSCRKPNVVVIAVPISLFPQEYYEIDIPVVTVATRRNRPDVLSPQVKSLNYLNNILVRIVAKLAGVQEALMLNDQGYVAEGSGDNVFIVKGNKLITPPSSAGALEGITRNAILEIGEKLGYDVREELFTRHDVYVADEVFLTGTAAEVIAVTTVDGRTIGLGQTGPHTNRLLEEFRKLVVEDGEKIYEENKVG

SEQ ID NO: 7108 - DNA, 876 bp, Bacillus cereus
  CDS (1)..(876)
atgaaagctactcataaagattggatcttgtttaatgggagaatgattaatacgaaagaagaacagccgatggtagcattagaagagagaggcttccaatttggtgatgggatttatgaagtatttagactatacgatggcaagcctcatttattagatttacatttggaacgattctttaactctatggcagaaataaaactaattccaccatttacgaaggaagaattagtagaagagttatatcaaatgattgaaaaaaatcaatttcaagaagatgggaatgtatatttacaaatatcaagaggtgcacaacagcgcaatcatgtatatgaatcagatttacaaccgacatattttgcaaatcttgtttcgttcccaagaccagttgcttcaatggaggcagggattaaggtgacagtagaagaggacatcaggtggaagttttgccatataaaatctttaaatttgcttcctaatatcatgatcaaaaacaaaataaatgaacaagggtatcaagaagcaatattagtacgagatggtattgtgactgaagggtgtcattccaatttctttatcgtgaagaataataagttgattacacatccagcggatcatttcattttacatggtattacacgtcactatgtaattacattagcgaaagagttacatatcgatgtagaggaacgagagttttcattacaagaagtatatgacgctgaggagtgcttctttacagcgacgccacttgaaatattcccagtcgttcaaattggtgatgaacagttcggggctggtgaaagaggaccaattacgaaaaaactacaagctgcatacgaagagagtattcgtttgtttaaagtgacaaattaa

SEQ ID NO: 7109 - protein, 291 aa, Bacillus cereus
MKATHKDWILFNGRMINTKEEQPMVALEERGFQFGDGIYEVFRLYDGKPHLLDLHLERFFNSMAEIKLIPPFTKEELVEELYQMIEKNQFQEDGNVYLQISRGAQQRNHVYESDLQPTYFANLVSFPRPVASMEAGIKVTVEEDIRWKFCHIKSLNLLPNIMIKNKINEQGYQEAILVRDGIVTEGCHSNFFIVKNNKLITHPADHFILHGITRHYVITLAKELHIDVEEREFSLQEVYDAEECFFTATPLEIFPVVQIGDEQFGAGERGPITKKLQAAYEESIRLFKVTN

SEQ ID NO: 7110 - DNA, 900 bp, Bacillus cereus
  CDS (1)..(900)
atgggaaaccagtacatatacatgaatggggaatttgtagaaaaagaaaaggcagttgtttcagtatatgatcacggttttttatacggagacggtgtatttaaagggattcgtagttacggaggaaatgtattttgtataaaggaacatgtgaaacgattggatgaaatcagcgaaatctattttactaacaattccaatgacggcagaagaaatggaagaagcagtttacatacactccaaaaaaacgaatatactgatgcttacattcgcttaattgtctcaagaggaaaaggtgacttagggctcgatccgagaagttgtgtgaagccgagcgtaattatcattgcagaacaattaaagttattcccacaagaattttatgataatgggctaagcgttgtatctgttgcatcaagacgtaatacgccagatgcgttagatccacgtattaagtcaatgaattatttaaataacgtacttgtaaaaattgaagcagcacaagcaggggtgttagaggctcttatgttaaatcaacaaggatatgtttgtgaaggttctggtgataatgttttcgttgtgaaagatggaaaagtattagccccgccatcctatttaggagcattagaaggtattacgagaaatagtgttatcgagctatgtgagcgactgagtattccgtgtgaggaaagaccgttcactcgccatgatgtatatatagcggatgaagtatttttaacaggaacagcagcggagttaattccagttgtaaaagttgattccagagaaattggagatgggaaaccaggaagtgtaacgaaacaattgaccgaagaatttaaaaaattaacgagagaaagaggagtacgtgttcccaggctgacggaaagcttagcataa

SEQ ID NO: 7111 - protein, 299 aa, Bacillus cereus
MGNQYIYMNGEFVEKEKAVVSVYDHGFLYGDGVFKGIRSYGGNVFCIKEHVKRLDEISEIYFTNNSNDGRRNGRSSLHTLQKNEYTDAYIRLIVSRGKGDLGLDPRSCVKPSVIIIAEQLKLFPQEFYDNGLSVVSVASRRNTPDALDPRIKSMNYLNNVLVKIEAAQAGVLEALMLNQQGYVCEGSGDNVFVVKDGKVLAPPSYLGALEGITRNSVIELCERLSIPCEERPFTRHDVYIADEVFLTGTAAELIPVVKVDSREIGDGKPGSVTKQLTEEFKKLTRERGVRVPRLTESLA

SEQ ID NO: 7112 - DNA, 1861 bp, Cicer arietinum
  CDS (5)..(1660)
ggagatggaggtcgaggtgattcactcatggtctgctccaagatctcttagcacctctcttatgtattcattttctcagcgagatgatatagaagtgcttgatgaacctctttatgctaatttccttcgagaccctgcttttgatagaccctacagagatcaactactctctaaaatggaatctgatggaaacaaggttgttaatgatattatatacggtccaggatccaaaaagtatagattttgcaagcatatgtcaaaacataaggtgcataatttgcctgaggatctactcaagaaagggaaacatttcattttgataagaaatccacttgacatactgccatcctttgacaaggttcttcccccaacttcctttgagttgggtttggggcagcttgttggtatatatgatgaactctgtgatattggaaaaccaccgcctgttatagatgccaaagaacttcaaaaagatcccgagggtactttacgaggtctctgtaatgatttggagattccttttcaacctgcaatgctcagttgggaagcaggtccaaaaccaatagatggcttgtgggccccttggtggtacaaaaatgtacataaatctactagatttgaggtacaaagcaagaatcctgagccacttcccctttctcaatataatttgttggcgcgaactctgcctcactacaacatgctccggagccatgtaaagaagaagttatccattctgagctctccttcacctcctcccgaccttccagttcctgcaaatgagaaattggttgcttgggttggtgatgagattgtgacacgtgagagtgctaaggtttctgtgtttgactcagttgtccaaggaggtgactcagtttgggagggtcttcgagtgtatgataaaaagatatttaaacttgaggagcatctagataggatgtttgattcagctaaagcattggcttttgaaaatgtaccaactcgagatgagattaaggaagctattttcagaaccctaattaagaatggaatgtttgacaatgcgcacatccgactttctctgacacgaggaaagaaggttacttctgggatgagccccgcattaaatctgtatggatgcacattaattgtgcttgctgaatggaagccccctgtttatgataatgagcgcggtatagttcttgtaactgccacaacacgccgtaactcaccaaataatttggattcaaagattcatcacaataatctcctcaataacattctagcaaagatagaagccaataatgcaaaagcagacgatgcaatcatgcttgacaaagatggttatgtatctgaaaccaatgcaacaaatatcttcatggtaaagaaaggccgtgttttgacaccacatgctgattactgtcttcctggcattactcgagcaactgttatggatcttgtggtgaaagagcagtttattttagaagagcgaagaatcagcctgtcagaagtgcatactgcagacgaggtatggacaacaggaacaatgggagaactaagcccagtagtgaaggttgatggacgcacaattggtaatggaaaagtagggccaataactagaaaattgcaagttgcttataaaaagttgaccgaacagtctggtgtaccaatagagttggcctgagatctctaccttgagacttgaaagttggaacttggaagttagtgaaaatgactgatgtgccactgctaataatctcagcgtcttccttttctcaatctagaataaaatgtattgcttcgtattgtacctttcggtcccagatattagtgcatgagttcttagtttataaatgcaatttgaaacaaaaaaaaaaaaaaaaaa

SEQ ID NO: 7113 - protein, 551 aa, Cicer arietinum
MEVEVIHSWSAPRSLSTSLMYSFSQRDDIEVLDEPLYANFLRDPAFDRPYRDQLLSKMESDGNKVVNDIIYGPGSKKYRFCKHMSKHKVHNLPEDLLKKGKHFILIRNPLDILPSFDKVLPPTSFELGLGQLVGIYDELCDIGKPPPVIDAKELQKDPEGTLRGLCNDLEIPFQPAMLSWEAGPKPIDGLWAPWWYKNVHKSTRFEVQSKNPEPLPLSQYNLLARTLPHYNMLRSHVKKKLSILSSPSPPPDLPVPANEKLVAWVGDEIVTRESAKVSVFDSVVQGGDSVWEGLRVYDKKIFKLEEHLDRMFDSAKALAFENVPTRDEIKEAIFRTLIKNGMFDNAHIRLSLTRGKKVTSGMSPALNLYGCTLIVLAEWKPPVYDNERGIVLVTATTRRNSPNNLDSKIHHNNLLNNILAKIEANNAKADDAIMLDKDGYVSETNATNIFMVKKGRVLTPHADYCLPGITRATVMDLVVKEQFILEERRISLSEVHTADEVWTTGTMGELSPVVKVDGRTIGNGKVGPITRKLQVAYKKLTEQSGVPIELA

SEQ ID NO: 7114 - DNA, 1229 bp, Giardia lamblia
  CDS (72)..(1139)
tttaacgtagcaatcttgggggccgtccgttaaaatggtcagcatttttcttaagcaaaggagaatgaaaaatggctgtcgatccctccacgatagactggtctgcgctgaagttttcgtggctgcaaacgcgctcccacgttcgcagtgtctggagaaacggcgagtggagccctcttgagctggtaaacgagccgacattcaatatttcgattgcggcctctgcgcttcactacggccaggcagtcttcgagggtctcaaggtcttccgcactgttgacggcagagtcgctgccttcagaccagttgagaatgcccgcaggctcatcagctcgtgcgacggtctctgcatggagtccccgtcagagcagctcttcctcaatgctcttgcgatggttgtcagggataacgttgactatatcccgccatatggtacagggggctccctctatgtccgtcccctggttatcggtaccggagcccagcttggagttgcaccgtcgtccgaatacatgttcctcatgatggtcgcgcctgttggtccttattaccggggaggcctcaagagcgtgaacgcaatcgttatggacgaattcgacagggcagcaccctatggcgtcggcagcaagaagtgtgccggaaactacgccgcatctcttaaggcccagagcgttgctctgaaaaagagcttccccattcagctgtacctcgacgctgctacgcacacgtttgttgaggagttctccaccagcaacttctttgggattaaggacatccagagagatggggcgggcaagatcgtttcgtgcacttacgttactcctaagtctccttctattttgccctcgatcacgaacaagactctccgcgagcttatttcccagtacttcggctggaaggttgatgtgcgcgaggtcccgttcacagaggttaagacattccaagaatgcggagccacaggcacggccgtcgttgtgacgcccattgcttccatcacccgcggttccactgttatcgacttcctgcaatctgacgatcaggttggcgaagttaccaagctactatatgaaactgtccagggcatacagtacggggtgatcccagacagattcaactggaaccactacattgacgtgtaaactccagcaacaaggcagagatctggattcacttgggggaactagtcccagttgatgccgcatacgtctcgtatgaacgggctgatcaac

SEQ ID NO: 7115 - protein, 355 aa, Giardia lamblia
MAVDPSTIDWSALKFSWLQTRSHVRSVWRNGEWSPLELVNEPTFNISIAASALHYGQAVFEGLKVFRTVDGRVAAFRPVENARRLISSCDGLCMESPSEQLFLNALAMVVRDNVDYIPPYGTGGSLYVRPLVIGTGAQLGVAPSSEYMFLMMVAPVGPYYRGGLKSVNAIVMDEFDRAAPYGVGSKKCAGNYAASLKAQSVALKKSFPIQLYLDAATHTFVEEFSTSNFFGIKDIQRDGAGKIVSCTYVTPKSPSILPSITNKTLRELISQYFGWKVDVREVPFTEVKTFQECGATGTAVVVTPIASITRGSTVIDFLQSDDQVGEVTKLLYETVQGIQYGVIPDRFNWNHYIDV

SEQ ID NO: 7116 - DNA, 1089 bp, Xylella fastidiosa
  CDS (1)..(1089)
atgtccatttcgttcgatattgcccgctcattgtctaccacttctgatgaagagctctctatgatcctgcaagcgccagggttcggtgttcatttcactgatcatatgattgctatcgcctgggataaggacaatgattggcacgacgcccaggtgcgcgcctatgggccattgttgctagatcctgccgctgctgtgctgcactacgggcaagagattttcgaaggaatcaaagcatatcgccatgctgatggttcgatctggacgttccgcccggaggccaacgctcgccgcttgcagcgttcggccaaacgattagtgctgccagagttgccggtggaactgtttacagaatctttgcgtcaactcattgcagtggatgcccgctgggttccttcagcaccagaaaccagcctttattttcgtcccttcatgattgccacagaagcgtacttaggcgtgcgtgctgcgcagcacgcctcttactacctgatcgccagccctgctggcccgtatttcgctaaaggcgttactcccgtgtcgatctggttgtcgacagactgtgcccgtgctgccctagggggcacgggcgcggtgaagtgtggtggcaattatgccgcctccttgctgccgcaacaggtcgcgcagacccagggatgctctcaggtactgttccttgatccggttgagggcaaatacctggaggagctgggagggatgaatgtgtttctcgtctacacagacggcaccttggtcacaccagcgttgtctggcagcatcctcgaaggtatcacccgcgagagtatcttgcagcttgctcgtgatcgagggatgtgtgttgaggaacgtaaggtagcaattgaggagtggaaagagggcgtggtttccggtgcgatcagcgaggtattcgcttgcggtacggctgctgtgatcactccaattggtgaattgaaagcggagggtttttcggtcggaaacatcaacgcaccacctggcgaagttactctgtcgttgcgcaaggaactgaccgacatccagtacggccgtttgccagaccgttatgggtggatgacgtgtttgaaggaataa

SEQ ID NO: 7117 - protein, 362 aa, Xylella fastidiosa
MSISFDIARSLSTTSDEELSMILQAPGFGVHFTDHMIAIAWDKDNDWHDAQVRAYGPLLLDPAAAVLHYGQEIFEGIKAYRHADGSIWTFRPEANARRLQRSAKRLVLPELPVELFTESLRQLIAVDARWVPSAPETSLYFRPFMIATEAYLGVRAAQHASYYLIASPAGPYFAKGVTPVSIWLSTDCARAALGGTGAVKCGGNYAASLLPQQVAQTQGCSQVLFLDPVEGKYLEELGGMNVFLVYTDGTLVTPALSGSILEGITRESILQLARDRGMCVEERKVAIEEWKEGVVSGAISEVFACGTAAVITPIGELKAEGFSVGNINAPPGEVTLSLRKELTDIQYGRLPDRYGWMTCLKE

SEQ ID NO: 7118 - DNA, 939 bp, Vibrio parahaemolyticus
  CDS (1)..(939)
atggcaacgaaaactgcagatttcatttggtttaatggtgagatggttccatgggcagaggcgaacgtgcatgttctcactcacgccatgcattacggcacctcggtatttgaaggggtacgctgctacaacacaccaaaaggcccaattgtcttccgtcaccgtgaacatgcacagcgtttaaaagattccgccaaaatttaccgcttccctattccatactctgttgaagaaatcatggaagcaacgcgtgaaactctgcgtcaaaacaaactcgacagcgcttacattcgtccattgggatttgtgggcaatgtcggtttaggtgtgtgtcctccagtaggcgccgaaatggagctgatcatcgcggcgttcccatggggctcgtaccttggtgaagaagcactagaaaaaggcgtggatgcgatgatttcaagctggaatcgcgcggcacctaacaccatccctaccgcagcaaaagcgggtggtaactacctttcttcactactcgttggtggtgaagcacgtcgtcatggttacgacgaaggtattgcactgagtgttgacggttacttgtcagaaggcgcgggcgaaaacatctttgtcatcaaagatcgcgtgatcaccacaccaccagccaccagcgctatcctaccgggtatcactcgtgactcgatcatgaccattgctcgcgataaaggttacgaagtccgtgaagctaacattgctcgcgaagcgctataccttgcggatgaagtattcatgaccggtaccgcagcagaagttgtgcctgtagctaccatcgacaaaattgaagtgggcagcggtaaacgcggtccaattaccaaagaattgcaagaagcctactttggcctatttaacggcaccacagaagataagtggggctggttagactatgtgtacccagagcagcagtaa

SEQ ID NO: 7119 - protein, 312 aa, Vibrio parahaemolyticus
MATKTADFIWFNGEMVPWAEANVHVLTHAMHYGTSVFEGVRCYNTPKGPIVFRHREHAQRLKDSAKIYRFPIPYSVEEIMEATRETLRQNKLDSAYIRPLGFVGNVGLGVCPPVGAEMELIIAAFPWGSYLGEEALEKGVDAMISSWNRAAPNTIPTAAKAGGNYLSSLLVGGEARRHGYDEGIALSVDGYLSEGAGENIFVIKDRVITTPPATSAILPGITRDSIMTIARDKGYEVREANIAREALYLADEVFMTGTAAEVVPVATIDKIEVGSGKRGPITKELQEAYFGLFNGTTEDKWGWLDYVYPEQQ

SEQ ID NO: 7120 - DNA, 1035 bp, Pseudomonas syringae
  CDS (16)..(1035)
atgatagagggcgttatgagtcaagaaagcatcaactgggacactctgggttttgactatatcaagactgacaaacgctatctgtctcattggcgcgacggtgcctgggatcagggctcgctgactgaagacaacacgctgcacatcagcgaaggttcgaccgcgctgcattacggtcaacagtgctttgaaggcctgaaggcctatcgctgcaaggacggctcgatcaacctgttccgtcccgaccagaacgcacagcgtatgcagcgcagctgttcccgtctgctgatgccccatgtacccaccgacgtgttcatcgaggcctgcaagcaggtcgtcaaggccaacgagcgtttcatcccgccgtatggctccggcggcgcgctgtacctgcgcccgttcgtgatcggagtgggtgacaacatcggcgtgcggactgcgccagagtttatcttctcgatcttctgcattccggttggtgcttatttcaagggcggcctgaagccgaacaacttcgtgatctccggttacgaccgtgctgcgcccaacggcaccggtgctgccaaggtcggtggcaactatgccgccagcctgatgccgggttcggaagccaagaaacacagcttcgcggactgtatctacctcgacccgcagactcattccaaaatcgaggaagtgggttcggccaacttcttcgccatcaccagcgacgatgtgttcctgacgcctaaatcgccatcagtgttgccaggcattacccgcctgtcgctgatcgaactggcaaaaaaccgtttgggcctgacggtcgaggagggcgatgtgttcatcgaccagctcgacacattcaaggaagccggcgcgtgcggcaccgctgcagtgatcaccccgatcggcggcatttcctaccaggacaacctgcacgtgttctacagccagaccgacgtcggcccggttacccagcgtctgtacaaggaactgaccggtgtgcaatccggtgacatcgagccgcccgccggctggatcgtcaaggtctag

SEQ ID NO: 7121 - protein, 339 aa, Pseudomonas syringae
MSQESINWDTLGFDYIKTDKRYLSHWRDGAWDQGSLTEDNTLHISEGSTALHYGQQCFEGLKAYRCKDGSINLFRPDQNAQRMQRSCSRLLMPHVPTDVFIEACKQVVKANERFIPPYGSGGALYLRPFVIGVGDNIGVRTAPEFIFSIFCIPVGAYFKGGLKPNNFVISGYDRAAPNGTGAAKVGGNYAASLMPGSEAKKHSFADCIYLDPQTHSKIEEVGSANFFAITSDDVFLTPKSPSVLPGITRLSLIELAKNRLGLTVEEGDVFIDQLDTFKEAGACGTAAVITPIGGISYQDNLHVFYSQTDVGPVTQRLYKELTGVQSGDIEPPAGWIVKV

SEQ ID NO: 7122 - DNA, 1122 bp, Pseudomonas putida
  CDS (103)..(1122)
gtgactggccgttcccgatccgccaaggatgtattaaggtggcatggtgcgcatataacagcagcccgagcgatcgggcacttgcaagacaatgagggtgtcatgagcaacgaaagcattaattgggacaagctgggtttcgactacatcaagaccgacaaacgctacctgtccgtatggcgcaatggcgagtgggacaagggcaccctgaccgaagacaacgtactgcacatcagtgaaggctccacggccctgcactacggccagcagtgcttcgaaggcctgaaggcctaccgttgcaaggacggctcgatcaacctgttccgcccggaccagaacgcggcccgcatgcagcgcagctgcgcacgcctgctgatgccgcacgtgccgaccgatgtgttcatcgaagcgtgcaagcaagtggtcaaggccaacgaaaagttcgtgccaccgcacggcaaaggcgccctgtacctgcgcccgttcgtgatcggcaccggcgacaacattggcgtgcgcaccgcccccgagttcatcttctcggtgttcgccatcccggttggttcgtatttcaagggcggcatgaagccgcacaatttccagatttccagcttcgaccgtgctgccccgcagggcaccggagcggccaaggtcggtggcaactacgctgccagcctgcagccgggcgctgaagcgaagaaggccaacttcgccgacgccatctacctcgacccgctgacccacaccaagatcgaggaagtcggttcggccaacttcttcggcatcaccgccaacaacgagttcgtcaccccgaaatcggcctcggtactgccaggcatcacccgcctctcgctgatggaactggcgcaatcgcgcctgggcatgaccgtgatcgaaggcgatgtcgagatcagcaagctggaccgcttcgtcgaagccggtgcctgcggcaccgcggccgttatcaccccgatcggcggcatcgagtacaacggcaagctgcacgtgttccacgacctggaaaaggtcggcccggttacccagaagctctacaacgagctgaccggtatccagagcggcgatgtagaggcaccggcaggctggatcgtcaaggtcgcctag

SEQ ID NO: 7123 - protein, 339 aa, Pseudomonas putida
MSNESINWDKLGFDYIKTDKRYLSVWRNGEWDKGTLTEDNVLHISEGSTALHYGQQCFEGLKAYRCKDGSINLFRPDQNAARMQRSCARLLMPHVPTDVFIEACKQVVKANEKFVPPHGKGALYLRPFVIGTGDNIGVRTAPEFIFSVFAIPVGSYFKGGMKPHNFQISSFDRAAPQGTGAAKVGGNYAASLQPGAEAKKANFADAIYLDPLTHTKIEEVGSANFFGITANNEFVTPKSASVLPGITRLSLMELAQSRLGMTVIEGDVEISKLDRFVEAGACGTAAVITPIGGIEYNGKLHVFHDLEKVGPVTQKLYNELTGIQSGDVEAPAGWIVKVA

SEQ ID NO: 7124 - DNA, 1029 bp, Lactobacillus plantarum
  CDS (1)..(1029)
atggcagacgtacaattagactggaacaacttggggtttgaatatcggaatcttccgtaccgttatcgtgcgtattggaaagatggtgcttggtacaaaaaagaattaacgggagatgcaactttacatattagtgaaggctcaacagcattacactatggtcaacaagactttgaaggcttaaaagcttaccgcactaaagatggtagtgttcaattattccggccagatcgtaatgcagcccgaatgcagaccagctgtgaacggttattaatgccacaagtgccgacagacatgtttgtggacgctgttaaacaggttgttaaggctaatcaagattacgtgccaccgtatggaactggtgcgactttatacttacggccattgatgatcggggttgggggtaacattggtgttcatccagctcaggaatacatcttcacggtctttgccatgccagttggtagttatttcaaaggcgggatgacgccaaccaactttacgacgtccgaatatgatcgtgcggcccataaaggaaccggggcttataaagttggtgggaattatgcggctagcttattcccaggtcaagaagctcatgccaacggtttctccgactgtgtttatcttgacccggttgaacatcgtaagattgaagaagtaggttcagcgaacttcttcgggattactaaggatggcacttttgtgacacccaagtcaccatcaattctacctgccgttacgaaatattcattactctacttggcagaacataaatttgggatgaagactgaacaaggcgacgtctacattgatgatttagaccggtttgctgaagctggggcttgtgggacagctgcggttatttcaccaatcggtggcttggaacatcaaggcaagttacacgtgttctacagtgaaacggaagttggtccggtaacgaaaaaattatatgatgaattaactggaattcaatttggcgatcgggaagcgcctgaaggttgggtccagaaagttgaattagactaa

SEQ ID NO: 7125 - protein, 342 aa, Lactobacillus plantarum
MADVQLDWNNLGFEYRNLPYRYRAYWKDGAWYKKELTGDATLHISEGSTALHYGQQDFEGLKAYRTKDGSVQLFRPDRNAARMQTSCERLLMPQVPTDMFVDAVKQVVKANQDYVPPYGTGATLYLRPLMIGVGGNIGVHPAQEYIFTVFAMPVGSYFKGGMTPTNFTTSEYDRAAHKGTGAYKVGGNYAASLFPGQEAHANGFSDCVYLDPVEHRKIEEVGSANFFGITKDGTFVTPKSPSILPAVTKYSLLYLAEHKFGMKTEQGDVYIDDLDRFAEAGACGTAAVISPIGGLEHQGKLHVFYSETEVGPVTKKLYDELTGIQFGDREAPEGWVQKVELD

SEQ ID NO: 7126 - DNA, 822 bp, Clostridium tetani
  CDS (1)..(822)
atgaacatatttggaaaatactatatctttaataatgatatcaaagattctagagaatttaacgataatattataaagggagaaaaaaatatttatgaggtattaaaagttaaaaatagcgtgccactactactagaagaacacataaaaagacttaaaagcacttctaatttaactaacctaaaaatatggttgaaagaaagctttatagaggattctataaaaaaattaataaaaaaaaataaggtggaagaaggaagtttaaaatttattttaaactttgaggaaaaaaactttatatgttactttgaagaaacaatatttcccaataaagaagattttaaagaaggcatatctactgcattatacaatgaggaaagagaaaatcctaatgcaaaggttttaaagttagattttagaaaaagtttagataaatttataaaagataaaaatatatttgaagccatattagtagatagaaatggattcataactgagggaagtaaatccaatatatttatggtaaaagaccataaacttataactactccatcaaaggctgtattacctggaattactagaaaacaagttttagatatatgcaatgaattaaatatatctgtaatagaaaagtatataggtagtgaagaattagaagaaatagatggaatattcatatcaagcactccttttgacattttaccaataaaaactgtagatgacttaaaatttaaatcgtcaaaaaatcctttaattatatctattatggataaatacaataaaaagatatatgaatatataaaagataagaaagataattaa

SEQ ID NO: 7127 - protein, 273 aa, Clostridium tetani
MNIFGKYYIFNNDIKDSREFNDNIIKGEKNIYEVLKVKNSVPLLLEEHIKRLKSTSNLTNLKIWLKESFIEDSIKKLIKKNKVEEGSLKFILNFEEKNFICYFEETIFPNKEDFKEGISTALYNEERENPNAKVLKLDFRKSLDKFIKDKNIFEAILVDRNGFITEGSKSNIFMVKDHKLITTPSKAVLPGITRKQVLDICNELNISVIEKYIGSEELEEIDGIFISSTPFDILPIKTVDDLKFKSSKNPLIISIMDKYNKKIYEYIKDKKDN

SEQ ID NO: 7128 - DNA, 1083 bp, Bradyrhizobium japonicum
  CDS (1)..(1083)
atgagcatgaaattcgacatccagcccgcatccaatcctactccagaaaaggaccgcgtcgccaagctggtggaccccggcttcgggcgggtcttcaccgaccacatggcgatcgtccgttacaaccaggccaagggcggctggtacgaggcgcgcatcgaggcgcgcgccaacttccagctcgatccggccggcgccgtcctgcactacgcccaggaaattttcgagggcctcaaggcctacaagcgcgacgacggcggcgtgaacctgttccgccccgacgccaatgcgcggcgcttcagggactcggccgatcgcatggcgatggcgcagctgcccgaagacgtcttcatcgaggcggtcgagcaggtcgtgcgcatcgatcgcgcctggatgccgggcggcgagggcagcctttacctgcgccccttcatgatcgcgagcgagaccttcctcggcgtcaagccgtcgtccgaatacatcttcgcggtgatcgcctcaccggtcggctcctatttcaagggcggacctgcgccggtgtcgatctgggtctcggagaactacacgcgcgccgcggtcggcggcaccggcgccgtcaagtgcggtggcaattacgccgcgagtctgcgtgcgcaggcggaagccattcagcacggctgcgatcaggtggtcttcctcgatgcgatcgagcgccgctacgtcgaggagctcggcggcatgaacatcttcttcgtgttcgaggacggctcgttgtcgacgccgccgctcggcacgatcctgcccggcatcacccgcgactccatcatcgcgctggcgaaggatgccggcaagacggtgcgcgaggagccgtactcgctcgaccagtggcgcaaggatgcggccagcggcaagctgaaggaagcgttcgcctgcggcaccgcggcggtgatctcgccgatcggcaaggtgcgctcggtgagcggcgatttcgagatcagcggcggcgtcgccggcccggtcgccatgggcctgcgcaagcagctcgtcgacatccagtacggccgcaccaacgatccccacaactggatccgcaaggtgttttga

SEQ ID NO: 7129 - protein, 360 aa, Bradyrhizobium japonicum
MSMKFDIQPASNPTPEKDRVAKLVDPGFGRVFTDHMAIVRYNQAKGGWYEARIEARANFQLDPAGAVLHYAQEIFEGLKAYKRDDGGVNLFRPDANARRFRDSADRMAMAQLPEDVFIEAVEQVVRIDRAWMPGGEGSLYLRPFMIASETFLGVKPSSEYIFAVIASPVGSYFKGGPAPVSIWVSENYTRAAVGGTGAVKCGGNYAASLRAQAEAIQHGCDQVVFLDAIERRYVEELGGMNIFFVFEDGSLSTPPLGTILPGITRDSIIALAKDAGKTVREEPYSLDQWRKDAASGKLKEAFACGTAAVISPIGKVRSVSGDFEISGGVAGPVAMGLRKQLVDIQYGRTNDPHNWIRKVF

SEQ ID NO: 7130 - DNA, 888 bp, Bradyrhizobium japonicum
  CDS (1)..(888)
atggttcccgataccaattccatcagccattcgaggacatggacattcttccgaggccagtggcacgagggcaatgtgccgatcatggggccacgtactcatgggctctggctcgcctcgaccatcttcgatggtgcgcgcgctttcgaaggcgtcatgcccgacctcgatcgtcattgcgcccgcgtcaatcaatctgcggtcaacttcgggctcaaaccggtcgtcgatctcgacacgtggctcggactggtgcgcgaaggtatcgcccgtttcccggtcaatgccgaactctacatccgcccgatgtactggccgcagaacggcatcggcggcggtgtgctgttcgatccggaaacgacggactggtgcctttgcatctacgaatcgccgatcccggagcccgtcggcagcgcgattaccctgtcgccgttccgcagaccgaccgccgaatgcgcgccggccgatgtcaaggcctcctgtctttatccgaacagttcgcgtgcgctcagggaagccgcctcgcgcggcttccagaattgcctgatgctggacatgctcggtaacgtcacggagttcggcaattccaacgtgttcatggcgaaagacggcgttgtctttacgcctgcgccgaatggcacgttcctgaacggaatcacgcggcagcgcgtgatcgaacttttgcgcggtgacggcatcacggtgttggaggcaacgctgcgctactccgatttcgtcagtgcggacgagatcttttcgaccggcaatttcgcaaaagtcgcgcccgtgatccggatcgacgaccggcaactcaggccagggcgcttttatgcgcgggcacgaaagctgtattgggattttgcccacggaatgaagcttgctgcgtga

SEQ ID NO: 7131 - protein, 295 aa, Bradyrhizobium japonicum
MVPDTNSISHSRTWTFFRGQWHEGNVPIMGPRTHGLWLASTIFDGARAFEGVMPDLDRHCARVNQSAVNFGLKPVVDLDTWLGLVREGIARFPVNAELYIRPMYWPQNGIGGGVLFDPETTDWCLCIYESPIPEPVGSAITLSPFRRPTAECAPADVKASCLYPNSSRALREAASRGFQNCLMLDMLGNVTEFGNSNVFMAKDGVVFTPAPNGTFLNGITRQRVIELLRGDGITVLEATLRYSDFVSADEIFSTGNFAKVAPVIRIDDRQLRPGRFYARARKLYWDFAHGMKLAA

SEQ ID NO: 7132 - DNA, 1056 bp, Bradyrhizobium japonicum
  CDS (1)..(1056)
atggacggcattatatccggtttgctccccaatgttatttcaccgcgatgctcaccctccgtccagggggccctccaggggaggggggcattccccgcagggaatcatttagaaattgcccccaatagtcgtgccatattgcggcatcacgccaaggggaggccggtcatggccgagatcaagaaagccatcgaatattcgccgagttggaccttcttcgagggcaaatggcacgacggcaatgtgccgatcatgggcccgcgcacgcatgcggcctggctcggctcggtcgtgttcgacggcgcgcgcgcgttcgagggcgtcgcacccgatctcgaccgtcacatcgcccgtgccaatcagtccgcgatcaattttggcctgaagccggtggtcgatcccggcacctggctcacgctcgcaaacgaaggcatcgcgcgcttcgcgacgaatgccgagctgtatatccgtccgatgtactgggcggagaacgggtcgggcggcggcgtgctgttcgaccccgagaccaccaactggtgcctgtgcatctacgaggcgccgatgcccaaacccgtcggcaacgccatcacgctgtcgccgttccgcaggccgactgccgaatgcgcgccggtcgaggccaaggcggcctgcctctatcccaacaattcgcgcgcgctggcggaggccgcctcccgcggcttccagaacgcgctgatgctcgacatgctcggcaatgtcgccgagttcggcaattccaacgtgttcatggccagggacggcgtggtgttcacgccggtgccgaacggcaccttcctcaacggcatcacgcgccagcgcgtcatcggcctgcttcgcgccgacggcgtcaccgtggtcgagaagacgttgcgctatgccgacttcctcgccgccgacgagattttttcaaccggcaatttcgccaaggtcgcgcccgtgattcgcatcgacgagcgcgagctgaagccgggcccgctctacacaaaagcgcgcaagctctattgggactttgcgcatgcggtgaagctggcggcgtag

SEQ ID NO: 7133 - protein, 351 aa, Bradyrhizobium japonicum
MDGIISGLLPNVISPRCSPSVQGALQGRGAFPAGNHLEIAPNSRAILRHHAKGRPVMAEIKKAIEYSPSWTFFEGKWHDGNVPIMGPRTHAAWLGSVVFDGARAFEGVAPDLDRHIARANQSAINFGLKPVVDPGTWLTLANEGIARFATNAELYIRPMYWAENGSGGGVLFDPETTNWCLCIYEAPMPKPVGNAITLSPFRRPTAECAPVEAKAACLYPNNSRALAEAASRGFQNALMLDMLGNVAEFGNSNVFMARDGVVFTPVPNGTFLNGITRQRVIGLLRADGVTVVEKTLRYADFLAADEIFSTGNFAKVAPVIRIDERELKPGPLYTKARKLYWDFAHAVKLAA

SEQ ID NO: 7134 - DNA, 1020 bp, Bacteroides thetaiotaomicron
  CDS (1)..(1020)
atgaaagaaatagactgggcgaatctgtcgttcggatacatgaagacagattacaatgtgagaatcaatttccgtaacggcgcatggggcgaactggaagtcagcagtgatgaacatctcaatctgcacatggcagctacttgtctgcactatggtcaggaagcttttgaaggtttgaaggctttccgcggcaaagacggtaaagtacgtatcttccgtctggaagaaaatgcggcacgtctgcaatctacttgtcagggcattctgatggccgaactgccgaccgaacgtttcaaggaagcgattctgaaagttgtaaagctgaacgaacgtttcattccgccttatgaaaccggtgcttctctatacattcgtccgttactgatcggaacaagtgcccaggtaggcgtacatcctgccgaagaatatatgttcgtggtatttgtaactccggtagggccttacttcaaaggtggtttctctaccaatccgtatgtgattatccgcgagttcgaccgtgccgctcctcatggaactggtatctacaaggtaggcggtaactatgcggccagtctgcgtgccaacaagaaagcgcacgatctgggctattcctgcgagttctatctggatgcaaaagaaaagaaatatatcgacgagtgcggcgcagccaacttcttcggaattaaagataatacgtacattactccgaagtcatcttctatcctgccttcgatcaccaacaagagtctgatgcagctggcagaagacatgggcatcaaggtagaacgacgcccgataccggaagaagaactggaaacgttcgaagaagcgggtgcttgcggtacagctgcggtaatcagtccgattcagcgtatcgatgacctggagaacggaaaatcatacgttatctctaaagacggcaagccgggaccgatctgcacgaaactgtataataagttgcgtggcattcagtacggtgacgaaccggatacacatggttgggtgacgattgtagaataa

SEQ ID NO: 7135 - protein, 339 aa, Bacteroides thetaiotaomicron
MKEIDWANLSFGYMKTDYNVRINFRNGAWGELEVSSDEHLNLHMAATCLHYGQEAFEGLKAFRGKDGKVRIFRLEENAARLQSTCQGILMAELPTERFKEAILKVVKLNERFIPPYETGASLYIRPLLIGTSAQVGVHPAEEYMFVVFVTPVGPYFKGGFSTNPYVIIREFDRAAPHGTGIYKVGGNYAASLRANKKAHDLGYSCEFYLDAKEKKYIDECGAANFFGIKDNTYITPKSSSILPSITNKSLMQLAEDMGIKVERRPIPEEELETFEEAGACGTAAVISPIQRIDDLENGKSYVISKDGKPGPICTKLYNKLRGIQYGDEPDTHGWVTIVE

SEQ ID NO: 7136 - DNA, 867 bp, Oceanobacillus iheyensis
  CDS (1)..(867)
atgtctgtatatccaattattttaacgcaatctgaatttaaagataaggatagcctaaactacccatttgaagaacgtggtttgcaattcggagatggtatttatgaagttatccgtgtatatgaggggaaatactatttatttgaagaacatgtcgatcgattatatcgttctgcagaagcaattaaaattgaaatacctcaaagtaaaaaagaaatgaaagaattattgcttcaactaattacaaaaaatgaaatgactacagatggaaaagtgtatatgcaaatcacaagagggtctgctcctcgcgatcatatcttcccacaatctgtagaaccaaatatgtatgcctatgtacaggatatgccaagaaataaagaagctctacaacatggagtatcaacgattactcaacctgatattcgttgggaaaattgctatattaaaagtttaaacttacttcctaatgttctagcaaaacagacagctaaagaacaaggatgttatgaggctattctccatagagacggcaaagtcactgaatgcagtgcatccaatgtgtatttagttaaaaacgggaaagtatatactcacccaacaacaaacaatatactctacggttgtgtgcgcatggcagtggaaaggttcttaaaagctgcaaatattgaacttattgaagaagcgtttcaactagaagacatttctagtgcagatgaaatattcttatccagtagtacttctgaagttacgcccattgtacgtgtggatgataaagctattggagacggtaagccaggtacaatcaccaagcaattacagcgagcatatgaaacagaagcagctataaaagataaattaactgtgtaa

SEQ ID NO: 7137 - protein, 288 aa, Oceanobacillus iheyensis
MSVYPIILTQSEFKDKDSLNYPFEERGLQFGDGIYEVIRVYEGKYYLFEEHVDRLYRSAEAIKIEIPQSKKEMKELLLQLITKNEMTTDGKVYMQITRGSAPRDHIFPQSVEPNMYAYVQDMPRNKEALQHGVSTITQPDIRWENCYIKSLNLLPNVLAKQTAKEQGCYEAILHRDGKVTECSASNVYLVKNGKVYTHPTTNNILYGCVRMAVERFLKAANIELIEEAFQLEDISSADEIFLSSSTSEVTPIVRVDDKAIGDGKPGTITKQLQRAYETEAAIKDKLTV

SEQ ID NO: 7138 - DNA, 861 bp, Synechococcus elongatus
  CDS (1)..(861)
atgctgctgtgcaacttggatggggtaattacgccagaggcctccatttctgttttggatcgggggtttctctacggtgacagtgtttatgaggtgattcgtacgtaccgggggattccctttgccctgccagagcacctagcacgattgcgcgcctcagccgcctatctctacatgcgtctgccctggtccgatgagtacattacccaagaagtgcaacgcaccttagcggctgccccagccggagaatattacattcggattgtggtgacccgtgggggcgatcgccgcattggcctattgccagaaccgaccacccaaccgcggttattgattgtgttgatggggatcccccccgaaccaacgttgagtgaacagggaattcgccttgccattcctaagcggcaacgcaccagcactgctgcccttgatccggcggccaaaacgggcaattacctcaacaacatcttggccctattggaggcacagcaggcgggttttgaggacgccctgcttctcaatgcccaaggacagattaccgaggccacgaccagcaacttctggattgttcgtgggggtgtggtcgagacaccccccaccaccgttggcatgctccacggaattacgcgcgggacgctgttgcagatcgttgcagacttgggtattccccatcgggaagtgattctcaccccccaggatctcgcagaagccagtgaggggtttctcagttcctcggtgcgccttctaatgccgattcggcaagtgaatgaggtgatctttccggcctgtccgggacctgtgacccaacagctatggcgagaattattagcagtgatggaaaaggcggttgcagcagcctaa

SEQ ID NO: 7139 - protein, 286 aa, Synechococcus elongatus
MLLCNLDGVITPEASISVLDRGFLYGDSVYEVIRTYRGIPFALPEHLARLRASAAYLYMRLPWSDEYITQEVQRTLAAAPAGEYYIRIVVTRGGDRRIGLLPEPTTQPRLLIVLMGIPPEPTLSEQGIRLAIPKRQRTSTAALDPAAKTGNYLNNILALLEAQQAGFEDALLLNAQGQITEATTSNFWIVRGGVVETPPTTVGMLHGITRGTLLQIVADLGIPHREVILTPQDLAEASEGFLSSSVRLLMPIRQVNEVIFPACPGPVTQQLWRELLAVMEKAVAAA

SEQ ID NO: 7140 - DNA, 912 bp, Synechococcus elongatus
  CDS (1)..(912)
atgagtgactttcttccctacgcctacctcaacggtcaatttgtgccctttgaagaagccaaaatttccgtagctacccatgcccttcactacggaacagctgccctagggggcttgcggggtcttcccaatcccgctaatcctaaggaaatacttctgttccgccttgaggatcactgtcggcgccttagtcgcagtgcctattatctgggctatgaattgcccaccagtgagattaaagcaagaatcattgagtgggtgcagaaaaatcaacccagggtgcctttctatattcgacccttggtttacacttctgggctagggatcgcccctcggctccacgatattgaaaaggattttctcatttacggcctgccccttggagattatcttgcagcgaccggcgttacctgccgcattagttcttggcagcggcagtgcgatcgctcgtttcccctacggggcaagttgaccacctcctacattgtctccgctttggccaaaacagaggccgtttccagcggctttgatgaggcgattctcctcaacgagcaggggaaagtttgtgaagccaccgggatgaatctctttttggtgcgggaggggcaactgattacccccagtgtggatcaggatattctggagggcatcacccgccgcagtgtcattgaattggcccaagcagccggtgttaaggtgatggagcgacccgtggatcgcacggaactgttgattgccgatgaggtctttttgaccggtacggcggcgcgaattgtgcccgtcagtcgtattgagacctacactctgcccagcgatcgccccctgacactccaactgcaaaaacaattacaggcgatcgttgaaggccgagagccgcagtatcgccattgggttgatgtcattccgctctag

SEQ ID NO: 7141 - protein, 303 aa, Synechococcus elongatus
MSDFLPYAYLNGQFVPFEEAKISVATHALHYGTAALGGLRGLPNPANPKEILLFRLEDHCRRLSRSAYYLGYELPTSEIKARIIEWVQKNQPRVPFYIRPLVYTSGLGIAPRLHDIEKDFLIYGLPLGDYLAATGVTCRISSWQRQCDRSFPLRGKLTTSYIVSALAKTEAVSSGFDEAILLNEQGKVCEATGMNLFLVREGQLITPSVDQDILEGITRRSVIELAQAAGVKVMERPVDRTELLIADEVFLTGTAARIVPVSRIETYTLPSDRPLTLQLQKQLQAIVEGREPQYRHWVDVIPL

SEQ ID NO: 7142 - DNA, 1026 bp, Streptococcus mutans
  CDS (1)..(1026)
atgacagtagatttagattggaaaaatttaggatttgaatatcacaaacttccatttcgctatatttcttactacaaagatgggaaatgggatgacggtaaactgacagaagatgcgactctccacatttctgaaagctcaccagctcttcattatgggcaagaagcttttgaaggtttgaaagcctaccgtacaaaagatggctctgttcagcttttccgtcctaatatgaatgctgagcgcttacaacgtacagctgatcgtctcttgatgccgcaagtgccaactgacaaattcattgatgctgccaaacaagtcgttcgtgccaatgaagagtatgttccaccatatggtacaggggcaacgctttatcttcgcccacttttgattggtgtcggcgatgtgatcggtgttcatccagctgatgaatatatctttaccatctttgctatgccggtaggtaactactttaaaggtggtttggctccgacgaattttcttattcaagatgattatgaccgcgctgcgccacatggcacaggagctgccaaagttggcgggaactacgcggcgagtcttttgccaggtaaggttgcccatgaacgccagttttcagatgttatttatcttgacccagcaacacatactaagattgaagaagtcggttcagctaacttctttggtatcactaaagataatgagtttattacacctcttagtccgtccattcttccttctgttaccaaatattctctgctttatttagctgaacatcgtttcggcatgaaagccattgaaggcgatgtctgcgtagatgaattagataaatttgttgaagcaggagcctgcggtacagcagctgttatctcaccaatcggaggtgtacagcacggtgatgatttccatgtcttttacagtgaaacggaagttggtcctgtaacgcataaattgtatgatgagttaacaggtatccaattcggcgatgttaaagcaccagagggctggatatataaagttgatgactag

SEQ ID NO: 7143 - protein, 341 aa, Streptococcus mutans
MTVDLDWKNLGFEYHKLPFRYISYYKDGKWDDGKLTEDATLHISESSPALHYGQEAFEGLKAYRTKDGSVQLFRPNMNAERLQRTADRLLMPQVPTDKFIDAAKQVVRANEEYVPPYGTGATLYLRPLLIGVGDVIGVHPADEYIFTIFAMPVGNYFKGGLAPTNFLIQDDYDRAAPHGTGAAKVGGNYAASLLPGKVAHERQFSDVIYLDPATHTKIEEVGSANFFGITKDNEFITPLSPSILPSVTKYSLLYLAEHRFGMKAIEGDVCVDELDKFVEAGACGTAAVISPIGGVQHGDDFHVFYSETEVGPVTHKLYDELTGIQFGDVKAPEGWIYKVDD

SEQ ID NO: 7144 - DNA, 1023 bp, Streptococcus agalactiae
  CDS (1)..(1023)
atgacagtaaatttagattgggataatttaggttttgcttacagaaaattaccattccgatacatttcgcattttaaagatgggaaatgggatgatggcaagttgacagatgatgcaacgctacatatttcagaaagttcacctgctctccattatgggcaacaagcttttgaaggattgaaagcttatagaactaaagatggctctattcagttatttcgtccagatcaaaatgcagaacgacttcaaagaacagcagatcgtcttttaatgccacatgttccgacagacaaatttattgcagcggttaaatctgttgtacgcgctaatgaggagtttgttccaccgtatggtacaggggcaacattatacattcgtcccttattaattggtgtgggagatattattggagttaaacctgctgaagaatatatttttacggtatttgcaatgccagtaggtagttattttaaaggtggtttaacaccaactaactttattgtttccaaagaatatgatagagcagcaccgaatggtacaggagctgcaaaagttggtggtaactatgctgctagtcttcttcctgggaaatatgctcatgagaaacaattttcagatgttatctatcttgatccagcgacacatactaaaattgaagaggttggagcagctaatttctttggaattactaaagataatcagtttatcacccctttgagtccttcaattttaccttcaattactaaatattcattgctttaccttgctaaagaaaggtttggtatggaagcgattgaaggagatgtctttgtcgacgaattagataaattcacagaagctggcgcatgtggtacagccgcagttatttcaccaattggaggaattcaaaacggagatgacttccatgtcttctacagtgagacagaagttggtccagcgacacgcaaactatatgatgagttagtagggatccagtttggtgatgttgaagcaccagaagggtggatttataaagtagattag

SEQ ID NO: 7145 - protein, 340 aa, Streptococcus agalactiae
MTVNLDWDNLGFAYRKLPFRYISHFKDGKWDDGKLTDDATLHISESSPALHYGQQAFEGLKAYRTKDGSIQLFRPDQNAERLQRTADRLLMPHVPTDKFIAAVKSVVRANEEFVPPYGTGATLYIRPLLIGVGDIIGVKPAEEYIFTVFAMPVGSYFKGGLTPTNFIVSKEYDRAAPNGTGAAKVGGNYAASLLPGKYAHEKQFSDVIYLDPATHTKIEEVGAANFFGITKDNQFITPLSPSILPSITKYSLLYLAKERFGMEAIEGDVFVDELDKFTEAGACGTAAVISPIGGIQNGDDFHVFYSETEVGPATRKLYDELVGIQFGDVEAPEGWIYKVD

SEQ ID NO: 7146 - DNA, 1092 bp, Shewanella oneidensis
  CDS (1)..(1092)
atggaaataaaatacgatttaaaacctgcgtccgaacgccgtactgagcaattcaagcccgaaggaaatgtgggcttcggtagcctcagaaccgatcatatgtttttaatggattatcacgatggtgagtggcgcgatcctcgtattgtgccctatggcccatttgaaatggctccgggtgcaatggcgctgcactatggccagtcaatcttcgaaggtgcaaaagcctttatgcatgaagatggcgaaatttacacgttccgtattaataaaaacgctgagcgtatgaatcgttctgcggatattgtctgtattcctaatatcgatgagcagatgcaaatcgatgcgatcaacgccttgatcgatgtggatcgtctttggttcccgatgcaagaaggtgcctgtttatacattcgcccctttatttttgcgaccgaagaccgtctgtctgtaagcccaagttcgcgctacacattctgcgtggtgttaagcccaagtggtgcttactacgcggcgggtgtgaataaaggcattcgtctactgatcagcaagacttaccatcgcgctgtatcgggtggtactggcgcctctaaagcggcgggtaactatgccgcctcattacgtgcgggtaaagctgccgcacagtttggggcctcacaggtgttgtatttagatgccaacaatcagcagattgaagaagctggggctatgaaccacttccacattctcaaagatggcactgtgattatcccgacattcaccgacaccatcttaaaatcgattacctcgcaatctattatggaactcagtgagctactcggctgcgaagtgcgccaagagacggtgatgctcgataagtttattgccgatatcgaatccggtgagattatcgaggcgggtggttttggaactgccgccgtagtgtctgctgttggttcttatatttttgaagatggccgagtggtgactgttggcaacggcgaggtgggtgagcatattcaacgcatctacaaactgtataccgatatccaaaaaggtcatgttcaaggccctgagggatgggtcaaacgcgtcgagcgtgttgcgccttaa

SEQ ID NO: 7147 - protein, 363 aa, Shewanella oneidensis
MEIKYDLKPASERRTEQFKPEGNVGFGSLRTDHMFLMDYHDGEWRDPRIVPYGPFEMAPGAMALHYGQSIFEGAKAFMHEDGEIYTFRINKNAERMNRSADIVCIPNIDEQMQIDAINALIDVDRLWFPMQEGACLYIRPFIFATEDRLSVSPSSRYTFCVVLSPSGAYYAAGVNKGIRLLISKTYHRAVSGGTGASKAAGNYAASLRAGKAAAQFGASQVLYLDANNQQIEEAGAMNHFHILKDGTVIIPTFTDTILKSITSQSIMELSELLGCEVRQETVMLDKFIADIESGEIIEAGGFGTAAVVSAVGSYIFEDGRVVTVGNGEVGEHIQRIYKLYTDIQKGHVQGPEGWVKRVERVAP

SEQ ID NO: 7148 - DNA, 1095 bp, Oceanobacillus iheyensis
  CDS (1)..(1095)
atggaagaacaaacaattcgcgtacaacgaagtgaaacaaagaaagaaaaacctcagtctgatcagttgattttcggaagatcttttacggatcatatgtttgtcatggattactctgatcctttgggatggcataatgcgagtattgtaccatatcaaccattgtcgattgatccatcttcaatgattttccattatggtcaatctgtttttgaaggattaaaggcatttcgtactgagagcggagatattcaattattccgtgcggaaaaaaaccttgagcgtttaaatcgttcaaatgaccgtctatgtattccgcaaatcgatgaggagttcacactaaaagcaattaaacagttaatttccatcgaaaaagattgggtaccaagtgcagaaggaacatccctttatattcgtccttttattatttcaacagaggcttatattggggtcgcaccatcgatgaattataagttgatcgtcattttatctccagtaggtgcttactacaaagaaggaataaacccagtcaaaattgctgttgaagatcactatgtacgaacggtgaaaggtggtactggtgaagcaaaaactggtggaaactatgcatcaagtctaaaagcacaagaaattgtagcgaaacaaggatttgcacaagtgctttggttagatggtgtcgagaaaaagtatattgaagaagtcggcagtatgaatgtcttcttcaaaattaatggagaagttgttactcctcaattaaacggaagtattctttcaggagtaactcgtagctctgtcattgaattattaaaacattggggtgtacctgtatctgaaaagcgcatttccattcaggatttataccaagcttatttagatggtgagctagaagaagcttttggatccggtacagctgctgtaatttctccaattggtcaacttacttgggaaggcaaagatatgatcgtcaacaatggggaaactggtgaactctctaaacgcatatacgatacaattactggcattcaatatggtcatttagatgatccattccaatggattcaagggattgaagcaaagagtcccgtaaaacattga

SEQ ID NO: 7149 - protein, 364 aa, Oceanobacillus iheyensis
MEEQTIRVQRSETKKEKPQSDQLIFGRSFTDHMFVMDYSDPLGWHNASIVPYQPLSIDPSSMIFHYGQSVFEGLKAFRTESGDIQLFRAEKNLERLNRSNDRLCIPQIDEEFTLKAIKQLISIEKDWVPSAEGTSLYIRPFIISTEAYIGVAPSMNYKLIVILSPVGAYYKEGINPVKIAVEDHYVRTVKGGTGEAKTGGNYASSLKAQEIVAKQGFAQVLWLDGVEKKYIEEVGSMNVFFKINGEVVTPQLNGSILSGVTRSSVIELLKHWGVPVSEKRISIQDLYQAYLDGELEEAFGSGTAAVISPIGQLTWEGKDMIVNNGETGELSKRIYDTITGIQYGHLDDPFQWIQGIEAKSPVKH

SEQ ID NO: 7150 - DNA, 1236 bp, Corynebacterium efficiens
  CDS (1)..(1236)
atggcgcccccggatttctatgctcccagcctagccataatcccgttacctgagacgacaccgcctgtgaacccgcctgcattgagagaccatctgctgaagctagtcggcagccggtgtaacttaaacagcatgacgtctattgagttcactgtgacccgtaccgaaaacccgacgtcacccgatcgcctgaaggaaattcttaccgccccgaaattcggtaagttcttcaccgaccacatggtgaccatcgactggactgaggacggcggctggcacaacgcccaggtagttccctacgcccccatcccgatggatcccgcaaccacggtattccactacggacaggccatcttcgagggcatcaaggcctaccgccacgcagacggcaccatcaaaaccttccgcccggaggagaacgccctgcgtatgcagcgttccgccgctcgcatggccatgccggaactccccgtcgagacgttcatcaaatcccttgaactgctcgtcgacatcgaccaggactgggtcccggccgccggtggggaagcatccctctatctgcgtcccttcatgatctccaccgaggtgtccctgggtgtcagccccgcgaacgcctacaagttcatcgtcatcgcctccccggtggccgcgtacttctccggtggcatcaagccggtgtcggtctggctcagcgaggattatgtccgcgccgcccccggtggcaccggagccgcgaaattcgccggcaactacgccgcctccctcctcgcccaggcccaggcccaggagaaggggtgcgaccaggtggtctggctcgatgcgatcgaacaccgctacatcgaggagatgggcggcatgaacctcggtttcatctaccgcaacggtgacaacgtgaagttggtgaccccggaactgtccggatcgctgctgccgggcatcacccgtgattcactcctgcaggtcgcccgcgatctcggttatgaggttgaggaacgacgcatcagcaccaccgaatgggaggaggacgccacctccggtgccatggccgaggcattcgcctgcggcaccgcagccgtgatcaccccggtgggcaccgtcaagtccaaccacggcgaattcgtggtcaacaacaacgaggccggcgagatcaccatgaaactgcgtgaaaccctcaccggcatccagcagggcaaggtcgacgacacccacgactggttgtacacgctggtgaaatag

SEQ ID NO: 7151 - protein, 411 aa, Corynebacterium efficiens
MAPPDFYAPSLAIIPLPETTPPVNPPALRDHLLKLVGSRCNLNSMTSIEFTVTRTENPTSPDRLKEILTAPKFGKFFTDHMVTIDWTEDGGWHNAQVVPYAPIPMDPATTVFHYGQAIFEGIKAYRHADGTIKTFRPEENALRMQRSAARMAMPELPVETFIKSLELLVDIDQDWVPAAGGEASLYLRPFMISTEVSLGVSPANAYKFIVIASPVAAYFSGGIKPVSVWLSEDYVRAAPGGTGAAKFAGNYAASLLAQAQAQEKGCDQVVWLDAIEHRYIEEMGGMNLGFIYRNGDNVKLVTPELSGSLLPGITRDSLLQVARDLGYEVEERRISTTEWEEDATSGAMAEAFACGTAAVITPVGTVKSNHGEFVVNNNEAGEITMKLRETLTGIQQGKVDDTHDWLYTLVK

SEQ ID NO: 7152 - DNA, 1128 bp, Bifidobacterium longum
  CDS (1)..(1128)
atgactgaaaacacgcaccacgatccggcagcgctcgacaagctcgccgaaccgttcaccgtactgccgaacgacaaccccgcatccgatgagaagcgccagtccctcatcgacaagccggctttcggccaggtgttctccgacaacatgacccacatgacctggaccaagggcgaaggttggtccgaccgccgcgtcgaaccgtacgcaccgctcaagatggatccgggtgcttccgtgctgcactacgcacaggagtgcttcgagggcctcaaggcttaccgtcatgccgacggctccacctggctgttccgcccggatgcgaacgccgagcgtttccagaactccgccaagcgtctgtacctgcctgagctgccgattgacgacttcctcggttccgtggccgcgctggtcaagcgcgacgccaactgggtgccgtcccgccgcgagtacacgctgtacatgcgtccgttcatgttcgcttccgagccgttcctcggcgtgcgcgccccgcaggaagtcgactactgcgtgatcgcctccccgtccggcccgtacttcccgggcggcgtcaagccggtgagcatctgggttgaagacaagtggttccgcaccggccctggcggcactggtttcgccaagtgcggcggcaactacgccgcctccctgctcggcgagtacaagggggttgagaacggctgcgagcaggtgtgcttcgtggacgccgccaccaagacctacctcgaagagctcggtggcatgaacatgatggccgtgcacaaggatggccacgtggagaccccgtccctgaccggtaacattctgccgggtgtgacccgtcgctccctgattcagctgctgcaggacaagggccacgacgtagtcgagaccatgattgccctcgaccagctgctcgaggacatcaagtccggtgaggtcaccgaggtgttcgcttgcggcaccgcagccatcatcaccccgatcggtcgcttcaagtccgagaagttcgatgtcgccgtcgccgacggcggctccggcaagctcacctgcgaactgcgtgacgagctgctcggcatccagctcggcgaagtcgaggacccgcacaactggatgtggaaagtgtgctga

SEQ ID NO: 7153 - protein, 375 aa, Bifidobacterium longum
MTENTHHDPAALDKLAEPFTVLPNDNPASDEKRQSLIDKPAFGQVFSDNMTHMTWTKGEGWSDRRVEPYAPLKMDPGASVLHYAQECFEGLKAYRHADGSTWLFRPDANAERFQNSAKRLYLPELPIDDFLGSVAALVKRDANWVPSRREYTLYMRPFMFASEPFLGVRAPQEVDYCVIASPSGPYFPGGVKPVSIWVEDKWFRTGPGGTGFAKCGGNYAASLLGEYKGVENGCEQVCFVDAATKTYLEELGGMNMMAVHKDGHVETPSLTGNILPGVTRRSLIQLLQDKGHDVVETMIALDQLLEDIKSGEVTEVFACGTAAIITPIGRFKSEKFDVAVADGGSGKLTCELRDELLGIQLGEVEDPHNWMWKVC

SEQ ID NO: 7154 - DNA, 1248 bp, Oryza sativa
  CDS (1)..(1248)
atggctgctgctgctgctgctgcgtcgtccgcgaagcgcgcgctcctcccgtgggcacgcgacgcccaccacgcgctggccagggccctgcagggatgcggcggcggcggcggcctcggtctccgcggggcgctcccgacggccggaggcaggtggtctctgctccagtgccggtggaggtcgtcgctgccgcagctcgactccgccgacaggtccgatgaggaaagcggcggcgaaatcgactgggacaacctggggttcgggctgacgccgaccgactacatgtacgtcatgcggtgctcgctggaggacggcgtcttctcccgcggcgagctcagccgctacggcaacatcgagctcagcccctcctccggcgtcatcaactacggccaggggctcttcgagggtctgaaggcgtacagggcggcgaaccaacaggggtcgtacatgctgttccggccggaggagaacgcgcggcggatgcagcacggcgccgagcgcatgtgcatgccgtcgccgtcggtggagcagttcgtccacgccgtcaagcagaccgtcctcgccaaccgccgctgggtgccaccgcaaggaaagggggcgctgtacatcaggccgctgctcatcgggagcggaccgattctcgggctggctcccgccccggagtacacgttcctcatctacgccgcaccggttggaacgtacttcaaggagggtctagcgccgataaaccttgtcgtagaggactcgatacaccgggccatgccgggcggcaccggcggggtcaagacgatcaccaactacgcgccggtgctcaaggcgcagatggacgccaagagcagagggttcactgacgtgctgtacctcgacgcggtgcacaagacgtacctggaggaggcctcctcctgcaacctcttcatcgtcaaggacggcgtcgtcgccacgccggccaccgtgggaaccatcctgccggggatcacgcgcaagagcgtcatcgagctcgccagggaccgcggctatcaggttgaagaacggctcgtctccatcgacgatctggtcggcgcagacgaggtgttctgcaccggaacagcggtggtcgttgccccagtatcgagtgttacttaccatgggcaaaggtacgagttcaggactggacatgacacgttatcgcagacactgcacacgactctgacgtccatccagatgggcctggctgaggacaagaaaggatggacagtggcaatagattaa

SEQ ID NO: 7155 - protein, 415 aa, Oryza sativa
MAAAAAAASSAKRALLPWARDAHHALARALQGCGGGGGLGLRGALPTAGGRWSLLQCRWRSSLPQLDSADRSDEESGGEIDWDNLGFGLTPTDYMYVMRCSLEDGVFSRGELSRYGNIELSPSSGVINYGQGLFEGLKAYRAANQQGSYMLFRPEENARRMQHGAERMCMPSPSVEQFVHAVKQTVLANRRWVPPQGKGALYIRPLLIGSGPILGLAPAPEYTFLIYAAPVGTYFKEGLAPINLVVEDSIHRAMPGGTGGVKTITNYAPVLKAQMDAKSRGFTDVLYLDAVHKTYLEEASSCNLFIVKDGVVATPATVGTILPGITRKSVIELARDRGYQVEERLVSIDDLVGADEVFCTGTAVVVAPVSSVTYHGQRYEFRTGHDTLSQTLHTTLTSIQMGLAEDKKGWTVAID

SEQ ID NO: 7156 - DNA, 1472 bp, Oryza sativa
  CDS (60)..(1277)
attgccattgtcttcgccccccgccgccgcctgctcaaacccatcggagagcaaaccgaatggagctccacctcacctcccgcggcgccctcccgctgtctccgccgctcgccggccagcggcgtcctcacctctctctctccacgccgtcgcttccgatcaagaatcacacttattcagtgccacctcctttctccaaggctcactgcgcgataggatgccaagcttctctagcaactaactacatggaaacctctgcggtggctgatttggactgggagaacctcggttttggccttgtccagacagattttatgtatattgcaaaatgcgggccagatgggaacttttccaaaggagaaatggtaccatttggacctatagaactgagcccatctgctggagtcttaaattatggacagggcttgtttgagggcttaaaggcatatagaaaaacagatggatacattctgctgtttcgtccggaggagaatgccataaggatgagaaatggtgcagagaggatgtgtatgcctgcaccaactcttgaacaatttgtggatgcagtaaagcaaaccgttttggcaaataaaagatgggtgcccccaaccggtaaaggctccctgtatataaggccgctgcttatgggaagtggagctgtccttggtcttgcacctgctcctgagtatacctttatgatttttgtctcccctgttgggaactatttcaaggaaggtttagcccctattaacttgattatagaagaaaactttcaccgtgctgcccctggtggaactggcggagtgaaaaccattggaaactatgcctcggtattaaaagcacagaggattgcaaaacagaaaggatattcagatgtcctctatctagatgccgttcacaagaaatatctggaagaagtgtcttcgtgcaatatctttattgtgaaaggcaatgttatttctactccagcaataaaaggaaccatactgcctggtataacaaggaaaagtattcttgaagttgctcagagaaaaggcttcatggttgaggagcgccttgtgtcagtggatgagcttcttgaagctgatgaagttttctgcacgggaacagctgttgtggtgtcccctgtggggagcataacttatctggggcaaagggtggaatatggcaaccaaggagtgggcgtggtgtgtcagcagctgtatacttcacttacaagcctccagatgggtcatgtggacgattgtatgggctggactgtggaactaaaccagtgatcatgtacctcccttctcgctgtatacgttgggggtatttggcgcattgatccgataataatgcaaaataataaaaaatgttgttctttttatggtcagaacaaattccccatatactattagtcctgtgctcctgaagttctgatcacaagaacagtgtgctaatgtatcctgttatcacaaaatactagtatc

SEQ ID NO: 7157 - protein, 405 aa, Oryza sativa
MELHLTSRGALPLSPPLAGQRRPHLSLSTPSLPIKNHTYSVPPPFSKAHCAIGCQASLATNYMETSAVADLDWENLGFGLVQTDFMYIAKCGPDGNFSKGEMVPFGPIELSPSAGVLNYGQGLFEGLKAYRKTDGYILLFRPEENAIRMRNGAERMCMPAPTLEQFVDAVKQTVLANKRWVPPTGKGSLYIRPLLMGSGAVLGLAPAPEYTFMIFVSPVGNYFKEGLAPINLIIEENFHRAAPGGTGGVKTIGNYASVLKAQRIAKQKGYSDVLYLDAVHKKYLEEVSSCNIFIVKGNVISTPAIKGTILPGITRKSILEVAQRKGFMVEERLVSVDELLEADEVFCTGTAVVVSPVGSITYLGQRVEYGNQGVGVVCQQLYTSLTSLQMGHVDDCMGWTVELNQ

SEQ ID NO: 7158 - DNA, 912 bp, Chlorobium tepidum
  CDS (1)..(912)
atggataactcgcttaaaatatggatgaacggcgaactggtcggctggagtgacgccaaaatccacgtcatgtcccacgtcgtccactatggttcgtcaaccttcgagggcatccgctgttacgataccgtcaaaggctcggcgctgctcttcctcgacgaacatgtccgccgcctctgggaatcttcgaaaatctaccgcatagagattccctattcggaaaccgagatcaaggacgccattatctcgaccatcaaggccaacaaccacaaggcctgctacgtccgtccgctggttttccgtggtcagggcgcgcttggcgtcaatccgcaccgcgcctccatcgaggtcgccatcgcgacctgggagtggggcacctacctcggcgaggatgtgcttgaaaatggcgtggatgtcaaggtctcctcatggcaccgcctcgccccgaacaccctgccctcatgggccaaagcaggcggcaactacatgaactcgcagctcatcaaaatggaggcgctgtcggacggttacgccgaaggactggcgctcgaccacaacggctacgttgccgagggcagcggcgaaaacatctttgtcgtcaggaacaacatcatttacaccccgctggccgcgcagtcgatcctgccgggctttacccgtcacgctgtgatgcacatcgccagggagcttggctacgaggttcgcgaaacgcccattccgcgcgaggcgctttacatcgccgacgaaatcttcctgaccggcacggctgccgagatcaccccagtcagaagcgttgacagaatcccgattggcaacgaacaccgcggcccggtcaccgaagccttgcagcacgagtacctcaaaatcgtccattccggagaagacccatacaactggctgacctttatttga

SEQ ID NO: 7159 - protein, 303 aa, Chlorobium tepidum
MDNSLKIWMNGELVGWSDAKIHVMSHVVHYGSSTFEGIRCYDTVKGSALLFLDEHVRRLWESSKIYRIEIPYSETEIKDAIISTIKANNHKACYVRPLVFRGQGALGVNPHRASIEVAIATWEWGTYLGEDVLENGVDVKVSSWHRLAPNTLPSWAKAGGNYMNSQLIKMEALSDGYAEGLALDHNGYVAEGSGENIFVVRNNIIYTPLAAQSILPGFTRHAVMHIARELGYEVRETPIPREALYIADEIFLTGTAAEITPVRSVDRIPIGNEHRGPVTEALQHEYLKIVHSGEDPYNWLTFI

SEQ ID NO: 7160 - DNA, 960 bp, Rhizobium loti
  CDS (1)..(960)
atgacacttgccacgacagacgcgacggtgggagttccggaagtcgaaactacccataaggatacccggcgttatcctcacggtgtcgccttcatggacggacagtacctcccaatgtctgaagcgaagatctctgtccttgactggggtttcctgcactctgacgctacttacgataccgtgcacgtctgggaagggcgattcttcagactggaccttcatcttgatcgcttcttcagggggatggatcgtctccgaatgaagctgccctatcatcgccgagaggtcgaacgggttctttcaaactgcgtcgctctgtctggacataaatcagcctatgttgagatgatctgcacgcggggaggttcgccgacatttagccgcgatccgcgcgaggccgagaatcggttcattgcctttgctgtgccgtttggttcggttgccaacaaagaacagttggagcgtggtctccacgttggcgtaagcgaaactgtccgaattccgccgaagtcagtggatccgacgatcaagaattaccactggcttgacttggtcagaggtctttacgatgcttacgatgtgggggcggaaacggcgctcataatggacaccaacggcaatattgcggaaggtcccggctttaatgtcttcaccgttaagaaccgtcagctgaagacaccagcctttggggtgcttccaggaataacgcggcagtccgttttcgacctgtgtggggaagtgggacttgcggtgacggctgcagacctacctcgtcttgaactgggcgaagccgatgaggtgttcatcacctccaccgcaggggggatcatgcccgtgacgcgcgttgatggttcatccatcggcagcggtaaagttggcgtcgtgacccggcagctgatggacctctactggcaaaagcattccgatgatgcttggtctacccccgttaaatatgcgtaa

SEQ ID NO: 7161 - protein, 319 aa, Rhizobium loti
MTLATTDATVGVPEVETTHKDTRRYPHGVAFMDGQYLPMSEAKISVLDWGFLHSDATYDTVHVWEGRFFRLDLHLDRFFRGMDRLRMKLPYHRREVERVLSNCVALSGHKSAYVEMICTRGGSPTFSRDPREAENRFIAFAVPFGSVANKEQLERGLHVGVSETVRIPPKSVDPTIKNYHWLDLVRGLYDAYDVGAETALIMDTNGNIAEGPGFNVFTVKNRQLKTPAFGVLPGITRQSVFDLCGEVGLAVTAADLPRLELGEADEVFITSTAGGIMPVTRVDGSSIGSGKVGVVTRQLMDLYWQKHSDDAWSTPVKYA

SEQ ID NO: 7162 - DNA, 1023 bp, Streptococcus pyogenes
  CDS (1)..(1023)
atgacaatagcaattgattgggacaacctaggatttgaatatcataagttgccatttcgttacatttcttattacaaaaatggtcaatgggataaaggtcaattaacagaagatgccaccttacatatctcagaaagcgctccagcgcttcattatggacaacaagcttttgaaggtttaaaggcttatcgcaccaaagatggctctattcaactatttagaccagaccgtaatgcagcgcgtttacaagccacagcagaccgcttgttgatgccacaagtatcaacagagcaatttattgatgcagctaagcaagtggttaaagccaatgaagactttgtaccaccttacggaacaggtgcaacgctttacctgagaccgttattaattggagttggagatattattggggttaaaccagccgaagaatatattttcactatttttgccatgccagtaggaaactatttcaaaggtggacttgctccaactaattttattgtttctgaagcgtttgaccgcgccgctccttacggaacaggtgctgctaaggtgggaggaaactatgcaggaagtttgctaccaggtaaggccgctaaatcagcaggcttttctgatgtgatttacttagatccagcaacccatactaaaattgaagaagtcggagctgcaaacttttttggcattactgcaaataatgaatttgttacgccacttagtccatccatcttgccatctattacgaagtattcactcttacaactagctgaagaaagacttggtatgacagtaattgagggtgatgttccaattaatgaattggataaatttgtggaagcaggagcttgtggaacagcagctgttatctctccaattggcggtatccagtacaaggataacttacatgtcttttacagtgaaacagaagttggtcctgtgacacgccgtttatacgatgagttggtcggcattcaatttggggatattgaagcaccagaaggttggattgtaaaagtagattaa

SEQ ID NO: 7163 - protein, 340 aa, Streptococcus pyogenes
MTIAIDWDNLGFEYHKLPFRYISYYKNGQWDKGQLTEDATLHISESAPALHYGQQAFEGLKAYRTKDGSIQLFRPDRNAARLQATADRLLMPQVSTEQFIDAAKQVVKANEDFVPPYGTGATLYLRPLLIGVGDIIGVKPAEEYIFTIFAMPVGNYFKGGLAPTNFIVSEAFDRAAPYGTGAAKVGGNYAGSLLPGKAAKSAGFSDVIYLDPATHTKIEEVGAANFFGITANNEFVTPLSPSILPSITKYSLLQLAEERLGMTVIEGDVPINELDKFVEAGACGTAAVISPIGGIQYKDNLHVFYSETEVGPVTRRLYDELVGIQFGDIEAPEGWIVKVD

SEQ ID NO: 7164 - DNA, 1086 bp, Xanthomonas campestris
  CDS (1)..(1086)
atgtccgtgtccttcgcttccacccgctccccgtcgccgcgcagcgccgacgaactgtccgtgatcctggctgcgccggggttcggcctgcatttcaccgaccacatggtcgccatctcctggaccaacgagctcggttggcacgatgcgcaggtgcgtgcctacggcccgctgcagctggatccggccgcctcggtgctgcattacggccaggagatcttcgaaggtatcaaggcctaccggcatgccgacggctcgatctggaccttccgcccgcaggccaatggcgagcgcctgcagcgctccgcgcgccgcctggcgctgccggaactgccggtggacctgttcgtggagtcgctgcgccagttggtggccgtggatgccggctgggtgccgtcggcgccggaaaccagcctgtatttccgcccgttcatgatcgccgacgaggcgttcctgggcgtgcgcgcggcgcacaaggcctcgtactacgtgatcgccagcccggccggtccgtatttcgccaagggcgtggcgccggtgtcgatctggttgtccaccgagtacgcacgtgcagccaagggcggcaccggcgcggccaagtgcggcggcaactacgccgcttcgctgctgccgcagcagaaagcctacgcgcagggctgctcgcaggtgctgttcctggacccggtggaaggcaaatacattgaagaactgggcggcatgaacgtgttcctggtctacaaggacggcacgctggtgaccccagagctgtccggcagcatcctggaaggcatcacccgcgacagcatcctgcagctggcccgtgaccgcggcatgcaggtggtggagcgcaaggtgtccatcgacgagtggaaggacggcgtggcctccggcgagatcagcgaggtgttcgcctgcggcacggcggctgtggttaccccgatcggcgagctgaagggcgatggctttgcggtcggcgacctgtctgcaccggcgggcgaggtgacgatgtcgctgcgccaggagctgaccgacatccagtacgggcgcgtgccggaccgccacggttggctggtgcgtctgtcctaa

SEQ ID NO: 7165 - protein, 361 aa, Xanthomonas campestris
MSVSFASTRSPSPRSADELSVILAAPGFGLHFTDHMVAISWTNELGWHDAQVRAYGPLQLDPAASVLHYGQEIFEGIKAYRHADGSIWTFRPQANGERLQRSARRLALPELPVDLFVESLRQLVAVDAGWVPSAPETSLYFRPFMIADEAFLGVRAAHKASYYVIASPAGPYFAKGVAPVSIWLSTEYARAAKGGTGAAKCGGNYAASLLPQQKAYAQGCSQVLFLDPVEGKYIEELGGMNVFLVYKDGTLVTPELSGSILEGITRDSILQLARDRGMQVVERKVSIDEWKDGVASGEISEVFACGTAAVVTPIGELKGDGFAVGDLSAPAGEVTMSLRQELTDIQYGRVPDRHGWLVRLS

SEQ ID NO: 7166 - DNA, 1086 bp, Xanthomonas axonopodis
  CDS (1)..(1086)
atgtccgtgtccttcgcttccacccgttctccgtcgccgcgcagcgccgacgaattgtccgtgatcctggctgcgcccggtttcgggttgcatttcaccgaccacatggtcgccatctcctggaacaacgagcagggctggcacgacgcgcaagtgcgcgcgtacggcccgctgcagctggatccggcagcgtcggtgctgcattacgggcaggagatcttcgaaggcatcaaggcctaccggcacgccgacggctcgatctggaccttccgtccgcaagccaacggcgagcgcctgcagcggtcggcgcgccgtctggcgctgccggaattgccggtggacctgttcgtggaatcgctgcgccagctggtggccgtggatggcggctgggtgccgtcggcgccggagaccagcctgtatttccgcccgttcatgattgccgatgaggccttcctgggcgtgcgcgcggcgcacaaggcctcgtattacgtgatcgccagcccggccggcccgtacttcgccaagggcgtggcgccggtgtcgatctggctgtccaccgaatacgcacgtgcggccaagggcgggaccggcgcggccaaatgcggcggcaattacgccgcgtcgctgctgccgcagcagaaggcctatgcccagggctgctcgcaggtgttgttcctggacccggtggaaggcaagtacatcgaagaactcggcggcatgaacgtgttcctggtctacaaggacggcacgttggtgaccccggaactgtccggcagcatcctggaaggcatcacccgcgacagcatcctgcaactggcccgcgaccgtggcatgcaggtgatcgagcgcaaggtcgcgatcgacgaatggaagcagggcgtggcctccggcgagatcaccgaggtgttcgcctgcggtacggcggcggtggtgacccccatcggcgagctgaagggcgaggggttcgcggtgggcgatctgtccgcgccagcgggccaggtgaccatgtcgctgcgccaggaactgaccgatatccagtacggccgcgtgccggaccgccacgggtggttggtgcgtttgtcgtaa

SEQ ID NO: 7167 - protein, 361 aa, Xanthomonas axonopodis
MSVSFASTRSPSPRSADELSVILAAPGFGLHFTDHMVAISWNNEQGWHDAQVRAYGPLQLDPAASVLHYGQEIFEGIKAYRHADGSIWTFRPQANGERLQRSARRLALPELPVDLFVESLRQLVAVDGGWVPSAPETSLYFRPFMIADEAFLGVRAAHKASYYVIASPAGPYFAKGVAPVSIWLSTEYARAAKGGTGAAKCGGNYAASLLPQQKAYAQGCSQVLFLDPVEGKYIEELGGMNVFLVYKDGTLVTPELSGSILEGITRDSILQLARDRGMQVIERKVAIDEWKQGVASGEITEVFACGTAAVVTPIGELKGEGFAVGDLSAPAGQVTMSLRQELTDIQYGRVPDRHGWLVRLS

SEQ ID NO: 7168 - DNA, 885 bp, Methanosarcina mazei
  CDS (1)..(885)
atgcaaatgagtgagttacttatttatttagacgggaaatttgtcccgaaatccgaagccaaagtttcggtttatgatcacggttacctctatggggacggtgtgttcgaaggaataagggcatataacggacgtgttttcaagttaaaggaacatgttgacaggctttttgactcagcaaaagcaattgcaatggacatacccgttacaagagaagagatgaccgaaataatccttgagaccctgagaaaaaataacctcaaagacgcttacatccgccctatcgtctcaagaggagtcggagatctcgggcttgacccccgcaagtgtgaaaaaccgtgcgttgttgttatcgcccagggatggggtgccatgtacggcaacctttatgaaatcgggcttacaggagtcagcgtctgcgtccgcaggaatgcacctgatgccctgtcccctaacatcaagtccctgaactacctgaataatatccttgcaaagatagaagcaaatgagaaaggcggagatgaagccatattccttgaccagaacggctttgtgtgcgaaggttctggagacaacatctttatcgtcaaaaatgataaggtctttactccccacacaataagcaacttaaaaggcatcacaagagctacagccattgagcttctggatgaaatgggatacaaggttattgaagcaaacctcggcctttttgacctctacacggcagacgaaattttcgttaccgggactgcagccgaatctgctccggtcaccaggctcgacggaagaatcatcggtaatggcaaacccggtcctctcacaatgaagatggttgaagcctttgacaaaataacccgcagtacaggcacccctatttataaataa

SEQ ID NO: 7169 - protein, 294 aa, Methanosarcina mazei
MQMSELLIYLDGKFVPKSEAKVSVYDHGYLYGDGVFEGIRAYNGRVFKLKEHVDRLFDSAKAIAMDIPVTREEMTEIILETLRKNNLKDAYIRPIVSRGVGDLGLDPRKCEKPCVVVIAQGWGAMYGNLYEIGLTGVSVCVRRNAPDALSPNIKSLNYLNNILAKIEANEKGGDEAIFLDQNGFVCEGSGDNIFIVKNDKVFTPHTISNLKGITRATAIELLDEMGYKVIEANLGLFDLYTADEIFVTGTAAESAPVTRLDGRIIGNGKPGPLTMKMVEAFDKITRSTGTPIYK

SEQ ID NO: 7170 - DNA, 876 bp, Thermoanaerobacter tengcongensis
  CDS (1)..(876)
atgggattagtatatgtaaatggagagtttgtggacagcgaaaaagcttgtgtatcagtttttgaccatggctacctttatggggacggaatttttgaggggataagggtttacgacggagtcatatttaaattggatgagcatttaaagaggctttacagtatggcaaaagtgcttcttttggacattcctctttctatggaagagatgaaagaaaaagtcgtggaaacagtgagaattaataatttaagagatgcttacataaggttggttgtctcaagaggaaaaggggatttaggacttgacccttataaatgtcctaaacctacagtcgtgataattgcagataaaatcgccttgtatccagaatctatgtatgagacgggtcttaaaattataacatcttcctttagaagaaattcaatacagtcattggacccgcaaataaagtctttgaactatttaaacaacatcttagctaagattgaagcagtaaaagctggataccctgaggctttgattttaaatcaagagggttatgtggcagagtgcacaggcgacaatatttttataatctccaacggggttttgtattctccaccttcagccgttggggcattaggaggaattacgagagctacagtgattgacatagccagagagcttaacattcctttcgaagaaaaatacttttctctgtttaatgtgtacacagctgatgaatgcttccttacaggtacagcagcagaagcaattcctgtggtagaagtggaccacagagttataggagacggaaaaccaggacctataaccaagaaaataatagaggaatttagaaagcttacaaaagttttgggcacaaaggtgtatgaataa

SEQ ID NO: 7171 - protein, 291 aa, Thermoanaerobacter tengcongensis
MGLVYVNGEFVDSEKACVSVFDHGYLYGDGIFEGIRVYDGVIFKLDEHLKRLYSMAKVLLLDIPLSMEEMKEKVVETVRINNLRDAYIRLVVSRGKGDLGLDPYKCPKPTVVIIADKIALYPESMYETGLKIITSSFRRNSIQSLDPQIKSLNYLNNILAKIEAVKAGYPEALILNQEGYVAECTGDNIFIISNGVLYSPPSAVGALGGITRATVIDIARELNIPFEEKYFSLFNVYTADECFLTGTAAEAIPVVEVDHRVIGDGKPGPITKKIIEEFRKLTKVLGTKVYE

SEQ ID NO: 7172 - DNA, 885 bp, Methanosarcina acetivorans
  CDS (1)..(885)
atgcaaatgagtgatttactgatttatttaaacgggaaatttgtccccaaagacgaagccaaagtttcggtctatgaccacggcttcctttacggagacggtgtgttcgaaggcataagggcatacaacggacgtgtcttcaagttaaaggagcacgttgacaggctttatgactcggcaaaagcaatcgcaatggacatacccgtcacaagagaggaaatgaccgaaataatccttgaggccctcaggaaaaacaacctcaaagatgcttacatccgtcccatcgtctcaagaggaatcggcgacctcgggcttgacccccgtaagtgcgggaaaccaagtgtcatcgttattgcccagggctggggggccatgtacggagacctttacgaagtagggcttaccggagttagcgtctgtgtccggagaaatgccccggatgccctgtccccgaacatcaagtccctgaactatctcaacaacatcctcgcaaagatagaagccaacgagaagggaggagacgaagctattttccttgaccataacgggtttgtctgcgagggctcgggagacaacatcttcgtcgtcaaggacgacagggtcctgacccccttcacaataagcaacctgaaaggtataacaagggccacagccatcgaacttctggacgaaatgggatacaaggttatcgaatcaaacctcggcctgtttgacctttacacagcagatgagatctttgtcacaggaactgcagccgaatcggcccccgtgaccagacttgacggaagagtcataggtacaggcaaacccgggcctctcacaatgaaaatggttgaagcctttgcgaaaataacccagagcacgggaacacaaatttataaataa

SEQ ID NO: 7173 - protein, 294 aa, Methanosarcina acetivorans
MQMSDLLIYLNGKFVPKDEAKVSVYDHGFLYGDGVFEGIRAYNGRVFKLKEHVDRLYDSAKAIAMDIPVTREEMTEIILEALRKNNLKDAYIRPIVSRGIGDLGLDPRKCGKPSVIVIAQGWGAMYGDLYEVGLTGVSVCVRRNAPDALSPNIKSLNYLNNILAKIEANEKGGDEAIFLDHNGFVCEGSGDNIFVVKDDRVLTPFTISNLKGITRATAIELLDEMGYKVIESNLGLFDLYTADEIFVTGTAAESAPVTRLDGRVIGTGKPGPLTMKMVEAFAKITQSTGTQIYK

SEQ ID NO: 7174 - DNA, 888 bp, Methanopyrus kandleri
  CDS (1)..(888)
atgtctgagcgcgagcagctcatctacctgaacggcgaactggtcccccgggaagaggctaaaatctccgtctacgaccacgggttcctgtacggcgacggcgtcttcgaggggattcgggcctacgatggccggatattcaagttggacgagcacgtcgacagactgtacgactccgcaaaggccatcatgctcgagataccgatgaccaaggagaagatgaaggaggccatcatcgagaccgtacgggccaacgagctccgggacgcgtacatccgggtggtggtctcgcgcggcgaaggtgacctcgggttggacccggagaagtgtccggaacccaacgtggtgatcatcgcggagccgatggagccgttgtacggggacctgtacgagaaagggatcgaggtgatcacggcctccgtgcgtcgtattccaccggacgcgctcgatccgaagatcaagtcgtgcaactacctgaacaacatcctggcgaagatccaagccaacctggcgggcgccgacgaggccatcatgttggaccacgagggctacgtctgcgagggtaccggtgacaacgtgttcgtggtggaagacgggaccgtgtacactccaccggaggacactattctccgggggatcaccagggcgaccgtgatggagatctgcgaggagctcggtatacccgtggaagagaagcggataacactgggagaactgtacgcggcggacgaggtgttcctaacgggcacggcggcggaggtggcccccgttaggaaggtcgacgggcggaagatcggcgaggagtgcccaggacccatcacgaggcgtatcatggaggcgttccgggagctcacgaagaaggaaggtacgccggtgtacgaggagtga

SEQ ID NO: 7175 - protein, 295 aa, Methanopyrus kandleri
MSEREQLIYLNGELVPREEAKISVYDHGFLYGDGVFEGIRAYDGRIFKLDEHVDRLYDSAKAIMLEIPMTKEKMKEAIIETVRANELRDAYIRVVVSRGEGDLGLDPEKCPEPNVVIIAEPMEPLYGDLYEKGIEVITASVRRIPPDALDPKIKSCNYLNNILAKIQANLAGADEAIMLDHEGYVCEGTGDNVFVVEDGTVYTPPEDTILRGITRATVMEICEELGIPVEEKRITLGELYAADEVFLTGTAAEVAPVRKVDGRKIGEECPGPITRRIMEAFRELTKKEGTPVYEE

SEQ ID NO: 7176 - DNA, 1065 bp, Ralstonia solanacearum
  CDS (1)..(1065)
atgcaattctcgaacacgtcgactactcggccgacccccatagaacaacgcaaggaagcgctacgtgtccccaagcttggaaaggtgttcactgatcacatggtgaccatccagtggacgagcgaagacgggtggcacgatgccaggattcgtcctcgcgaacccttctccctcgaccctgcttccgcagtcctgcattacgctcaggaaattttcgagggcatgaaagcctatgcgcaaccggacggtggtgtggttttgttccgccccgtggacaacgcgcgccggttcaacgcgtcggcaacccgaatgacgatgccgactattccggaaactgtcttcgttgaggcaatcgagcaactgcttcgcgtagacggcgcgtgggttccgagtggcgaaggaacgagcttgtacctgcgccccttcatgtttgccagtgagtccttcctgggcgtgcgcccagctacccagttcacattttgcgtgatcgccagccctgcaggcgcctacttcaagggcggcgccgagccgatcactgtttggatctcggaacattactctcgcgcggcgaaaggcggcacgggcgcagccaaatgcggcgggaactacgccgggggattgatagcccaggcagaggcgacacgtaatggctgcgatcaggtcgcgtttctcgacgcagccgaaagccggtggatcgaggaactcggcggaatgaacgtcttctttgtcgtagacggcgtgttggttacacctccgctcggcacgattttgccaggtatcacacgagaatccatcatcagcatcgcggaaaagaagggcatcaaggtcgaggagcgtccttactccttcgatcaatggcgagaagatgctgcaactggccgactgaccgaagcattcgcctgtgggacagctgcggtgatcgcgtcgatcggcaaggtccgtttcaaggacggtgaattctcgatttcaggggggcaactgacagatgcactgcgagacgagttggtaggtattcagcgcggcgtcatcgcggacgatttcaactggacttggcgcgtgaaatga

SEQ ID NO: 7177 - protein, 354 aa, Ralstonia solanacearum
MQFSNTSTTRPTPIEQRKEALRVPKLGKVFTDHMVTIQWTSEDGWHDARIRPREPFSLDPASAVLHYAQEIFEGMKAYAQPDGGVVLFRPVDNARRFNASATRMTMPTIPETVFVEAIEQLLRVDGAWVPSGEGTSLYLRPFMFASESFLGVRPATQFTFCVIASPAGAYFKGGAEPITVWISEHYSRAAKGGTGAAKCGGNYAGGLIAQAEATRNGCDQVAFLDAAESRWIEELGGMNVFFVVDGVLVTPPLGTILPGITRESIISIAEKKGIKVEERPYSFDQWREDAATGRLTEAFACGTAAVIASIGKVRFKDGEFSISGGQLTDALRDELVGIQRGVIADDFNWTWRVK

SEQ ID NO: 7178 - DNA, 1026 bp, Clostridium perfringens
  CDS (1)..(1026)
atggataaaaagacagctattgattggaataatctaggcttctcttatatgaaaacagattatcgttacatatctcactataaagatggtaaatgggatgaaggaaaattagttacagacaacaaattaagcataagtgaagcttcaactgcccttcactatggccaacaatgttttgaaggtttaaaagcttatagaacaaaggatggaaagattcaactttttagagtagatgaaaatgctaagagaatgaataaatcatgtgataaacttttaatgcctgaaataccagttgaaaaattcatagatgcttgtatgcaagttgtcaaggctaatgaaagatttgtacctccatacggtactggtgcaactctttatataagacctttcatgataggtgttggtgataatataggtgttaaatctgctcctgaatttatattttcagtattctgccttccagttggtgcttattttaaaggtggaatgaagcctgtaaactttatgattgcagattatgatagagctgctcctaaaggaactggtgccgctaaagttggtggaaattacgcagcaagcttaaaggctcatgaaatagctgcaaaaaaaggatttgctgattgtatatatttagacccagcaactcacactaaaattgaggaagttggagctgcaaacttctttggaataacaaagaaaggtgagtttgttactccatattcagaatcaattttaccaagtataacaaaatactctttaatgcaaatagctaaagattatttaaaaatgcctgtatcagaaagagatgttttaatagataacttagatgaattcgctgaggctggcgcttgtggtacagccgctgtaataactccaataggaggaatagaatataagaataaacttcatgttttccatagcgaaactgaagttggtcctattactaaaaaactttatgatcttttatctggaatgcaatttggagatgtagaagctcctgaaggatggatatttgaagttaaataa

SEQ ID NO: 7179 - protein, 341 aa, Clostridium perfringens
MDKKTAIDWNNLGFSYMKTDYRYISHYKDGKWDEGKLVTDNKLSISEASTALHYGQQCFEGLKAYRTKDGKIQLFRVDENAKRMNKSCDKLLMPEIPVEKFIDACMQVVKANERFVPPYGTGATLYIRPFMIGVGDNIGVKSAPEFIFSVFCLPVGAYFKGGMKPVNFMIADYDRAAPKGTGAAKVGGNYAASLKAHEIAAKKGFADCIYLDPATHTKIEEVGAANFFGITKKGEFVTPYSESILPSITKYSLMQIAKDYLKMPVSERDVLIDNLDEFAEAGACGTAAVITPIGGIEYKNKLHVFHSETEVGPITKKLYDLLSGMQFGDVEAPEGWIFEVK

SEQ ID NO: 7180 - DNA, 930 bp, Ralstonia solanacearum
  CDS (1)..(930)
atgaccagcatggctgaccgcgacggcaagatctggaaagacggcaagctgatcgaatggcgcgacgcgcaactccacgtgctcacccacaccctgcactacggcatgggcgtgttcgagggcgtgcgcgcgtaccagacgccggccggccccgccatcttccgcctgtccgagcacacgcgccggctgttcaattcggccaagatcttccagatgcagattccgttctcggaacagcagctgatggacgcgcagcgcgaagtcgtgcgtgccaacgcgctggcgtcctgctacatccgcccgctggcgtggctcggctccgagaagatgggcgtgtccgcccgcggcaacaccgtccacgtggcgatcgccgcctggccttggggcgcctacctgggcgaagaaggcatgcagcgcggcatccgcgtcaagacgtcgtccttcacgcgccaccatgtgaacgtgtcgctggtgcgcgccaaggccagcggctactacatcaactcgatcctcgccaaccaggaagccaccggcctgggctacgatgaagccctgctgctcgacaccgagggctatgtgagcgaaggctcgggcgagaacgtcttcatcgtccgcaacggcgtgatctacacgcccgacctggcctcgtgcctggacggcatcacccgcgacgcaatcatcaccatcgcgggcgacctcggcatcgaggtgcgcgagaagcgcatcacccgcgacgagatgtactgcgcggacgaagccttcttcaccggcaccgcggcggaagtcaccccgatccgcgaactggatgaccgcgtgatcggcgcgggctcgcgcggcccgatcaccacgcagctgcagtcgacgttcttcgacatcgtcaacggcaagagcaccatcgaaaagtacaaggcgtggctgaccctggcctga

SEQ ID NO: 7181 - protein, 309 aa, Ralstonia solanacearum
MTSMADRDGKIWKDGKLIEWRDAQLHVLTHTLHYGMGVFEGVRAYQTPAGPAIFRLSEHTRRLFNSAKIFQMQIPFSEQQLMDAQREVVRANALASCYIRPLAWLGSEKMGVSARGNTVHVAIAAWPWGAYLGEEGMQRGIRVKTSSFTRHHVNVSLVRAKASGYYINSILANQEATGLGYDEALLLDTEGYVSEGSGENVFIVRNGVIYTPDLASCLDGITRDAIITIAGDLGIEVREKRITRDEMYCADEAFFTGTAAEVTPIRELDDRVIGAGSRGPITTQLQSTFFDIVNGKSTIEKYKAWLTLA

SEQ ID NO: 7182 - DNA, 912 bp, Pyrobaculum aerophilum
  CDS (1)..(912)
atgaagccgtacgctaaatatatctggcttgacggcagaatacttaagtgggaagacgcgaaaatacacgtgttgactcacgcgcttcactacggaacctctatattcgagggaataagagggtattggaacggcgataatttgctcgtctttaggttagaagaacacatcgaccgcatgtacagatcggctaagatactaggcataaatattccgtatacaagagaggaagtccgccaagctgtactagagaccataaaggctaataacttccgagaggatgtctacataagacctgtggcgtttgtcgcctcgcagacggtgacgcttgacataagaaatttggaagtctccctcgcggttattgtattcccatttggcaaatacctctcgcccaacggcattaaggcaacgattgtaagctggcgtagagtacataatacaatgctccctgtgatggcaaaaatcggcggtatatatgtaaactctgtacttgcgcttgtagaggctagaagcaggggatttgacgaggctttattaatggacgttaacggttatgttgttgagggttctggagagaatattttcattgtcagaggtggaaggcttttcacgccgccagtacacgaatctatcctcgagggaattacgagggatacggtaataaagctcagcggggatgtgggacttcgggtggaggaaaagcctattacgagggaggaggtgtatacagccgacgaggtgtttttagtaggaaccgccgcagagataacgccagtggtggaggttgacggcagaacaatcggcacaggcaagccgggccccattacgacaaaaatagctgagctgtactcaaacgtcgtgagaggcaaagtagagaaatacttaaattggatcactcctgtgtattag

SEQ ID NO: 7183 - protein, 303 aa, Pyrobaculum aerophilum
MKPYAKYIWLDGRILKWEDAKIHVLTHALHYGTSIFEGIRGYWNGDNLLVFRLEEHIDRMYRSAKILGINIPYTREEVRQAVLETIKANNFREDVYIRPVAFVASQTVTLDIRNLEVSLAVIVFPFGKYLSPNGIKATIVSWRRVHNTMLPVMAKIGGIYVNSVLALVEARSRGFDEALLMDVNGYVVEGSGENIFIVRGGRLFTPPVHESILEGITRDTVIKLSGDVGLRVEEKPITREEVYTADEVFLVGTAAEITPVVEVDGRTIGTGKPGPITTKIAELYSNVVRGKVEKYLNWITPVY

SEQ ID NO: 7184 - DNA, 864 bp, Rhizobium meliloti
  CDS (1)..(864)
atgccgagaatcgcctatgtcaacggcacttacgtccggcacgccgaagccgccattcacgtcgaggaccggggttaccagtttgccgacggcgtctacgaggtctgcgaggtgcggcacggcttcatcatcgacctgacccgacacctcgatcgcctagggcgatccctgggcgagctcaggataggctggccgatgagtcgtgcggcgctgatccatgtcatccgggaggtgctgcgccgaaacagggtccgcaacgggctcttctatctgcaggtgacccgcggcgtcgcgcggcgggatcatgttttccctgatgcggacacgccgccttcgatcgtcgtcaccgccaaacgcacggatcccggggcgatcgcccggaagaatgccgagggcatatcggcgataacggtgccggagaaccggtgggatcgcgtcgatatcaagagcgtcggccttctcccgaatgtgcttgcccgtcagcaggcgaaggaagcgggcgcgcaggaggcgatcttcgtcgacgtggacggcatggtcaaagagggggcggcgacgaatgtatggatcgtggaccgcgaagggacgttacgcacccgcccggcggaaagtggcattctgcgcggcgtgacccgcaccaccctgatggacgtggccaagccgctgggccttgcgatcgaggaaacggccttctccgtggaagaaatgctcgcagcgcgggaggtcttcatcaccgctgctaccagcatctgctttcccgtcgtttccgtcgacggaaagacgatcggcaacggtcatccaggaagcatagcacagaatattcgcgagacctttttcgacattgcggaaaagacggtgatttga

SEQ ID NO: 7185 - protein, 287 aa, Rhizobium meliloti
MPRIAYVNGTYVRHAEAAIHVEDRGYQFADGVYEVCEVRHGFIIDLTRHLDRLGRSLGELRIGWPMSRAALIHVIREVLRRNRVRNGLFYLQVTRGVARRDHVFPDADTPPSIVVTAKRTDPGAIARKNAEGISAITVPENRWDRVDIKSVGLLPNVLARQQAKEAGAQEAIFVDVDGMVKEGAATNVWIVDREGTLRTRPAESGILRGVTRTTLMDVAKPLGLAIEETAFSVEEMLAAREVFITAATSICFPVVSVDGKTIGNGHPGSIAQNIRETFFDIAEKTVI

SEQ ID NO: 7186 - DNA, 936 bp, Rhizobium meliloti
  CDS (1)..(936)
atgctgctttttccggatagagcggaagtgcgtgaagaaaagaaggaggcaccgatggccgtcgatacatccccacgatccaccacctggacctttgtcgacggcgagtggcttgccggcaacccgccgctgatcggcccgacatcccatgcgatgtggctcggttcgaccgtattcgacggtgcccgctggttcgacggcatcgcgccggatctcgacctccattgccagcgcgtcaaccgctccgccgaggctctgggtctcaagccgacgatgtcggccgaggagatcgagggattggcctgggaaggcgtgaagaagttcgacggcaagacggcgatctatgtgaagcccatgtattggggcgagcacggatcctggagcgtcgttgcggtggatcctgaatcgacacgcttcgcgctttgccttttcgaggcgccgatgggcaacggccatgccggctcgtcgctgacgctctctcccttccgccgaccgacgctggaatgcatgccgaccgatgccaaggccggctgcctctatcccaacaacgcccgcatcctcaacgaggcacgttcgcgcggtttcgacaatgcactggtgcgcgacatgctcggcaacatcgcggagaccggctcctcgaatatcttcatggtgaaggacggcgtcgtcttcacgccggccgccaacaggaccttcctcgccggcatcacccgctcgcgcgtgatggggcttctcagcgaggcaggcttcgaagtgatcgaaaccagcttgaccatggccgatttcgagggggccgacgaaatcttcacctcgggtaattattccaaggtgctgcccgtcacccgcctcgagcagcgcgaattgcaggccggtccggtcacggcgaaggcgcgcgatctctatatggactgggcgcacgcgaccgaaagggagtga

SEQ ID NO: 7187 - protein, 311 aa, Rhizobium meliloti
MLLFPDRAEVREEKKEAPMAVDTSPRSTTWTFVDGEWLAGNPPLIGPTSHAMWLGSTVFDGARWFDGIAPDLDLHCQRVNRSAEALGLKPTMSAEEIEGLAWEGVKKFDGKTAIYVKPMYWGEHGSWSVVAVDPESTRFALCLFEAPMGNGHAGSSLTLSPFRRPTLECMPTDAKAGCLYPNNARILNEARSRGFDNALVRDMLGNIAETGSSNIFMVKDGVVFTPAANRTFLAGITRSRVMGLLSEAGFEVIETSLTMADFEGADEIFTSGNYSKVLPVTRLEQRELQAGPVTAKARDLYMDWAHATERE

SEQ ID NO: 7188 - DNA, 1098 bp, Rhizobium meliloti
  CDS (1)..(1098)
atgaccggtagcggtgagcagactttcctgttcgagcagaacccgaccagagtggcgaacagcgagcgcgatgcgctgcttgcgaatccgggcttcgggcgcgtgttcaccgatcacatggcgacgatccgctattccgaggggcgcggctggcacgatgcgaagatcggcccgcggaaggcgttcgatctcgatccgtcgacactggtgctgcactacgcccaggagatcttcgagggtatgaaggcctatcgcctgcccgacggcggcgccacgctgtttcgccccgatgccaatgcgcgccgtttccgcaactccgcccttcggctcgcaatggcgccgctgccggaggagctgttcgtccaatccgtgcgcgaactggttcgtatcgaccgcgactggatacccgccggcgaaggagccgcgctctatcttcggccgttcatgatcgccacggaagtgctcctcggcgtgaagccttcggctgaatatctctactgcgtcattgcttcctcggtcggttcctacttcaagggcggcgccccggccattaccatatgggtttcggagaattacacccgggcagcgcccggcggcaccggcgaggccaaatgcggcggcaactacgccgcgagcctcgcggcgcaggcggaggcgatgcaggagggctgcgagcaggtggtgttcctcgacgcggtggaacgccgcttcgtcgaagagctcggcggcatgaacgttttcttcggtttccgcgacggctcgctgcagacgccgccgctgacgggcacgatcctgccgggcatcacgcgcgattcgctgatcacgcttgcccgcgatatggggctaacggtgcgcgaagagccctatgccatcgaccagtggcaggcggatgcggaaagcggccgcctcaccgaggccttcgcctgcgggacggctgcggtcgtaacgccgatcggcaaggtcaagggccgcgaacacagcttcaccattggcgacggcggagccggtccggtagccagccgcctgaagtcagccttgctcgacatccagaacggccgcgcgccggacccgcatggctggctcgaccggctgttctga

SEQ ID NO: 7189 - protein, 365 aa, Rhizobium meliloti
MTGSGEQTFLFEQNPTRVANSERDALLANPGFGRVFTDHMATIRYSEGRGWHDAKIGPRKAFDLDPSTLVLHYAQEIFEGMKAYRLPDGGATLFRPDANARRFRNSALRLAMAPLPEELFVQSVRELVRIDRDWIPAGEGAALYLRPFMIATEVLLGVKPSAEYLYCVIASSVGSYFKGGAPAITIWVSENYTRAAPGGTGEAKCGGNYAASLAAQAEAMQEGCEQVVFLDAVERRFVEELGGMNVFFGFRDGSLQTPPLTGTILPGITRDSLITLARDMGLTVREEPYAIDQWQADAESGRLTEAFACGTAAVVTPIGKVKGREHSFTIGDGGAGPVASRLKSALLDIQNGRAPDPHGWLDRLF

SEQ ID NO: 7190 - DNA, 870 bp, Brucella suis
  CDS (1)..(870)
atgaccatgattacgaattcgagctcggtacccaacggcgaatacgtcgccgcccgcgatgcccgcatctccattttcgaccgtggctttctcttcggcgacggcatttacgaagtaactgccgttctggaaggcaagcttgtcgatagcgaaccgcatatgcaacgcctgcgccgctcgaccggcgaaatcggcattgcgatgccgatgagcgaagacgagatcgtcaccatcgaacgcgagctgatccgccgcaacaagctgaccgaaggtctggtctatctacaggtgacacgcggcaatggaggcgaccgcgattttgtgccagccgcaaacatgaagccttcggtggttctcttcacgcaggaagccaacctgctcgacaagccagcactcaagaccggcgcgcatgtgctttcactggacgatctgcgctggaagcgccgtgacatcaagacagtctgcctgctgccgcaggcgctcaccaaggaaattgccaagaatgccggttgcgacgaggcatggatgatcgaagacggttatgtgaccgaaggcgcatcttccacggcctatatcgtaaccagggacgatgttatcgtcacccggcccaacagcaatttcaccctgcccggttgcacgcggctttcgcttttgcaactgattacagagaccggcatgaagctggaagaacgcctcttcaccatcgatgaggcctatgcggcaaaagaagcctttcttacaagtgcgggaactttcgtcacgccgatcaccgttattgatggaaaaaccatcggcgacggaaagcccggcccgattgcccggcgcctgcgcgaagtctatctcgaccacgcccgccgcacggcaatctga

SEQ ID NO: 7191 - protein, 289 aa, Brucella suis
MTMITNSSSVPNGEYVAARDARISIFDRGFLFGDGIYEVTAVLEGKLVDSEPHMQRLRRSTGEIGIAMPMSEDEIVTIERELIRRNKLTEGLVYLQVTRGNGGDRDFVPAANMKPSVVLFTQEANLLDKPALKTGAHVLSLDDLRWKRRDIKTVCLLPQALTKEIAKNAGCDEAWMIEDGYVTEGASSTAYIVTRDDVIVTRPNSNFTLPGCTRLSLLQLITETGMKLEERLFTIDEAYAAKEAFLTSAGTFVTPITVIDGKTIGDGKPGPIARRLREVYLDHARRTAI

SEQ ID NO: 7192 - DNA, 912 bp, Streptomyces avermitilis
  CDS (1)..(912)
atggacggactgtggcaggagcgggacctgccgttcgggagcaacagtgtccaacatggcacggccgtcttcgaaggcatccgcatgtacacgacgccggcaggcccggtgttgttccggctcgacgcgcatctggagcggctgctggactcggcggccctgctgggcatcccgcatgcctacgacctggccgccctgcgccggcacgtgcgggacgcggccgccggaagcggactggacaacgcctacgtgcggcccgtgctttacacccgagagccgcgcctcggcgtgaatctccgggacttccacttcactctcggcacggagatctgggcccttccccccgacgacaccccgtcccgacccgtacgggtcacggtgtcgccctggcgccgtccgtcacagctcacctttccggtgcgcgccaaggcgaccggcacgtatgtggtgtccgcgctggcccgcacacgcgccgccgcggacggattcgacgacgccatccagttggacccgaactccggcagggtcgcggagtccacgatcgccaacgtcttcctggttcgcgacggccgcctggtgacgccctggctcgaggacagcgtcctggcgggcatcacccgcgacaccgtcctgaccctcgccggagacctgggcatcgagaccgccgaggcacccgtgcagcccggtgaactgctcgccgccgacgaggtgttcctgaccgggacggcgagcggcctggtgtccgtggcgggtctcgacacccacacgtacgcggccggccgtcccgtgacggacgcgctgagccgcgcctatcgggaggccgtcctgggcgacggaccgcaccgtccctcctggctcacccccgtctctcgccccaccccatccacttcgcgcctccgaggagtatcgtga

SEQ ID NO: 7193 - protein, 303 aa, Streptomyces avermitilis
MDGLWQERDLPFGSNSVQHGTAVFEGIRMYTTPAGPVLFRLDAHLERLLDSAALLGIPHAYDLAALRRHVRDAAAGSGLDNAYVRPVLYTREPRLGVNLRDFHFTLGTEIWALPPDDTPSRPVRVTVSPWRRPSQLTFPVRAKATGTYVVSALARTRAAADGFDDAIQLDPNSGRVAESTIANVFLVRDGRLVTPWLEDSVLAGITRDTVLTLAGDLGIETAEAPVQPGELLAADEVFLTGTASGLVSVAGLDTHTYAAGRPVTDALSRAYREAVLGDGPHRPSWLTPVSRPTPSTSRLRGVS

SEQ ID NO: 7194 - DNA, 1398 bp, Capsicum annuum
  CDS (85)..(1242)
ttactcacaatttttctctttgcctctacctaatctgttgcttgcaaagatctaacactaaggtttatatttcttttggcaaagatgattcgaggggctgcatgttttcgaaagttgtttcaatcttctgctctatcatcaaagtttacaacaaggtactatacggctcaggcagcagtacagcctgctatttacagtagtgatgaggagtctggaagtattgactgggacaatcttggattcaagttaatgcaaactgattatatgtatgtgacaaaaacctctgatgatggaatttttagacaaggccaacttgatcgttatggcaatattcaattgagcccatctgctggtgtactgaactatggacaggggttattcgaaggtacaaaagcgtttagaagagaggatggacgactatttctatttcgccctgaacagaacgcgatcagaatgcaaattggtgcagagagaatgtgtatgccagctccttcgactgatcaatttgtcgacgcccttaaacaaacagccctttctaacaagcgctggattcctcctcctggaaaaggatcactttacattaggcctcttttaataggcactggccccattttgggtttggccccagcacctgagtacacattccttgtctatgcctgccctgtgggtaattatttcaaggaaggaacagcaccattgaacttgtacgttgaagaagacgttcatcgtgcctcacgtggtggagctggcggagtcaaaagcattactaactatgctccggttttaaaagcgatgaagaaagcaaaggcgaacggatattcagatgtactgtatgttgatgcagtaaataagaaatatattgaagaagtttcttcttgcaacattttcgttgtcaaaggaaatgtagtttcaactccaatagccaaaggaactattcttgaaggagtaacaagaaaaagcatcatggacattgcacttgatcttggatatacggttgaagaacgtttaattgaagctgatgaattaattagtgctgatgaagtattctgtacgggaactgcagttggtgttgctcctgttggaagtatcacttacaaaggccaaaggattgagtataaaataagctcagatctatcttgtaagaaattttattcaagattagtagggattcaaaaaggtgtgatcaaagatgaaaggaactggatcgtggagattgaatcatcttatttggttcaagattagtagagattcaaaaaggtgttatcaaggatgaaaggaactggatcatggagattgaatcgtcttaaagttattttacaaatctttttgccattatattaattcatgtgctagcaggctgtatattatatgataatatacaatatataatttttttta

SEQ ID NO: 7195 - protein, 385 aa, Capsicum annuum
MIRGAACFRKLFQSSALSSKFTTRYYTAQAAVQPAIYSSDEESGSIDWDNLGFKLMQTDYMYVTKTSDDGIFRQGQLDRYGNIQLSPSAGVLNYGQGLFEGTKAFRREDGRLFLFRPEQNAIRMQIGAERMCMPAPSTDQFVDALKQTALSNKRWIPPPGKGSLYIRPLLIGTGPILGLAPAPEYTFLVYACPVGNYFKEGTAPLNLYVEEDVHRASRGGAGGVKSITNYAPVLKAMKKAKANGYSDVLYVDAVNKKYIEEVSSCNIFVVKGNVVSTPIAKGTILEGVTRKSIMDIALDLGYTVEERLIEADELISADEVFCTGTAVGVAPVGSITYKGQRIEYKISSDLSCKKFYSRLVGIQKGVIKDERNWIVEIESSYLVQD

SEQ ID NO: 7196 - DNA, 1449 bp, Oryza sativa
  CDS (1)..(1146)
atggagtacggtgcagcaacgcgtggcgcgctcctcgcggccaccctgctcgccggcgcccggcgtagccggttgcccctctcaccgccgccgtcgccgccctctattcagattcagaatcgactttattcgatgtcgtcgcttccactaaaggctcgaggcgtgagaagatgcgaggcttctctagcaagtgactacacgaaggcatctgaggtagctgattttgattgggagaaccttggttttggaatcgtgcagaccgactacatgtatatcacaaaatgcggacaggacgggaatttttctgagggtgaaatgattccatttggacctatagcgctgaacccatcttctggagaaaatgcactgagaatgagaacaggtgcagaaagaatgtgcatgcctgcgcctagtgttgagcagtttgtggatgcagtaaagcagactgttttagcaaacaagagatgggtgcctcctaccggtaaaggttctttatatattagaccgctacttatgggtagtggtgctgttcttggtcttgcacctgctcctgagtatacgttcattatatttgtctcccctgtggggaactactttaaggaaggtttagctccaataaatttgatagttgaagataagtttcatcgtgcaacccctggtggaactggaagtgtgaagaccataggaaattatgcctcggtcttgatggcacaaaagattgcaaaagaaaagggctattctgatgttctctacttggatgctgttcacaaaaagtatcttgaagaagtttcttcatgtaatatttttgttgtcaagggcaatgtcatttcaactccagcagtaaaaggaacaatattgccaggcatcacaaggaaaagtatcattgatgttgctctgagcaagggtttccaggtcgaggagcgacttgtgtcagtagacgagctgcttgaagctgatgaggttttctgcacaggaactgctgtcgtagtgtctcctgtgggtagtattacctatcaagggaaaagggtcgaatatgctggcaacaaaggagttggtgtcgtgtctcagcagctatatacttcattgacaagcctgcagatgggccaggcagaagattggctaggctggactgtgcaactgagttaggaagtaataaaatgttcatcaacatcaaaactcaaaagatggacatgattatgatcatgtgtacccttcagttttgtagtttttgttggtgtgacatcctgctgtatatgtatagacggcagtgcattatagcgcgaagcagttttgctaaggaacgacaccatgcatccagctttatgccttttgcatgagaaatcaaacgtggaaggctctcctgactgaaatatcgacaactataaaactattttgctatgttgattacaatatcctagataatctaaattaacttcttttttgggctcc

SEQ ID NO: 7197 - protein, 381 aa, Oryza sativa
MEYGAATRGALLAATLLAGARRSRLPLSPPPSPPSIQIQNRLYSMSSLPLKARGVRRCEASLASDYTKASEVADFDWENLGFGIVQTDYMYITKCGQDGNFSEGEMIPFGPIALNPSSGENALRMRTGAERMCMPAPSVEQFVDAVKQTVLANKRWVPPTGKGSLYIRPLLMGSGAVLGLAPAPEYTFIIFVSPVGNYFKEGLAPINLIVEDKFHRATPGGTGSVKTIGNYASVLMAQKIAKEKGYSDVLYLDAVHKKYLEEVSSCNIFVVKGNVISTPAVKGTILPGITRKSIIDVALSKGFQVEERLVSVDELLEADEVFCTGTAVVVSPVGSITYQGKRVEYAGNKGVGVVSQQLYTSLTSLQMGQAEDWLGWTVQLS

SEQ ID NO: 7198 - DNA, 876 bp, Rhizobium loti
  CDS (1)..(876)
atggcgttcatggatggtcagtacctgccgatgtccgaagccaaggtgtcggttctggactggggctttctgcattccgatgccacctacgataccgttcatgtgtgggacgggaggttctttaggctgaatctgcacgtggaccggttcttccgcgggatggaaaagctccgcatgaagcttccctacaaccgcagtgagatcgaaaagatcctgtcgacctgtgtagcgctctccggacacaagtcggcctatgtcgaaatgatctgtacgcgaggtggctcgcccacctttagccgggacccgcgccagtcggagaaccggttcatcgcattcgcggtgcctttcgggtcggttgccaacaaggagcagctcgagcgcggcctgcatgtcgccatcagcaacactgtccggatcccgcccaagtcgatcgatccgaccatcaagaactatcactggctcgatctggtgaagggcctgttcgatgcgtacgactatggtgccgaaactgcattgatcgtcgacatcaacgacaacattgccgaagggcctggctttaacgttttcaccgtcaaagacggccgcttgaagacgccggcttatggtgtccttgccggcattaccaggcagaccgtatttgatctgtgcgacgaactgggcctatccgtcagcgccggcgacattgatcgcaacgaactgaagggcgccgatgaggttttcatcacgtctacagcaggcgggatcatgccggtgtccaagattgacgaaaccgttgtaggcgacggcaaggttggcgctctaacacgccagctggcagacctgtattgggagaagcatgctgatcccgcatggtcgacagcggtaaattacgcatag

SEQ ID NO: 7199 - protein, 291 aa, Rhizobium loti
MAFMDGQYLPMSEAKVSVLDWGFLHSDATYDTVHVWDGRFFRLNLHVDRFFRGMEKLRMKLPYNRSEIEKILSTCVALSGHKSAYVEMICTRGGSPTFSRDPRQSENRFIAFAVPFGSVANKEQLERGLHVAISNTVRIPPKSIDPTIKNYHWLDLVKGLFDAYDYGAETALIVDINDNIAEGPGFNVFTVKDGRLKTPAYGVLAGITRQTVFDLCDELGLSVSAGDIDRNELKGADEVFITSTAGGIMPVSKIDETVVGDGKVGALTRQLADLYWEKHADPAWSTAVNYA

SEQ ID NO: 7200 - DNA, 879 bp, Rhizobium loti
  CDS (1)..(879)
atgacactggcggcagcggcgcaatccgcgacttggactttcgtcgatggcgactggtacgaaggcaatgtcgccattctgggtccgcgcagccatgccatgtggctcggtaccagcgtgttcgacggggcgcgctggttcgagggcgtggcgcccgacctcgacctgcatgccaggcgtgtgaacgcctcggcgatcgcgctcggcctcaagccgaacatgtctcccgaacagatcgtcgggctgacctgggacggattgaagaaatttgacggcaagacggcggtctatatcaggccgatgtactgggccgagcatggtggctacatgggcgtgcccgccgatcccgcttcgacccgtttttgcctttgcctctatgaatcgccgatgatctcgccgaccgggttttcggtgacgatgtcgccgttccggcgcccgacgatcgagaccatgccgaccaacgccaaggctgggtgcctctatcccaacaatggccgcgccatcctcgaagccaagatgcgcggcttcgacaatgctttggttttggacatgctgggtaatgtcgccgagaccggaagctccaacatcttcctggtcaaggatggccacgtgctgaccccggcgccgaacggcaccttcctgtccgggatcacacgctcgcgcacgatgacgttgctgggcgagtacggattcaagacgacggaaaagacgctgtcggtgcgcgatttcctcgaagcggacgaaatattctcgaccggcaaccattccaaggtggtgccgatcacccgcatcgaggatcgcaatctgcaacccggcccggtggccaaaaaggcgcgcgagctttattgggattgggcgcattcggcgtcggccggctga

SEQ ID NO: 7201 - protein, 292 aa, Rhizobium loti
MTLAAAAQSATWTFVDGDWYEGNVAILGPRSHAMWLGTSVFDGARWFEGVAPDLDLHARRVNASAIALGLKPNMSPEQIVGLTWDGLKKFDGKTAVYIRPMYWAEHGGYMGVPADPASTRFCLCLYESPMISPTGFSVTMSPFRRPTIETMPTNAKAGCLYPNNGRAILEAKMRGFDNALVLDMLGNVAETGSSNIFLVKDGHVLTPAPNGTFLSGITRSRTMTLLGEYGFKTTEKTLSVRDFLEADEIFSTGNHSKVVPITRIEDRNLQPGPVAKKARELYWDWAHSASAG

SEQ ID NO: 7202 - DNA, 894 bp, Rhizobium loti
  CDS (1)..(894)
atggcatccgttcccttcgatcaactggacggcttcatctggatgaatggcgaattcgttgcgtggggcgacgccaagatccatgttctgacgcacggtctgcactacgccagcgcggtcttcgagggcgagcgcgcctatggcggcgagatcttcaagctcaacgagcataccgagcgcctgcatgaatcggcgcgcctgctcggcttcaagattccctattcggttgccgagctcaacgacgcctcgaccacgctgttgaagaagcaagggttccaggacgcctatgtcaggccgatcgcctggcgcggcagcgagcagatgggcgtttcggcgcagaacaaccgtatcaacgtcgccatcgccatctggcagtggccgagctatttcgatccggcgcagaagctgaagggcatccgcctcgatgtcgcggaatggcgccggcccgacccgcgcacggcgccgtcgaaatcgaaggccgccggcctctacatgatctgcaccatgtcaaagcacgccgccgaagcaaaaggctacgccgacgccatgatgctcgactggcgcggccaggtcgccgaagcaaccggcgccaacatcttcttcgtcaaggacggcaagatccatacgcccaagcccgattgcttcctcgacggcatcacccgccgcacggtcatcgggctcgccagggatcgtggcctggaagtgatcgaacgcgccatcctgccggaagaactcgaaggcttcgaacaatgcttcctgaccggaaccgcggcggaagtaacgccggtttcggagatcggcccctaccgattcgaggttggcgaaatcgccaagaaccttatgaatgactattctgcggcggttcagccgaagcacgcgatcgccgcagaataa

SEQ ID NO: 7203 - protein, 297 aa, Rhizobium loti
MASVPFDQLDGFIWMNGEFVAWGDAKIHVLTHGLHYASAVFEGERAYGGEIFKLNEHTERLHESARLLGFKIPYSVAELNDASTTLLKKQGFQDAYVRPIAWRGSEQMGVSAQNNRINVAIAIWQWPSYFDPAQKLKGIRLDVAEWRRPDPRTAPSKSKAAGLYMICTMSKHAAEAKGYADAMMLDWRGQVAEATGANIFFVKDGKIHTPKPDCFLDGITRRTVIGLARDRGLEVIERAILPEELEGFEQCFLTGTAAEVTPVSEIGPYRFEVGEIAKNLMNDYSAAVQPKHAIAAE

SEQ ID NO: 7204 - DNA, 963 bp, Rhizobium loti
  CDS (1)..(963)
atggaccagacgacggcaacacaggcttcaaagccgctgcccacagtcggcgaccgccacgtcgacccgcattcctaccccgacggcatcgccttcctcgacggccagtatctgccgatgtcgcaagccaaggtgtcggtgctggactggggcttcctgcattccgacgccacctacgacacggtgcatgtctggaacggccgcttcttccgcctcgacctgcatctcgaccgcttcttcggcggactggaaaagctgcgcatgaccatccccttcgacagggatggcgtggccgagatcctgcacaattgtgtcgccctttcgggccatcgcgccgcctatgtcgaaatgctgtgcacgcgcggcgcatcgccgaccttcagccgcgatccgcgccaggcgatcaaccgcttcatggccttcgccgtacccttcggctcggtcgccaatgccgagcagttgcagcgcggcctgcgcgtcgccatcagcgacaaggtgcgcatcccgccggcttcggtcgatccgtcgatcaagaactaccattggctcgatctggtgcgcggcctctacgacgcctatgacagcggtgcggagaccgcgctcattctcgacttcaacggcaatgtcgccgagggcccgggcttcaacgtcttctgcgtcaaggacggcaaactgtcgacgccggccatcggcgtgctgcccggcatcacgcgccgcacagtcttcgatctctgcgccgaagaaggtcttgccgccgccgccgccgatgtcagcgtcgccgcgctcaaggcggccgacgaggtcttcatcacctcgaccgccggcggcatcatgccggtgaccgagatcgacggcgcggcgatcgccgacggcaaggtcgggccggttaccagccggctaatggcgctctactggcaaaagcacgacgatccggcctggtcgtctcaggtgaagtatccctga

SEQ ID NO: 7205 - protein, 320 aa, Rhizobium loti
MDQTTATQASKPLPTVGDRHVDPHSYPDGIAFLDGQYLPMSQAKVSVLDWGFLHSDATYDTVHVWNGRFFRLDLHLDRFFGGLEKLRMTIPFDRDGVAEILHNCVALSGHRAAYVEMLCTRGASPTFSRDPRQAINRFMAFAVPFGSVANAEQLQRGLRVAISDKVRIPPASVDPSIKNYHWLDLVRGLYDAYDSGAETALILDFNGNVAEGPGFNVFCVKDGKLSTPAIGVLPGITRRTVFDLCAEEGLAAAAADVSVAALKAADEVFITSTAGGIMPVTEIDGAAIADGKVGPVTSRLMALYWQKHDDPAWSSQVKYP

SEQ ID NO: 7206 - DNA, 864 bp, Rhizobium loti
  CDS (1)..(864)
atgccgcgcattgcctatgtcaacgggcgctacgtcgctcacgcggacgcttccgtgcatatcgaggatcgcggctatcagttcgccgatggcgtctacgaggtctgcgaggtggcgcgcggcttcatcgtcgacatgccgcgccatcttgcccggctcaaccgctcgctgaccgaactgtcgatcgcctggccggtcgcgcgcaacgtgctgccgctgatcctgcgcgaggtggtcaatcgcaaccacgtcgtcaacggccttgtctatgtgcaggtgacgcgtggtgtcgccagccgcgagtttgttttcccgtcggcggacaccaagccgtcattggtggtcacagccagaaaggccgatccggcggctggagcaaagcgagccgaaaccgggatcgcggtcatcaccgtgccagagaatcgctgggaccgggtcgatatcaagaccgtcggactgctgcccaatgtattggccaagcaaaaagccaaggaagccggtgcgcaggaagcatggttcgtcgacaccgacggcaacgtcaaggaaggcggctcgtcgaacgcctggatcgtcacccgggatggcgtcctggtcaccaggccggccgatcacggcatcctgcgcggcatcacccgcacgacgatgttcgaagtcgcggccaagctcggcctgaagatcgaggagcgcggtttttccgtcgccgaggccaaggcggcgcgcgaggcgttcatcagttccgccacgacgattgccatgccggtcgtggccattgacggcgatccggtggccaacgggcaccccggctcagtgacactttcgttacggcaagccttttttgacattgcggaaaaaagtccagcctga

SEQ ID NO: 7207 - protein, 287 aa, Rhizobium loti
MPRIAYVNGRYVAHADASVHIEDRGYQFADGVYEVCEVARGFIVDMPRHLARLNRSLTELSIAWPVARNVLPLILREVVNRNHVVNGLVYVQVTRGVASREFVFPSADTKPSLVVTARKADPAAGAKRAETGIAVITVPENRWDRVDIKTVGLLPNVLAKQKAKEAGAQEAWFVDTDGNVKEGGSSNAWIVTRDGVLVTRPADHGILRGITRTTMFEVAAKLGLKIEERGFSVAEAKAAREAFISSATTIAMPVVAIDGDPVANGHPGSVTLSLRQAFFDIAEKSPA

SEQ ID NO: 7208 - DNA, 1200 bp, Rattus norvegicus
  CDS (1)..(1200)
atgaaggactgcagtaatggatgttcggcatcgtatgctgaagaagaagaattagaagcttcgaccgagtcgtatgatgaagaaggaggatcagaagcttcgacccagacgtttagggccaaagatctcattatcacaaaagccgatgtcttaaaaaagaagcccgaccccagctcgctggtctttggagcttcgttcactgaccacatgctgatggtggagtggacctccaagtatggatgggataagcctcacatcaagccttttgaaaacttgtccatacatcccgctgcctctgttttgcactatgctgtggaattgtttgaaggcttgaaggcttttcggggagttgataacaagatccgattgttccggccggacctcaacatgaaaagaatgtgccgatctgccgtgaggaccactctgccggagtttgacaaggaggagcttctgcaatgcgttcttcagctcatacagctcgaccgagagtgggtcccctactcaacctctgccagtctgtacatccgccccacattcatcgggattgagccatcgcttggagtcaagaagccttctaaagctctgctctttgtgattttgagccccgtgggatcttatttttctaatgggaccttttctccggtgtccctgtgggccaacccaaagttcgtcagatcctggaaaggtgggactggagacttcaagatgggctgcaactatggatcttcccttctggcgcagtgtgaggcggcagagaacggctgtcaccaggtcctgtggctgtacggcaaggaaaaccggataactgaagtgggcacgatgaatctcttcctctactggataaacaaagatggagaagaagaactggcgacgcctccgctagatggcgtcattctcccaggagtcactcggcagagcatcctggagctgggagaagagtggggcgagtttaaggtgtgcgagagacacatcaccatggatgacctgtccaccgccctggaggagaacagagtgaaggagatgttcggctcggggacagcctgcgttgtctgcccagttgccagtattctgtacaagggccagatgctgcacattccaaccatggagaatggccacaagctttcaagtcgcatcatggcaaagttgactgatatccagtatggacggatcaagagcgaatggacactggagttgccctaa

SEQ ID NO: 7209 - protein, 399 aa, Rattus norvegicus
MKDCSNGCSASYAEEEELEASTESYDEEGGSEASTQTFRAKDLIITKADVLKKKPDPSSLVFGASFTDHMLMVEWTSKYGWDKPHIKPFENLSIHPAASVLHYAVELFEGLKAFRGVDNKIRLFRPDLNMKRMCRSAVRTTLPEFDKEELLQCVLQLIQLDREWVPYSTSASLYIRPTFIGIEPSLGVKKPSKALLFVILSPVGSYFSNGTFSPVSLWANPKFVRSWKGGTGDFKMGCNYGSSLLAQCEAAENGCHQVLWLYGKENRITEVGTMNLFLYWINKDGEEELATPPLDGVILPGVTRQSILELGEEWGEFKVCERHITMDDLSTALEENRVKEMFGSGTACVVCPVASILYKGQMLHIPTMENGHKLSSRIMAKLTDIQYGRIKSEWTLELP

SEQ ID NO: 7210 - DNA, 873 bp, Rickettsia montana
  CDS (1)..(873)
atgacaatgataaaactagagcaaattttttggcatgtttggattaacggtgatttagttccttatcaatttgcaaggattcatgttttgactcatagcctgcattattcaggatcggtatttgagggtgagagagcttataacggcaaagtttttaaactaaaagaacatacggcaagattaataaaatcagcagaagcattaggtttgaaagtaccttataatgtagacgagataataaaagctcatgaacttgtaataaaacaaaataatattaaggatgcatatataagaccgcttatttggtgcggagacgagtcgctaaatatcactaatcagtatttatctactaatcttttgattgccggtattccatctatgccgaggtcttttgagaaaggtataaatttgcatgtaagccgctggcgtaaagcaatgcctgatagcaccccggtacaatctaaatccgccgctcaatataatatggcaataacgagtaaaaaagaagctaaggcttttggctatgatgatgcattattacttgattatgaagggtatattgctgaatgcactacaacaaatattttctttgttaaagataaaatattatatactccaattgccgataggtttttaaacggtataacaagacagactattattgaaattgcaaaagatttaggtctagaaataaaagaagagcgtttaaaattagagcaaatagaggattttaccggatgttttgttacaggcacggcaattgaggtacaaaatattggttctatagatcttggcaataaaaagattatttttgatgatcataaaattgcagatcgtttgaaagaagagtatggacgtgttgttagggagtag

SEQ ID NO: 7211 - protein, 290 aa, Rickettsia montana
MTMIKLEQIFWHVWINGDLVPYQFARIHVLTHSLHYSGSVFEGERAYNGKVFKLKEHTARLIKSAEALGLKVPYNVDEIIKAHELVIKQNNIKDAYIRPLIWCGDESLNITNQYLSTNLLIAGIPSMPRSFEKGINLHVSRWRKAMPDSTPVQSKSAAQYNMAITSKKEAKAFGYDDALLLDYEGYIAECTTTNIFFVKDKILYTPIADRFLNGITRQTIIEIAKDLGLEIKEERLKLEQIEDFTGCFVTGTAIEVQNIGSIDLGNKKIIFDDHKIADRLKEEYGRVVRE

SEQ ID NO: 7212 - DNA, 1023 bp, Pasteurella multocida
  CDS (1)..(1023)
atgataaaagatcttgattggaaaaatttaggctttggctatattaaaacagattatcgctatatcgcttattggaaagacggaaagtggtcaaaaggcgagctgacacaagataatgtactgcatattagtgaaggttcaactgcacttcattatgggcaacaatgctttgaaggactcaaagcttatcgctgtaaagacggttcgattaacttgttccgccctgatcaaaatgcagaacgtatgcaacgcagttgtcgccgtttattgatgcctgaagtgccaacagacatgtttattgatgcctgtaaacaagtggtcaaagcaaatcaagcatggttagcgccttatggcactggtgccaccctctatttacgccctttcttgattggtgtaggtgacaatgtcggcgtcaatcctgcgccagaatatattttctcgattttctgctgccctgttggcgcttattttaaaggtggcttaaaaccgaccaatttcttagtttcaaattatgatcgcgccgcaccgcaaggaaccggggcagcaaaagtgggtggaaattacgcagcaagtctttatcctggtaaagaagccaaacaaaacggctttggtgactgtatttatttagacccgaccacacacaccaaaattgaagaagtggggtcagcgaatttcttcggtatcacaaaagataacaaatttattactccgctttcgccgtcaattctgccaagtatcacgaaatactcgttactctatctcgctaaagcgcggttagggttagaaacagaagaaggggatgtgtatatcgatcaattagatcaatttaaagaagcgggcgcttgtggtactgctgccgtcatcacaccgattggtggtattcaatatggtgataacttccatgtgttctactctgaaacggaagtcggtgaaatcaccaccaaactctacaatgaattagtgggtatccaatttggtgatgttgaagcccctgaaggttggattgttaaagtagataactaa

SEQ ID NO: 7213 - protein, 340 aa, Pasteurella multocida
MIKDLDWKNLGFGYIKTDYRYIAYWKDGKWSKGELTQDNVLHISEGSTALHYGQQCFEGLKAYRCKDGSINLFRPDQNAERMQRSCRRLLMPEVPTDMFIDACKQVVKANQAWLAPYGTGATLYLRPFLIGVGDNVGVNPAPEYIFSIFCCPVGAYFKGGLKPTNFLVSNYDRAAPQGTGAAKVGGNYAASLYPGKEAKQNGFGDCIYLDPTTHTKIEEVGSANFFGITKDNKFITPLSPSILPSITKYSLLYLAKARLGLETEEGDVYIDQLDQFKEAGACGTAAVITPIGGIQYGDNFHVFYSETEVGEITTKLYNELVGIQFGDVEAPEGWIVKVDN

SEQ ID NO: 7214 - DNA, 1080 bp, Staphylococcus carnosus
  CDS (1)..(1080)
atgtcagaaaaagtaaaatttgaaaaacgtgaagacttaaaacaaaaaccagatccaaaaaatttagggtttggtcaatacttcacagattacatgttaagttatgactacgatagcgaaaaaggcggttggcatgatttgaagattacaccttatgcaccgatcgaactagatccagctgcacaaggacttcattatggtcaacttgtattcgaaggattaaaagcttataaacataacggtgaagtggttttattcagaccagaccaaaacttcgcacgtatcaatcaatcacttgatcgtttggaaatgcctcagattgatgaagaagagctattagaaggcttgaaacaattagtagatgtagaacgtgattgggtgcctgaaggcgaaggacaatctttatatattcgtccatttgtatttgcaacagaagcaggattaggtgttcaccctgcacataactataaattattaattatcttatctccttctgggtcttactatggtggagattcattgaaaccaacacgtatttatgttgaagacgaatacgttcgtgctgtacgcggtggtgtaggttttgcaaaagttgcaggtaactatgcagctagtttactatcacaatctaatgctaatgaacaaggctatgaccaagtattatggttagatggtgtagaacgcaaatatattgaagaagtgggcagtatgaatatcttcttcgtagaaaatggtaaacttgtaacacctaaattaaacggtagtatcttaccaggtattacacgtaagactgttatcgctttagcaaaagaattaggatatgaagtagaagaacgtcatatctctatcgatgaattactagagtcttatgataaaggcgaattagaagaagtatttggaacaggtactgctgcggttatttcaccagtaggcactttaaaatatgaagatcgtgaaatcacaatcaacaataatgaaactggtccaattacacaacgcttatatgatgaatatacaggtattcaaagcggtaaattagacgatccacaaggttggagagtcgtagtaccagaatattaa

SEQ ID NO: 7215 - protein, 359 aa, Staphylococcus carnosus
MSEKVKFEKREDLKQKPDPKNLGFGQYFTDYMLSYDYDSEKGGWHDLKITPYAPIELDPAAQGLHYGQLVFEGLKAYKHNGEVVLFRPDQNFARINQSLDRLEMPQIDEEELLEGLKQLVDVERDWVPEGEGQSLYIRPFVFATEAGLGVHPAHNYKLLIILSPSGSYYGGDSLKPTRIYVEDEYVRAVRGGVGFAKVAGNYAASLLSQSNANEQGYDQVLWLDGVERKYIEEVGSMNIFFVENGKLVTPKLNGSILPGITRKTVIALAKELGYEVEERHISIDELLESYDKGELEEVFGTGTAAVISPVGTLKYEDREITINNNETGPITQRLYDEYTGIQSGKLDDPQGWRVVVPEY

SEQ ID NO: 7216 - DNA, 822 bp, Streptomyces coelicolor
  CDS (1)..(822)
atgaagatctggctcgacggcgggttgcaggacatcggttccgcccgcgtctccgtcctcgatcacggactgaccgtgggcgacggcatcttcgagaccgtgaaggcggtggacggccggccgttcgcgttgacccggcacctggaccggctgacccgctcggcccgcggcctcggcctgcccgcccccgaccacgacgaggtccgccgcgcctgtgccgccgtgctggaggccaacccgatgccgctgggccggctgcgcgtcacctacaccggcggccacggcccgctcggctccgaccgcggcgagcacggcccgaccctcgtcgtcgccctcggcgagaccggccgccgccccgactccaccgccgtgatcacggtgccctggacccgcaacgaacgcggcgcgctcaccggcctgaagaccacctcctacgccgagaacgtcgtcgccctggcccgggcccgcgaacggggcgccaccgaggcgctgttcggcaacacggtgggccggctctgcgagggcaccgggtcgaacgtcttcgtcgtcctcgacggcgagatccacaccccgccggtcgcctccggctgcctcgccgggatcacccgcgccctggccgccgagtggaccggtgcccgcgagaccgacctcccgctggacgtcctggggcgcgccgacgaggtcttcctgacctcgacgctgcgggacgtacaggccgtgcaccggatcgacgaccgcgaactgccgggcgccccgggaccggtgacggccaaggccatgcggatcttccaggagcggtccggggacgacctggatccgtga

SEQ ID NO: 7217 - protein, 273 aa, Streptomyces coelicolor
MKIWLDGGLQDIGSARVSVLDHGLTVGDGIFETVKAVDGRPFALTRHLDRLTRSARGLGLPAPDHDEVRRACAAVLEANPMPLGRLRVTYTGGHGPLGSDRGEHGPTLVVALGETGRRPDSTAVITVPWTRNERGALTGLKTTSYAENVVALARARERGATEALFGNTVGRLCEGTGSNVFVVLDGEIHTPPVASGCLAGITRALAAEWTGARETDLPLDVLGRADEVFLTSTLRDVQAVHRIDDRELPGAPGPVTAKAMRIFQERSGDDLDP

SEQ ID NO: 7218 - DNA, 1700 bp, Solanum tuberosum
  CDS (340)..(1473)
gggggggggggaatttgtaacgccggagctgagcagagagataacataaaagataaatggagagcgccgccgtattgcggggcttcaccctactcctggtcaccataaccaccttctgggtccatcacgaactgctattaagcttcttcctccttccattgataaaatcattttttctcctttgcccatcaaggttttttcttccttaagccattcatatttcagtttctccattgaaactgatgctgttttatgattactgtgtgtatgatgttagcttcatgcgtgtagttttgtgtagagttgactaattcgtgtagatttcattgactttgtgtgatggaatttgtattgcagcttcagaagcagtcgcatttcacttcttatattgataatagtgccataaacagtggaaattcctttcgtgtggcctctcctgcaagcgacgttgcatctgaattagccgacatcgattgggacaaccttggctttggctttatgcctactgattatatgtatagcatgaaatgctctcaaggtgaaaacttttctaagggtgaattacagcgtttcggtaatattgagttgagtccgtctgctggaatattaaattatggtcagggattgtttgaaggtttaaaagcatatcgaaaacatgacggcaatatattgttgtttcgacccgaggaaaatgcaacgcgtttgaagatgggtgctgaacgtatgtgtatgccttcaccgtctgttgaacagtttgtggaagcagtgaaagccactgttttagctaatgaaagatggattcctcctcccggtaaaggctcattatacataagacctctgcttatggggagtggagctgtccttggtcttgctcctgctcctgagtacacattcctgatttatgtgtcacctgttggaaattattttaaggaaggtttggcaccaattaatttggtaattgagactgaaatgcaccgtgcaacacctggtggcactggaggcgtcaagactattggaaattatgctgcagttctgaaggcacagagtgctgctaaagcaaaaggctattccgatgttctgtaccttgattgtgttcagaaaaaatatctcgaagaggtttcctcttgcaatgtctttattgtgaagggtaatctgatagtaactcctgcaattaaaggaaccattcttcctggaattacgcgaaagagcataatcgatgtagcaattagtcaaggattccaggttgaggaacgacaggtgtctgtggacgaattgcttgatgctgatgaagttttctgtacgggaactgcagtggttgtatctcctgttggtagcattactcatcaagggagaagggtaacatatggaaatgatggtgttggccttgtgtcgcagcagttatactctgcacttactagcctacaaatggggctctcagaggataagatgggttggattgttgagctcaaatgagctctccaaccaaagggttgtactttccattgatgaaaaaatgttgacttggaagttctcagacacttgtgatccagagtttatccttgatcatacatccatgatgcgtgtcaagtatatctgtgtgtttgatatgtatccttcagctatgaaatagtcgtcgttttcaccccaaatttggtgatttaatctagtaaagtcttgtgttcaaaaaaaaaaaaaaaaaa

SEQ ID NO: 7219 - protein, 377 aa, Solanum tuberosum
MEFVLQLQKQSHFTSYIDNSAINSGNSFRVASPASDVASELADIDWDNLGFGFMPTDYMYSMKCSQGENFSKGELQRFGNIELSPSAGILNYGQGLFEGLKAYRKHDGNILLFRPEENATRLKMGAERMCMPSPSVEQFVEAVKATVLANERWIPPPGKGSLYIRPLLMGSGAVLGLAPAPEYTFLIYVSPVGNYFKEGLAPINLVIETEMHRATPGGTGGVKTIGNYAAVLKAQSAAKAKGYSDVLYLDCVQKKYLEEVSSCNVFIVKGNLIVTPAIKGTILPGITRKSIIDVAISQGFQVEERQVSVDELLDADEVFCTGTAVVVSPVGSITHQGRRVTYGNDGVGLVSQQLYSALTSLQMGLSEDKMGWIVELK

SEQ ID NO: 7220 - DNA, 1683 bp, Solanum tuberosum
  CDS (116)..(1372)
ttcggcacgaggtacgtcgttgttgtcaaaacaaaagaattagaaaaattaagacaacattgaaagtgagtgacaaacgaaacggctcaagtcgtagaagaagaagaacaaatcaatggagagcggcggcgcattagcagggcttcaccggaatcccactttccaccaccttctccggccaccacgaaccgccgttaataatcttctctcttcttcttcctccacctataagcgccatttttctcctcttcctctcaagtttcagaagcagtcacattttgcttcttatagttataattgctccataaacgatgggagtacttttcaggtggcttattctgctagtgcaacacactcattagccaacatcgattgggacaacttggcctttggggttatgcctactgattatatgtatagcatgaaatgttctcaagatgggaacttttctaagggcgagctacaacgttttgggaatattgagttgagcccagcttctgggatattaaattatggacagggattgtttgaaggtttaaaagcctataaaagacatgatggtaatatattgctgtttcgacccgaagaaaatgctctgcgtatgaagatgggagcagaacgtatatgcatgccttcaccatctgttgaacagtttgtggaagcagtaaaagccactgttttagcaaatgaaagatggattcctccaccaggtaaaggttcattatacataagaccactgcttatggggagtggagctattcttggtgttgctccagctcctgagtacacattcctgatttatgtatcacctgtgggaaattattttaaggaaggtatggcaccaataaatttggtaattgagacagaaatgcatcgcgcaactcctggtggtactggaggtgtcaagactatcggaaattatgctgcagttctgaaggcacagagtgctgctaaagcaaaaggctactctgatgttctgtaccttgattctgttaacaaaagatacctagaggaggttccctcttgtaatggcttcatcgtaaagggtaatctgatagcaactcctgcaattaaaggaaccattcttcctggtatcacacgaaagagcataattgacgtagctttaagccaagggttccaggttgaagaacggcaagtgtctgtggacgaattgcttgatgctgatgaagtgttctgcacaggaactgcagtggttgtatctcctgttggcagcattactcatcttgggaaaagggtatcatatggaagtgatggggttggtcgtgtatcaaagcaattatattctacacttacaagcctacaaatgggactagcaacggataacatgaattggactgttgcgctaaaatgaactttgctatctttggattaaagttatattcactgatagtgaatattcatgacgctatcagtgcaattttactgctcacagcaggttattactttattttcaaggtttattaggcctcttatggagagctacctattgttgtatgtcaaatttagttcatgctgtatattttttttacaatgtcgatgcacataacttaaacactctcttctagcttaagtttgtctgaagttctcgccttgtcatatagacttttatatgtctgttaacgatctcagttgatatcatttgtaaaaaaaaaaaaaaaaaaa

SEQ ID NO: 7221 - protein, 418 aa, Solanum tuberosum
MESGGALAGLHRNPTFHHLLRPPRTAVNNLLSSSSSTYKRHFSPLPLKFQKQSHFASYSYNCSINDGSTFQVAYSASATHSLANIDWDNLAFGVMPTDYMYSMKCSQDGNFSKGELQRFGNIELSPASGILNYGQGLFEGLKAYKRHDGNILLFRPEENALRMKMGAERICMPSPSVEQFVEAVKATVLANERWIPPPGKGSLYIRPLLMGSGAILGVAPAPEYTFLIYVSPVGNYFKEGMAPINLVIETEMHRATPGGTGGVKTIGNYAAVLKAQSAAKAKGYSDVLYLDSVNKRYLEEVPSCNGFIVKGNLIATPAIKGTILPGITRKSIIDVALSQGFQVEERQVSVDELLDADEVFCTGTAVVVSPVGSITHLGKRVSYGSDGVGRVSKQLYSTLTSLQMGLATDNMNWTVALK

SEQ ID NO: 7222 - DNA, 1668 bp, Arabidopsis thaliana
  CDS (1)..(1668)
atggcagaaccggaggtgattcactcatggtctgcaccaagatctctcagcaccagcctcatgtactcctttgctcagagacttgacactgaagttgtcgacgagccgttgtatgcatcatttcttaaagctacaggttttgataggccatacagagacgaagttctctccaagatggagtgcaatggagagaaagttgtgaaagatgtcatatatggatcaggatctaagaagtaccggtattgtaagcatatctcgaagcagcggcttttcggtttgccaagtgaactgatgagtagaggaaagcatttcatattaatacgaaatcctcttaacatattgccttcctttgagaaggtacaccctccatcatttctcgaattaggcttgggggaattagtgtcgatatacagtgatctctgtcagatgggaacaccaccagcagtcatcgatgcggatgagcttcagcgagatcccgagactacacttcgcggtctttgtgatgatttggagattccatttcaagcctctatgcttaaatggaaggctggtcctataccagaagatggagtatgggcaccatggtggtacaagagtgttcacgaatcaacgggtttctcatctccaaagaagtatcctcggacattccctttgtcgcattacgatttgctggagcgaagtctaccgctttacaacattctcaggagccacgtgaagcacagttcctccctcttgagtagtcccttgcctcctcctagtctcccagttcctgaaaatgcaaaacttcttgcatgggtcggtgacgagattttgcctcgtgaaatggcaaaggtttctgtttttgactcggttgttcaaggcggtgactctgtatgggaaggacttcggatttacaagggaaagatattcaagcttgaggaacatctagatcggttgtttgattcagcaaaggctctggctttcgataatgttccagcgcgtgaagaggtaaaagaagcaatcttcagaactcttataaccaatggtatgtttgacaatacacatatcaggttgtctctaactcgaggcaaaaaggttacttctggaatgagccctgcatataatcgatatgggtgcactcttattgtgcttgccgaatggaagcctccggtatatgacaatgaaggtggaattgtgctggtgactgcaaccacacgccgcaattcgcctaataatttggattccaagattcatcacaacaaccttctcaataacatactagcaaagattgaaagtaacaacacgaatgctgctgacgccattatgcttgacaaagatggttatgtgtctgaaaccaatgcaaccaacattttcatggtgaagaaaggctgtgtacttactcctcacgcagattactgtctccctggcataaccagagcaactgtaatggaacttgtggtgaaagagaacttcatcttagaagaaagaagaatcagtctctccgaattccatacagctaatgaggtatggacaacaggaactatgggagaactaagcccggttgtgaaaatcgatgggcgtgtgattggtgacggcaaagttggaccggtaacgagaacactgcaaaacgcttacaagaaactgacagaggattcaggtgtgccgatacctacttatcaagaaccctga

SEQ ID NO: 7223 - protein, 555 aa, Arabidopsis thaliana
MAEPEVIHSWSAPRSLSTSLMYSFAQRLDTEVVDEPLYASFLKATGFDRPYRDEVLSKMECNGEKVVKDVIYGSGSKKYRYCKHISKQRLFGLPSELMSRGKHFILIRNPLNILPSFEKVHPPSFLELGLGELVSIYSDLCQMGTPPAVIDADELQRDPETTLRGLCDDLEIPFQASMLKWKAGPIPEDGVWAPWWYKSVHESTGFSSPKKYPRTFPLSHYDLLERSLPLYNILRSHVKHSSSLLSSPLPPPSLPVPENAKLLAWVGDEILPREMAKVSVFDSVVQGGDSVWEGLRIYKGKIFKLEEHLDRLFDSAKALAFDNVPAREEVKEAIFRTLITNGMFDNTHIRLSLTRGKKVTSGMSPAYNRYGCTLIVLAEWKPPVYDNEGGIVLVTATTRRNSPNNLDSKIHHNNLLNNILAKIESNNTNAADAIMLDKDGYVSETNATNIFMVKKGCVLTPHADYCLPGITRATVMELVVKENFILEERRISLSEFHTANEVWTTGTMGELSPVVKIDGRVIGDGKVGPVTRTLQNAYKKLTEDSGVPIPTYQEP

SEQ ID NO: 7224 - DNA, 1680 bp, Arabidopsis thaliana
  CDS (1)..(1680)
atggaggtgatacacgcatggtctgctccaagatcactcagcaccactctcatgtactcctttgcccagagagatgacattgaagtgcttgatgagccattatacgctgcgttcctcaagtctacgggtgttgataggccttacaaagatgagcttctctctaagatggagtgtgatggagaaaaggtggtgaaggatatcatttatggtccaggaaagaagaaatataggttttgtaagcatatatcgaaacagcgacttcttggtttgccaagtgaactaatgagtgaagggaagcactttatattgatacgcaatcccctcaacatattgccttcttttgagaagatacacccttcatcgtttcacgaattgggactgggagagttagtatcgatatacagtgatctctgtcagatgggaacaccaccagcaatcatcgatgcagatgagctccagcgagatcccgaggctacactacgcagtctttgtgatgacttagagatcccctttcaagcctctatgcttaaatgggaggctggtcctataccagaagatggactttgggctccatggtggtacgagactcttcataaatcaacagggttctcgtcgccccagaagtaccctcagactttccctttaatgcattacgatttgctggagcaatgtttaccgctgtacaacattctgaggtgccacatgaagcacaagtcatcgctcttgtccagcaccttacctcctcccagtctcccagttcctgaaaatgctaaacttcttgcttgggttggtgatgagattgtgccacgagagatggcgaaggtttctgtttttgactcggtcgtgcaaggcggtgactctgtatgggaaggtcttcgtatatacaaagggaaagtatttaagcttgaagaacatctagaccggttgtctgattccgcaaaggctctggctttcaacaatgtcccaacccgcgaggagataaaagaagccatcttcagaactctcataaccaatgggatgtttgacaatacacatataagattgtctctaactcgaggcaaaaaggtcacatctggaatgagccctgcatttaaccgttatggatgtactttgatcgtgcttgctgaatggaagcctccggtatatgacaatgatggcggaattgtgctggtgactgcaactacacgccggaattcacccaacaatttagattccaagattcatcacaacaacctcctcaataatatacttgcaaagattgaaagcaacaatgccaacgtcgatgatgcaatcatgcttgacaaggatgggtttgtgtctgaaaccaatgcaaccaacattttcatggtgaagaaagaccgagtactcactcctcacgcagattattgtctccccggcattactcgagctactgtgatggaactggtggtgaaagagaactttatcttagaagaacgtagaatcagcttgtcggaattccatacagctgatgaggtatggactacaggaactatgggagaactcagcccggttgtgaaaattgatgggcgtgtgatcggtgaaggaaaagtaggaccggtaacaagaagacttcaaaatgcttacaagaaactgacggatggttcaggtgtcccaatacctacttaccaagaagtcaagaaccttgaaccatgtgtttga

SEQ ID NO: 7225 - protein, 559 aa, Arabidopsis thaliana
MEVIHAWSAPRSLSTTLMYSFAQRDDIEVLDEPLYAAFLKSTGVDRPYKDELLSKMECDGEKVVKDIIYGPGKKKYRFCKHISKQRLLGLPSELMSEGKHFILIRNPLNILPSFEKIHPSSFHELGLGELVSIYSDLCQMGTPPAIIDADELQRDPEATLRSLCDDLEIPFQASMLKWEAGPIPEDGLWAPWWYETLHKSTGFSSPQKYPQTFPLMHYDLLEQCLPLYNILRCHMKHKSSLLSSTLPPPSLPVPENAKLLAWVGDEIVPREMAKVSVFDSVVQGGDSVWEGLRIYKGKVFKLEEHLDRLSDSAKALAFNNVPTREEIKEAIFRTLITNGMFDNTHIRLSLTRGKKVTSGMSPAFNRYGCTLIVLAEWKPPVYDNDGGIVLVTATTRRNSPNNLDSKIHHNNLLNNILAKIESNNANVDDAIMLDKDGFVSETNATNIFMVKKDRVLTPHADYCLPGITRATVMELVVKENFILEERRISLSEFHTADEVWTTGTMGELSPVVKIDGRVIGEGKVGPVTRRLQNAYKKLTDGSGVPIPTYQEVKNLEPCV

SEQ ID NO: 7226 - DNA, 1973 bp, Arabidopsis thaliana
  CDS (571)..(1818)
tagttaaggtagggtagggaaaaatcgttggcttctagtgtgttgcagtgtgtgtatttgagaatatatgatttgtgagactaaaaagccgaaatcattatcggggtttattgtttcttctacttgtaatgatgttgatgattgatgtcttttagctcatcggttagtaagtgtcaacagcaagagtgttcggctggactaccgtggcccattctgtagatttctttctagcccggcccacaacttccattgggctagatatgtttttctcacgtaaaagatatctgactgtcgatattgaagtaacttcttaaaacatttagatttaattgataatttaaatgtcacttttggttttttagatgacgattaaaatccttttcataacccaaaatattagttttgccgatattagaaatccgaagaaaatgacagaaaataggattaatcaatttagggtttaataaaaaatagtgagtgagagagaggctacagtgctccacattgacatcaacaaggttgaagaagaacaacatcattcaacatcagcatcacgaatattttcgagtcatggagagaagcgccgttgcctcaggttttcatagaaattacatcctctgtgcttcacgcgccgccacttccacgacgcgcctccactctttgtcctccctcagaaactttccctcttcctctctcaggattcgtcactgtccttctcccatctcttccaatttcatcgttagtgaagtttcccgaaaccgacgatgcgacgccgtttcttccagcaccaccgatgtgactgaattagccgaaattgattgggacaagattgattttgggcttaaaccaacggattacatgtacgccatgaaatgtagccgtgatggtgaattctctcaaggtcaattgcaaccttttggtaacattgacattaacccagcagctggtgttctcaactatggacaaggtttgtttgaaggtctaaaagcttacagaaaacaagatgggaatattctactcttccgtcctgaggagaatgcgatccgaatgagaaatggcgctgaaagaatgtgtatgccttctccaaccgttgaacagtttgttgaggctgtgaaaactactgtattagctaacaaacgctggattccacctccaggtaaaggatcattatacataaggccattgctaatgggaactggagctgttcttggtcttgctcctgctcctgaatacactttccttatctttgtttcacctgtcgggaactacttcaaggaaggtgttgcgccgatcaacttaattgttgaaactgaattccatcgtgcaactcccggcggtactggaggtgttaaaaccatcggtaattatgctgcagtcttgaaggctcagtcgattgcgaaagctaaagggtattctgatgttttataccttgattgccttcacaaaagatatcttgaggaggtttcatcgtgcaatattttcattgtgaaggataatgtgatatctactcctgaaattaaaggaaccatcttgcctggaattacccggaagagtatcatcgaagtagctcgtagccaaggtttcaaggtggaggaacgaaatgtgacagttgatgaattggtagaagcagacgaggttttctgcacaggaaccgccgttgttttatctccggttggaagcatcacttacaaaagccaaaggttttcttatggagaagatggctttggaacagtctcgaaacaactctacacttccttgacgagcctgcaaatgggtctgagcgaagataacatgaactggactgttcaattgagttaaaaccagtcacgaacatatcaatattatacatatggatgtgttagtagatacagaagatatattagaattccatgcttctgatgcttcaagattctgtacttgaaactataaacaataatctgtctttaaaataactaaaacggggaataaaaagc

SEQ ID NO: 7227 - protein, 415 aa, Arabidopsis thaliana
MERSAVASGFHRNYILCASRAATSTTRLHSLSSLRNFPSSSLRIRHCPSPISSNFIVSEVSRNRRCDAVSSSTTDVTELAEIDWDKIDFGLKPTDYMYAMKCSRDGEFSQGQLQPFGNIDINPAAGVLNYGQGLFEGLKAYRKQDGNILLFRPEENAIRMRNGAERMCMPSPTVEQFVEAVKTTVLANKRWIPPPGKGSLYIRPLLMGTGAVLGLAPAPEYTFLIFVSPVGNYFKEGVAPINLIVETEFHRATPGGTGGVKTIGNYAAVLKAQSIAKAKGYSDVLYLDCLHKRYLEEVSSCNIFIVKDNVISTPEIKGTILPGITRKSIIEVARSQGFKVEERNVTVDELVEADEVFCTGTAVVLSPVGSITYKSQRFSYGEDGFGTVSKQLYTSLTSLQMGLSEDNMNWTVQLS

SEQ ID NO: 7228 - DNA, 1541 bp, Homo sapiens
  CDS (1)..(1179)
atggccgcagccgctctggggcagatctgggcacgaaagcttctctctgtcccttggcttctgtgtggtcccagaagatatgcctcctccagtttcaaggctgcagacctgcagctggaaatgacacagaagcctcataagaagcctggccccggcgagcccctggtgtttgggaagacatttaccgaccacatgctgatggtggaatggaatgacaagggctggggccagccccgaatccagcccttccagaacctcacgctgcacccagcctcctccagcctccactactccctgcagctgtttgagggcatgaaggcgttcaaaggcaaagaccagcaggtgcgcctcttccgcccctggctcaacatggaccggatgctgcgctcagccatgcgcctgtgcctgccgagtttcgacaagctggagttgctggagtgcatccgccggctcatcgaagtggacaaggactgggtccccgatgccgccggcaccagcctctatgtgcggcctgtgctcattgggaacgagccctcgctgggtgtcagccagcccacgcgcgcgctcctgttcgtcattctctgcccagtgggtgcctacttccctggaggctccgtgaccccggtctccctcctggccgacccagccttcatccgggcctgggtgggcggggtcggcaactacaagttaggtgggaattatgggcccaccgtgttagtgcaacaggaggcactcaagcggggctgtgaacaggtcctctggctgtatgggcccgaccaccagctcaccgaggtgggaaccatgaacatctttgtctactggacccacgaagatggggtgctggagctggtgacgcccccgctgaatggtgttatcctgcctggagtggtcagacagagtctactggacatggctcagacctggggtgagttccgggtggtggagcgcacgatcaccatgaagcagttgctgcgggccctggaggagggccgcgtgcgggaagtctttggctcgggcaccgcttgccaggtctgcccagtgcaccgaatcctgtacaaagacaggaacctccacattcccaccatggaaaatgggcctgagctgatcctccgcttccagaaggagctgaaggagatccagtacggaatcagagcccacgagtggatgttcccggtgtgaagctgcaggctgtgctccagatccaccgacccgtagcatctcgtcacgccagcactcgcctccctaccaatgactcacctgaagtgcaatacgaaataaaaggccagcgggcggcgtctgggtctctggcgcccccatgtggttgcgacactcccaaagccgtaagggccgacccaggcatcttggcccccagcccctcgtcgcgggttcaggtccgcccattactccttgtcgtgcggtcaaggatacaccttggccccgattccggatctctccgttctcaggccagacccctggtgctgccgttgatttttttttctctgtctttgctgcaattttgaaataaaatgccaaagaacaca

SEQ ID NO: 7229 - protein, 392 aa, Homo sapiens
MAAAALGQIWARKLLSVPWLLCGPRRYASSSFKAADLQLEMTQKPHKKPGPGEPLVFGKTFTDHMLMVEWNDKGWGQPRIQPFQNLTLHPASSSLHYSLQLFEGMKAFKGKDQQVRLFRPWLNMDRMLRSAMRLCLPSFDKLELLECIRRLIEVDKDWVPDAAGTSLYVRPVLIGNEPSLGVSQPTRALLFVILCPVGAYFPGGSVTPVSLLADPAFIRAWVGGVGNYKLGGNYGPTVLVQQEALKRGCEQVLWLYGPDHQLTEVGTMNIFVYWTHEDGVLELVTPPLNGVILPGVVRQSLLDMAQTWGEFRVVERTITMKQLLRALEEGRVREVFGSGTACQVCPVHRILYKDRNLHIPTMENGPELILRFQKELKEIQYGIRAHEWMFPV

SEQ ID NO: 7230 - DNA, 1953 bp, Ovis aries
  CDS (492)..(1649)
ctgtttccattgcgtccttaagtgtttttaaaattttaccccctcattccatgagttctgtccttaacgagtgaccttgcgcctgcattggaggaccctactcgtggagaaaatggttcactctggtccccatcgcttttccaggcttgctattgtgcgcccgtgatcgacaagaccacgaggctgagtgcgcccaggagatttctctgttaatggctttaagccctaatctagactatttcctcggataaaagggagacaattactttcttgttctttgctggtgaaccctggcgcttcagggagaacctggaatttaaccagtctgctcgaagccagcggtggaggacaaaaacagccgcgacctccgacagggcagaaagagaaggacagctctcgcaggacgctctcctttggggctggtgcctgggtgtttgattctccttttccagtttgcttggggaccagacccgagcgcagcgaagggtgtgatggactgcaataatggatgctccgcagaaggtaccggagaaggcggatccaaagagccggtggagactttcaaggctgaagatctaataatcacacgagccaccattttaaaggaaaaaccagaccccagtactctggtttttggaacagtttttacagatcacatgttaacagtggagtggtccttggagcttggatgggagaaaccacgcatcaaacctcttcaaaacctctcactgcatccgggttcatcggctttgcactatgctgtggaattatttgaaggattgaaggcatttcggggagtagataataaaattcgtctgtttcggccaaacctcaacatggataggatgtaccgatctgctatgagggccactttgccggcgtttgacaagaaagagcttttagagtgtattcagcagcttgtgaaattggatgaggaatgggtcccctactcaacatctgcgagtctatatatccgtcctacgttcattggaactgagccttctctgggagtcaagaagccgactaaagccctgctctttgtaatcttgagcccagtgggaccttatttttccagtggaagctttaatcctgtgtccctgtgggccaacccgaagtatgtaagagcctggaaaggtgggaccggggactgcaagatgggagggaattatggctcgtctctttttgcccaatgtgaagcagtggaaaatgcatgtcaacaggttctgtggctctatggagaagaaaatcaaataactgaagttggaactatgaatctttttctttattggataaatgaagatggagaagaagaactggcaactcctccgctagatggcatcattcttccaggagtgatgaggcagagcatcctggacttggcacacaagtggggtgaatttaaggtatcagagagatacctcaccatggatgacttgaccacagctgtagaggagaatcgggtgagggagatgtttggttcaggtaccgcctgcgttgtttgccctgtttcaactatactgtacaaggatgagactatacacattccaactatggagaacggtcctaagcttgcaagccgcatcttagaaaaactgactgatattcaatacggaagagaagagagcgactggacaatcacggtagcctgagtggaaaagaacaggatatcatctgtgtgcgcttgggacagactgtggcatttgagttatgggaaatgtctttggctacctgattttagttgtgcatcacgttgttcatattatgtgtgttaccagggcgattgtttcttcatgccagagaagacgaatcacaatcatccaatgatagtttctaaacttgctcctagaagttttccttaccttctctagagttgattatggaagccatataattgtagagttttcctccataatcttagtgcctcccttagggcttcactcagatttttttttt

SEQ ID NO: 7231 - protein, 385 aa, Ovis aries
MDCNNGCSAEGTGEGGSKEPVETFKAEDLIITRATILKEKPDPSTLVFGTVFTDHMLTVEWSLELGWEKPRIKPLQNLSLHPGSSALHYAVELFEGLKAFRGVDNKIRLFRPNLNMDRMYRSAMRATLPAFDKKELLECIQQLVKLDEEWVPYSTSASLYIRPTFIGTEPSLGVKKPTKALLFVILSPVGPYFSSGSFNPVSLWANPKYVRAWKGGTGDCKMGGNYGSSLFAQCEAVENACQQVLWLYGEENQITEVGTMNLFLYWINEDGEEELATPPLDGIILPGVMRQSILDLAHKWGEFKVSERYLTMDDLTTAVEENRVREMFGSGTACVVCPVSTILYKDETIHIPTMENGPKLASRILEKLTDIQYGREESDWTITVA

SEQ ID NO: 7232 - DNA, 1322 bp, Bacillus licheniformis
  CDS (247)..(1098)
taatactaaagtcacaaggaggatcacaatgtctaagtatacaggattggatagaagatgaatacaggatgaagggaaaaatatatcaaattttaagagaaaatgttgaacgatagggaatgctgtttttttgatcctgaaggcggaaaaaagtttttggaaatattgcactattttgatcagcagggtcgtgttagaatggaatggagaaaattcagaagtcaacaaaaataaggggatggagaaatgaaagttctttttaacggccggctgatggaacggagcgagtgtgcggttgatattgaggacagaggctaccaatttggagacggcgtctatgaagtcatccgcatttacaatggaatcttgttcacgcttgatgaacacattgcccgcttatacaaaagcgcagccgaaatcggaatcgacttgtctttttcagaagccgaactgaaaagccagctgaaagagctcgtcgacatcaatcagaggcgggacggcgggctgtatcttcaagtgacaaggggaaaagctccgaggaagcatcaatacggagcagggcttacgcctcaggtgacggcttatacatttcctattcagaagcctgaaaaagaacagcaaaacggcgtttcggctattactgcggacgacatgcgctggctgagatgcgacattaaaagcttaaatctgttgtacaatgtaatgatcaagcaaaaagcacaggaagcttccgcctttgaagcgatcttaattcgcgacggtttggtgacggaagggacgtcttcaaatgtttacgtcgccaaacaaaatgttatctacacccatcctgtgacaacgctcatcttaaacggcatcacgcggatgaaagttcttcagctgtgtgaagagaacggcttgaattacgaagaaaaagcggtgacaaaggatgaattgctgaatgcggatgaagtattcatcacgtcaacgacagccgaagtcattccggtcacatcgattgacgggcaaacaatcggctccggagcgcccggaccgctcacaaaaaatgtgcagaccgctttgcaaaacagcattttgtcagagacagccaaaacggtttaacaaaagaaaaacgccgcttccatgaggaaacggcgtttttttacttgcggaaaccgaacaaaattgaaaagagcggcgataaatataggaaaaacacaaacggcaaatattcaatgacgggaacgccgagcgcgctggacatgaacgcgccgctgactccccaagggatcatcggattgattaatgtccctccgtcttcaagcgatctcgacaaatgcttccgg

SEQ ID NO: 7233 - protein, 283 aa, Bacillus licheniformis
MKVLFNGRLMERSECAVDIEDRGYQFGDGVYEVIRIYNGILFTLDEHIARLYKSAAEIGIDLSFSEAELKSQLKELVDINQRRDGGLYLQVTRGKAPRKHQYGAGLTPQVTAYTFPIQKPEKEQQNGVSAITADDMRWLRCDIKSLNLLYNVMIKQKAQEASAFEAILIRDGLVTEGTSSNVYVAKQNVIYTHPVTTLILNGITRMKVLQLCEENGLNYEEKAVTKDELLNADEVFITSTTAEVIPVTSIDGQTIGSGAPGPLTKNVQTALQNSILSETAKTV

SEQ ID NO: 7234 - DNA, 1194 bp, Bacillus sphaericus
  CDS (134)..(985)
aagcttcacacgccaagcacttcactgaaaaatctactttgatttactgcatctggtcttacttgatcgtctagtgggaatcattgtacttaaaaatgtgaaaataacttaaaaatgaaaaggatgtataaacatggcatactcattatggaatgaccaaatcgttgaagaaggatctattacaatttcaccagaagaccgtggttatcaatttggtgatggtatttacgaagtaatcaaagtatataacgggcatatgtttacagcacaagagcacatcgatcgtttctatgctagtgccgaaaaaattcgccttgttattccttatacaaaagatgtattacacaaattattgcatgatttaatcgaaaaaaataatttaaatacaggtcatgtttacttccaaattacacgtggaacaacttctcgtaaccacattttcccggatgcaagcgtaccagcagtgctaacaggtaatgttaaaactggtgaacgttcaattgaaaatttcgaaaaaggcgtaaaagcgacattggttgaagatgttcgttggttacgttgtgatattaaatctttaaatttacttggcgcggtacttgcgaaacaagaagcatctgaaaaaggttgttacgaagccattttacaccgtggagatattatcacagaatgttcttctgctaatgtctatggtattaaagatggtaaactttatacgcacccagcaaataactacatcttaaatggtattacacgccaagttatattaaaatgtgccgctgaaataaatttaccagtgattgaagagccgatgacaaaaggcgatttattaacaatggatgaaattattgtgtcttctgtttcatctgaagtgacaccggttatcgatgtggatggtcagcaaattggtgcaggtgttcctggtgaatggactcgtaaattgcaaaaagcatttgaggcaaaattaccaatttcaattaatgcctaatctgtataaatgattaaaaagagctacctaaaacttggttattcgccaagttaggagggtagctcttttttatagaacaaaatatgcatgtattctcctgaaacgtcatgtaaaataaaaaagatagcgcctttagtcgatatcacggtgataccgactagtaacgaggcgaatttgatatggggcagtaagattggagtgacctaaac

SEQ ID NO: 7235 - protein, 283 aa, Bacillus sphaericus
MAYSLWNDQIVEEGSITISPEDRGYQFGDGIYEVIKVYNGHMFTAQEHIDRFYASAEKIRLVIPYTKDVLHKLLHDLIEKNNLNTGHVYFQITRGTTSRNHIFPDASVPAVLTGNVKTGERSIENFEKGVKATLVEDVRWLRCDIKSLNLLGAVLAKQEASEKGCYEAILHRGDIITECSSANVYGIKDGKLYTHPANNYILNGITRQVILKCAAEINLPVIEEPMTKGDLLTMDEIIVSSVSSEVTPVIDVDGQQIGAGVPGEWTRKLQKAFEAKLPISINA

SEQ ID NO: 7236 - DNA, 849 bp, Staphylococcus epidermidis
  CDS (1)..(849)
atgacaaaagtttttataaatggtgaatttgttaatgaagaggatgctaaggtttcatacgaagatcgaggctacgtgtttggggacggaatctatgaatatatacgggcatatgatgggaaattgtttaccgttaaagagcattttgaaagatttttaagaagtgctgaagaaataggactagatttaaattatactattgaggaattaattgaattagtacgccgattattaaaagaaaataatgtagtgaatggcggtatttatatacaagctactcgtggtgctgctcctcgaaatcattcatttcctacaccacctgtaaaacctgttattatggcgtttacaaaaagttatgatagaccttatgaagaattagaacaaggagtttatgccattacaactgaagacattagatggttacgttgtgatattaaaagtttaaatttattaggaaatgtattagctaaagaatatgctgttaaatataatgctgcagaggctatacaacaccgaggtgatattgtcactgagggtgcatctagtaatgtttacgcaattaaagatggagtgatatacacgcatccagttaataattttatattgaacggaattactcgccgtgtcataaaatggatagcagaggatgaacaaataccattcaaagaagaaaaatttacagtagaatttcttaaaagtgctgatgaagttatcatttctagtacttctgcagaagttatgccaattacaaaaattgatggtgaaaatgttcaagacggacaagttggtactataacacgacaattacaacaaggatttgaaaagtatattcaatcgcatagtatttaa

SEQ ID NO: 7237 - protein, 282 aa, Staphylococcus epidermidis
MTKVFINGEFVNEEDAKVSYEDRGYVFGDGIYEYIRAYDGKLFTVKEHFERFLRSAEEIGLDLNYTIEELIELVRRLLKENNVVNGGIYIQATRGAAPRNHSFPTPPVKPVIMAFTKSYDRPYEELEQGVYAITTEDIRWLRCDIKSLNLLGNVLAKEYAVKYNAAEAIQHRGDIVTEGASSNVYAIKDGVIYTHPVNNFILNGITRRVIKWIAEDEQIPFKEEKFTVEFLKSADEVIISSTSAEVMPITKIDGENVQDGQVGTITRQLQQGFEKYIQSHSI

SEQ ID NO: 7238 - DNA, 1529 bp, Staphylococcus haemolyticus
  CDS (216)..(1064)
atagaaatcaaactggtgatatgtctgaaccatatacaataggtgggggaacatatgctagaaatcttgataaaggtgtagcgtttggggctatgtttgaagattcagaggatttaatgcatcaaaagaatgagtatattactaaaaaacaattgttcaacgcgacaagtatctatttagaagcaatttattcactatgtgtggagggataatctatgacaaaagtttttattaacggcgaatttatcgaccaaaatgaagctaaagtatcttatgaagaccgtggttatgtatttggtgatggaatttatgaatacattagagcatatgatgggaaattatttacagtaacagaacactttgaacgatttattagaagtgcaagtgaaattcaattagatttaggctatactgtcgaagaattaattgatgtagttagagaattattaaaggtaaataatattcaaaatggtggtatctatattcaagctacgcgtggtgtagcaccaagaaatcactcgttcccaactccagaagtaaagccagttattatggcatttgctaaaagttatgaccgtccatatgatgatttagaaaatggtattaatgcagctactgttgaagatattagatggttacgttgtgatattaaaagtttaaaccttctaggaaatgtacttgcaaaggaatatgcggttaaatacaatgctggtgaagcaattcaacatagaggggaaactgttacagaaggcgcttctagtaatgtatatgcgattaaagatggtgctatttatacgcatcccgttaataattacattttaaatggtattactcgtaaggttattaaatggatttctgaagatgaagatattccttttaaagaagaaacattcactgttgaattcttaaaaaatgctgatgaagtcattgtttctagtacatctgctgaagtgacaccagttgttaagattgatggtgaacaagttggtgacggtaaggtaggtcctgtgactcgtcaattacaagaaggctttaataaatatattgaatctagaagtagttaattcattaaaataattaattgaagagcgtactaattcttaaaagatagaattttagtacgttcttttttatttttcagtgtgaataaattaaatgaattaaattaaaaatactcagtttaaagatatgaaaatgtgttataatgaaacctaaagattgaatcgaattttagcaagtatcgactagtaaaatgtatctttttgtttctcattttcagttgaaaaagcaaggctaaaaattatcaaaatcaacattgagtgataaaagagacgtatttatttaaataagtgttaggggacaataacatattatttaaaattatgacttatatgtaaaaacataactattttgaaataaataatctattttccaacaaatgattataataaattagaatatatggctcttgaaaacctatattctcgagccatttctatgaagtgaggtgaaccgagttggagcagttt

SEQ ID NO: 7239 - protein, 282 aa, Staphylococcus haemolyticus
MTKVFINGEFIDQNEAKVSYEDRGYVFGDGIYEYIRAYDGKLFTVTEHFERFIRSASEIQLDLGYTVEELIDVVRELLKVNNIQNGGIYIQATRGVAPRNHSFPTPEVKPVIMAFAKSYDRPYDDLENGINAATVEDIRWLRCDIKSLNLLGNVLAKEYAVKYNAGEAIQHRGETVTEGASSNVYAIKDGAIYTHPVNNYILNGITRKVIKWISEDEDIPFKEETFTVEFLKNADEVIVSSTSAEVTPVVKIDGEQVGDGKVGPVTRQLQEGFNKYIESRSS

SEQ ID NO: 7240 - DNA, 921 bp, Methanobacterium thermoautotrophicum
  CDS (1)..(921)
atgtcatgcgaagccagtggaaagatatggttaaacggtgaaatggttgaatgggaagaagccaccgtccacgtactctcacatgttgtgcattatggatcatctgtctttgagggaataaggtgctacaggaacagtaaggggtcagccatcttccgtttgcgggagcatgttaaacgcctttttgattctgcaaagatataccggatggacataccctacacccaggagcagatatgtgatgccatagttgagaccgtcagggagaacggacttgaggagtgctatataagacccgtggtattcaggggatacggtgagatgggtgttcacccggtgaactgcccagtggacgtcgctgtggctgcctgggaatggggggcctatctgggtgcagaggcccttgaggttggtgtcgatgctggtgtttcaacctggcggaggatggcaccaaacacaatgcccaacatggcaaaggccggcggtaactacctcaactcacagcttgccaagatggaggctgtgagacacggctatgatgaggccataatgctggactaccatggctacataagtgagggtagcggggagaacatattcctcgtcagtgagggtgaaatttacaccccccctgtttcatcatcccttctgagggggataacaagggactccgtaataaagatagccaggaccgagggtgttaccgtgcatgaggaacccataaccagggagatgctctacatcgcagatgaggccttcttcacaggtacagccgcagagataacacccatcagatcagttgatggtatagagataggtgccgggcgaaggggtcccgttacaaagctgctgcaggatgagttcttcaggataatcagggcagagacagaggacagcttcggatggctcacctacatctga

SEQ ID NO: 7241 - protein, 306 aa, Methanobacterium thermoautotrophicum
MSCEASGKIWLNGEMVEWEEATVHVLSHVVHYGSSVFEGIRCYRNSKGSAIFRLREHVKRLFDSAKIYRMDIPYTQEQICDAIVETVRENGLEECYIRPVVFRGYGEMGVHPVNCPVDVAVAAWEWGAYLGAEALEVGVDAGVSTWRRMAPNTMPNMAKAGGNYLNSQLAKMEAVRHGYDEAIMLDYHGYISEGSGENIFLVSEGEIYTPPVSSSLLRGITRDSVIKIARTEGVTVHEEPITREMLYIADEAFFTGTAAEITPIRSVDGIEIGAGRRGPVTKLLQDEFFRIIRAETEDSFGWLTYI

SEQ ID NO: 7242 - DNA, 1077 bp, Staphylococcus epidermidis
  CDS (1)..(1077)
atgtcagaaaaagtaaaattcgaaaaaagagagtctttaaaagaaaaacctgatacagcaaacttaggatttggacaatatttcacagactatatgttaagtgttgattatgacgctgatcaaggatggcatgatatgaagattgtgccgtacgcaccatttgaaatttcaccagcagcgcaagggttacattatggtcaggcagtttttgaaggccttaaagcctataaacataatggagaagttgtattattccgcccagatcaaaacttcaaacgtattaataattctttagcacgtttagaaatgccagaagttgatgaagaagcattattagaagggttgaagcagcttatcgacgttgaacgagattgggtacctgaaggcgaaggtcaatcgttatatattcgtccttttgtatttgctactgaaggtgttttgggtgtacgttcttcacatcaatataaattactaattattttatctccgtcaggcgcttattatggtggtgacacattaaagtcaactaaaatttatgtcgaagatgaatatgtacgtgcagtacgtggaggtgtaggtttcgctaaagttgcaggtaactatgctgccagcttactcgcacaaacaaacgctaataaattaggttatgaccaagtattgtggcttgatggtgttgaacaaaaatatgttgaagaagttggtagtatgaatattttcttcgtagaaaatggaaaagtagttacgccagcattaaacggtagtatcttgcctggtatcactagaaagtcaattattcaattagctgaagatttaggttatgaagttgaagagagaagagtttctatagaagagctgtttaacgcatatgataaaggtgaacttacagaagtatttggttcaggtacagcagctgttatctctcctgtaggtacacttcgctatgaagatagagaaattgttattaataacaatgaacctggtaaaatcactcaaaaattatatgacacatatactggtattcaaagtggcaaattagaagataaatacggatggagagtagaagttcctaagtattaa

SEQ ID NO: 7243 - protein, 358 aa, Staphylococcus epidermidis
MSEKVKFEKRESLKEKPDTANLGFGQYFTDYMLSVDYDADQGWHDMKIVPYAPFEISPAAQGLHYGQAVFEGLKAYKHNGEVVLFRPDQNFKRINNSLARLEMPEVDEEALLEGLKQLIDVERDWVPEGEGQSLYIRPFVFATEGVLGVRSSHQYKLLIILSPSGAYYGGDTLKSTKIYVEDEYVRAVRGGVGFAKVAGNYAASLLAQTNANKLGYDQVLWLDGVEQKYVEEVGSMNIFFVENGKVVTPALNGSILPGITRKSIIQLAEDLGYEVEERRVSIEELFNAYDKGELTEVFGSGTAAVISPVGTLRYEDREIVINNNEPGKITQKLYDTYTGIQSGKLEDKYGWRVEVPKY

SEQ ID NO: 7244 - DNA, 1074 bp, Cochliobolus carbonum
  CDS (1)..(1074)
atggcgatacccttgcctgcattttacaaatgggatgtttacgatagtaaattaaacaatgtacacggacacgtagaatgtcgatacacagcccaaacgggctactggtcagacccttgtttcgtccaaagcccttttctgagcgtccatggtcttgcaccggggctaaattatgggcagcaagtatacgaaggaattcaagctcggcgaaccgctcgtaacgaaatcttgatattccgtcccggcgcgagtgccgatcgtatggccaagtcagcaacggctgtctccatgcccccggtgccctacgaattgttcgtgagatcggttcacatggctgttgctttgaacgccgattatgttcctccacatgattttcatgggagcatgtatattcgtccgtgccaatttggatcgagttgtcaaattggacttcaaccccccgacgagtttatcttctgcgtcttcgtacagccacacattgcgttgcacgggcacggttccctgcgggcgctgatagcagaggactttgaccgggccgctacgaggggcactggtcatgtcaaaataggcggtaattatgcccccgtgataaggtggacacagtcagcgaagaaggaggaaaatggtgggtgggacgttttgctccacgtggacagcaaaacgcaaacgcggattgacgaattcagtacttcagcatttattgggacaaaatatgcagaggaacagaatgagccaccacaaatcatcttgccagaaagtgcagcggctattcaaagcatcacttcggattccgtcgcatggttagcgaagtcattcggctggaatattgtcaaacagcctgtcaccattgatgaacttgcttccttatcagaagtaatggctgtgggcaccgctgccggtcttgtgcctgttagttgtatacgtcataactccaccaatcggacgtttgaattcccttctgcgggacctatgtacagacagctcaaggaaacgctagataatatacaacggggcaggtcaagtgattcgtttggatggtgtgagaaacttcgatacgccgaattcgtacaatag

SEQ ID NO: 7245 - protein, 357 aa, Cochliobolus carbonum
MAIPLPAFYKWDVYDSKLNNVHGHVECRYTAQTGYWSDPCFVQSPFLSVHGLAPGLNYGQQVYEGIQARRTARNEILIFRPGASADRMAKSATAVSMPPVPYELFVRSVHMAVALNADYVPPHDFHGSMYIRPCQFGSSCQIGLQPPDEFIFCVFVQPHIALHGHGSLRALIAEDFDRAATRGTGHVKIGGNYAPVIRWTQSAKKEENGGWDVLLHVDSKTQTRIDEFSTSAFIGTKYAEEQNEPPQIILPESAAAIQSITSDSVAWLAKSFGWNIVKQPVTIDELASLSEVMAVGTAAGLVPVSCIRHNSTNRTFEFPSAGPMYRQLKETLDNIQRGRSSDSFGWCEKLRYAEFVQ

SEQ ID NO: 7246 - DNA, 24 bp, Artificial sequence
  Primer sequence
atgaccacgaagaaagctgattac

SEQ ID NO: 7247 - DNA, 26 bp, Artificial sequence
  Primer sequence
ttattgattaacttgatctaaccagc

SEQ ID NO: 7248 - DNA, 1791 bp, Saccharomyces cerevisiae
  CDS (2)..(1504)
aatgtctagattagaaagattgacctcattaaacgttgttgctggttctgacttgagaagaacctccatcattggtaccatcggtccaaagaccaacaacccagaaaccttggttgctttgagaaaggctggtttgaacattgtccgtatgaacttctctcacggttcttacgaataccacaagtctgtcattgacaacgccagaaagtccgaagaattgtacccaggtagaccattggccattgctttggacaccaagggtccagaaatcagaactggtaccaccaccaacgatgttgactacccaatcccaccaaaccacgaaatgatcttcaccaccgatgacaagtacgctaaggcttgtgacgacaagatcatgtacgttgactacaagaacatcaccaaggtcatctccgctggtagaatcatctacgttgatgatggtgttttgtctttccaagttttggaagtcgttgacgacaagactttgaaggtcaaggctttgaacgccggtaagatctgttcccacaagggtgtcaacttaccaggtaccgatgtcgatttgccagctttgtctgaaaaggacaaggaagatttgagattcggtgtcaagaacggtgtccacatggtcttcgcttctttcatcagaaccgccaacgatgttttgaccatcagagaagtcttgggtgaacaaggtaaggacgtcaagatcattgtcaagattgaaaaccaacaaggtgttaacaacttcgacgaaatcttgaaggtcactgacggtgttatggttgccagaggtgacttgggtattgaaatcccagccccagaagtcttggctgtccaaaagaaattgattgctaagtctaacttggctggtaagccagttatctgtgctacccaaatgttggaatccatgacttacaacccaagaccaaccagagctgaagtttccgatgtcggtaacgctatcttggatggtgctgactgtgttatgttgtctggtgaaaccgccaagggtaactacccaatcaacgccgttaccactatggctgaaaccgctgtcattgctgaacaagctatcgcttacttgccaaactacgatgacatgagaaactgtactccaaagccaacctccaccaccgaaaccgtcgctgcctccgctgtcgctgctgttttcgaacaaaaggccaaggctatcattgtcttgtccacttccggtaccaccccaagattggtttccaagtacagaccaaactgtccaatcatcttggttaccagatgcccaagagctgctagattctctcacttgtacagaggtgtcttcccattcgttttcgaaaaggaacctgtctctgactggactgatgatgttgaagcccgtatcaacttcggtattgaaaaggctaaggaattcggtatcttgaagaagggtgacacttacgtttccatccaaggtttcaaggccggtgctggtcactccaacactttgcaagtctctaccgtttaaaaaaagaatcatgattgaatgaagatattatttttttgaattatattttttaaattttatataaagacatggtttttcttttcaactcaaataaagatttataagttacttaaataacatacattttataaggtattctataaaaagataacttatgttattgttaacctttttgtctccaattgtcgtcataacgatgaggtgttcgatttttggaaacgagattgacatagagtcaaaatttgctaaatttgatccctcccatcgcaagataatcttccctcaag

SEQ ID NO: 7249 - protein, 500 aa, Saccharomyces cerevisiae
MSRLERLTSLNVVAGSDLRRTSIIGTIGPKTNNPETLVALRKAGLNIVRMNFSHGSYEYHKSVIDNARKSEELYPGRPLAIALDTKGPEIRTGTTTNDVDYPIPPNHEMIFTTDDKYAKACDDKIMYVDYKNITKVISAGRIIYVDDGVLSFQVLEVVDDKTLKVKALNAGKICSHKGVNLPGTDVDLPALSEKDKEDLRFGVKNGVHMVFASFIRTANDVLTIREVLGEQGKDVKIIVKIENQQGVNNFDEILKVTDGVMVARGDLGIEIPAPEVLAVQKKLIAKSNLAGKPVICATQMLESMTYNPRPTRAEVSDVGNAILDGADCVMLSGETAKGNYPINAVTTMAETAVIAEQAIAYLPNYDDMRNCTPKPTSTTETVAASAVAAVFEQKAKAIIVLSTSGTTPRLVSKYRPNCPIILVTRCPRAARFSHLYRGVFPFVFEKEPVSDWTDDVEARINFGIEKAKEFGILKKGDTYVSIQGFKAGAGHSNTLQVSTV

SEQ ID NO: 7250 - DNA, 1461 bp, Vibrio cholerae
  CDS (1)..(1461)
atgtgtaaaaccaaaattgtggccactttaggccctgctagccaaactcgtgaaactttgactcaactcatccaagctggcgtgaacgtggttcgcttgaacttttctcacggcagcgctgaagaacacattgctcgcgcggaaatggtgcgtgagatcgcgcagcagctcaatgtgagcgttggcgtactggttgatctacaaggccctaaaattcgtatcgcttgctttgcagaaggcgcgattcaactctctgcaggcgacacatttattcttgatggccatttagatggtcaagccggtacgcaagagcgcgtgggtttagactacccagaactaattgatgatctaaacgtaggcaacatcctgctcctcgatgatggccgcattcaactggaagtcacggccgtcgatatgcaagctcgccttgttcacaccatcgcactcaatagtggcaaactgtccaaccgtaaaggcattaacttgcttggcggcggtctttccgctccggctctcacagaaaaagacaagctcgacattattactgcggcggagctgcaagccgacttcttagccgtctctttcccacgcaatgcggaagatattgaatacgcgcgccaactcgccactcaagcaggctgccatgcgcacattgtcgccaaagttgagcgcgcagaagtggtagccagtgaagaagcgatggacagcgttattcgcgcgtctgatgtgatcatggtggcgcggggtgatttgggcgtggaaattggtgatgctcgtttgccaagcgtacaaaaagcgctgatcgcgcgtgctaagcacttaggtaaacctgtcatcaccgccacgcaaatgatggaatcgatgatcgaaaacccactgccgacacgcgcagaagtcttggatgtcgcgaatgcggtgattgatggtactgatgcgatcatgctttctgcggaatcggccgcgggacgctaccctgtggaaacagtgcaagccatggtgcgcatcgcccaaggggttgagcacgaaactcactgtgcgcaaaattgttgggatgcgctacaacatctgtgcagcgatgcgggcaaaagctttgctctgtcatcgatgatttcagcatccaaagtcaataaagatctcggtgttgcgattgtgactgagcaaggtgaaacgccgcttttgatgtcacgctgtcaaagccaagccaccatttgggcggtgtctgataaacctgcgctactgcgtaagcttgctattttgcgtggtgtcacaccgacctatttcccacatttagataagcaaggtgatattgcgactcagctgattcatttgctgcgtaaacccgcacaagagaaaaaaatcgcctcgattttggtcactcaactggaatcggtcgaaggggttggtcacgtcaacgtgtgccgactactgaatttggcgcagcaggaagccctgttcgcctaa

SEQ ID NO: 7251 - protein, 486 aa, Vibrio cholerae
MCKTKIVATLGPASQTRETLTQLIQAGVNVVRLNFSHGSAEEHIARAEMVREIAQQLNVSVGVLVDLQGPKIRIACFAEGAIQLSAGDTFILDGHLDGQAGTQERVGLDYPELIDDLNVGNILLLDDGRIQLEVTAVDMQARLVHTIALNSGKLSNRKGINLLGGGLSAPALTEKDKLDIITAAELQADFLAVSFPRNAEDIEYARQLATQAGCHAHIVAKVERAEVVASEEAMDSVIRASDVIMVARGDLGVEIGDARLPSVQKALIARAKHLGKPVITATQMMESMIENPLPTRAEVLDVANAVIDGTDAIMLSAESAAGRYPVETVQAMVRIAQGVEHETHCAQNCWDALQHLCSDAGKSFALSSMISASKVNKDLGVAIVTEQGETPLLMSRCQSQATIWAVSDKPALLRKLAILRGVTPTYFPHLDKQGDIATQLIHLLRKPAQEKKIASILVTQLESVEGVGHVNVCRLLNLAQQEALFA

SEQ ID NO: 7252 - DNA, 1455 bp, Chlamydophila pneumoniae, Chlamydia pneumoniae
  CDS (1)..(1455)
atgatcacacgcactaaaattatttgcactatagggccagcaacgaatagtccagagatgttagcaaaacttctagatgctgggatgaacgtagcaagattaaatttcagtcatgggagtcacgaaactcatggacaggctattggatttctcaaggagttaagggagcagaagcgggttcctttagcaattatgctagatactaaggggcctgaaattcgtttagggaatattcctcagccaatttcggtttctcagggacaaaagcttcgtctggtaagtagtgatatcgatgggagtgctgaagggggagtgtctctctatcctaaggggatatttccctttgttcctgagggtgctgatgttttaatagatgatggctacattcatgctgttgttgtctcttcagaggctgattctttagaattagagtttatgaacagtggccttctcaagtctcataaatctttgagtatccgaggtgttgatgttgctcttccctttatgacagagaaagatattgcggatcttaagtttggggtagagcagaatatggatgtgaatgctgcatcttttgtgcgctacggtgaagatattgaaactatgcgcaagtgtttagcagacttaggcaatcctaagatgcccatcattgcaaaaatagaaaatcgtttaggggtagaaaatttctctaagattgccaagcttgcggatggaattatgattgctagaggagatttaggaatcgagctttctgtcgttgaagtcccaaatttgcaaaagatgatggctaaggtttctagagaaacaggtcacttctgtgtgactgcaacgcagatgctagaatctatgattcgcaatgtcttacctacacgagctgaagtctctgatattgccaatgcaatttatgatggttcttcagcagtgatgttgtcaggggaaactgcatctggagcccatcccgtggctgccgtgaaaatcatgcgttctgtgattttagaaacagaaaagaatctctcccatgattcattcttaaaattagacgatagcaatagcgctcttcaggtgtccccctatctctcagccattggattggcaggcattcagattgcagaaagggcagacgccaaagctcttattgtttatacagaatcaggaagttctccgatgtttctctctaaatatcgtccgaaattccctatcattgccgtgactccaagcacttctgtttactatcgcctagctttggaatggggggtctatcctatgcttacccaggaaagtgatcgcgctgtatggagacatcaggcctgtatttatggcatagaacagggcattctctctaattatgatcggattcttgtgcttagcagaggagcctgtatggaagaaacaaataatcttaccctgacaatagtgaatgatattttgactgggtcggaatttcctgaaacctag

SEQ ID NO: 7253 - protein, 484 aa, Chlamydophila pneumoniae, Chlamydia pneumoniae
MITRTKIICTIGPATNSPEMLAKLLDAGMNVARLNFSHGSHETHGQAIGFLKELREQKRVPLAIMLDTKGPEIRLGNIPQPISVSQGQKLRLVSSDIDGSAEGGVSLYPKGIFPFVPEGADVLIDDGYIHAVVVSSEADSLELEFMNSGLLKSHKSLSIRGVDVALPFMTEKDIADLKFGVEQNMDVNAASFVRYGEDIETMRKCLADLGNPKMPIIAKIENRLGVENFSKIAKLADGIMIARGDLGIELSVVEVPNLQKMMAKVSRETGHFCVTATQMLESMIRNVLPTRAEVSDIANAIYDGSSAVMLSGETASGAHPVAAVKIMRSVILETEKNLSHDSFLKLDDSNSALQVSPYLSAIGLAGIQIAERADAKALIVYTESGSSPMFLSKYRPKFPIIAVTPSTSVYYRLALEWGVYPMLTQESDRAVWRHQACIYGIEQGILSNYDRILVLSRGACMEETNNLTLTIVNDILTGSEFPET

SEQ ID NO: 7254 - DNA, 1419 bp, Clostridium acetobutylicum
  CDS (1)..(1419)
atgcaaaaaacaaaaatgatttttacaatagggccctctagtgattcagaggagaaattaaaagaattaatgaatgctggaatgaatgctgcaaggttaaatttttcacatggcactcatgaagatcacaaagaaaaaatagatattataaaaaaacttagaaaagaactgaacaaaaatgttgcaattgtagttgacatcaaaggaccaaaaattagaactcataattttgaaaatgacaaagctgaaataaaaaaaggtcaaaccttcacagtaatgtgtggaagcgaaattttgggaaattcagagaaatgctccgtttcttatgatgatctttataaagatgtaaaaaaaggtggattactccttgtcgatgatggtcttttagaatttgaaataactgatgtacaagacaaaaacattatttgtaaggcaaaaaataatggtattatttcaaatcataaaggtgtaaatgtacctggtgtttctataggtcttcctgctgtaactgaaaaagatgtattagatttaaaatttgcatgtaaaatgcaagctgatttagtagctgcttcttttataagaaaagcagaagatgtatctgtcgttagaaaggttcttaaagaaaatggtggagaagatataagagttatctctaagatagaaactcaagaaggtgttgataacatcgataagattctcgaactatctgatggaatcatggtagcaagaggagatatgggtgttgaaattccaatagaggatgttccttcaatacagaaaatgataataagaaaatgtaatgatgcaggcaaaatagttataacagctactcaaatgcttgattcaatgataagaaacccaagacctacaagagctgaggcatcagatgttgccaatgcaatatatgacggaacagatgctataatgctaagtggagaaagtgcaagtggtttatatccaattgaagctgctgaaactatggcaaagatagcacaaaaaacagaatctcaaatagactatactaaagctcttaatgaaagaaaaggtgaaattataacaaaaatttcagacgctataagtcttgctgcatgctcaactgctgctgaacttaaagctgctgctataataacagctactcaaagcggtataactgcaagaatggtatctaaattcagaccaacttgccctataatagctgttacacctcatgatgatgttgcaagaagacttgctctaaactttggtataacacctattacatctgaaaaagttgtttcaacagatgaacttatatctgtttcaataaaaagagcacttaacgagaatttaattaaaaaaggtgacttagttgttgtagttgcaggtgttcctgtaggcgaatctggaactactaatatgttaaaaattcaatacacataa

SEQ ID NO: 7255 - protein, 472 aa, Clostridium acetobutylicum
MQKTKMIFTIGPSSDSEEKLKELMNAGMNAARLNFSHGTHEDHKEKIDIIKKLRKELNKNVAIVVDIKGPKIRTHNFENDKAEIKKGQTFTVMCGSEILGNSEKCSVSYDDLYKDVKKGGLLLVDDGLLEFEITDVQDKNIICKAKNNGIISNHKGVNVPGVSIGLPAVTEKDVLDLKFACKMQADLVAASFIRKAEDVSVVRKVLKENGGEDIRVISKIETQEGVDNIDKILELSDGIMVARGDMGVEIPIEDVPSIQKMIIRKCNDAGKIVITATQMLDSMIRNPRPTRAEASDVANAIYDGTDAIMLSGESASGLYPIEAAETMAKIAQKTESQIDYTKALNERKGEIITKISDAISLAACSTAAELKAAAIITATQSGITARMVSKFRPTCPIIAVTPHDDVARRLALNFGITPITSEKVVSTDELISVSIKRALNENLIKKGDLVVVVAGVPVGESGTTNMLKIQYT

SEQ ID NO: 7256 - DNA, 1413 bp, Yersinia pestis
  CDS (1)..(1413)
atgaaaaagactaaaattgtttgtactatcggtccaaaaaccgaatccgaagaaatgctgacaaacctgctgaatgctggcatgaacgttatgcgtttaaacttctctcacggtgactatgcagagcacggtcaacgtatcaaaaacctccgggctgtaatggcaaaaacaggcaaaaaagccgcgattttgctggatactaaaggccctgaaatccggaccatgaaactggaaggcggcaaagatgctgcgctggttgcaggtcagaccttcacgttcacgactgatcaaagcgttgtcggtaacgacaaaattgttgcagtcacctacccaggcttcgccgctgacctgaaaattggtaacactgttctggttgacgatggcttgatcggtatggaagtcattgaagtcactgaacacaccgttgtctgtaaagtcttgaacagtggtgatttgggtgaaaacaaaggcgttaacctgccaggcgtgtcgatccaactgcccgcattagcagaaaaagataaaggcgacctgatcttcggttgcgaacaaggcgttgatttcgttgccgcctcctttatccgtaaacgttctgatgtactggaaattcgtgaacacctgaaagcacacggtggcgaacatatccagatcatctctaaaatcgaaaatcaggaaggtctgaataacttcgacgaaatcctggaagcctctgacggtatcatggttgcccgtggtgacttaggtgttgagatccctgtcgaagaagtcatcttcgcgcagaagatgatgatcgagaaatgtaaccgcgcacgtaaagttgttattactgcaactcaaatgctcgattccatgatcaaaaacccacgtcctacccgcgcagaagccggtgacgttgcaaacgccatccttgacggtaccgacgcggtcatgctgtccggcgaaagtgctaagggtaagtacccattagagtctgtcaccatcatggcgaccatctgtgagcgtacagaccgtgttatgcctagccgcattgagtcactgaacgacaaccgtaaaatgcgaatcactgaagccgtttgccgtggtgctgttgaaaccgcagaaaaactggaagccaaagtgattgtggtcgcaaccggggggggtaaatctgcaaaatctgtccgtaaatacttccctactgcgaccattctggcactgacgaccaatgaaatgacagcccatcagttaattctgactaaaggcgtaatcactcagttggtagacgaaatcgcctcaaccgatgatttctaccgtctcggtaaagaagcggctctggcgagcggcctggcacagaaaggcgacgtggtcatcatggtttcaggtgccttggtaccaagcggtacgaccaatacctcttcagtacacgtgttataa

SEQ ID NO: 7257 - protein, 470 aa, Yersinia pestis
MKKTKIVCTIGPKTESEEMLTNLLNAGMNVMRLNFSHGDYAEHGQRIKNLRAVMAKTGKKAAILLDTKGPEIRTMKLEGGKDAALVAGQTFTFTTDQSVVGNDKIVAVTYPGFAADLKIGNTVLVDDGLIGMEVIEVTEHTVVCKVLNSGDLGENKGVNLPGVSIQLPALAEKDKGDLIFGCEQGVDFVAASFIRKRSDVLEIREHLKAHGGEHIQIISKIENQEGLNNFDEILEASDGIMVARGDLGVEIPVEEVIFAQKMMIEKCNRARKVVITATQMLDSMIKNPRPTRAEAGDVANAILDGTDAVMLSGESAKGKYPLESVTIMATICERTDRVMPSRIESLNDNRKMRITEAVCRGAVETAEKLEAKVIVVATGGGKSAKSVRKYFPTATILALTTNEMTAHQLILTKGVITQLVDEIASTDDFYRLGKEAALASGLAQKGDVVIMVSGALVPSGTTNTSSVHVL

SEQ ID NO: 7258 - DNA, 1413 bp, Salmonella enterica subsp. enterica serovar Typhi
  CDS (1)..(1413)
atgaaaaagacgaaaattgtttgtactatcggtccgaaaaccgaatccgaagagatgttaagcaaaatgctggacgcgggcatgaacgtgatgcgtctgaacttctctcatggcgattatgcagaacacggtcagcgtatccagaacttgcgcaacgtgatgagcaaaactggtaaaaaagctgctattctgcttgatactaaaggaccagaaatccgcaccattaaactggaaggcggtaacgacgtttcgctgaaagcgggccaaacctttacttttaccaccgacaaatccgtggtcggtaataatgaaatcgttgccgtcacctatgaaggcttcaccagcgacctgagcgttggcaacaccgtcctggttgacgatggtctgatcggtatggaagtgaccgccatcgaaggcaataaagtcatttgtaaggtgctgaacaacggcgatctgggcgagaacaaaggcgttaacctgccgggcgtttctattgctctgccggcgctggctgaaaaagacaaacaggacctgatcttcggttgcgaacagggcgttgactttgttgctgcgtcctttatccgtaaacgttctgacgttgtcgaaattcgcgagcatctgaaagcccacggcggcgaaaacatccagattatctctaagatcgaaaaccaggaaggcctgaacaacttcgatgaaattctcgaagcttccgacggcatcatggttgcgcgtggcgacctgggcgtagaaatcccggttgaagaagtgatctttgcgcagaaaatgatgatcgaaaaatgtatccgcgcacgtaaagtcgtgatcaccgcgactcagatgctggattctatgatcaaaaatccgcgtccgacccgcgcagaagcaggcgatgttgcaaacgccatcctcgacggtacggatgcggttatgctgtccggcgaatccgcaaaagggaaatacccgctggaagccgtttctatcatggcgaccatctgcgaacgtaccgaccgcgtcatgaacagccgtctggactacaacaacgacagccgtaaactgcgcattacggaagcggtatgccgcggcgcggtagaaaccgccgaaaaattgaaagcgccgctgatcgtggtagcgacccagggcggtaaatccgctcgcgccgtgcgtaaatacttcccggacgccaccatcctggcattgaccaccaatgaagtgaccgcccgtcagttagtactgagcaaaggcgtggtatcgcagctggtgaaagaaatcaattctactgatgatttctaccgtctgggcaaagatgtcgccctacaaagcggcctcgcccagaaaggcgacgtcgtagtgatggtctccggcgcgctggttccaagcggcaccactaacaccgcctctgttcacgtactgtaa

SEQ ID NO: 7259 - protein, 470 aa, Salmonella enterica subsp. enterica serovar Typhi
MKKTKIVCTIGPKTESEEMLSKMLDAGMNVMRLNFSHGDYAEHGQRIQNLRNVMSKTGKKAAILLDTKGPEIRTIKLEGGNDVSLKAGQTFTFTTDKSVVGNNEIVAVTYEGFTSDLSVGNTVLVDDGLIGMEVTAIEGNKVICKVLNNGDLGENKGVNLPGVSIALPALAEKDKQDLIFGCEQGVDFVAASFIRKRSDVVEIREHLKAHGGENIQIISKIENQEGLNNFDEILEASDGIMVARGDLGVEIPVEEVIFAQKMMIEKCIRARKVVITATQMLDSMIKNPRPTRAEAGDVANAILDGTDAVMLSGESAKGKYPLEAVSIMATICERTDRVMNSRLDYNNDSRKLRITEAVCRGAVETAEKLKAPLIVVATQGGKSARAVRKYFPDATILALTTNEVTARQLVLSKGVVSQLVKEINSTDDFYRLGKDVALQSGLAQKGDVVVMVSGALVPSGTTNTASVHVL

SEQ ID NO: 7260 - DNA, 1758 bp, Listeria innocua
  CDS (1)..(1758)
atgaaaaaaacgaaaattgtttgtacaattggtcctgcaagtgagtcagttgacacattagttcagttgatcgaagcaggaatgaacgttgcacgtcttaatttctctcacggagattttgaagagcacggtgcgcgtattgtaaatatccgtgaagcatcgaaaaaaactggcaaacaagttgctatcttacttgatacaaaaggtccagaaatccgtacaaacgacatggtcggcggaaaattagaattccaaacaggtgacgttgtacgtgtatctatgactcctgttgaaggaacaaaagaaaaattctctgtaacttacggagaactttatgatgacgtagaaattggttcttccattttacttgatgacggtttaatcggtcttgaagtaatcgaaaaagacgaagctaatcgcgaactagtaactaaagtacttaacccaggtgtacttaaaaataaaaaaggtgttaacgtaccgaatgtttctatcaacctaccaggaatcacagaaaaagatgctgctgatatccgcttcggtttagaacaaggtattgactttatcgctgcatctttcgtacgtcgtgctacagatgttcttgaaattactaaaattttagaagagcataacgcaactcacgtacaaatcattcctaaaatcgaaaaccaagaaggcgttgacaacatcgacgaaatcttacaagtatctcaaggcttaatggttgctcgtggtgacctaggtgttgaaattccagctgaagaagttccgattgtacaaaaagaacttatcagaaaatgtaataaacttggtaaacctgttattactgctacacaaatgcttgattccatgcaacgtaacccacgtccaactcgcgctgaagcaagtgacgtagcgaatgcgatttttgatggaacagatgctattatgttatccggtgaaacagctgctggggattatccagtagaagcagttaaaatgatggcgaaaatcgctgttcgtactgaggaagttctagttgctcaagataaatttgcacttaaacttcatgaaaatacagatatgacagaagctatcggtcaagcagttggccatactgcgaaaaacctaaatgtacaaactatcgttgctgcgactcaaagtggtcacacagctcgtatgatttctaaataccgtccaaaatctcatatcgttgctgtaacattcaacgaacatgtatatcgcggattagctctttcttggggcgtatatcctcgtctagctactccagttagcaatacagacgaaatgtttgaccttgcagtaaaagaatctcttgcttcaggtgttgcgaaacaaggcgacctaatcatcatcactgctggtgttccagttacagaaagcggaacaacaaacgttatgaaaatccaattaattggtgaaaaagtagttaaaggccaaggtattggtagcaaatcagttattggtaaagcagtagttgctaaatccaatgcagaagctcttcaaaaagcagaagaaggcggaatcttaatcgttaaaacaactgataaagaaatccttcctgcattcgagaaaagtgctgcagttgttgtggaagaaggcggcttaactagccatgcagcagttgttggaatcaaccttggcattcctgtcatcgttggcgctaaagacgcaacatcccttgtaaaagacggtgaaatcatcactgttgattctcgtcaaggtgttgtatataacggcaaaacagcaactcactaa

SEQ ID NO: 7261 - protein, 585 aa, Listeria innocua
MKKTKIVCTIGPASESVDTLVQLIEAGMNVARLNFSHGDFEEHGARIVNIREASKKTGKQVAILLDTKGPEIRTNDMVGGKLEFQTGDVVRVSMTPVEGTKEKFSVTYGELYDDVEIGSSILLDDGLIGLEVIEKDEANRELVTKVLNPGVLKNKKGVNVPNVSINLPGITEKDAADIRFGLEQGIDFIAASFVRRATDVLEITKILEEHNATHVQIIPKIENQEGVDNIDEILQVSQGLMVARGDLGVEIPAEEVPIVQKELIRKCNKLGKPVITATQMLDSMQRNPRPTRAEASDVANAIFDGTDAIMLSGETAAGDYPVEAVKMMAKIAVRTEEVLVAQDKFALKLHENTDMTEAIGQAVGHTAKNLNVQTIVAATQSGHTARMISKYRPKSHIVAVTFNEHVYRGLALSWGVYPRLATPVSNTDEMFDLAVKESLASGVAKQGDLIIITAGVPVTESGTTNVMKIQLIGEKVVKGQGIGSKSVIGKAVVAKSNAEALQKAEEGGILIVKTTDKEILPAFEKSAAVVVEEGGLTSHAAVVGINLGIPVIVGAKDATSLVKDGEIITVDSRQGVVYNGKTATH

SEQ ID NO: 7262 - DNA, 1431 bp, Nostoc sp. PCC 7120
  CDS (1)..(1431)
atgcgtcgaactaaaattatctgtactgtaggcccggctacatctgcaccagaacgtttagaagcgttggtagaagctgggatgaatgtagcacggctgaatttttctcatggagcttatgacttccatgcccaaactgctcagtatttgcggcaaatcagtgctgacagacaaaagcctgtggcgattatgcaagacctatgcgggccgaagattcgcttgggaactttaccaccagaagggttaatggtagaggctggtcaggaagtgacttttgtcttgcaagaaaagggtagtagtcttgatgaattgcctttacctttgccgaccttgttcgcaatggtacgacctggggaaccaatcttaattaatgatggtcgtgtcaagttgattgtgacagatcgcgatgccgatcgcattcgggctattgccaaaatcgggggtcttctttctacccgtaagggtgttaacctgccagcgactcgtttacctgtcagttccatcaccgaaaaggacttgcaggatttgcgttttggcatcgatttgagtgtagattgggtggcggtgtcttttgtgcgatcgccttatgacctcgaaccagcgcaacggatgattgaagcggcggggaaaactattcgggtaatcgccaaaattgaacgtccagaagccgttgagcaaattgattctatcatcgacgttgctgatgcgattatgattgctcgtggtgacttgggtgtggaaatgcctatccatgaagtcccattgattcaaaaggacatcattcgccgttgcaaccaagctggtaagcccgtgattacagcaacgcaaatgctagagtcgatgattagcgctcccgatcccacccgtgcggaggctacagacgttgctaactctattctcgatggtacagatgccgtcatgctctctggggaaacggctgtaggacaatatcccgtcgccgccgtccaggttatgcacgatatcgccgtgactacagaaaagtctttgcaagagggtagtaaacattgcttatcccatgaagcaggtggtctgagtgtcaccgaatctgtagctgaagcggtctgtcgtatcgcctacgaaacaggcgcaaaagcgattctttgcaacaccacatcagggagtacagcaaagctcgtgtcgaaatatcgtccgactacacccatttttgcgttgacccccgacgaaaccgcctaccatcagttagcactttcttggggtgtggaacctttattaaccccaccagtccacaatgcggaagaaatgtttatgaatctcatcaacaccgccgtgagaacgggtttggtgcatgacggtgacaaggtagttattacttctggagtgccaattggtaaatcaggcacaactagtttaattaaagtgcattctattggacaaccaatcaccgcctaa

SEQ ID NO: 7263 - protein, 476 aa, Nostoc sp. PCC 7120
MRRTKIICTVGPATSAPERLEALVEAGMNVARLNFSHGAYDFHAQTAQYLRQISADRQKPVAIMQDLCGPKIRLGTLPPEGLMVEAGQEVTFVLQEKGSSLDELPLPLPTLFAMVRPGEPILINDGRVKLIVTDRDADRIRAIAKIGGLLSTRKGVNLPATRLPVSSITEKDLQDLRFGIDLSVDWVAVSFVRSPYDLEPAQRMIEAAGKTIRVIAKIERPEAVEQIDSIIDVADAIMIARGDLGVEMPIHEVPLIQKDIIRRCNQAGKPVITATQMLESMISAPDPTRAEATDVANSILDGTDAVMLSGETAVGQYPVAAVQVMHDIAVTTEKSLQEGSKHCLSHEAGGLSVTESVAEAVCRIAYETGAKAILCNTTSGSTAKLVSKYRPTTPIFALTPDETAYHQLALSWGVEPLLTPPVHNAEEMFMNLINTAVRTGLVHDGDKVVITSGVPIGKSGTTSLIKVHSIGQPITA

SEQ ID NO: 7264 - DNA, 1440 bp, Agrobacterium tumefaciens
  CDS (1)..(1440)
atgaagcgtaaccgcaaagtcaaaattcttgcaactctcggcccggcctcttccgaagaggccatgatcgaaaagctgcatcttgctggcgctgatcttttccggatcaacatgagccatgcgagccacgacgtgatgcggacgctcattcagcgtatccgctctgtcgaaagccgcaacggccgtcccatcggcattctggccgacctgcagggtcccaagctgcgcgtcggaaaattcgccgagacgaaggtcgatctggttccgggccagaccttcacgcttgataacaacgacacccccggcgacaacacccgcgttttcctgccgcatcctgaaattctcgaggcggtcaagcccggccaccgtctgctgatcgatgacggcaagctgcatctgcgcgctgaaaagagcgacggcaagagcatcgtcaccacggtcgtttccggcacccggatttccgaccgcaagggcatcagcctgcccgacaccctgctcggcgtcggcgttctgaccgacaaggaccgcgtcgacctcgatgccgttctcgagaccaacgaagtggactgggttgctctttccttcgttcagcgccctgaagacctggcagaagtgcgcaagatttcccgcggccgcgttggcctgatgtccaagatcgaaaagccgcaggctgttgaacgcatcgaggaaatcatcgagctttccgatgcattgatggttgcgcgcggcgatcttggcgtggaaatgccgttggaagccgttccgggcatccagaagcagctgacccgtgcctgccggcgcgccggcaaacccgtcgtcgttgccacccagatgctggaatcgatgataacggcaccggttccgacccgcgcggaagtatcggacgttgcaacggccgtattcgaaggcgccgacgccatcatgctctcggctgagtccgcttccggcgattatccgatcgaagccgtatcgaccatggcgtctatcgccagcacggtggaacaggacccctattattccaacatcatctacgcgcagcgtccgcagccggaagcaaccggtgccgacgccatttcgcttgccgcccgccagatcgctgaaacgctgaagcttgcggcgatcgtcacctatacgtcctcgggcacgaccggcctgcgcgccgcgcgcgagcggccgcaggtgccgatcattgcactgtcaccgatcatccagaccgcacgccgcctgtcggtcgtctggggcctgcactgcgtcgtcaccggcgatgccagcgatctggacgacatggtgaaccgcgcttgtcgcatcgttgtttccgaaggtttcggcaagcccggtgatcgcatcatcatttccgccggcgtgccgctcggcacccccggcgcaaccaacatggtgcgcatcgcctatatcggctcggacggccagagcggcgtctga

SEQ ID NO: 7265 - protein, 479 aa, Agrobacterium tumefaciens
MKRNRKVKILATLGPASSEEAMIEKLHLAGADLFRINMSHASHDVMRTLIQRIRSVESRNGRPIGILADLQGPKLRVGKFAETKVDLVPGQTFTLDNNDTPGDNTRVFLPHPEILEAVKPGHRLLIDDGKLHLRAEKSDGKSIVTTVVSGTRISDRKGISLPDTLLGVGVLTDKDRVDLDAVLETNEVDWVALSFVQRPEDLAEVRKISRGRVGLMSKIEKPQAVERIEEIIELSDALMVARGDLGVEMPLEAVPGIQKQLTRACRRAGKPVVVATQMLESMITAPVPTRAEVSDVATAVFEGADAIMLSAESASGDYPIEAVSTMASIASTVEQDPYYSNIIYAQRPQPEATGADAISLAARQIAETLKLAAIVTYTSSGTTGLRAARERPQVPIIALSPIIQTARRLSVVWGLHCVVTGDASDLDDMVNRACRIVVSEGFGKPGDRIIISAGVPLGTPGATNMVRIAYIGSDGQSGV

SEQ ID NO: 7266 - DNA, 1770 bp, Nostoc sp. PCC 7120
  CDS (1)..(1770)
atgcaattaagagattctgtacgccggacaaaaatcgtcgctacaattggccctgccactagtagccccgaaatgctgaaagccatcattgaagcgggtgcaacaacgctgcgactcaacttttcccacggttcccacgccgaccatcagcgtagtattcgcctaattcggcaaaccgcttttgaactaaatcagccagtggcaattctccaagatttgcaagggccaaaaattcgcttgggaaagtttgaaaacgggtctatagttttagctaaaggcgatcgcttcaccttaacaaatcgcccagttgttggtagtcaagaaattagctgtgtcacctacgattatttggcagatgaggtccctgtaggtgcaaaaatcctcctggatgatggccgtgtagaaatggtggtagaggatatcaaccgcgacaaaggggatttgaactgtcgggtgactgtagcaggtaagttatctaataacaaaggtgttaactttcctggcgtttatctctcaattaaagccatgaccgacaaagatcgtgaggatctgatgtttggtctagatcagggtgttgattgggtagccctttcctttgtccgcaatccgcaagacatcattgaaattaaagagctaatttccagcactggtaaacaagtgccggtagttgccaaaatagaaaagcatgaagcgatcgaacaaatggaagcagttctcgctttatgtgatggcgtaatggtggctagaggcgatttaggtgtagaactaccagcagaagatgtccccgtactacaaaagcgcttaattgccacagcaaaccgcttggggattcccatcatcactgctactcaaatgttagatagcatggtgagcaatccccgtcccacccgcgcggaagtgtccgatgtagccaatgccattcttgatggtacagatgcggtcatgctctccaatgaaacggctgtgggtagctacccagtggaagcagtggcgacaatggcaagaattgccgaacgcatcgagcaggaagaagctatggctagtaaattacgccaaatgcgagataaccgccgttctattcccaacgccatcagccaagctgtaggtcaaattgctgaacagttgggagcagcagcaattatgactctcacccaaacaggggcgactgcacgcaacgtttccaaattccgcccccaaacaccaatcttggcagtaacaccccacgttaacgtagctcgtcaactacaaatggtgtggggcgtaaaacctttgttggtcttagaattaccttccactggtcaaactttccaagccgccattaacgtcgcccaagagcatagtttactgtttgaaggtgatttagtcgtgatgacagccgggacgttacaaggggtatctggctcaacggacttgattaaagttgaagtggtaacggcagttctaggacagggaattggtctaggacagggtttggtaagcggttgtgctagggttgctcacaccgggatggatgtggggaactttaacgctggtgatattttggttgcaccccgcacaggtgcagattttgtcgaggcgattcgcaaagccggcgggattattacagaggatgaaagtttaactagtcatgcggcggtgattggtttacgcctgggtgtgccggtgattgtaggtgtgaagaaagccacgcaagttatccgtgatggagcaattttgactctggatttgcaacgaggtttagtttattccggagcagtaggaactccttaa

SEQ ID NO: 7267 - protein, 589 aa, Nostoc sp. PCC 7120
MQLRDSVRRTKIVATIGPATSSPEMLKAIIEAGATTLRLNFSHGSHADHQRSIRLIRQTAFELNQPVAILQDLQGPKIRLGKFENGSIVLAKGDRFTLTNRPVVGSQEISCVTYDYLADEVPVGAKILLDDGRVEMVVEDINRDKGDLNCRVTVAGKLSNNKGVNFPGVYLSIKAMTDKDREDLMFGLDQGVDWVALSFVRNPQDIIEIKELISSTGKQVPVVAKIEKHEAIEQMEAVLALCDGVMVARGDLGVELPAEDVPVLQKRLIATANRLGIPIITATQMLDSMVSNPRPTRAEVSDVANAILDGTDAVMLSNETAVGSYPVEAVATMARIAERIEQEEAMASKLRQMRDNRRSIPNAISQAVGQIAEQLGAAAIMTLTQTGATARNVSKFRPQTPILAVTPHVNVARQLQMVWGVKPLLVLELPSTGQTFQAAINVAQEHSLLFEGDLVVMTAGTLQGVSGSTDLIKVEVVTAVLGQGIGLGQGLVSGCARVAHTGMDVGNFNAGDILVAPRTGADFVEAIRKAGGIITEDESLTSHAAVIGLRLGVPVIVGVKKATQVIRDGAILTLDLQRGLVYSGAVGTP

SEQ ID NO: 7268 - DNA, 1401 bp, Thermotoga maritima
  CDS (1)..(1401)
atgcgaagtacaaagatcgtatgtacggtcggaccaagaacagacagctatgaaatgatagaaaagatgatagaccttggagtgaacgtcttcagaataaacacctcacatggtgactggaacgagcaggaacagaaaatactcaaaataaaagatctgagagagaaaaagaaaaaacccgtagccattctgatcgatcttgcggggccgaagatcagaaccggatacctcgaaaaagagtttgtggaattaaaagaaggccagatcttcactctcaccacaaaggaaatacttggaaacgaacacatagtctcggtgaatctcagctctcttccaaaggacgtgaagaaaggagacaccattctgctgagcgatggagagatagtgcttgaggtaattgaaacaaccgatacagaagtgaaaacagtggtgaaagtcggtggaaagatcacacacaggagaggtgtgaacgtaccgacggccgatctttcggtggaatccataacggacagagacagagaattcataaaactcggaacgttgcatgacgttgaatttttcgctctttcttttgtgagaaagccagaggacgtgctcaaggcaaaagaagagatcagaaaacacggaaaggaaatacctgtaatctccaaaatagaaacgaaaaaggctctggagcgtctcgaggagataataaaggtgagcgatggaatcatggtcgcacgcggtgacctgggagtggagatacccatagaagaagtccccatcgttcagaaagaaatcatcaaactctccaagtactactccaaaccagtcatagtcgcaactcagatactcgaatcgatgatagaaaatccgttccccacgagggcagaggtcaccgacatagccaacgccatcttcgatggagcggacgccctgctcctcacagcggaaacagcggttggaaaacatcccctggaagccataaaggtgctgagtaaagtagcaaaagaagccgaaaaaaaactggaatttttcagaacgatagaatacgataccagcgacatatctgaggctatatcacacgcctgctggcagctctctgaatctctgaacgcgaagctgatcatcacacctaccatatccgggagtaccgctgttcgtgtttcaaagtacaacgtttctcaacccattgtggccctgacaccagaagagaaaacctactacagactttctctcgtgaggaaggtgatacccgttctcgctgaaaaatgttcccaggaattagagtttatcgaaaaagggctgaagaaagtagaagaaatgggtttggcagaaaaaggggatctggtggttctcacttccggcgttccaggaaaggtgggaacgacaaacaccataagggtgttgaaggtggattga

SEQ ID NO: 7269 - protein, 466 aa, Thermotoga maritima
MRSTKIVCTVGPRTDSYEMIEKMIDLGVNVFRINTSHGDWNEQEQKILKIKDLREKKKKPVAILIDLAGPKIRTGYLEKEFVELKEGQIFTLTTKEILGNEHIVSVNLSSLPKDVKKGDTILLSDGEIVLEVIETTDTEVKTVVKVGGKITHRRGVNVPTADLSVESITDRDREFIKLGTLHDVEFFALSFVRKPEDVLKAKEEIRKHGKEIPVISKIETKKALERLEEIIKVSDGIMVARGDLGVEIPIEEVPIVQKEIIKLSKYYSKPVIVATQILESMIENPFPTRAEVTDIANAIFDGADALLLTAETAVGKHPLEAIKVLSKVAKEAEKKLEFFRTIEYDTSDISEAISHACWQLSESLNAKLIITPTISGSTAVRVSKYNVSQPIVALTPEEKTYYRLSLVRKVIPVLAEKCSQELEFIEKGLKKVEEMGLAEKGDLVVLTSGVPGKVGTTNTIRVLKVD

SEQ ID NO: 7270 - DNA, 1377 bp, Aeropyrum pernix
  CDS (1)..(1377)
atgagggggcctgtcaagatagtcgccacggtagggccatcatcatcctctgcctccatactagcacagatgctcagcctaggagttgatgtggctaggataaacgccagccacgggggtgtagagcagtggaatagcatgctggagtcgcttaggagggctgaggaggctgtcgggaagagggtcggagtggctgtcgacctagagggccctagggttaggactggtaacagcgagcctgttaagctggagaagggtgatctcgttacactaggcttcatggagggcgacgtgccggttgacgccagacagtttttcgaaacaatagacgagggcgatatagtgcttctcgacgacgggaagataatcctccaggtggagtctgtggaggggttccgggttaaagccagggttctagagggtggagtgctagggcctaggaagggcgtggttgttagaggtaaggagcccgatctcccgccactctcggctaaggataggagggcgctcgagttcttcgctgacaagggggtcagccacgtctatgtgagcttcgcccgcagtgctgaacatgttgagaaggttcgtaccgtggtgagaaggctcggactgaggcaggccaggattttcgccaagatagaggggcctagcggcgtgtctaggataggagagattgctgaggccagcgatggcgtgataatagctagaggagacctcgggatgcactacagcctagaggagctcccggagattcaggagcttatagtatgggaggctaggaagaggtacaagactgttgtgctagccacggagttcctgtcaagcatgatcgagaagccggtccccactagaagcgaggtagtcgatatataccaggcggtgcttcagacggcggacgcgctcatgctgacgggtgagactgccataggcaagtaccccgtcaagtctgtacagtggatggcaaagatatcctcccgagcctacaaaaagctggcgactagccccccggagaggcccaggcccacgtcgaccccctacaagctagcattggggcttgtagagctggcggagagcctcgactcccctctagtcgtctacagtaagaccggcaggttcgccgagaggcttgcaagcttcaagccgctcaaaaccttctacgtgggggtgcccagccgtgaggtggagagggttgtcagacacctctggggggctgagcccatagttgtgggcgattatccctacgaagcgggcctcgccaagacctatgagaagcttcgtagagagaacattatacacggtgatgaaaccgtggttgaggcggcctggagcagcgagaggggaatatacataatcagagttaggaacctggagttctag

SEQ ID NO: 7271 - protein, 458 aa, Aeropyrum pernix
MRGPVKIVATVGPSSSSASILAQMLSLGVDVARINASHGGVEQWNSMLESLRRAEEAVGKRVGVAVDLEGPRVRTGNSEPVKLEKGDLVTLGFMEGDVPVDARQFFETIDEGDIVLLDDGKIILQVESVEGFRVKARVLEGGVLGPRKGVVVRGKEPDLPPLSAKDRRALEFFADKGVSHVYVSFARSAEHVEKVRTVVRRLGLRQARIFAKIEGPSGVSRIGEIAEASDGVIIARGDLGMHYSLEELPEIQELIVWEARKRYKTVVLATEFLSSMIEKPVPTRSEVVDIYQAVLQTADALMLTGETAIGKYPVKSVQWMAKISSRAYKKLATSPPERPRPTSTPYKLALGLVELAESLDSPLVVYSKTGRFAERLASFKPLKTFYVGVPSREVERVVRHLWGAEPIVVGDYPYEAGLAKTYEKLRRENIIHGDETVVEAAWSSERGIYIIRVRNLEF

SEQ ID NO: 7272 - DNA, 1449 bp, Deinococcus radiodurans
  CDS (1)..(1449)
atgaaacactttgaccgtgccaccaaaatcgtggcgactgtcggccccgccagccgcagcaccgaagttctcgggcgcatgatcgacgttggcctgaacgtggtccgcctcaacttcagccacggcgacctcgaagaccaccgtcagacggtgcagatggtgcgtgacctcgccgtgagcaagggcgtgaccatcggtatcctgcaagacctgcaaggccccaagattcgggtgggccgctttgccgaaggttcggtgaccctgaatcccgggcagaagttcgtcatcacgatggacgaggtggagggcaatgccgagcgcgtgggcagcacctacaagggcctcgccggtgacgtgacccccggcatgacgctgctgctcgacgacggcaacatgagcctgcgggtggaccacgtgcgcggcaacgacattcagacgactgtcctgatcggcggcacgttgaaaaacaacaagggcatcaacgtgcccgaagccgacctgaccgtgcccgcactgtcggaaaaagatgtgcaggacatggaatttggcgcgagcctcggcgtggactgggtggccttgagcttcgtgcgctcgcgcgatgacctgctgctcgcccggcattacctcgcccgcttcggcagccgcgccaagctgatggccaaaatcgagaagccgcaggcggtggaccgcttcgccgacatcctcaaggaagtggacggcgtgatggtggcgcgcggcgacctcggtgtggaaatgcgccccgagcaggtgccgaccatccagaaacgcatcatccgcatgtgccgtgaggcgggcaagccggtcattacggccacccagatgctcgaaagcatgatcaacctgccgcgccccacccgcgccgaggcgtcggacgtggcgaacgctatttatgacggcaccgacgcggtgatgctttccgccgaatcggcggcgggccagtacccggtcgagtcggtcgctatgatggaccgtattgcccgcgaggccgaagcgagcgagctttaccagttgatgcagcgtcaggtcgtgatggacaccgagcaggcgcaggacgccattgcgctcgccgcctgcaacatcggggctaagctcgaagcgcccgccatcgtgacctttaccagcacgggcggggcggccacccgcatttccaagaaccgtccgccgctcgccatcgtcgcgctgacccccaacgagatcacccgcaaccagctcgcgctttcctggggcgtctaccccatgctcagcgaagaccccgaggacaccgatgacatggtacgcatcgccaacgacgagctgaaaaagagcggcctggccgacgtgggcgaccgctacgtgattacggcgggcgtgcccttcggcgtgcgcggcaccaccaatatgctgcgcgtggaaaagttgaaggccgaggacttgtcggaccgcgtttaa

SEQ ID NO: 7273 - protein, 482 aa, Deinococcus radiodurans
MKHFDRATKIVATVGPASRSTEVLGRMIDVGLNVVRLNFSHGDLEDHRQTVQMVRDLAVSKGVTIGILQDLQGPKIRVGRFAEGSVTLNPGQKFVITMDEVEGNAERVGSTYKGLAGDVTPGMTLLLDDGNMSLRVDHVRGNDIQTTVLIGGTLKNNKGINVPEADLTVPALSEKDVQDMEFGASLGVDWVALSFVRSRDDLLLARHYLARFGSRAKLMAKIEKPQAVDRFADILKEVDGVMVARGDLGVEMRPEQVPTIQKRIIRMCREAGKPVITATQMLESMINLPRPTRAEASDVANAIYDGTDAVMLSAESAAGQYPVESVAMMDRIAREAEASELYQLMQRQVVMDTEQAQDAIALAACNIGAKLEAPAIVTFTSTGGAATRISKNRPPLAIVALTPNEITRNQLALSWGVYPMLSEDPEDTDDMVRIANDELKKSGLADVGDRYVITAGVPFGVRGTTNMLRVEKLKAEDLSDRV

SEQ ID NO: 7274 - DNA, 1446 bp, Vibrio cholerae
  CDS (1)..(1446)
atgagctcaactttgcgtagaacaaaaatcgtcgccaccttaggtccttccacagaaagccctgaaattctcgaagccattatccgagccggagccaatgtcgttcggatgaatttttcacacggcaccgcggaagaccataaaaaccgtgcgcagaaagttcgcgaaattgccgccaaactcggtcgccacgtcgccttattaggtgatttacaaggtccaaaaattcgtgtttctactttcaaagaaggcaaaattatccttaatgaaggggaacacttcattcttgatgcggaattagccaaaggggaaggtacgcaagaaagcgtggggattgattacaaaaagctaccgcaagatgtttgtaacgacgatattttgctgcttgatgatggccgtgtgcagttacaagttatgcgagttgaaggcaataaaatccacaccaaagtcttggtcggcggtcctctctccaacaataaagggattaacaaaaaaggcggcggtttgtcggcagatgctttgactgagaaagacaaaaatgacattcgacttgcggcagaaattcaagttgagtacctcgcggtgtctttccctcgcaatggtgaagacatgaaattcgcgcgccgccttgcccaagaatctgggctttatgcgcgtatggtcgccaaagttgaacgcgcagaaaccgtctcttgtgatgaaaacattgatgatattgttcgtgcctcggatgtcatcatggtcgcacggggtgatctcggggtggaaatcggtgaccccgaactcatcgccgtacagaaaaagctgatttcacgcgcgaaaaaactcaaccgtgtggtgattaccgcaacgcaaatgatggaatcgatgatcagtaaccctatgccaacccgcgccgaagtcatggatgtggcgaatgcggtgctcgatggcactgacgctgtgatgctgtcgggagaaacggctgcgggcaaatatccggttgaaaccgtcaaagcgatggctgaagtctgcattggtgcagaaaagatgattgagtcgaatgagcaaaactatcgcattaaaagtgtgttccgcacggaagaagaagcgattgctatgtcgactatctatgcagccaaccacttagaaggcgttaaagccatggtcacgctcaccgaatcaggacgcaccgcattaatgacctcaaggctcaattccgtattcccgatttttgcgatgtctgccaaccaagcaaccctcaatcgctgcgcgttattgcgcggggtgatccctttctacttcgataccaaacaagccagcggtctggaagcagccattgcagcattagatgccctcaaagagcgaaacctactcgaagaaggggatctcgtgatcattacccaaggcgatattatgggagtcgaaggctccaccaactgtatgcgcatcttacctgtctattag

SEQ ID NO: 7275 - protein, 481 aa, Vibrio cholerae
MSSTLRRTKIVATLGPSTESPEILEAIIRAGANVVRMNFSHGTAEDHKNRAQKVREIAAKLGRHVALLGDLQGPKIRVSTFKEGKIILNEGEHFILDAELAKGEGTQESVGIDYKKLPQDVCNDDILLLDDGRVQLQVMRVEGNKIHTKVLVGGPLSNNKGINKKGGGLSADALTEKDKNDIRLAAEIQVEYLAVSFPRNGEDMKFARRLAQESGLYARMVAKVERAETVSCDENIDDIVRASDVIMVARGDLGVEIGDPELIAVQKKLISRAKKLNRVVITATQMMESMISNPMPTRAEVMDVANAVLDGTDAVMLSGETAAGKYPVETVKAMAEVCIGAEKMIESNEQNYRIKSVFRTEEEAIAMSTIYAANHLEGVKAMVTLTESGRTALMTSRLNSVFPIFAMSANQATLNRCALLRGVIPFYFDTKQASGLEAAIAALDALKERNLLEEGDLVIITQGDIMGVEGSTNCMRILPVY

SEQ ID NO: 7276 - DNA, 1740 bp, Halobacterium sp. NRC-1
  CDS (1)..(1740)
atgagaaacgcgaagatcgtctgtacgctcggccccgcgaccaacgacgacgcgtcggtgcgggcgctcgcggacgccggcatgacggtagcacggatcaacgccagccacggcgacgcggccgcgcgccgggagctcatcgagaccacgcgggccgtcgacgcccagaccgacaagccgcttgcggtgatgctcgacacccaaggcccggaggtcaggaccgcaccgatcgacgacgacggcaccatccacatcgaaaccggcagcgacgtggcgttcgtcgagggcgacaccgcgacccccgatcggatcgggatctccaccagcatcgcggccgccgaacccggtgacacggtgttgctcgacgacggccgcatcgaggccgacgtcgaccgcgtcgccggcgacacggtgcacgccaccgtggtgtccggcgggagcctcggcagccggaagggcgtcaacgtgccgggcgtcgagctggacgtggacgtcgtcaccgagaaggaccgccgcgatctggcgttggccgccgagctggacgtcgattacgtggcggcgagcttcgtccgggacgccgacgacgtgttggccgtcaaccgcgtcctggagtcccacggtgccgacatccccatcgtggcgaagatcgagcgggcgggtgccgtggagaacctggacggcatcatcgacgccgcccagggcgtgatggtggcgcgcggcgatctcggcgtggagtgtccgatggaggacgtgccgatgatccaaaagcgcatcatcgcgcagtgccgggacgcgggggtgccggtgatcaccgcgaccgagatgctggactcgatggtgcacgcccggcgtccgacgcgcgcggaggccagcgacgtggccaacgcggtcctggacggcaccgacggcgtgatgttgtccgcggagaccgcggtgggggacaaccccacgcgggttgtcgagacgatggaccgcatcgtgcgggaggtcgaaggcagcgcggagtacagcgagcgccaggagcaggcggtgccgacggccgacgggacggcgaagacggacgcgctggcgcggtcggcgcggtatctggcccgcgacatcgacgccagcgcggtggtggtggcctccgagtcggggtacaccgcccggaaggccgcgaagttccggcccagcgtcccggtggtctgtgcgacgccgtcccacgacgtgcgccggcagctcgcgctcaactggggggtccacgccaactacgcggcggtcgcggagggcgacgcgacgacggtcgtcgagcgcgcggtgcaggcggccgtcgactccggcgtggtggcgagcggcgacaccgtggtggtgctcgtgggcatgatgacggagcttgagggcgcatcgacgacgaacacgctgaaagtgcacgtggccgcggagacgctctcgaccgggcgggcggtcgtcgacgggcggacgaccggccggacgtaccgtgccgacagcggggatctcagcgacgccccggagaacgcggtggtgctgttggcgcacgggttcgacggcgagttcgacggcgatctctcgaagatcggggcgatcgtgagcgcggacgccgggctgaccgggtatccggcggtgatcgcgcgcgaactcgacgtgccgatggtcggcgatgtcgacgtggacgcggtgccggctggcgatctggtgaccgtggacggcgagcgcggcgtcgtctacgaggccgatcagtga

SEQ ID NO: 7277 - protein, 579 aa, Halobacterium sp. NRC-1
MRNAKIVCTLGPATNDDASVRALADAGMTVARINASHGDAAARRELIETTRAVDAQTDKPLAVMLDTQGPEVRTAPIDDDGTIHIETGSDVAFVEGDTATPDRIGISTSIAAAEPGDTVLLDDGRIEADVDRVAGDTVHATVVSGGSLGSRKGVNVPGVELDVDVVTEKDRRDLALAAELDVDYVAASFVRDADDVLAVNRVLESHGADIPIVAKIERAGAVENLDGIIDAAQGVMVARGDLGVECPMEDVPMIQKRIIAQCRDAGVPVITATEMLDSMVHARRPTRAEASDVANAVLDGTDGVMLSAETAVGDNPTRVVETMDRIVREVEGSAEYSERQEQAVPTADGTAKTDALARSARYLARDIDASAVVVASESGYTARKAAKFRPSVPVVCATPSHDVRRQLALNWGVHANYAAVAEGDATTVVERAVQAAVDSGVVASGDTVVVLVGMMTELEGASTTNTLKVHVAAETLSTGRAVVDGRTTGRTYRADSGDLSDAPENAVVLLAHGFDGEFDGDLSKIGAIVSADAGLTGYPAVIARELDVPMVGDVDVDAVPAGDLVTVDGERGVVYEADQ

SEQ ID NO: 7278 - DNA, 1437 bp, Haemophilus influenzae
  CDS (1)..(1437)
atgtctagaagactaagaagaacgaagattgtatgtactatgggcccatcaactgaccgtgataacaatcttgaaaaaattatcgcagcgggcgcaaacgtagttcgtatgaacttctctcacggtacacctgatgaccatatcggacgtgctgaacgtgtacgttctattgcgaaaaaattaggtaaaaccgtggcaatcttaggtgatttacaaggtcctaaaattcgtgtttctacttttaaagacggtaaaattttcttaaacgttggcgataaattcattcttgatgcagagttaccaaaaggcgaaggcactcaagaatccgttggtttagactataaaacgcttcctcaagatgttgtgccgggcgatattcttttattagatgatggccgtgttcaattaaaagtattatcaactgatggtgcaaaagttttcactgaagttactgttggtggtccattatcaaataataaaggtatcaataaattaggtggcggtttatctgcggatgccctaacagaaaaagataaagccgacattattaccgctgcacgcattggtgttgatttcttagccgtttctttccctcgttcaagtgcagatttaaattatgcacgtgaacttgctcaacaagcaggtttaaatgcaaaaatcgttgctaaagttgaacgtgcagaaaccgttgctaatgatgaagccatggacgatattattttagcctctgatgtaattatggttgcacgtggtgacttaggtgtagaaatcggcgatcctgaattagtcggtgtacagaaaaaattaatccgtcgttcacgtcaattaaatcgtgctgtaattacagcgactcaaatgatggaatcaatgattagtaacccaatgccaactcgtgctgaagtaatggacgttgcaaacgcagtattagatggaactgatgcagttatgctttctgcagaaacagcagctggtcaatatccttctgaaacagtggcagcaatggctagcgtatgtttaggtgcagaaaaaatgccaagcattaacgtttctcgtcaccgtatggataaagaatttgaaactattgaagaatctgttgcgatgtctgcaatgtatgcagcaaaccacatgaaaggtgtagcggcaatcgtcactttaagtagcacaggccgtactccattattaatgtcacgcattagctctggcttaccaatctttgctttatctcgtaatcaagaaaccctaaacctttgtgcactataccgcggtgtaacaccaatttatcacggcgaagaaagtcgtacagaagctggtgcaaaagcagcacctcaatcattaaaagaaaaaggttatttatctactggcgatttagtgctggtaacccaaggtggtcaaggtgcgacacaaactaacgtatgtcgtacattaattgttgaataa

SEQ ID NO: 7279 - protein, 478 aa, Haemophilus influenzae
MSRRLRRTKIVCTMGPSTDRDNNLEKIIAAGANVVRMNFSHGTPDDHIGRAERVRSIAKKLGKTVAILGDLQGPKIRVSTFKDGKIFLNVGDKFILDAELPKGEGTQESVGLDYKTLPQDVVPGDILLLDDGRVQLKVLSTDGAKVFTEVTVGGPLSNNKGINKLGGGLSADALTEKDKADIITAARIGVDFLAVSFPRSSADLNYARELAQQAGLNAKIVAKVERAETVANDEAMDDIILASDVIMVARGDLGVEIGDPELVGVQKKLIRRSRQLNRAVITATQMMESMISNPMPTRAEVMDVANAVLDGTDAVMLSAETAAGQYPSETVAAMASVCLGAEKMPSINVSRHRMDKEFETIEESVAMSAMYAANHMKGVAAIVTLSSTGRTPLLMSRISSGLPIFALSRNQETLNLCALYRGVTPIYHGEESRTEAGAKAAPQSLKEKGYLSTGDLVLVTQGGQGATQTNVCRTLIVE

SEQ ID NO: 7280 - DNA, 1434 bp, Borrelia burgdorferi (Lyme disease spirochete)
  CDS (1)..(1434)
atgatttcaaagttaacaaaaattgtagcaacaatatctgatcttagatgcgaaccagaacatataaaagatttacacgatgcaggggtaaatgttataagactaaatactgctcatcaatcacacgaagatacaataaaagtaatagacaatgttagaaaaatttcaaataaaatagctttaatgattgatacaaaaggaccagaagttagaacagcaaatattgaaaatcctattattgtaaaaactggagacaaggtaatcatttcaacctcgcctattaatgagcctaataactttcaaaccaattatgatggatttgttaaagaagtaccccaaggatctaaagtgctaattgatgacggtgaacttgaaatgactgttgttgccaaattgcctgacagattaatttgtgaaattaaaaatgacggccaaattaaaaataaaaaatcaatcaatacccccggaatttctcttaagctacaatcagtaaccgaaaaagacaaaggatttattgagcttgcagcaaaatataatgttgattttattgcccattcgtttgtaagacattccaaagacgttcaagatgttcaagaaattttaactgcctctggaaatcctgatgtaaaaattatatccaaaatcgaaaatcaagagggaattgacaacattgaagaaattgcaaaagcttcttacggaataatggttgcaaggggagacatgggagttgaaattcctgcagaagatgtacccattgctcaacttaaaataacacaaacctgtataaagtatggaatacccgtgattacagcaactcaaatgcttcatacaatgattgaaaatccaagacctactagagcagaagtgtctgacatcgctaacgctattttaaacggcacagacgcaattatgttatccggagaaaccgcctacgggaaatatccaattgaagctgtaaaaatgatgacaagcattgctaaaaaagttgaaaaacacagaaaaatgaccttatataaggatgaacttttttacgataaaagtatcacaagaaactatattatcaaatgtgcaattgatgccacaaaacttatggacataaaagcaattattgtagattctctaaaaggcaaaaccgcaagaataatggcaacctacagagcaagtgttccattattcattacaacaaatagcgaaagactagcaagagaattagcattatcttacggggtttattctaatcttgtagacaataatttcaaaagaactaccgaatttgtagtaacttctcttaaaatgttaaaagaacaaggtgttgttaatgacaaagatactgtaataattatttctggaaatccaaatagaaatattgaaaaaggaacagaatttatggaaataaacacagtagaagatgcaatcaaaggacgaaatatataa

SEQ ID NO: 7281 - protein, 477 aa, Borrelia burgdorferi (Lyme disease spirochete)
MISKLTKIVATISDLRCEPEHIKDLHDAGVNVIRLNTAHQSHEDTIKVIDNVRKISNKIALMIDTKGPEVRTANIENPIIVKTGDKVIISTSPINEPNNFQTNYDGFVKEVPQGSKVLIDDGELEMTVVAKLPDRLICEIKNDGQIKNKKSINTPGISLKLQSVTEKDKGFIELAAKYNVDFIAHSFVRHSKDVQDVQEILTASGNPDVKIISKIENQEGIDNIEEIAKASYGIMVARGDMGVEIPAEDVPIAQLKITQTCIKYGIPVITATQMLHTMIENPRPTRAEVSDIANAILNGTDAIMLSGETAYGKYPIEAVKMMTSIAKKVEKHRKMTLYKDELFYDKSITRNYIIKCAIDATKLMDIKAIIVDSLKGKTARIMATYRASVPLFITTNSERLARELALSYGVYSNLVDNNFKRTTEFVVTSLKMLKEQGVVNDKDTVIIISGNPNRNIEKGTEFMEINTVEDAIKGRNI

SEQ ID NO: 7282 - DNA, 1413 bp, Vibrio cholerae
  CDS (1)..(1413)
atgaaaaagaccaaaatcgtatgtacgattggcccaaaaactgagtctgtagagaaactgactgagcttgtaaacgctggcatgaatgttatgcgtctcaacttctctcacggtgactacgttgaacacggcactcgtatcactaacttccgtaaagtgatggaagtgaccggtaaacaactggcgatcctactggatactaaaggtccagagatccgtactatcaagctggaaaacggtgacgatgtggatctggtcgctggccaagagttcactttcacaactgacacgaaagttgttggtaacaaagagcgcgtagcagtcacttactctggttttgcaaaagacctgaacgtgggcaaccgtattctggttgacgacggtcttatagagatggaagtactggcgaccactgacactgaagtgaagtgtaaagttctgaacaacggcgctctgggtgaaaacaaaggtgttaacctgccaggcgtttctgtcaatctgccagcgctgtctgaaaaagacaaaaacgacctgaaatttggttgtgagcaaggcgttgatttcgttgctgcctctttcatccgtaaaggttctgacgtgaaagaaatccgtgaagtattagcttctcacggcggtcaaaacattcaaatcatctctaaaatcgaaaaccaagaaggcttggacaacttcgatgagatccttgagctgtctgacggcatcatggttgcacgtggcgacctaggtgtagaaatcccagcagaagaagttatcttcgctcaaaagatgatgatcgagaaatgtaaccgtgcacgtaaagtggttatcacggcgacgcaaatgctggattcaatgatcaagaacccacgtccaactcgcgcagaagcgggcgacgttgcgaacgcgatcatggatggtactgatgctgtaatgctttctggcgaaacagcaaaaggtaagtacccagttgaagcggtgaagatcatggcgcaaattgctgagcgtactgaccctgtactgaaagcagaactgggttcacgcctagacagcccacgtctacgtatcactgaagccgtatgtaaaggtgcagtagacaccgcagagaaactggcagcgccactgatcatcgtagcaactgaagcgggtaaatctgctcgttcagttcgtaagtacttcccaacggctaacattattgcagtcaccaccaacaagaaaacagcagctcagttagtgctttctaaaggtgtaacgccagttgtggttgacgcgattgacaacactgacgctttctaccacctaggtaaagagattgcgctgcaatctggccttggcaagaaaggcgacatcgtagtgatggtttcaggcgcactggttgcttctggcacaacgaacactgcatcagtacacgtactgtaa

SEQ ID NO: 7283 - protein, 470 aa, Vibrio cholerae
MKKTKIVCTIGPKTESVEKLTELVNAGMNVMRLNFSHGDYVEHGTRITNFRKVMEVTGKQLAILLDTKGPEIRTIKLENGDDVDLVAGQEFTFTTDTKVVGNKERVAVTYSGFAKDLNVGNRILVDDGLIEMEVLATTDTEVKCKVLNNGALGENKGVNLPGVSVNLPALSEKDKNDLKFGCEQGVDFVAASFIRKGSDVKEIREVLASHGGQNIQIISKIENQEGLDNFDEILELSDGIMVARGDLGVEIPAEEVIFAQKMMIEKCNRARKVVITATQMLDSMIKNPRPTRAEAGDVANAIMDGTDAVMLSGETAKGKYPVEAVKIMAQIAERTDPVLKAELGSRLDSPRLRITEAVCKGAVDTAEKLAAPLIIVATEAGKSARSVRKYFPTANIIAVTTNKKTAAQLVLSKGVTPVVVDAIDNTDAFYHLGKEIALQSGLGKKGDIVVMVSGALVASGTTNTASVHVL

SEQ ID NO: 7284 - DNA, 1755 bp, Bacillus halodurans
  CDS (1)..(1755)
atgcgaaagacaaaaatcgtttgtacgatcggtccggcgagtgaaagtgtagaaaagttagaacaattaatggaagcaggcatgaatgttgcgcggttaaatttttcccatggggactttgaagagcacggtgcacgaatcaaaaacattcgagaagcagcgaaacgtatcggaaaaacagttgcaattttacttgatacaaaaggaccggaaattcgtacccaaacccttgaagggggcgtggccgaattaaaggcagggcaagagcttgtcatctctatgaaggaggttgtaggtacgagtgagcgtatttctgtcacatatccgggcctagttcatgatgttgtaccaggtgcaaaaattttattagatgatgggttaattgggctagaagtcgttgaggttcgcgatcaagagattttgacaaaagtcttgaacagcggcacattgaaaaataaaaaaggtgtcaatgtcccgaacgtaagcgtcaacctgcctggaatcacagaaaaagacgcagcggatatcaagtttgggatagagcaaggcgtcgatttcattgcagcttcattcgttcgcagagcgcaagatgtactagaaattcgcgaattgcttgagcagcacggggcagagcatattaaaatcatccctaagatcgagaatcaagaaggcgttgataacatcgaggaaattcttgaagtatcagacggtttgatggtggcccgcggagatctaggggtagagattcctgctgaggaagttccacttgtgcaaaagtcgcttattaagaaatgcaaccttgtagctaaacctgttattacagcgacacagatgcttgactcgatgcagcgtaacccacgtccaactcgagccgaagctagtgatgtagcgaatgcgatttttgatggaacggatgcgatcatgctttccggtgaaaccgcagctggggattatccagtcgaggcggttcagacgatgagccgaattgcagagcgtgcagagcaagccctaaactatcaagaaatcttgtccaagcatacaaaagaagcgagaacgacgattacgagtgctattagtcaatcggttggccacacagcattcaacttgaatgcaagtgcaatcttgacggcgactgaaagcggccatacagctcgcgtagtagcgaaataccgcccgaaatcaccaattgtagcagttacaagtaacgaaacagttgttcgtcaactcgctctcgtttggggagtgtattcaatccttggagaagaggcagagacgacggatgatatgcttcaagtgaccgttgagacagcgttaaagtcccaattggtgaaacaaggggatcttgtcgtcatcacggcaggtgttccagtgggagagacaggaacgacgaacattatgaaagttcacgtcattggtgaagtggtcgcgaaaggtcaaggcattggacgcgacacggtgaacggcaaagtcgtcattgctgctaatgcagaggaagcaaatgcaaaggttgaagaagggtcgattttagttactttcagcacggataaggatatgatgccagcctttgaaaaagcagccgccgtcattaccgaagaaggtgggattacatcccatgccgcagttgttggtctaagtcttaatacacctgtgatcgtcggtgtacaaaatgcgtctgcgctctttaaagatggggaagaaataacggtcgatacgagccgcggtgacatttacagagggcaagcaagtgtactataa

SEQ ID NO: 7285 - protein, 584 aa, Bacillus halodurans
MRKTKIVCTIGPASESVEKLEQLMEAGMNVARLNFSHGDFEEHGARIKNIREAAKRIGKTVAILLDTKGPEIRTQTLEGGVAELKAGQELVISMKEVVGTSERISVTYPGLVHDVVPGAKILLDDGLIGLEVVEVRDQEILTKVLNSGTLKNKKGVNVPNVSVNLPGITEKDAADIKFGIEQGVDFIAASFVRRAQDVLEIRELLEQHGAEHIKIIPKIENQEGVDNIEEILEVSDGLMVARGDLGVEIPAEEVPLVQKSLIKKCNLVAKPVITATQMLDSMQRNPRPTRAEASDVANAIFDGTDAIMLSGETAAGDYPVEAVQTMSRIAERAEQALNYQEILSKHTKEARTTITSAISQSVGHTAFNLNASAILTATESGHTARVVAKYRPKSPIVAVTSNETVVRQLALVWGVYSILGEEAETTDDMLQVTVETALKSQLVKQGDLVVITAGVPVGETGTTNIMKVHVIGEVVAKGQGIGRDTVNGKVVIAANAEEANAKVEEGSILVTFSTDKDMMPAFEKAAAVITEEGGITSHAAVVGLSLNTPVIVGVQNASALFKDGEEITVDTSRGDIYRGQASVL

SEQ ID NO: 7286 - DNA, 1443 bp, Buchnera sp
  CDS (1)..(1443)
atgttaaatcgattaagaagaacaaaaatcgtagctactttaggaccttctacagacattaataataatttagaaaaaataattcgttctggagtaaatgttcttcgatttaatttctctcatggttcaaaagatgaacataaatccagagcaaatcaagctcgagaaataatgactcgtttaaattttcacattgcattgcttggcgatttacaaggtcctaaaattcgcatttctaaatttataaaaaataatatttttttgaatgttggtgatttttttatattagatgcgaatttagatcaaaataatggaaatcaagaacgggtaggaattgattataaacagttaccatatgatctaaaagtaggtgatgtattattattagatgatggaagaatacaattaaaggttataaaatcaactggtcatgaaatattaacaaaagttgttatcggcggaatactttctaacaataaaggcattaataaactaggtggtggtttatctgcagatgcgttaactgaaaaagacaagaaggatataatcctagcaactgaaattaatgtagactatttagcaatatctttcccacgatgcagtaatgacttgaaacaagcaagaaaattagctaaagaatttggtagcaatgctaaaattatcgctaaaatagaacgtgctgaagctgtattaaatcaaaatactatcgaagatataattttagcatcagatgcaattatgatagctagaggcgatttaggtgtggaaattggagattctgaattagcaggtattcaaaaaaaattaatacgaactgctaggcaattaaatagaatagtaattactgctacacagatgatggaatctatgattactaacccattacctactcgtgcagaagttatggatgtagctaatgctgttttagatggcagtgatgcagttatgctttcggctgaaacagcatcaggcgaatatccagctgaaactgttataaaaatggcaaaaatttgcaaaggtgcagaaaaagttcctagtattaatgtatctagacatcgtattcatgcaaaatttgatgatattgaagaagcaattgctatgtccgcaatgtatgttgctaatcatttgaaaggtattacagcaattataacgatgacagaatcaggtaagactgcactaatgacatcgaggattacatctggattgcctatttttgctttatcaaaaaataaagaaactttaaatttagcaagtctttatagaggtgtgactcctatatattttaatagtaaaaataataattttaaagctgcgaatgaagcaattgttcttttacgtaaacgaggttttttatgtcgtggcgagttagttattataactcaaggtgatattatgggaaaaatcggaaaaactaatactagtagaattttaaaagtagtatga

SEQ ID NO: 7287 - protein, 480 aa, Buchnera sp
MLNRLRRTKIVATLGPSTDINNNLEKIIRSGVNVLRFNFSHGSKDEHKSRANQAREIMTRLNFHIALLGDLQGPKIRISKFIKNNIFLNVGDFFILDANLDQNNGNQERVGIDYKQLPYDLKVGDVLLLDDGRIQLKVIKSTGHEILTKVVIGGILSNNKGINKLGGGLSADALTEKDKKDIILATEINVDYLAISFPRCSNDLKQARKLAKEFGSNAKIIAKIERAEAVLNQNTIEDIILASDAIMIARGDLGVEIGDSELAGIQKKLIRTARQLNRIVITATQMMESMITNPLPTRAEVMDVANAVLDGSDAVMLSAETASGEYPAETVIKMAKICKGAEKVPSINVSRHRIHAKFDDIEEAIAMSAMYVANHLKGITAIITMTESGKTALMTSRITSGLPIFALSKNKETLNLASLYRGVTPIYFNSKNNNFKAANEAIVLLRKRGFLCRGELVIITQGDIMGKIGKTNTSRILKVV

SEQ ID NO: 7288 - DNA, 1344 bp, Methanococcus jannaschii
  CDS (1)..(1344)
atggtgggaatgatgagaaaaactaaaattttagtcactttaggaccatccttagaaaataaattagataaagcaataaatttgatagatggagttagatttaacatgtctcatgccacaacagattattgtgaaaagtttttgaatatattggaaaaaaataatatcgccaaagttatggatttgaagggaataaaaattagaattaaagaagttaaattaaaaaataaaatattaaaaatgggggagaaggttgttattggagaggatataaagctcaactacaatatagacacaattgaagaagggcattttattttaataaacgatgggaaaattaagctaagagttgtagaaaaaactgataaaattatcgcagttgtagaagttgggggagagattaaagaaggtatgggagttaatcttccagatacaaggatagaactcccaataattgatgaaactgatttgaagaatataaaattcgctgtagaaaaggactttgaatatattgctttatcatttgttaggaataaggaagatgttaaggaattaaaagatattatatcagaatacaaaggagattgtgaggtaatatcaaaaatagaaactaaggagggattaaagaatataaaagagatagcaagagaaagtgatggagtgatggtagcaaggggagatttgggtgtagaggttccaatagaaaatattccaattgaacaaaagaatatattgagaatagctaatagatatggaattttgtcaataacagccacacaaatattggattctatgataaacaatccatttccaacaagagctgaggttacagacatagctaatgccatatacgatggaactgactgcttaatgctctccaacgaaacaactattggaaaatacccaatagaggcgataaaggtattaaataaggttgccaaagtggcagatgaacattatgaggagtttggtgatagagtttgtttagaggttgagagcattgatgaaggtttagtatatgctgtttatgagctatataagaagctaaatactaagttagttataactccaacatattctggaagaactgctaagttaatatctaaattaaggataaatagtaaaataatagctccaacgccaaatataagaactttaaaaaggttgagattggtttggggagttgaaagctgtttgatggaagaatttgatgatatggagaaaataatcaacacctgtagagaaatggctaaaaaagaaattggaaaggggatttacttaatcacattaggtcatccaataggtcaaaagaaaactaacactataaaagttgaaagtatctaa

SEQ ID NO: 7289 - protein, 447 aa, Methanococcus jannaschii
MVGMMRKTKILVTLGPSLENKLDKAINLIDGVRFNMSHATTDYCEKFLNILEKNNIAKVMDLKGIKIRIKEVKLKNKILKMGEKVVIGEDIKLNYNIDTIEEGHFILINDGKIKLRVVEKTDKIIAVVEVGGEIKEGMGVNLPDTRIELPIIDETDLKNIKFAVEKDFEYIALSFVRNKEDVKELKDIISEYKGDCEVISKIETKEGLKNIKEIARESDGVMVARGDLGVEVPIENIPIEQKNILRIANRYGILSITATQILDSMINNPFPTRAEVTDIANAIYDGTDCLMLSNETTIGKYPIEAIKVLNKVAKVADEHYEEFGDRVCLEVESIDEGLVYAVYELYKKLNTKLVITPTYSGRTAKLISKLRINSKIIAPTPNIRTLKRLRLVWGVESCLMEEFDDMEKIINTCREMAKKEIGKGIYLITLGHPIGQKKTNTIKVESI

SEQ ID NO: 7290 - DNA, 1413 bp, Escherichia coli
  CDS (1)..(1413)
atgaaaaagaccaaaattgtttgcaccatcggaccgaaaaccgaatctgaagagatgttagctaaaatgctggacgctggcatgaacgttatgcgtctgaacttctctcatggtgactatgcagaacacggtcagcgcattcagaatctgcgcaacgtgatgagcaaaactggtaaaaccgccgctatcctgcttgataccaaaggtccggaaatccgcaccatgaaactggaaggcggtaacgacgtttctctgaaagctggtcagacctttactttcaccactgataaatctgttatcggcaacagcgaaatggttgcggtaacgtatgaaggtttcactactgacctgtctgttggcaacaccgtactggttgacgatggtctgatcggtatggaagttaccgccattgaaggtaacaaagttatctgtaaagtgctgaacaacggtgacctgggcgaaaacaaaggtgtgaacctgcctggcgtttccattgctctgccagcactggctgaaaaagacaaacaggacctgatctttggttgcgaacaaggcgtagactttgttgctgcttcctttattcgtaagcgttctgacgttatcgaaatccgtgagcacctgaaagcgcacggcggcgaaaacatccacatcatctccaaaatcgaaaaccaggaaggcctcaacaacttcgacgaaatcctcgaagcctctgacggcatcatggttgcgcgtggcgacctgggtgtagaaatcccggtagaagaagttatcttcgcccagaagatgatgatcgaaaaatgtatccgtgcacgtaaagtcgttatcactgcgacccagatgctggattccatgatcaaaaacccacgcccgactcgcgcagaagccggtgacgttgcaaacgccatcctcgacggtactgacgcagtgatgctgtctggtgaatccgcaaaaggtaaatacccgctggaagcggtttctatcatggcgaccatctgcgaacgtaccgaccgcgtgatgaacagccgtctcgagttcaacaatgacaaccgtaaactgcgcattaccgaagcggtatgccgtggtgccgttgaaactgctgaaaaactggatgctccgctgatcgtggttgctactcagggcggtaaatctgctcgcgcagtacgtaaatacttcccggatgccaccatcctggcactgaccaccaacgaaaaaacggctcatcagttggtactgagcaaaggcgttgtgccgcagcttgttaaagagatcacttctactgatgatttctaccgtctgggtaaagaactggctctgcagagcggtctggcacacaaaggtgacgttgtagttatggtttctggtgcactggtaccgagcggcactactaacaccgcatctgttcacgtcctgtaa

SEQ ID NO: 7291 - protein, 470 aa, Escherichia coli
MKKTKIVCTIGPKTESEEMLAKMLDAGMNVMRLNFSHGDYAEHGQRIQNLRNVMSKTGKTAAILLDTKGPEIRTMKLEGGNDVSLKAGQTFTFTTDKSVIGNSEMVAVTYEGFTTDLSVGNTVLVDDGLIGMEVTAIEGNKVICKVLNNGDLGENKGVNLPGVSIALPALAEKDKQDLIFGCEQGVDFVAASFIRKRSDVIEIREHLKAHGGENIHIISKIENQEGLNNFDEILEASDGIMVARGDLGVEIPVEEVIFAQKMMIEKCIRARKVVITATQMLDSMIKNPRPTRAEAGDVANAILDGTDAVMLSGESAKGKYPLEAVSIMATICERTDRVMNSRLEFNNDNRKLRITEAVCRGAVETAEKLDAPLIVVATQGGKSARAVRKYFPDATILALTTNEKTAHQLVLSKGVVPQLVKEITSTDDFYRLGKELALQSGLAHKGDVVVMVSGALVPSGTTNTASVHVL

SEQ ID NO: 7292 - DNA, 1434 bp, Pseudomonas aeruginosa
  CDS (1)..(1434)
atgacagccgacaagaaagccaagatcctcgccaccctcggcccggccacccgcagccgcgacgatatccgtgccctggtggaggccggcgccaacctgctccgcctgaacttcagccacggcgactatgccgatcacgcgcagcgcttcgcctgggtgcgcgaggtggaagcggagctgaactacccgatcggcgtgctcatggacctgcagggtccgaagctgcgggtcggccgcttcgccgccggtgccgtgcaattgcagcgtgggcagaccttcaccctcgacctcagcgacgcccccggcgacgagcggcgggtcaacctgccgcatccggagatcatccatgccctggaaccgggcatgagcctgctgctggacgacggcaagatccgcctggaagtggtcaactgccacagcgacgccatcgagacccgcgtggcggtgggtggcgagctgtccgatcgcaagggcgtcaacgtgccggaagcggtgctgcaactcagcccgctgaccgacaaggaccgccgcgatctggccttcggcctggaactgggggtcgactgggtggcgctgtccttcgtgcaacgcccggaggacatcgacgaggcccgtgggctgatcggcgacaaggccttcctcatggccaagatcgagaagcccagcgcggtgagcgccatcgaggcgatcgccgagcgcgccgacgcgatcatggtggcgcgcggcgacctcggcgtagaggtgccggcggagagcgtgccaggcatccagaaacgcatcgtccaggtctgccgccagctcggcaagccggtggtggtggccacccagatgctcgagtcgatgcgcttctcccccgccccgacccgcgccgaggtgaccgacgtagccaccgcggtgggcgccggcgccgacgcggtgatgctctcggcggaaaccgcttccggacaataccctcgcgaggcggtagagatgatggcgaagatcgtccgccaggtggaggccgagccggactaccacgtccagctcgaggtcaaccgtccgcagcccgacgctaccgtctccgatgcgatcagctgcgcgatccgccgggtcagccggatcctcccggtggcggtgctggtgaactacaccgagtcgggcaactcgaccctgcgcgccgcccgcgagcggcccaaggcgccgatcctcagcctgaccccgaacctgcgtaccgcgcggcgactgaccgtggcctggggcgtgtattcggtggtcaacgagcaactggcgcacgtcgacgagatctgctcgaccgccctcgacatcgccctggcccagcgcatggcgcgccgcggcgacaccgtggtggtcaccgccggcgtaccgttcggtcgccccggctcgaccaacatgctgcgcatcgagaccgtggcgccgccgctgggagatctctga

SEQ ID NO: 7293 - protein, 477 aa, Pseudomonas aeruginosa
MTADKKAKILATLGPATRSRDDIRALVEAGANLLRLNFSHGDYADHAQRFAWVREVEAELNYPIGVLMDLQGPKLRVGRFAAGAVQLQRGQTFTLDLSDAPGDERRVNLPHPEIIHALEPGMSLLLDDGKIRLEVVNCHSDAIETRVAVGGELSDRKGVNVPEAVLQLSPLTDKDRRDLAFGLELGVDWVALSFVQRPEDIDEARGLIGDKAFLMAKIEKPSAVSAIEAIAERADAIMVARGDLGVEVPAESVPGIQKRIVQVCRQLGKPVVVATQMLESMRFSPAPTRAEVTDVATAVGAGADAVMLSAETASGQYPREAVEMMAKIVRQVEAEPDYHVQLEVNRPQPDATVSDAISCAIRRVSRILPVAVLVNYTESGNSTLRAARERPKAPILSLTPNLRTARRLTVAWGVYSVVNEQLAHVDEICSTALDIALAQRMARRGDTVVVTAGVPFGRPGSTNMLRIETVAPPLGDL

SEQ ID NO: 7294 - DNA, 1509 bp, Lactococcus lactis subsp. lactis
  CDS (1)..(1509)
atgaataaacgtgtaaaaatcgtctcaactcttggacctgctgtcgaaattcgtggtggcaaaaaatttggtgaaagcggctattggggagaatctcttgacgtcgaagcatcagcaaaaaacattgcagctttgattgaagaaggcgcaaatgtcttccgtttcaacttctcacacggtgaccatcctgaacaaggtgctcgtatggcaacagttcaccgcgctgaagaaatcgctggtcataaagtaggtttcttgcttgatactaaaggtcctgaaatgcgtacagaactctttgctgacggtgctgatgcaatcagcgttgttactggagataaattccgcgttgcaactaaacaaggtcttaaatcaactcctgaattgattgctttgaacgtagctggtggtcttgatatctttgatgatgttgaaatcggtcaaactattttgattgacgatggtaaacttggtttgtcattgactggtaaagatgcagcaactcgtgagtttgaagttgaagcacaaaatgatggcgttattggtaaacaaaaaggtgttaacattcctaacactaaaattcctttcccagctcttgctgaacgtgatgatgcggatatccgtttcggactttcacaacctggtggaatcaactttatcgctatctcattcgtacgtactgcaaatgacgttaaagaagtacgtcgtatttgtgaagaaactggaaatccacacgtacaacttttggctaaaattgaaaaccaacaaggtatcgaaaaccttgatgaaatcatcgaagcagctgatggtatcatgattgctcgtggtgacatgggtatcgaagttccatttgaaatggttccagtttaccaaaaattgatcatcagcaaagttaacaaagcaggtaaaatcgttgttactgcaacaaacatgcttgaatcaatgacttacaacccacgtgctactcgttcagaaatttcagacgtattcaacgctgttattgacggaactgacgcaacaatgctttcaggtgaatctgctaatggtaaatacccacgcgaatcagttcgtacaatggctactgttaacaaaaatgctcaaacaatgttgaaagaatacggacgtcttcacccagaacgttacgacaaatcaactgtaacagaagtagttgctgcatcagttaaaaacgctgcagaagctatggatatcaaattgattgttgctttgactgaatcaggtaacactgctcgtttgatttctaaacaccgtcctaatgctgatatcttggctattacatttgacgaaaaagttgaacgtggattgatgattaactggggtgtaatcccaacaatgactgaaaaaccttcatctacagatgacatgtttgaagttgctgaaaaagttgctttggcttcaggtttagttgaatctggtgacaatatcatcatcgttgctggtgttccagttggtactggtcgtacaaatacaatgcgtatccgcactgttaaataa

SEQ ID NO: 7295 - protein, 502 aa, Lactococcus lactis subsp. lactis
MNKRVKIVSTLGPAVEIRGGKKFGESGYWGESLDVEASAKNIAALIEEGANVFRFNFSHGDHPEQGARMATVHRAEEIAGHKVGFLLDTKGPEMRTELFADGADAISVVTGDKFRVATKQGLKSTPELIALNVAGGLDIFDDVEIGQTILIDDGKLGLSLTGKDAATREFEVEAQNDGVIGKQKGVNIPNTKIPFPALAERDDADIRFGLSQPGGINFIAISFVRTANDVKEVRRICEETGNPHVQLLAKIENQQGIENLDEIIEAADGIMIARGDMGIEVPFEMVPVYQKLIISKVNKAGKIVVTATNMLESMTYNPRATRSEISDVFNAVIDGTDATMLSGESANGKYPRESVRTMATVNKNAQTMLKEYGRLHPERYDKSTVTEVVAASVKNAAEAMDIKLIVALTESGNTARLISKHRPNADILAITFDEKVERGLMINWGVIPTMTEKPSSTDDMFEVAEKVALASGLVESGDNIIIVAGVPVGTGRTNTMRIRTVK

SEQ ID NO: 7296 - DNA, 1431 bp, Caulobacter crescentus
  CDS (1)..(1431)
atgatccgcgcccgtcgctcgcgcatcgtcgccaccctcggtccggcgtcgagctctttcgacatgatcgtcaccctggccaaggccggggctgacgtctttcgcctgaacttcagccacggcgcccacgagacccacgcggccgtctatgcggccattcgcgaggcggagaaggtcgtcaatcgcccgctgggcgtgctggccgaccttcaggggcctaagctgcgcgtcggcaagttcgccgatggtccggtgatgctgaaggccggccaggcgttccgcttcgacagcgatccggcgccgggcgacgagacgcgcgtgcatctcccgcacccggaaatcctgaccgccatgcggccgggcgcgaccctgctgctggacgacggcaagctgcggatgaccgtgacggatgcgggccccggctacgccaacaccaaggtcgtcaacagcggcaaactgtcggaacgcaagggcgtagcggtgccggatgtcgtcatcccgatgtcgccgctgaccgccaaggaccgtgaggacctggccttcgccctgcgcctgggcgtggactgggtggcgctgtcgttcgtgcaggcccctgaggatatggccgagctgcgccggatcgtcgaaggccgcgccgccgtgctggccaagatcgaaaagccgcaggcgctgaaggtgctgggcccgatcctggatctctgcgacggcgtcatggtggcgcgtggcgatctcggcgtcgaaatggcgcccgaggaggtgccggtcgcccagaaggaaatcctgcgcgcggcgcgtgagcggggcattcccgtgatcgtcgccacccagatgctggagtcgatgaccagctcgccgacccctacgcgggccgaggcgtcggacgtcgccaacgccgtctatgagggcgccgatgcggtgatgctgtcggcggagtcggcggcgggtgactatcccgaagagtcggtctcgatgatgaaccgcatcatcgaacgcgttgagcgtgacccgaagtggccagagctgatgtacgccgagcagagccacgacgacgtggacgccgacgtgctggtggtcgccgccgccggggcggccaagtcggggtccaccaagtgcctcgtggccttcaccaccacgggcgcgaccgcgcgccgcctctcgcgcgagcgccccttgcagccggtgctggccctgtcgcccgagatcagcgccgtgcgtcgcatgtgcctggtctggggtgtggagccgcgcgtcagcgctcagcccgacagcctggaggtcgtcacgacggacgcgtcgagcaaggcgttggagcttgggctggtggcgcccggtgagcgactgctggtcgtcgcgggcacgcccttcggcgctccgggcgcagcgaaccttctgcgcctggcgcatgcgcccgcgccggcgcgccggcgttag

SEQ ID NO: 7297 - protein, 476 aa, Caulobacter crescentus
MIRARRSRIVATLGPASSSFDMIVTLAKAGADVFRLNFSHGAHETHAAVYAAIREAEKVVNRPLGVLADLQGPKLRVGKFADGPVMLKAGQAFRFDSDPAPGDETRVHLPHPEILTAMRPGATLLLDDGKLRMTVTDAGPGYANTKVVNSGKLSERKGVAVPDVVIPMSPLTAKDREDLAFALRLGVDWVALSFVQAPEDMAELRRIVEGRAAVLAKIEKPQALKVLGPILDLCDGVMVARGDLGVEMAPEEVPVAQKEILRAARERGIPVIVATQMLESMTSSPTPTRAEASDVANAVYEGADAVMLSAESAAGDYPEESVSMMNRIIERVERDPKWPELMYAEQSHDDVDADVLVVAAAGAAKSGSTKCLVAFTTTGATARRLSRERPLQPVLALSPEISAVRRMCLVWGVEPRVSAQPDSLEVVTTDASSKALELGLVAPGERLLVVAGTPFGAPGAANLLRLAHAPAPARRR

SEQ ID NO: 7298 - DNA, 1452 bp, Pseudomonas aeruginosa
  CDS (1)..(1452)
atgtccgttcgccgcaccaaaatcgtcgccaccctcggcccagccagcaattccccggaagtgctggagcaactgatcctggccgggatcgacgtcgcccgcctcaacttctcccacggcacccccgatgaacaccgcgcccgcgccaggctggtgcgcgaactggcggccaagcacggccgcttcgtcgccctgctcggcgacctgcaaggaccgaagatccgcatcgccaagttcgccaacaagcgcatcgaattgcaggtcggcgacaagttccgcttctccaccagccacgcccgcgacgccggtacccaggaagtggtcggcatcgactacccggacctggtgaaggactgcggggtcggcgatgaactgctgctggacgacggccgggtggtgatggtggtcgaggaagtcgccgccgacgaactgcgctgccgggtgctgatcggcggcccgctgtccgaccacaagggcatcaaccgccgcggcggcggtctcaccgcgccggcgctgaccgacaaggacaaggccgacatcaagctggccgcggacatggacctggactacgtggccgtttccttcccgcgcgacgccaaggacatggaatacgcccgccgcctgctcaccgaggccggtggcaaagcctggctggtagccaagatcgagcgcgccgaggcggtcgccgacgacgacgcactcgacggcctgattcgtgccagcgacgcggtaatggtggcccgtggcgacctcggcgtggaaatcggcgatgccgagctggtcggcatccagaagaagatcatcctgcacgcccgccgcaacaataaagtggtgatcaccgcgacccagatgatggagtcgatgatccacagcccgatgccgacccgcgcggaagtctccgacgtggccaacgctgtgctcgactacaccgacgcggtgatgctctcggcggaaagcgccgccggcgagtacccggtggaagcggtgaaagccatggcccgcgtctgccagggcgccgagaagcacccgaccagccagaaatccagccaccgcctcggccagactttcgaccgctgcgacgagagcatcgccctggcgtcgatgtacacggccaaccacttcccggggatcaaggcgatcatctgcctgaccgaaagcggcttcaccccgctgatcatgtcgcgcatccgctcgtcggtaccgatctacgcctactccccgcaccgcgagacccaggctcgcgtggcgatgttccgcggcgtagaaaccatccccttcgacccggcggcgctgccggcggagaaggtcagccaggccgcggtcgacgagttgctcaagcgcggcgtggtgaccaagggcgactgggttatcctgaccaagggcgacagctacaccgcccagggcggcaccaacaccatgaaggtgctgcacgtcggcgacctgctggtataa

SEQ ID NO: 7299 - protein, 483 aa, Pseudomonas aeruginosa
MSVRRTKIVATLGPASNSPEVLEQLILAGIDVARLNFSHGTPDEHRARARLVRELAAKHGRFVALLGDLQGPKIRIAKFANKRIELQVGDKFRFSTSHARDAGTQEVVGIDYPDLVKDCGVGDELLLDDGRVVMVVEEVAADELRCRVLIGGPLSDHKGINRRGGGLTAPALTDKDKADIKLAADMDLDYVAVSFPRDAKDMEYARRLLTEAGGKAWLVAKIERAEAVADDDALDGLIRASDAVMVARGDLGVEIGDAELVGIQKKIILHARRNNKVVITATQMMESMIHSPMPTRAEVSDVANAVLDYTDAVMLSAESAAGEYPVEAVKAMARVCQGAEKHPTSQKSSHRLGQTFDRCDESIALASMYTANHFPGIKAIICLTESGFTPLIMSRIRSSVPIYAYSPHRETQARVAMFRGVETIPFDPAALPAEKVSQAAVDELLKRGVVTKGDWVILTKGDSYTAQGGTNTMKVLHVGDLLV

SEQ ID NO: 7300 - DNA, 1437 bp, Pyrococcus horikoshii
  CDS (1)..(1437)
atgagaaggatgaagcttccctcccataaaacaaagattgtcgcaacgatagggccggcaactaactcgaaaaaaatgatcaaaaaattaattgaagctggcatgaacgttgcaagaataaacttttctcatggcacattcgaagagcatgcaaagatcatagagatggtgagggaacagtcacagaagttagataggagagttgcaatattagccgaccttcccggactgaagattagggttggggagataaaggggggatatgtggaacttgaaagaggggagaaagttactttgacaacaaaagatattgagggagatgaaacaacgatccccgtagaatataaggatttcccaaagcttgtatctaagggagatgtgatatacctaagcgatggctatatagtgttaagagtcgaagatgtaaaggagaatgaagttgaagcagtagttatttctggtggaaaactcttctcgaggaaagggataaacattccaaaggcctatcttcccgttgaagctataactccaagagatatagagataatgaagttcgcaatcgaacatggcgtcgatgcaataggactcagctttgttggaaacgtttacgatgtactaaaagcgaagagctttttggagagaaatggcgcaggtgacaccttcgttatagctaagatcgaaagacccgatgctgttagaaacttcaatgaaattctaaatgccgctgacgggattatgatagccaggggtgatctaggggttgagatgccaatagaacaacttccaattctccagaagaggttaattaggaaagccaacatggaaggaaagcctgtaattacggcaacccagatgctcgtttccatgacaatggaaaaagtcccaacaagagctgaagttacagacgttgccaatgcaatactagatggaaccgatgccgttatgttgtctgaagaaacagcagttggaaaattcccgattgaggccgtcgagatgatggcaaggatagcgaaagtaactgaggaatatagggaaagctttgggataaccagaatgcgagagttcctggaaggaacgaagaggggaacgataaaggaggcgataaccaggagtatcattgatgccatctgcactataggtataaagttcatattgacgccaactaaaacgggtagaacggcaagattgatctccagatttaagccaaagcagtggatacttgcattctctacgagggagaaagtttgcaataacctaatgttcagctatggagtgtatccattctgtatggaggaagggttcaatgagaatgacattgttaggttaataaagggactaggattggttggaagcgatgacatagttttgatgacggaaggtaagccgatagagaaaaccgttgggactaattcaataaagatattccaaatagcgtga

SEQ ID NO: 7301 - protein, 478 aa, Pyrococcus horikoshii
MRRMKLPSHKTKIVATIGPATNSKKMIKKLIEAGMNVARINFSHGTFEEHAKIIEMVREQSQKLDRRVAILADLPGLKIRVGEIKGGYVELERGEKVTLTTKDIEGDETTIPVEYKDFPKLVSKGDVIYLSDGYIVLRVEDVKENEVEAVVISGGKLFSRKGINIPKAYLPVEAITPRDIEIMKFAIEHGVDAIGLSFVGNVYDVLKAKSFLERNGAGDTFVIAKIERPDAVRNFNEILNAADGIMIARGDLGVEMPIEQLPILQKRLIRKANMEGKPVITATQMLVSMTMEKVPTRAEVTDVANAILDGTDAVMLSEETAVGKFPIEAVEMMARIAKVTEEYRESFGITRMREFLEGTKRGTIKEAITRSIIDAICTIGIKFILTPTKTGRTARLISRFKPKQWILAFSTREKVCNNLMFSYGVYPFCMEEGFNENDIVRLIKGLGLVGSDDIVLMTEGKPIEKTVGTNSIKIFQIA

SEQ ID NO: 7302 - DNA, 1443 bp, Campylobacter jejuni
  CDS (1)..(1443)
atgcttaaaaaaacaaaaattgtagccacagtaggtccagcaagtgaaaaggaagaaattctacgccaaatgattatcaatggtgtaaatgttttccgtttaaacttttctcatggaacacatgagtatcataaaaaaaacttagataccataagaagagtagctaaagaattgcatactcgtattggaattttacaagacattagtggtcctaaaattcgtacaggtgaacttaaagaaccatttgaattaaaaaagggtgatagacttgatttttatcgtgaaacaattttaggggagaagattgctcaaaatcattataaaatcagtatcaatcaaaaatccattttagatatgttaaaaattgatgaatatatttatctgtatgatggatcaattcgtgctaaagtagtaaatatagataatcaaaaaattgaaaccattatagaaaatgatggttttttaaactcaaataaaggtattaattttccgaatactaaaatcaatattgatgttattacacaaaaagataaaaatgatttactttggggtataaaaaatgaagtagattttttagcaatatctttcgtacaaaatgcgcacgatattgatgaagttcgtgaaattttagcacaaaataacgcaaaaatatctatttttgcaaaaattgaaaaatttgatgcagtagaaaatattgatgagattattaaatctagcgatggtataatggttgcaagaggagacttaggtattgaggtaccttattataaagttcctaatatccaaaaagaaattatacaaaaagcaaacaatgcctctaagcctgttattactgcgactcagatgcttttttcattagccaaaagcaaaaccgccacaagagctgaaatttcagatgttgcaaatgctgttttagatggaacagatgcagtaatgctaagtgaagaaagtgccgttggtatagatcctgcaaacgctgttgatataatgtgccaaactataatagaaacagaaaaacgctatccatataacaaatttaatgattttaatgatttagacaatacagataaaatcatgcgttcttcagctcatcttgcaacagatcttaacgctgatgctattttttctttaacaagtagcggaaaatctgctattaagattgcgagatatcgtccaaatatagaaatcatagcagtagggcattctgaaaaaaccttaaactctttaagtatagtttggggagttaatcctgcaatcttggttaacaaaagtaatgaacttacagaattattaaaagactctgtaagatcaagtgttgaaaaaggttttatggatgaagataaatgctatcttctaactgcaggctttccaacaggagtagaaggtactagcaatcttatccgcattctcaataaagagcaaattgcttattatctacaataa

SEQ ID NO: 7303 - protein, 480 aa, Campylobacter jejuni
MLKKTKIVATVGPASEKEEILRQMIINGVNVFRLNFSHGTHEYHKKNLDTIRRVAKELHTRIGILQDISGPKIRTGELKEPFELKKGDRLDFYRETILGEKIAQNHYKISINQKSILDMLKIDEYIYLYDGSIRAKVVNIDNQKIETIIENDGFLNSNKGINFPNTKINIDVITQKDKNDLLWGIKNEVDFLAISFVQNAHDIDEVREILAQNNAKISIFAKIEKFDAVENIDEIIKSSDGIMVARGDLGIEVPYYKVPNIQKEIIQKANNASKPVITATQMLFSLAKSKTATRAEISDVANAVLDGTDAVMLSEESAVGIDPANAVDIMCQTIIETEKRYPYNKFNDFNDLDNTDKIMRSSAHLATDLNADAIFSLTSSGKSAIKIARYRPNIEIIAVGHSEKTLNSLSIVWGVNPAILVNKSNELTELLKDSVRSSVEKGFMDEDKCYLLTAGFPTGVEGTSNLIRILNKEQIAYYLQ

SEQ ID NO: 7304 - DNA, 1446 bp, Chlamydia muridarum, Chlamydia trachomatis MoPn
  CDS (1)..(1446)
atgatcgctagaacaaaaattatttgtacaataggccctgcaacaaacaccccagaaatgcttgaaaaacttcttgatgcggggatgaatgtagcgcgtcttaacttcagtcatggtacccacgaaagccacggccggaccattgctattcttaaggaactacgcgaaaagcgccaagtccctttagctattatgttggatacaaaaggaccagaaattcgtttaggccaagtagaatctcctataaaagtgaagccaggagaccgtctcactttaaccagtaaagaaattttgggatccaaagaagctggagtcactctttatcctagctgcgtgttccctttcgttcgcgaacgcgctcccgtcctgattgatgatggatatatccaagccgtagttgtcaatgctcaagagcatctcattgagatagaatttcagaattcaggagaaatcaagtctaataaatcacttagcatcaaagatatagacgtagccctccccttcatgacagagaaggatatcacggatctaaaattcggggtcgaacaagaacttgaccttatcgcagcatcttttgtccgatgtaacgaagacatcgatagcatgcgtaaagttttagaaaacttcggccggccaaatatgccgatcattgccaaaatagaaaatcatttaggggtacaaaatttccaagaaatagccaaagcttctgatggaattatgatcgcacgaggagatctcggcatcgaattatctatcgttgaagtccctgccttacaaaaatttatggctcgtgtgtccagagaaacaggccgtttttgtatcaccgcaacacaaatgctcgagtcaatgattcgcaatccccttcctacacgagccgaagtttccgatgtagctaatgctatccacgatggaacttccgctgtgatgttatcaggagaaactgcttcaggaacttatcctatagaagctgtaaaaactatgcgctcgatcatccaagaaacggaaaaatcctttgattaccaagcctttttccaactcaatgacaaaaatagcgctctcaaagtctctccttatcttgaagcaataggcgcttcagggatccaaatcgctgagaaagcttctgctaaagcgattattgtatacacccaaactgggggatctcccatgtttctttctaaatatcgtccctatctccccattattgccgttaccccaaaccgcaatgtatactatcgcttagcagtagaatggggcgtataccctatgctaacctcagaatctaaccgaacagtttggcgccaccaagcttgtgtctatggagtagagaaaggaatcctttcaaactatgataaaattcttgtttttagccgaggagcagggatgcaggacacgaataaccttactctgactactgtaaacgatgttttatctccttctcttgaatga

SEQ ID NO: 7305 - protein, 481 aa, Chlamydia muridarum, Chlamydia trachomatis MoPn
MIARTKIICTIGPATNTPEMLEKLLDAGMNVARLNFSHGTHESHGRTIAILKELREKRQVPLAIMLDTKGPEIRLGQVESPIKVKPGDRLTLTSKEILGSKEAGVTLYPSCVFPFVRERAPVLIDDGYIQAVVVNAQEHLIEIEFQNSGEIKSNKSLSIKDIDVALPFMTEKDITDLKFGVEQELDLIAASFVRCNEDIDSMRKVLENFGRPNMPIIAKIENHLGVQNFQEIAKASDGIMIARGDLGIELSIVEVPALQKFMARVSRETGRFCITATQMLESMIRNPLPTRAEVSDVANAIHDGTSAVMLSGETASGTYPIEAVKTMRSIIQETEKSFDYQAFFQLNDKNSALKVSPYLEAIGASGIQIAEKASAKAIIVYTQTGGSPMFLSKYRPYLPIIAVTPNRNVYYRLAVEWGVYPMLTSESNRTVWRHQACVYGVEKGILSNYDKILVFSRGAGMQDTNNLTLTTVNDVLSPSLE

SEQ ID NO: 7306 - DNA, 1704 bp, Arabidopsis thaliana (mouse-ear cress)
  CDS (1)..(1704)
atggctgcttatggtcaaatctcctcgggaatgactgtagatcctcaggttctctcttcctccagaaacattggagtttccctatcacctctccggagaacactaatcggcgccggagttaggtctactagtatctctctccgtcaatgttctctctccgttagatcgattaaaatctccgaagatagccgcaaacctaaagcttatgcagagaacggtgcttttgatgtgggagttttggattcttcatcatatagattggctgattcaagaacaagtagtaatgattcaaggaggaagactaagattgtgtgtacgattggaccgtcttcgagttctagggaaatgatttggaaactcgcggaagctggaatgaatgtggctcgtttgaatatgtctcatggtgatcatgcttctcatcagataactattgatttagttaaggagtataattctttgtttgttgacaaagctattgctattatgttggatacaaagggtcctgaggttcgaagcggggatgtaccgcagccgatatttcttgaagagggtcaagagtttaactttactatcaagagaggtgtttcgcttaaagacactgttagtgtaaattatgatgattttgtgaacgatgttgaagttggggatatacttttggtggatggtggaatgatgtcgttagctgttaaatcaaagacgagtgatttggtgaagtgtgtggttattgatggtggagagcttcaatctagacgtcacttgaatgttcgaggaaagagtgcgactcttccatccattacagacaaagattgggaagacataaaatttggagtggacaaccaagtcgatttctacgccgtctcctttgttaaggatgctaaagttgtccatgagttgaagaactatctcaaaaacatatcggtgattgtgaaaattgaaagtgcagactctataaagaatcttccttctatcatatctgcttgtgatggggcaatggttgctcgtggagatcttggagctgaacttcccattgaagaggtcccgttgttacaggaagaaataatcagaaggtgtagaagcattcataaaccagtgattgttgccacaaacatgctagagagtatgattaatcatccaacgcctacaagagctgaagtctctgacattgcaattgcagtacgtgaaggcgcagatgctatcatgctttctggtgaaaccgcacatggaaagtttccgctgaaagctgttaacgtaatgcatactgtggcgttgagaaccgaggcaagtctacctgtcagaacctcggcatcccgtaccactgcttacaagggtcacatgggccaaatgtttgcttttcatgcttctataatggcaaatacactgagctcaccgctaattgtatttacgagaaccggatccatggcagtgcttctaagccactaccgcccatctgcaacaattttcgccttcacaaaccagagaagaataatgcaaaggcttgctctttatcaaggtgtcatgcctatatatatggagttctcggatgatgcagaagatacatatgcccggtctctcaaactcttacaggacgagaatatgctcaaggaaggacaacatgtaactcttgtccaaagtggctcgcaacccatttggcgtgaagaatcaacacatctcatacaagtccgtaagataaagataggtggatga

SEQ ID NO: 7307 - protein, 567 aa, Arabidopsis thaliana (mouse-ear cress)
MAAYGQISSGMTVDPQVLSSSRNIGVSLSPLRRTLIGAGVRSTSISLRQCSLSVRSIKISEDSRKPKAYAENGAFDVGVLDSSSYRLADSRTSSNDSRRKTKIVCTIGPSSSSREMIWKLAEAGMNVARLNMSHGDHASHQITIDLVKEYNSLFVDKAIAIMLDTKGPEVRSGDVPQPIFLEEGQEFNFTIKRGVSLKDTVSVNYDDFVNDVEVGDILLVDGGMMSLAVKSKTSDLVKCVVIDGGELQSRRHLNVRGKSATLPSITDKDWEDIKFGVDNQVDFYAVSFVKDAKVVHELKNYLKNISVIVKIESADSIKNLPSIISACDGAMVARGDLGAELPIEEVPLLQEEIIRRCRSIHKPVIVATNMLESMINHPTPTRAEVSDIAIAVREGADAIMLSGETAHGKFPLKAVNVMHTVALRTEASLPVRTSASRTTAYKGHMGQMFAFHASIMANTLSSPLIVFTRTGSMAVLLSHYRPSATIFAFTNQRRIMQRLALYQGVMPIYMEFSDDAEDTYARSLKLLQDENMLKEGQHVTLVQSGSQPIWREESTHLIQVRKIKIGG

SEQ ID NO: 7308 - DNA, 1758 bp, Staphylococcus aureus
  CDS (1)..(1758)
atgagaaaaactaaaattgtatgtacaattggaccagcttcagaatcagaagaaatgattgagaaattaatcaatgctggtatgaacgttgcacgattaaacttttcacatggtagtcatgaagagcataaaggtagaattgatacaattcgtaaagtagctaaaagattagacaaaattgtagcaattttattagatacaaaaggtccagaaattcgtacgcataatatgaaagacggtatcattgaacttgaacgtggcaacgaagttattgttagcatgaatgaagttgaaggaacacctgaaaagttctcagtaacatatgaaaacttaattaacgatgttcaagtaggttcatacattttacttgatgatggcttaattgaattacaagttaaagatattgaccatgctaaaaaagaagttaaatgtgatattttaaactctggtgagcttaaaaacaaaaaaggtgttaacttacctggcgtaagagtaagtttacctggtattacagaaaaagatgctgaagatatccgtttcggtattaaagaaaatgttgacttcattgcagcaagtttcgtacgtcgtcctagtgatgttttagaaattcgtgaaattttagaagaacaaaaagctaacatttcagtattccctaaaattgaaaaccaagaaggtattgataatattgcggaaattcttgaagtgtctgatggtttaatggttgcacgtggtgacatgggtgttgaaattccacctgaaaaagtaccaatggttcaaaaagatttaatcagacaatgtaacaaattaggtaaaccagttattacagctacacaaatgttagattctatgcaacgtaacccacgtgctacacgtgcagaagctagtgacgttgccaacgcaatctatgatggtacagatgcagtaatgttatctggtgaaactgctgctggtttatatcctgaagaagctgttaaaacaatgagaaatattgctgtatcagctgaagcagcccaagattacaaaaagttattgtcagatcgtactaaattagttgaaacttcattagtgaatgctatcggtatttcggttgcacatacagctttaaacttaaatgttaaagcaattgtagctgctactgaaagtggttcaacggcacgtactatctccaaatatcgtccacattcagacattattgcggtgactccaagtgaagaaactgcacgtcaatgttcaattgtttggggagttcaacctgtagttaaaaaaggacgtaagagtacagatgcattgttaaacaatgcagttgcaacagctgttgaaactggtagagtatctaatggtgatttaatcattattactgctggtgtaccaactggtgaaactggaactactaatatgatgaaaatccacctagttggtgacgaaattgctaatggtcaaggtattggacgtggatcagttgttggtactacgttagttgctgaaactgttaaagatttagaaggtaaagatttatctgacaaagttatcgttactaactcaatcgatgaaacgtttgtaccttatgtagaaaaagctttaggcttaattacagaagaaaatggtattacatcaccaagtgcaattgttggtttagaaaaaggtattccaacagttgtaggtgtagaaaaagctgttaaaaacataagcaataacatgttagttacgattgatgctgctcaaggtaaaatctttgaaggatatgcaaacgtactataa

SEQ ID NO: 7309 - protein, 585 aa, Staphylococcus aureus
MRKTKIVCTIGPASESEEMIEKLINAGMNVARLNFSHGSHEEHKGRIDTIRKVAKRLDKIVAILLDTKGPEIRTHNMKDGIIELERGNEVIVSMNEVEGTPEKFSVTYENLINDVQVGSYILLDDGLIELQVKDIDHAKKEVKCDILNSGELKNKKGVNLPGVRVSLPGITEKDAEDIRFGIKENVDFIAASFVRRPSDVLEIREILEEQKANISVFPKIENQEGIDNIAEILEVSDGLMVARGDMGVEIPPEKVPMVQKDLIRQCNKLGKPVITATQMLDSMQRNPRATRAEASDVANAIYDGTDAVMLSGETAAGLYPEEAVKTMRNIAVSAEAAQDYKKLLSDRTKLVETSLVNAIGISVAHTALNLNVKAIVAATESGSTARTISKYRPHSDIIAVTPSEETARQCSIVWGVQPVVKKGRKSTDALLNNAVATAVETGRVSNGDLIIITAGVPTGETGTTNMMKIHLVGDEIANGQGIGRGSVVGTTLVAETVKDLEGKDLSDKVIVTNSIDETFVPYVEKALGLITEENGITSPSAIVGLEKGIPTVVGVEKAVKNISNNMLVTIDAAQGKIFEGYANVL

SEQ ID NO: 7310 - DNA, 1758 bp, Bacillus subtilis
  CDS (1)..(1758)
atgagaaaaactaaaattgtttgtaccatcggtccggcaagtgaaagtattgaaatgcttacgaaattaatggagtcaggaatgaacgtggctcgattaaacttttctcacggagattttgaggagcacggtgcaagaattaaaaatatccgcgaagcaagtaaaaaacttggcaagaacgttggaattctgcttgatacaaaaggtcctgaaatccgcacacatacaatggaaaacggcggtattgagcttgaaacaggcaaagagctcattatttcaatggacgaggttgtaggaacaacagataaaatttcagtgacatatgaaggtttagtccatgacgttgaacaaggttcaacgattctgttagatgacggccttatcggtcttgaggtacttgatgtagatgccgctaaacgcgaaatcaaaacaaaagtattaaacaacggaacactcaaaaataaaaaaggtgttaacgtaccgggcgtaagtgtcaatcttccggggattactgaaaaggatgcgcgagacatcgttttcggtattgagcaaggagtagacttcatcgcaccatctttcattcgacgttctacggatgtgctcgaaatccgtgagcttcttgaagagcacaacgctcaggatattcaaatcatccctaaaatcgaaaaccaagagggcgttgacaacatcgatgcgattctcgaagtgtctgacggcttaatggttgcacgcggagacttaggtgtggaaattccagctgaagaagtgccgcttgtgcaaaaagaactgatcaaaaaatgcaacgcgctgggcaaacctgttattacagcgacacaaatgcttgacagcatgcagcgcaacccgcgtccgactcgtgcggaagcaagtgacgttgcaaacgcgatcttcgacggaacagatgcgatcatgctttctggtgaaactgctgccggaagttacccggttgaagcagttcaaacaatgcataacatcgcgtcccgttctgaagaagcattaaattataaagaaattctctcaaaacgcagagaccaagtgggcatgacaattacagacgcaattggacaatctgtcgcacatacggcgattaacctgaatgctgctgcgatcgtaacgccgacagaaagcggccatacagcacgtatgattgcaaaataccgtccgcaggctccgattgttgcggttactgtaaatgactctatttccagaaagcttgccctcgtatctggcgtattcgcggaaagcggccaaaatgcgagctcaacagatgagatgcttgaggatgctgtccaaaaatcattgaacagcggaattgtaaaacacggcgatcttatcgttattacagctggcactgtcggtgagtccggcactacgaacttaatgaaggttcatactgtcggcgatatcatcgctaaaggccaaggcattggacgcaaatcagcttacggtccggttgtcgttgcacaaaatgcaaaagaagctgagcaaaaaatgactgacggtgcggtacttgttaccaaaagcactgaccgtgatatgattgcatcccttgaaaaagcgtctgctcttattacagaagaaggcggtttgactagccatgctgcggtagtcggattaagccttggcatcccggttatcgtgggtctggaaaatgcgacatctattttgacagatggccaggatattacagttgacgcttccagaggcgcagtctatcaaggccgtgcgagcgttctttaa

SEQ ID NO: 7311 - protein, 585 aa, Bacillus subtilis
MRKTKIVCTIGPASESIEMLTKLMESGMNVARLNFSHGDFEEHGARIKNIREASKKLGKNVGILLDTKGPEIRTHTMENGGIELETGKELIISMDEVVGTTDKISVTYEGLVHDVEQGSTILLDDGLIGLEVLDVDAAKREIKTKVLNNGTLKNKKGVNVPGVSVNLPGITEKDARDIVFGIEQGVDFIAPSFIRRSTDVLEIRELLEEHNAQDIQIIPKIENQEGVDNIDAILEVSDGLMVARGDLGVEIPAEEVPLVQKELIKKCNALGKPVITATQMLDSMQRNPRPTRAEASDVANAIFDGTDAIMLSGETAAGSYPVEAVQTMHNIASRSEEALNYKEILSKRRDQVGMTITDAIGQSVAHTAINLNAAAIVTPTESGHTARMIAKYRPQAPIVAVTVNDSISRKLALVSGVFAESGQNASSTDEMLEDAVQKSLNSGIVKHGDLIVITAGTVGESGTTNLMKVHTVGDIIAKGQGIGRKSAYGPVVVAQNAKEAEQKMTDGAVLVTKSTDRDMIASLEKASALITEEGGLTSHAAVVGLSLGIPVIVGLENATSILTDGQDITVDASRGAVYQGRASVL

SEQ ID NO: 7312 - DNA, 1419 bp, Mycobacterium tuberculosis
  CDS (1)..(1419)
atgacgagacgcgggaaaatcgtctgcactctcgggccggccacccagcgggacgacctggtcagagcgctggtcgaggccggaatggacgtcgcccgaatgaacttcagccacggcgactacgacgatcacaaggtcgcctatgagcgggtccgggtagcctccgacgccaccgggcgcgcggtcggcgtgctcgccgacctgcagggcccgaagatcaggttgggacgcttcgcctccggggccacccactgggccgaaggcgaaaccgtccggatcaccgtgggcgcctgcgagggcagccacgatcgggtgtccaccacctacaagcggctagcccaggacgcggtggccggtgaccgggtgctggtcgacgacggcaaagtcgcattggtggtcgacgccgtcgagggcgacgacgtggtctgcaccgtcgtcgaaggcggcccggtcagcgacaacaagggcatctcgttgcccggaatgaacgtgaccgcgccggccctgtcggagaaggacatcgaggatctcacgttcgcgctgaacctcggcgtcgacatggtggcgctttccttcgtccgctccccggccgatgtcgaactggtccacgaggtgatggatcggatcgggcgacgggtgccggtgatcgccaagctggagaagccggaagccatcgacaatctcgaagcgatcgtgctggcgttcgacgccgtcatggtcgctcggggcgacctaggtgttgagctgccgctcgaagaggtcccgctggtacagaagcgagccatccagatggcccgggagaacgccaagccggtcattgtggcgacccagatgctcgactcgatgatcgagaactcgcggccgacccgagctgaggcctccgacgtcgccaacgcggtgctcgatggcgccgacgcgctgatgctgtccggggaaacctcggtagggaagtacccccttgctgcggtccggacaatgtcgcgcatcatctgcgcggtcgaggagaactccacggccgcaccgccgttgacacacattccccggaccaagcgtggggtcatctcgtatgcggcccgtgacatcggcgaacgactcgacgccaaggccttggtggccttcactcagtccggtgataccgtgcggcgactggcccgcctgcataccccgctgccgctgctggccttcaccgcgtggcccgaggtgcgcagccaactggcgatgacctggggcaccgagacgttcatcgtgccgaagatgcagtccaccgatggcatgatccgccaggtcgacaaatcgctgctcgaactcgcccgctacaagcgtggtgacttggtggtcatcgtcgcgggtgcgccgccaggcacagtgggttcgaccaacctgatccacgtgcaccggatcggggaagatgacgtctag

SEQ ID NO: 7313 - protein, 472 aa, Mycobacterium tuberculosis
MTRRGKIVCTLGPATQRDDLVRALVEAGMDVARMNFSHGDYDDHKVAYERVRVASDATGRAVGVLADLQGPKIRLGRFASGATHWAEGETVRITVGACEGSHDRVSTTYKRLAQDAVAGDRVLVDDGKVALVVDAVEGDDVVCTVVEGGPVSDNKGISLPGMNVTAPALSEKDIEDLTFALNLGVDMVALSFVRSPADVELVHEVMDRIGRRVPVIAKLEKPEAIDNLEAIVLAFDAVMVARGDLGVELPLEEVPLVQKRAIQMARENAKPVIVATQMLDSMIENSRPTRAEASDVANAVLDGADALMLSGETSVGKYPLAAVRTMSRIICAVEENSTAAPPLTHIPRTKRGVISYAARDIGERLDAKALVAFTQSGDTVRRLARLHTPLPLLAFTAWPEVRSQLAMTWGTETFIVPKMQSTDGMIRQVDKSLLELARYKRGDLVVIVAGAPPGTVGSTNLIHVHRIGEDDV

SEQ ID NO: 7314 - DNA, 1458 bp, Chlamydia trachomatis
  CDS (1)..(1458)
atgatcgctagaacgaaaattatttgtacgataggccctgcaacgaatacccctgagatgctggaaaagcttcttgatgcagggatgaatgtagctcgccttaattttagccacgggacccatgaaagccatggccggaccatcgctattcttaaagaactacgagagaagcgccaagttcctttagctattatgctagatacaaaaggtcccgaaattcgtttaggccaagtagaatctcctataaaagtacagcctggggatcgtcttactctcgttagcaaagaaattttaggatccaaagaaagcggcgttactctttatccaagttgtgtattcccttatgttagagaacgagctcctgttctcattgatgatgggtatatccaagcagtggtggtcaatgctcaagagcatatggtggaaatagagtttcaaaattcaggagaaataaaatccaacaaatctcttagcatcaaagatatcgatgttgctcttcctttcatgacagagaaggatattgcagacttaaaatttggggtagaacaagaactcgatcttatcgctgcttcgttcgtcagatgtaatgaagatattgacagcatgcgtaaagttttggaaagctttggtcgtcctaatatgcccatcattgctaaaatagaaaatcatttaggagtacaaaatttccaagagatcgctagagctgctgatggtatcatgattgcacgcggggatcttggtattgaattgtctattgttgaagttcctggactacaaaaatttatggcccgagcatcgagggaaacgggtcggttttgtatcactgcaacgcaaatgctcgagtcaatgattcgcaacccccttcctacacgagccgaagtctctgacgttgccaacgccatttacgatggaacctctgcagtcatgttgtctggagaaactgccttaggagcccatcctgtacatgcagtaaaaacaatgcgttccattatccaagagactgagaagactttcgattaccacgcttttttccagctgaacgacaaaaacagcgctctcaaagtttctccttatcttgaagccattgggttttctggaatccaaattgcagaaaaagcatctgccaaagccattattgtgtatacccagacgggaggatctccgatgtttttatccaaatatcgaccttatctccctattattgctgttacccctaaccgcaatgtgtactatcgtttagctgtagaatggggagtatatcctatgctaaccctagaatcgaaccgtacagtctggcgtcaccaagcttgtgtatatggagtagaaaaaggaattctttctaactatgataaaattcttgtcttcagccgcggagctgggatgcaagacaccaacaatctcaccttgacaactgtgcatgatgtgctatccccctctcttgacgagatagttccataa

SEQ ID NO: 7315 - protein, 485 aa, Chlamydia trachomatis
MIARTKIICTIGPATNTPEMLEKLLDAGMNVARLNFSHGTHESHGRTIAILKELREKRQVPLAIMLDTKGPEIRLGQVESPIKVQPGDRLTLVSKEILGSKESGVTLYPSCVFPYVRERAPVLIDDGYIQAVVVNAQEHMVEIEFQNSGEIKSNKSLSIKDIDVALPFMTEKDIADLKFGVEQELDLIAASFVRCNEDIDSMRKVLESFGRPNMPIIAKIENHLGVQNFQEIARAADGIMIARGDLGIELSIVEVPGLQKFMARASRETGRFCITATQMLESMIRNPLPTRAEVSDVANAIYDGTSAVMLSGETALGAHPVHAVKTMRSIIQETEKTFDYHAFFQLNDKNSALKVSPYLEAIGFSGIQIAEKASAKAIIVYTQTGGSPMFLSKYRPYLPIIAVTPNRNVYYRLAVEWGVYPMLTLESNRTVWRHQACVYGVEKGILSNYDKILVFSRGAGMQDTNNLTLTTVHDVLSPSLDEIVP

SEQ ID NO: 7316 - DNA, 1437 bp, Pyrococcus abyssi
  CDS (1)..(1437)
atgattgccatgaggcttcctgatcacaagacaaagatagttgcaacaatagggcccgccacaagctctaggaatatgataaagaagctaatagaaaacggtgtgagcgttgtgaggctcaacttctctcacggtagctttgaggagcatgcaaaggtcatagagaaagtcagggatatatcacaaaagcttgacagaagggttgcaatattggccgacctcccaggattgaagattagagtgggcgagataaagggagggtacgtagagcttaagagaggtgagaaggtagttttgactacgagagatgttgttggggatgaaactacgattcccgtagagtacaaggacttcccaagattagtctccaagggcgacgtcatatacctaagtgacggttacatcgttcttagggttgaagaggtaaggggtcaagacgttgaggcagttgtcgtctctggtggaaaactgttctcaagaaagggaataaacattccaaaggcctacctaccagtggaggcagtaactcccagggacatggagataataaagttcgccatcgagcagggagttgatgcaataggcttaagctttgttggaagcgtttatgacgttctcaaggttaaaagtttcctcgagaagaatgatgccgaggacgtcttcgttatttcaaagatagaaagaccggacgcagtcaggaacttcgatgaaatcctgaaggcttcagatggcatcatgatagctagaggtgatcttggggttgagatgccgatagaaagattgccaatacttcagaaggagcttataagaaaggcaaacacggagggtaagccagtaataacagctactcagatgttagtttcaatgacggccgaaaaggttccaaccagagctgaagttacggacgttgccaacgcgatacttgacggaacagacgcggtcatgctctctgaggagaccgcgattggaaaattcccaatcgatgccgtcaagatgatggcaaagatagccaaggtcaccgaggagtacagggagagctttggaatgtcgaggctcagggaactcgtggaggatgggacaagggggacaataaaggaggcaatagcgagaagcataatagatgcgctctgcaccctaaacataaagtacatactaacccccactagaacgggcaggacggcaaggctcatctcgaggtttaagccaaagcagtggatatttgggttctccactaacgaaagggtttgcaacaacttgatgttcagctatggagtttatgcgttctgtctcgaggagggcttcgatgagagggacataataaggctaattaagggacttggactggttgagagtgacgacatagtgctgatgaccgagggtaagccaatagagaagaccatgggaacgaactccatcaagatattccagatagcgtga

SEQ ID NO: 7317 - protein, 478 aa, Pyrococcus abyssi
MIAMRLPDHKTKIVATIGPATSSRNMIKKLIENGVSVVRLNFSHGSFEEHAKVIEKVRDISQKLDRRVAILADLPGLKIRVGEIKGGYVELKRGEKVVLTTRDVVGDETTIPVEYKDFPRLVSKGDVIYLSDGYIVLRVEEVRGQDVEAVVVSGGKLFSRKGINIPKAYLPVEAVTPRDMEIIKFAIEQGVDAIGLSFVGSVYDVLKVKSFLEKNDAEDVFVISKIERPDAVRNFDEILKASDGIMIARGDLGVEMPIERLPILQKELIRKANTEGKPVITATQMLVSMTAEKVPTRAEVTDVANAILDGTDAVMLSEETAIGKFPIDAVKMMAKIAKVTEEYRESFGMSRLRELVEDGTRGTIKEAIARSIIDALCTLNIKYILTPTRTGRTARLISRFKPKQWIFGFSTNERVCNNLMFSYGVYAFCLEEGFDERDIIRLIKGLGLVESDDIVLMTEGKPIEKTMGTNSIKIFQIA

SEQ ID NO: 7318 - DNA, 1473 bp, Neisseria meningitidis
  CDS (1)..(1473)
atgaaccagacaagccgcgatctgacccgcatcagccacaacactaaaatcgtcgccacccttgggccgggcagcaacaacgtcgaactgttggaagacatgatccgcgtcggcggtctgaacgtcgtccgcttcaacttcagccacggcacgcccgaattccatcaggaaaacgcccgcatcgtgcgcgaggcggcaaaacgcaccggacaggaaatcgccatcattgccgacctgcagggcccgaaaatccgcgtgggcaaaatcgccggcggcggcatcgaattgaacaaaggcgaaacgctgggactggatgccgcgctcgaaggcgaaggcacgcgcgaggcggtcggtttggactaccgcgacctgcccgacgacgttgccgcaggcgatgtcttgtggctggacgacggcctgctgaccctgaccgtggaatccgtcgaaggcagcaggattatcacaagggtggaaaacagccacgtcctgaaaagcaacaagggcatcaacaaacgcggcggcggtctgtccgcaggcgcgttgaccgaaaaagacttccgcgacctgaaaaccgcgattgccatcggttgcgactatctcgccatcagctttgtgaaatccgccgaagatttgcacatcgcgcgcgccaaagtcgaagaagaaatgaaaggcagtacggccgtgcgccccggtttggtttccaaaatcgaacgcgtagaagcgattgaaaaccttgatgaaatcatcctcgccggcgacggcattatggttgcacgcggcgacttggcggtcgaagtcggacacgccgccgtccccgccctgcaaaaacggatgatccgccgcgcccgcgagttgcgccgcttcagcattacggcgacgcaaatgatggaatcgatgattaccaaccccgtgccgacccgcgcggaagtcagcgatgtggcaaacgcggtattggacggcaccgatgcggtgatgtgttccgccgaaaccgccgtcggcgcgtatccgtttgaaaccgtcagccaaatggcgattatctgcgcggctgcggaaaaagagcaggattcgctcaacggcgttgccgaacaggtcgagtatcccgaagcggtcagcaccaacctggcggttgccggcggtgcggtcagcgtggcgcgcgcggttcacgccaaagccatcgtcgccctgaccgaaagcggttcgaccgcctttgaaatcagccgccacaacatcaccctgccgattttcgcgctgaccccgagcgtttccgcccaacgccgtatggcgatgtaccggggcgtgcgcccgctgattttggcaaccagcaccgaccacgacacggcgttaaacgaagtcgaaaccatgctggtggaacacaacatcctgcattccggcgaccaatacatcattaccagcggctcgcaaatgcgcgaatccggttcgaccaatacgctggaagtgctgcgcgtcaaataa

SEQ ID NO: 7319 - protein, 490 aa, Neisseria meningitidis
MNQTSRDLTRISHNTKIVATLGPGSNNVELLEDMIRVGGLNVVRFNFSHGTPEFHQENARIVREAAKRTGQEIAIIADLQGPKIRVGKIAGGGIELNKGETLGLDAALEGEGTREAVGLDYRDLPDDVAAGDVLWLDDGLLTLTVESVEGSRIITRVENSHVLKSNKGINKRGGGLSAGALTEKDFRDLKTAIAIGCDYLAISFVKSAEDLHIARAKVEEEMKGSTAVRPGLVSKIERVEAIENLDEIILAGDGIMVARGDLAVEVGHAAVPALQKRMIRRARELRRFSITATQMMESMITNPVPTRAEVSDVANAVLDGTDAVMCSAETAVGAYPFETVSQMAIICAAAEKEQDSLNGVAEQVEYPEAVSTNLAVAGGAVSVARAVHAKAIVALTESGSTAFEISRHNITLPIFALTPSVSAQRRMAMYRGVRPLILATSTDHDTALNEVETMLVEHNILHSGDQYIITSGSQMRESGSTNTLEVLRVK

SEQ ID NO: 7320 - DNA, 1506 bp, Streptococcus pneumoniae
  CDS (1)..(1506)
atgaacaaacgtgtaaaaatcgttgcaactttgggtcctgcggtagaaatccgtggtggtaaaaaattcggtgaggacggatactggggtgaaaaacttgatgttgaagcttcagctaaaaacattgctaaattgattgaagctggtgctaacacattccgattcaacttctcacacggcgaccaccaagaacaaggtgagcgtatggcaactgttaaacttgcggaaaaaattgcaggtaaaaaagttggtttccttcttgatacaaaaggacctgaaatccgtacagaattgttcgaaggtgaagctaaagaatattcatacaaaactggtgaaaaaattcgtgttgcaactaaacaaggaatcaaatcaactcgtgaagtgattgcgttgaacgttgctggtgctcttgatatctatgatgatgttgaagttggtcgtcaagttttggttgacgatggtaaacttggtcttcgtgtggttgctaaagatgatgcaactcgtgaatttgaagttgaagttgaaaacgatggtatcatcgctaaacaaaaaggtgtgaacatccctaacactaaaattcctttcccagctcttgctgaacgcgataacgacgatatccgtttcggtcttgaacaaggtatcaacttcatcgcaatttcattcgtacgtactgcaaaagatgtgaacgaagttcgtgcaatctgtgaagaaactggaaacggacatgttcaattgttcgctaaaatcgaaaaccaacaaggtatcgataacttagacgaaatcatcgaagcagctgatggtattatgattgctcgtggtgatatgggtatcgaagtaccgttcgaaatggttccagtttatcaaaaaatgattatcaagaaagtcaatgctgcaggtaaagttgttatcactgcaacaaacatgcttgaaacaatgactgaaaaaccacgtgcaactcgttcagaagtatcagacgtattcaacgctgttatcgacggaactgacgctacaatgctgtcaggcgagtctgcaaacggtaaatacccactcgagtcagtaactacaatggctacaatcgacaagaacgctcaagctcttcttaatgaatacggacgtcttgattcagattcatttgagcgtaactctaagacagaagtaatggcttctgctgttaaagatgctactagctcaatggatatcaaattggttgtaactcttactaagacaggtcatactgcacgtttgatttctaaataccgtccaaatgctgacatcttagcattgacatttgacgaattgacagaacgtggcttgatgttgaactggggtgttatcccaatgttgacagatgctccatcttcaactgacgatatgttcgaaatcgctgaacgtaaagcggtagaagcaggtctcgttgagtcaggcgatgatatcgttatcgttgctggtgtgccagtaggagaagctgttcgcacaaacacaatgcgtatccgcacagtacgttaa

SEQ ID NO: 7321 - protein, 501 aa, Streptococcus pneumoniae
MNKRVKIVATLGPAVEIRGGKKFGEDGYWGEKLDVEASAKNIAKLIEAGANTFRFNFSHGDHQEQGERMATVKLAEKIAGKKVGFLLDTKGPEIRTELFEGEAKEYSYKTGEKIRVATKQGIKSTREVIALNVAGALDIYDDVEVGRQVLVDDGKLGLRVVAKDDATREFEVEVENDGIIAKQKGVNIPNTKIPFPALAERDNDDIRFGLEQGINFIAISFVRTAKDVNEVRAICEETGNGHVQLFAKIENQQGIDNLDEIIEAADGIMIARGDMGIEVPFEMVPVYQKMIIKKVNAAGKVVITATNMLETMTEKPRATRSEVSDVFNAVIDGTDATMLSGESANGKYPLESVTTMATIDKNAQALLNEYGRLDSDSFERNSKTEVMASAVKDATSSMDIKLVVTLTKTGHTARLISKYRPNADILALTFDELTERGLMLNWGVIPMLTDAPSSTDDMFEIAERKAVEAGLVESGDDIVIVAGVPVGEAVRTNTMRIRTVR

SEQ ID NO: 7322 - DNA, 1422 bp, Clostridium acetobutylicum
  CDS (1)..(1422)
atgcaaaaaactaaaatgatttttacagttggaccagcaagtgagacagaggagattgtaacagctttcataaaagctggaatgaatgcttcaagacataacttttcacacggtgatcatgcagagcacggtggaagaatagctttagtaaaaaaggttagagcaaagcttaataagcctgtagctatatgccttgatactaaaggaccagaaataagaactggagatttcaatccttcaaagcttgaacttcaaaaaggttcaaaatttactatcgtttgtggcgaagaaatagttggagatgctacaaaatgttcaatatcatataaagatttatacaaagatgtaaaaccaggaaacactatattaatagatgatggtttagttggacttacagtagaagctatagaaggaacaaatgtaatttgtactgtagcaaatacaggattagttggaagccataaaggagtaaatgttccaaacgtttcaatacaacttcctgcaatgacagaaaaagataagagcgatttaatattcggatgtaaagaagaaatagatatggtaagtgcatcattcataagaaaacctgaagatgtacttgcaataagaaaagtattaaatgagaatggcggagaaaacattcaaatattctctaaaattgaaaatcaagaaggcgtggacaacatagatgctattatagaagtttctgacggaataatggtagctagaggagatatgggagttgaaattcctatacaaagagttccattaatccaaaaaatgataatcaaaaaatgtaatgcagtaggaaaacctgttataacagcaactcaaatgcttgattcaatgatgagaaatccaagacctacaagagcagaagcttcagatatagcaaatgctatatttgatggaacagatgctataatgttaagtggagaaagcgctaatggatcatatccaatagaagctgtaactacaatggcaaaaatagcacaagaggcagaaaatgaaatcaattatgataaattcctagcagaaagaaaaggaaatgaaaagaaaaatacttctgatgtaataagtcttggaacttgcacagcagcagcagacttagaagcttcagcaataataactgcaactcaaacaggaagcacagcaagaacagtttcaaaatatagaccaaaagcacctgtaatagcagttactccatctgaaaaagtagcaagaaaacttgcaatgagctggggagtacaccctataatatctgataaatttggttcaactgatgaacttatctctacttcagtagataaagcccttgaagcaggatatgtacaaaaaggagatcttgtagttgtagctgcaggtgtaccaacaaatgtatcaggtactacaaacatgcttaaagttcaagttgttgagtaa

SEQ ID NO: 7323 - protein, 473 aa, Clostridium acetobutylicum
MQKTKMIFTVGPASETEEIVTAFIKAGMNASRHNFSHGDHAEHGGRIALVKKVRAKLNKPVAICLDTKGPEIRTGDFNPSKLELQKGSKFTIVCGEEIVGDATKCSISYKDLYKDVKPGNTILIDDGLVGLTVEAIEGTNVICTVANTGLVGSHKGVNVPNVSIQLPAMTEKDKSDLIFGCKEEIDMVSASFIRKPEDVLAIRKVLNENGGENIQIFSKIENQEGVDNIDAIIEVSDGIMVARGDMGVEIPIQRVPLIQKMIIKKCNAVGKPVITATQMLDSMMRNPRPTRAEASDIANAIFDGTDAIMLSGESANGSYPIEAVTTMAKIAQEAENEINYDKFLAERKGNEKKNTSDVISLGTCTAAADLEASAIITATQTGSTARTVSKYRPKAPVIAVTPSEKVARKLAMSWGVHPIISDKFGSTDELISTSVDKALEAGYVQKGDLVVVAAGVPTNVSGTTNMLKVQVVE

SEQ ID NO: 7324 - DNA, 1359 bp, Sulfolobus solfataricus
  CDS (1)..(1359)
atgagaaagactaaaatagttgctactttaggtccttcctcagaggaaaaagtaaaagaactggcagaatacgttgatgtttttagaataaattttgcacatggagacgaaacatctcataggaagtattttgatcttattagaacatatgcaccggaatctagtattatagtagatttgccagggcctaagttgagactaggagaactcaaagaaccaatagaggtgaagaaaggagataagatagttttctctcaaaaagatggaattccagttgatgatgagttattttattcggctgtaaaagaaaactcggatatcttaattgcagacggaacaatacgtgtgagggttaagtcaaaagctaaggatagagtagagggaaccgtaatagagggtggaattttattatcgagaaaaggaataaatattcctaatgtcaatctaaaatctgggataacggacaacgatttaaaacttttaaaaagagctttagatctgggagcagattatataggactctcttttgtaataagtgagaatgatgtaaagaaggtaaaggaatttgtaggtgatgaagcttgggttatcgcgaagatagaaaaaagtgaggcattaaagaacttaaccaatatcgttaatgaatcggatggaataatggtagccagaggcgatttgggggttgagactggcttagaaaatctgcctttaattcaaaggagaatagtaaggacttcaagagtatttggcaaacccgtcattttagcaactcaagtattaacttcgatgataaacagccctatacctaccagagctgagattatagatatttctaactcgattatgcagggagtggactctataatgttaagcgatgaaacagccataggcaattatccagttgaaagcgtaagaactcttcataatatcataagtaatgtagaaaagagtgtaaaacatagaccaatcggaccactaaatagtgagagtgatgcgatagctctagctgctgtaaatgcaagtaaagtatctaaggcagatgtaatagtagtgtatagtagatcaggtaattcaatattgcgcgtatcgagactgagacctgaacgtaacataataggagtctctcctgatcctagactagctaaaaagtttaagctttgttatggtgtaatacccattagtataaacaaaaagatgcagtccatagacgagataatagacgtctcagccaagctaatgcaggaaaaaataaaggacttaaaatttaaaaaaatcgttatagtaggaggggatcctaaacaagaagcggggaagactaacttcgttatagttaagacactagaacaacaaaagaaatga

SEQ ID NO: 7325 - protein, 452 aa, Sulfolobus solfataricus
MRKTKIVATLGPSSEEKVKELAEYVDVFRINFAHGDETSHRKYFDLIRTYAPESSIIVDLPGPKLRLGELKEPIEVKKGDKIVFSQKDGIPVDDELFYSAVKENSDILIADGTIRVRVKSKAKDRVEGTVIEGGILLSRKGINIPNVNLKSGITDNDLKLLKRALDLGADYIGLSFVISENDVKKVKEFVGDEAWVIAKIEKSEALKNLTNIVNESDGIMVARGDLGVETGLENLPLIQRRIVRTSRVFGKPVILATQVLTSMINSPIPTRAEIIDISNSIMQGVDSIMLSDETAIGNYPVESVRTLHNIISNVEKSVKHRPIGPLNSESDAIALAAVNASKVSKADVIVVYSRSGNSILRVSRLRPERNIIGVSPDPRLAKKFKLCYGVIPISINKKMQSIDEIIDVSAKLMQEKIKDLKFKKIVIVGGDPKQEAGKTNFVIVKTLEQQKK

SEQ ID NO: 7326 - DNA, 1428 bp, Mycoplasma pulmonis
  CDS (1)..(1428): transl_table=4
atgtattcgataaaaaagaaatcaaaactaattgctacaattggaccttcttctgataactatgaagttttaaaagagttagtagaaaatggagtaacttgtgtaagggctaatttttcacatggagactatcaagaacaaaaaagaaaatttgatcttgccaaaaaagtaagccatgatttaaacacccccctttcattaatgttagatactaaaggacctgaaattagaattgggaaaatgaaagatggagttcaaaaaattgaggccaatcaaagtttaaaaatttgagtctcagaagaaaaatataaaaatttattaggaacctcagaagatattagcgtttcttataatatgtctcaagatttaaaaaagggcaatcaagttcttcttgatgatggaaaattagatactattgtagaaaaagtaacccctgagtatgttcaagtaagagcacttaattctcataatttaaaaacaaacaaaagaattaatcttcccggagtggctttttcacttccttttctaagtgaaaaagataaaaaagatatagcctttggagttgaaaatgatattaactatgttgcagcttcatttgttaattccaaagaaaatgtattagaacttagagctattttaaaatcactaaacgcagagcatgttcaaattatttcaaaaattgaatcaactttaggaattgaaaacattgatgaaataattgaacactcagatggaattatgatagcaagaggagatttaggtcttgagattccttattatgaagttccttattgacaaaaaacaattattagaaaatgtagaaatgtaggcaaagttgtaatagttgcaactcaaatgcttgatagtatggaacacaatactaatccaacaagagccgaagtcactgatgtttattttgcaactgagctaggcgctgatacaacaatgctctcaggagagacagctcaaggatcttttccagttgaagctgttaaggttatgtcaaaaattaaccaaagagctgaaaaagagttttatagcaaactttactataacgctcaacttgaatcaaatgcaaaattagccactaccaaaagagctaaaattgcctatgaagttgcaaaacagactcaatctggagattttaaatatacagtagtgctttcagctagtggtaatttattaaaaaaagtagctaactttagacctaatacttcaattatcggctttgttgaagacaaaaaactaattaatgcttttggaattgtctcttcagtgtttgtctctcttgagtctgttcaaaaatattttgaactaaaaaataatcctttagctgcaattagcacccttaaaaactatgatgctaggccaggggatagattcttaattgttcataatgaaaaaattacccaacacgttgttgagtaa

SEQ ID NO: 7327 - protein, 475 aa, Mycoplasma pulmonis
MYSIKKKSKLIATIGPSSDNYEVLKELVENGVTCVRANFSHGDYQEQKRKFDLAKKVSHDLNTPLSLMLDTKGPEIRIGKMKDGVQKIEANQSLKIWVSEEKYKNLLGTSEDISVSYNMSQDLKKGNQVLLDDGKLDTIVEKVTPEYVQVRALNSHNLKTNKRINLPGVAFSLPFLSEKDKKDIAFGVENDINYVAASFVNSKENVLELRAILKSLNAEHVQIISKIESTLGIENIDEIIEHSDGIMIARGDLGLEIPYYEVPYWQKTIIRKCRNVGKVVIVATQMLDSMEHNTNPTRAEVTDVYFATELGADTTMLSGETAQGSFPVEAVKVMSKINQRAEKEFYSKLYYNAQLESNAKLATTKRAKIAYEVAKQTQSGDFKYTVVLSASGNLLKKVANFRPNTSIIGFVEDKKLINAFGIVSSVFVSLESVQKYFELKNNPLAAISTLKNYDARPGDRFLIVHNEKITQHVVE

SEQ ID NO: 7328 - DNA, 1533 bp, Solanum tuberosum (potato)
  CDS (1)..(1533)
atggccaacatagacatagctggaatcatgaaggatctcccaaatgatggccgtattccaaagaccaagattgtttgcacgttagggccatcttctagaacagtgccaatgctggagaagcttctccgtgctggcatgaacgttgccaggtttaacttttctcatgggacccatgagtaccatcaggagacattggacaatcttaagattgctatgcagaatactcagatcctgtgtgctgtcatgcttgacaccaaggggcctgagattcgtactggtttcttaacagatggaaaaccgattcagcttaaggaaggtcaagaaatcactgtatccacagactataccataaaaggaaatgaagaaatgatctcaatgagctataagaagttggtaatggacttgaagcccggcaataccattttgtgtgcagatggtaccataacccttactgttttgtcatgtgatccaccgtctggaacggtgagatgtcgctgcgagaatactgccaccttaggagagaggaagaatgtaaaccttccaggtgtggttgtggaccttccaacacttacagagaaggataaagaagatatactagagtggggtgttcctaacaacattgatatgatagcgctttcgtttgtgcgtaagggttcagatcttgtcaatgttcgcaaggttcttggtccacatgccaagcgcattcaactaatgtcaaaggttgaaaaccaagaaggggtaatcaactttgatgaaatccttcgtgagacagattcttttatggttgctcgaggtgatctcggaatggaaattccagttgagaagattttcttggctcagaaaatgatgatatacaagtgtaatcttgctggcaaagctgtggtaactgccactcagatgcttgaatcaatgatcaagtctccagcacccacccgtgctgaggctactgatgtggctaatgctgtcttggatggcactgattgtgttatgttaagtggggagagtgcagctggtgcttatcctgagctggcagtaaaaatcatgtcacgaatctgcattgaggcagagtcttcacttgacaacgaggctatcttcaaggaaatgatcaggtgtaccccactgccaatgagcccattggagagtcttgcatcatcagctgtccgtacggctaacaaagctagagcaaaactcattgttgtcctgacacgtggcgggagtacagcaaagctggttgccaagtataggcctgcagttcctattctgtcagtagtcgtgcctgttttgaccacagactctttcgattggtccatcagcgacgagaccccagctagacacagtttggtatataggggcttgattccacttcttggtgaaggttctgcaaaggccactgattctgaatcaactgaggtaatccttgaagcggccctgaagtctgccgtaacgagagggctatgcaaacctggtgatgctgtcgtggcacttcatcgtattggttctgcatccgttatcaagatttgcgtcgtgaagtaa

SEQ ID NO: 7329 - protein, 510 aa, Solanum tuberosum (potato)
MANIDIAGIMKDLPNDGRIPKTKIVCTLGPSSRTVPMLEKLLRAGMNVARFNFSHGTHEYHQETLDNLKIAMQNTQILCAVMLDTKGPEIRTGFLTDGKPIQLKEGQEITVSTDYTIKGNEEMISMSYKKLVMDLKPGNTILCADGTITLTVLSCDPPSGTVRCRCENTATLGERKNVNLPGVVVDLPTLTEKDKEDILEWGVPNNIDMIALSFVRKGSDLVNVRKVLGPHAKRIQLMSKVENQEGVINFDEILRETDSFMVARGDLGMEIPVEKIFLAQKMMIYKCNLAGKAVVTATQMLESMIKSPAPTRAEATDVANAVLDGTDCVMLSGESAAGAYPELAVKIMSRICIEAESSLDNEAIFKEMIRCTPLPMSPLESLASSAVRTANKARAKLIVVLTRGGSTAKLVAKYRPAVPILSVVVPVLTTDSFDWSISDETPARHSLVYRGLIPLLGEGSAKATDSESTEVILEAALKSAVTRGLCKPGDAVVALHRIGSASVIKICVVK

SEQ ID NO: 7330 - DNA, 2083 bp, Bacillus psychrophilus
  CDS (271)..(2031)
gcatgcgaaatcatgtggtggtagactatgagttgacagatgttttcgaacaatcaaatggtttggatatggaaatgtacaagctgtccaacgaattgtctatttaactttatgtagcaaaaattccctgcctttatacgtgggaagacaaacgcgaacgaagtcagtaattcagagggcatcaaaatgtcggctgaatcgagcgagcactatttaaaatctgggtgcaattaattgggttgttaaaaaaactaaaagaggcgatatttgatgagaaaaacgaaaatagtatgtacgattggccctgcaagtgaatcaccggaattattggaacaacttattgaggctggtatgaatgtagcgaggctgaatttttcccatggtaatcatgcggaacataaagcccgtatcgattccattagaaaagtcgcacgtgaaaaaggcaaagttgttgggattctattagatacgaaaggaccagaaattcggacgcattctatgatgaatggaaagttggaacttgtaacaggacaaaaaattgatatttccatgacgcaagtcgaaggaaacaatgatgtattttcagtaagttacgataaacttattgaagatgtaaacgagggttctgttattcttttagacgatggtctaatccaattagaagttactggtaaagacgtagcacgagggttaattcatacactaattattaattcggggtcattaagcaataataagggcgttaacataccgggtgtttcagtacaacttcctggaatgacggaaaaagatgcagaagatatcctgtttggtattagggaaggtgtcgacttcatagctgcctcattcgtaagacgggcttccgatgttatggaaatccgtgcccttcttgagaacaacaacggctcgaacctgcaaattattccgaagatagaaaaccaagaaggcgtcgacaatatcgatgaaattttgaatgtttcagatggtcttatggtagcacgtggtgatctgggtgtagaaataccaccagaagaagtaccacttgtccagaaaaatttgattgagaagtgtaaccaggcgggtaaaccggttatcacggcaacacaaatgcttgattcgatgcagcgtaacccgcgtcctacacgtgcagaagcgagcgatgtagcgaatgcgatttttgacggtaccgatgcaattatgctgtcaggagagacggcagcaggaatttatccagtcgaatcagtccaaacgatggatcgaattgcgcttactacggaagctgccatcgattatcgctctgtagtgtcgacacgtcgacgagaaaaacatggtaatatgactgaagcgattggacaagctgcagcatacacggctatcaacttgaaagtgaaggctgtccttgccccaacagaaagtggtcacacagctaaaatgattgccaaatatcgtccaggttgcccagttattgcggtaacgtcatctgaaatgtgttcaagaaaactatcacttatctggggcgtctacccgatagttggaaaaaaagcttcttcgattgatgaaatcttgcaagagtctgtagaagagagtgttaaacatcaatatgtcggacatggtgatgtggttatcattacagcaggtgttccagttggtgaagcgggaacgacgaacttgatgaaaatacatgtcataggtgatttgcttgcacgaggacaaggaattggcaaagatgtagcttatggtcgaactgttgtagccaaaaatgcagctgaagcattggcgtatgatacagaaggagctattcttgtaacgaacgcatctgatcgtgatatgatgcctgccatcgagaaatgcgcaggactcattacggaagaaggcggattgacgagtcatggtgcaattgtcggactcagtttaggtataccgataattgtcggagttgaaaatgctaccgagcttatccaacatggcaaggaaattacgatggatgctgaatctggcgttatctataatggacacgcgagcgttctataaagttaatcttcaatcagagtgggggttcttcatcccccactgattgtttaaa

SEQ ID NO: 7331 - protein, 586 aa, Bacillus psychrophilus
MRKTKIVCTIGPASESPELLEQLIEAGMNVARLNFSHGNHAEHKARIDSIRKVAREKGKVVGILLDTKGPEIRTHSMMNGKLELVTGQKIDISMTQVEGNNDVFSVSYDKLIEDVNEGSVILLDDGLIQLEVTGKDVARGLIHTLIINSGSLSNNKGVNIPGVSVQLPGMTEKDAEDILFGIREGVDFIAASFVRRASDVMEIRALLENNNGSNLQIIPKIENQEGVDNIDEILNVSDGLMVARGDLGVEIPPEEVPLVQKNLIEKCNQAGKPVITATQMLDSMQRNPRPTRAEASDVANAIFDGTDAIMLSGETAAGIYPVESVQTMDRIALTTEAAIDYRSVVSTRRREKHGNMTEAIGQAAAYTAINLKVKAVLAPTESGHTAKMIAKYRPGCPVIAVTSSEMCSRKLSLIWGVYPIVGKKASSIDEILQESVEESVKHQYVGHGDVVIITAGVPVGEAGTTNLMKIHVIGDLLARGQGIGKDVAYGRTVVAKNAAEALAYDTEGAILVTNASDRDMMPAIEKCAGLITEEGGLTSHGAIVGLSLGIPIIVGVENATELIQHGKEITMDAESGVIYNGHASVL

SEQ ID NO: 7332 - DNA, 2054 bp, Bacillus licheniformis
  CDS (132)..(1889)
gaattcaaaataaccagttggtgcatcatgatatcattgaaatactcgagcaaaaacatacaattgatcaaagcatgtaccgcttgtctcaagaactgtcaatctagtgtaaaacccgaggaggaagcaatatgagaaagactaaaatagtttgtacaattggaccggccagcgaaagtgttgaaaagctcacccagctgatggaagccggaatgaacgtggcgcgcctgaacttttcccatggagatttcgaagagcacggcgcaagaattaaaaacattcgtgaagcagccggcaagctgggaaaagatatcggcatccttcttgacacgaaagggcctgaaatccgcacgcacacaatggaaaacggttcgatcgaactggcagcgggttctcagctgatcgtttcaatggacgaagtcatcggtacgcctgataaaatctcagttacatatgatgggttgattcacgatgtgtcagtcggttcaacgattttgcttgacgatggattggtcggacttgaagtcactgacataaacaaggacaagcgtgaaatcgtcacgaaagtgatgaacagcggaacgttgaaaaacaaaaaaggcgtgaatgtgccgggcgtcagcgtcaatcttccgggaattacggaaaaagatgcaaacgacatcgtattcggcatcgagcagggcgttgatttcatcgcggcatcctttgtgcgccgtccgtcggatgtccttgaaatccgcgaacttcttgaagagcacaatgcggcagatattcaaatcattccaaaaatcgaaaaccaggaaggcgttgacaacatcgatgccattcttgaagtatcagacggtctgatggttgcgcgtggagacctgggtgtagaaatccctgccgaagaagtgccgctcgttcaaaaagaactgatcaaaaaatgcaatgcgcttggcaagcctgtcatcacggctacccaaatgctcgacagcatgcagcgcaatccgcgcccgacacgcgcggaagcgagcgacgttgccaatgcgatctttgacggaactgacgcaatcatgctttcaggtgaaacggcagcgggaaattatcctgttgaagccgttcagacgatgcacaatatcgcttcccgttcagaagaagcgctcaaccataaaaagatcctttccgcacgaagcaagcaagtcagcatgtcaattacggatgcgatcggccaatctgtggcgcatacggcaatcaaccttgatgtgaatgccatcgtcacaccgacggaaagcggccatacggcgagaatgatttccaaatatcgcccgcaggcgccgattgtcgcagttacggtaaacgatgcggtgtcaagaaagctgtcacttgtgttcggggttttcgcaacaagcggacaaaaccacagctccactgacgaaatgcttgaaaaagcggtgcaaaaatctctcgatacaggcatcgtacgccacggcgacttgatcgttatcacggccggagctgtcggtgaagccggtacaacaaacttgatgaaagtgtatgttgtcggagacgtggtcgcaaaaggccagggcatcggacgcaaatccgcatttggtgaagtggtcatcgctcaaaacgcacaagaagcggccaaaaaaatgaaagatggcgccgttttagttacaaaaagcacggatcgtgacatgatggcatcccttgaaaaagcggctgcgctgattacggaagaaggcggcttaacaagccacgcggcagtcgtaggcttaagcctcggcatccctgtcatcgtcggaatggaaaatgcgacttccattctgaaagagggagaagacatcacggtcgactccgcccgcggagctgtatacaaaggacgtgcaagcgtgctttaatcgcttattgaagaagaagggaagctttccccttcttttagatttatgacaaaatcctaaaacgtttttcagttttaggattttgtcatccttcaattcagcgtgattgaaaacccttgcagtctaggaaggccgagcatcggagcggagcgaatgttggaattc

SEQ ID NO: 7333 - protein, 585 aa, Bacillus licheniformis
MRKTKIVCTIGPASESVEKLTQLMEAGMNVARLNFSHGDFEEHGARIKNIREAAGKLGKDIGILLDTKGPEIRTHTMENGSIELAAGSQLIVSMDEVIGTPDKISVTYDGLIHDVSVGSTILLDDGLVGLEVTDINKDKREIVTKVMNSGTLKNKKGVNVPGVSVNLPGITEKDANDIVFGIEQGVDFIAASFVRRPSDVLEIRELLEEHNAADIQIIPKIENQEGVDNIDAILEVSDGLMVARGDLGVEIPAEEVPLVQKELIKKCNALGKPVITATQMLDSMQRNPRPTRAEASDVANAIFDGTDAIMLSGETAAGNYPVEAVQTMHNIASRSEEALNHKKILSARSKQVSMSITDAIGQSVAHTAINLDVNAIVTPTESGHTARMISKYRPQAPIVAVTVNDAVSRKLSLVFGVFATSGQNHSSTDEMLEKAVQKSLDTGIVRHGDLIVITAGAVGEAGTTNLMKVYVVGDVVAKGQGIGRKSAFGEVVIAQNAQEAAKKMKDGAVLVTKSTDRDMMASLEKAAALITEEGGLTSHAAVVGLSLGIPVIVGMENATSILKEGEDITVDSARGAVYKGRASVL

SEQ ID NO: 7334 - DNA, 1617 bp, Trichoderma reesei
  CDS (1)..(1617)
atgtcccagatctcccgcacgcagagcatcatggctaccacggcccaggagcacctggaaaccggcggccgcatcaattggctggcctcgctcaacacggcctttacgcctgcccgcaactttcgccgcacctccatcatctgcaccatcggccccaagaccaactcggtcgaggccctcaacaagctgcgtgatgccggcctcaacgtcgcccgcatgaacttctcccacggcagctacgagtaccaccagtccgtcatcgacaatgtgcgcgcctctgtcgccgcccaccctggccggcccgtcgccattgccctcgacaccaagggccccgagattcgaactggcaacacggccggcgacgtggacattcccatcagcgccggcaccgtcatgaacttcaccaccgacgagaagtacgcgacggcctgcgacactcagaacatgtacgtcgactacaagaacatcaccaaggtgatccagcctggccgtgtcatctacgtcgacgacggtgtcctcgcctttgacgtcctcagcatcaaggacgaccagaccgtcgaggtccgcgcccgcaacaacggcttcatctcctcccggaagggtgtcaacctgcccaacaccgatgtcgacctgcctgctctctccgagaaggacaaggccgatctccggtttggtgtcaagaacaatgtcgacatggtctttgcctcatttatccgccgtgcgcaggatatcaaggatatccgcgacgtgctgggccccgagggcaagcagatccagatcattgccaagatcgagaaccgacagggtctcaacaactttgccgagatccttgaggagaccgacggtgtcatggtcgcccgtggtgacctgggtattgagatccccgccgccgaggtgttcgccgcccagaagaagatgattgccatgtgcaacattgccggcaagcccgtcatctgcgctacccagatgctcgagtccatgatcaagaaccctcgacctacgcgtgccgagatcagcgatgtcggcaacgccgtcactgatggcgccgactgtgttatgctatctggcgagactgccaagggtaactaccctgccgagtccattcatgagatgcacgaggccagtctcaaggctgaaaacaccatcccctacgtctcccactttgaggagatgtgcactctggtcaagcgccccgtctcgaccgtcgagtcttgcgccatggctgccgtccgcgcctctctcgacctcggcgccggtggcatcattgtcctgtccacctctggcgactctgcccgcctgctgtccaagtaccgccccgtctgccccatcttcatggtgacccgaaaccccaccacctctcgattcagccacctgtaccgcggtgtctaccccttcctgtatcccgagcagaagcccgactttgatactgtcaactggcaggaggacgtcgacaagcgcatcaagtgggccgtcacccgcgccattgagctcaagacgctcactgccggcgacaccgttgtcgtcgtccagggctggaagggcggcatgggcaacacaaacaccctgcgcattgtccgcgctgaccccgaccacctgggcattggacagatggagtag

SEQ ID NO: 7335 - protein, 538 aa, Trichoderma reesei
MSQISRTQSIMATTAQEHLETGGRINWLASLNTAFTPARNFRRTSIICTIGPKTNSVEALNKLRDAGLNVARMNFSHGSYEYHQSVIDNVRASVAAHPGRPVAIALDTKGPEIRTGNTAGDVDIPISAGTVMNFTTDEKYATACDTQNMYVDYKNITKVIQPGRVIYVDDGVLAFDVLSIKDDQTVEVRARNNGFISSRKGVNLPNTDVDLPALSEKDKADLRFGVKNNVDMVFASFIRRAQDIKDIRDVLGPEGKQIQIIAKIENRQGLNNFAEILEETDGVMVARGDLGIEIPAAEVFAAQKKMIAMCNIAGKPVICATQMLESMIKNPRPTRAEISDVGNAVTDGADCVMLSGETAKGNYPAESIHEMHEASLKAENTIPYVSHFEEMCTLVKRPVSTVESCAMAAVRASLDLGAGGIIVLSTSGDSARLLSKYRPVCPIFMVTRNPTTSRFSHLYRGVYPFLYPEQKPDFDTVNWQEDVDKRIKWAVTRAIELKTLTAGDTVVVVQGWKGGMGNTNTLRIVRADPDHLGIGQME

SEQ ID NO: 7336 - DNA, 1725 bp, Rattus norvegicus (Norway rat)
  CDS (1)..(1725)
atgtctgtccaggagaacactctaccccagcagctctggccgtggatctttaggtcccaaaaagacttggcaaagtctgccttaagtggggctcccggagggccagcgggataccttcgacgtgcgagtgtggctcaactgacccaggagctgggcactgccttcttccagcagcagcaactgcccgcagctatggcggacaccttcctggaacacctctgccttctggatatcgactcacagcctgtggctgctcgtagcaccagcatcattgccaccattgggccagcatcccgctctgtggaccgcctcaaggagatgatcaaagcagggatgaacattgcacgactcaacttctcccatggctcccatgagtaccatgcagaatacatcgccaacatccgggaggcaactgagagttttgcaacctccccactcagctacagacctgtggccatcgccctggacaccaagggacctgagatacgaaccggagtcttgcaggggggtccggagtcggaggtggaaattgtgaagggctcacaggtgctggtgacggtggacccgaagttccagacaaggggtgatgcaaagacagtgtgggtggactaccacaatatcacccgggtcgttgcagtggggggccgcatctacattgacgacgggctcatctccttagtggtacagaaaatcggcccagagggactggtgacagaagtggagcacggtggtatcttgggcagcaggaagggtgtgaacttgccaaacactgaggtggacctgcccgggctgtctgagcaagaccttttggatctgcgcttcggggtgcagcataatgtggacatcatctttgcctcctttgtgcggaaagccagtgacgtgttagcagtccgggatgccctggggccagaaggacagaacatcaaaattatcagcaaaatcgagaaccatgaaggcgtgaagaggtttgatgaaattctagaagtgagcgatggcatcatggtggcacggggtgacctgggcattgagatccctgcggagaaggttttcttggctcagaagatgatgattggacgctgcaacctggccggcaagcctgtcgtttgtgccacacagatgctggagagcatgatcactaaggctcgaccaactcgggcggagacaagcgatgtggccaatgccgtgctggatggggctgactgtatcatgctgtccggagagaccgccaagggcagttttcctgtggaagctgtaatgatgcaacatgcgattgcgcgggaggcagaggccgctgtgtaccaccgccagttgtttgaggagctacgccgggcagcgccgctgagccgtgacccaactgaggtcactgcgattggagccgtggaggcttccttcaagtgctgtgcagcagccatcatcgtgctgacgaagactggccgttcagcccagcttctatctcaataccgacctcgggcggctgtcattgctgtgactcgatctgcccaggctgcccgacaggtccacctgtcccgaggagtcttccccttgctctaccgtgagcctccagaggccatctgggcagatgatgtggatcgaagggtccaatttggcattgaaagtggaaagctccgtggtttcctccgtgtgggtgatctggtgattgtggtgacaggttggcggcctggctctggctataccaacatcatgcgggtgctgagcgtatcctga

SEQ ID NO: 7337 - protein, 574 aa, Rattus norvegicus (Norway rat)
MSVQENTLPQQLWPWIFRSQKDLAKSALSGAPGGPAGYLRRASVAQLTQELGTAFFQQQQLPAAMADTFLEHLCLLDIDSQPVAARSTSIIATIGPASRSVDRLKEMIKAGMNIARLNFSHGSHEYHAEYIANIREATESFATSPLSYRPVAIALDTKGPEIRTGVLQGGPESEVEIVKGSQVLVTVDPKFQTRGDAKTVWVDYHNITRVVAVGGRIYIDDGLISLVVQKIGPEGLVTEVEHGGILGSRKGVNLPNTEVDLPGLSEQDLLDLRFGVQHNVDIIFASFVRKASDVLAVRDALGPEGQNIKIISKIENHEGVKRFDEILEVSDGIMVARGDLGIEIPAEKVFLAQKMMIGRCNLAGKPVVCATQMLESMITKARPTRAETSDVANAVLDGADCIMLSGETAKGSFPVEAVMMQHAIAREAEAAVYHRQLFEELRRAAPLSRDPTEVTAIGAVEASFKCCAAAIIVLTKTGRSAQLLSQYRPRAAVIAVTRSAQAARQVHLSRGVFPLLYREPPEAIWADDVDRRVQFGIESGKLRGFLRVGDLVIVVTGWRPGSGYTNIMRVLSVS

SEQ ID NO: 7338 - DNA, 1596 bp, Trypanosoma brucei
  CDS (59)..(1558)
ctaattatcacctaataaaggaacaattcagacaaaacagatttattccgacgagtccatgtcgcagctagagcacaacattgggctctccatttttgagccggtggccaaacaccgtgccaaccgcattgtgtgcaccatcggacccagcacacagagcgttgaagccctgaaaaacctaatgaagagtggtatgtctgttgcccgtatgaacttttcccatggatcccatgaataccaccagacgacaataaacaacgttcgcgcagctgctgctgaacttggccttcatattggtattgcgctggacacgaaaggtcctgaaatccgtacaggcctcttcaaggatggtgaggtgacgttcgcccctggtgacatcgtgtgtgtcactaccgatcccgcctatgagaaggttggcacaaaggaaaagttctatatcgactacccacaactgacgaaggcagtgcccgtgggtggttccatttatgtcgacgacggtgtgatgactctccgcgtcttaagcaaagaggacgatcggacgctgaagtgccacgtgaacaatcaccaccgcctgaccgaccgcaggggtatcaacctcccaggttgtgaggtggatctgcccgccgtttccgagaaggaccgcaaggacttggagttcggtgtggcacaaggtgttgatatgatttttgcctcgttcatccgcacggctgagcaggttcgtgaggtgcgcgccgccctcggtgagaagggaaaagacatccttatcatttccaagattgaaaaccaccagggtgtgcagaacattgactccatcattgaagcgagcaatggcattatggttgctcgtggtgatcttggcgtcgagatccccgccgagaaggtgtgtgtggcgcagatgtgcatcatcagcaagtgcaacgtggtgggcaaacctgtcatctgtgccacgcaaatgctcgagagcatgacgtcaaacccccgccccacacgtgccgaagtatccgatgttgccaatgctgttctcaacggagccgactgtgtcatgctttccggtgaaacggccaaagggaagtaccccaacgaagtggtacagtacatggctcgcatctgtgtcgaggcgcagagcgcaacgcacgatactgttatgttcaacagcattaagaacctgcagaaaatccccatgtgccccgaagaggccgtttgcagcagcgccgtcgcctctgcatttgaggtacaagccaaggcaatgctcgtgctaagcaacacgggccgaagtgctcgcctcatcagcaagtaccgcccgaactgccccatcatttgtgtcaccacacgtctgcaaacgtgccgtcaactcaacgtgacgcgctccgtcgtgagtgttttctacgacgccgcaaagagtggtgaggacaaggataaggaaaagcgcgtgaaactcggtttggattttgcgaagaaggagaaatatgccagcactggagacgtggtggttgtcgtgcatgccgaccactctgtgaaggggtacccgaaccaaactcgcctcatctatcttccttaagcattggtgggtgggtgagcaatgtaatgaggggttaa

SEQ ID NO: 7339 - protein, 499 aa, Trypanosoma brucei
MSQLEHNIGLSIFEPVAKHRANRIVCTIGPSTQSVEALKNLMKSGMSVARMNFSHGSHEYHQTTINNVRAAAAELGLHIGIALDTKGPEIRTGLFKDGEVTFAPGDIVCVTTDPAYEKVGTKEKFYIDYPQLTKAVPVGGSIYVDDGVMTLRVLSKEDDRTLKCHVNNHHRLTDRRGINLPGCEVDLPAVSEKDRKDLEFGVAQGVDMIFASFIRTAEQVREVRAALGEKGKDILIISKIENHQGVQNIDSIIEASNGIMVARGDLGVEIPAEKVCVAQMCIISKCNVVGKPVICATQMLESMTSNPRPTRAEVSDVANAVLNGADCVMLSGETAKGKYPNEVVQYMARICVEAQSATHDTVMFNSIKNLQKIPMCPEEAVCSSAVASAFEVQAKAMLVLSNTGRSARLISKYRPNCPIICVTTRLQTCRQLNVTRSVVSVFYDAAKSGEDKDKEKRVKLGLDFAKKEKYASTGDVVVVVHADHSVKGYPNQTRLIYLP

SEQ ID NO: 7340 - DNA, 1581 bp, Aspergillus niger
  CDS (1)..(1581)
atggccgccagctcttccctcgaccacctgagcaaccgcatgaagttggagtggcactccaagctcaacactgagatggtgccctccaagaacttccgccgcacctccatcatcggaaccatcggccccaagaccaactccgtggagaagatcaactctctccgcactgccggtcttaacgttgttcgcatgaacttctcccacggttcttatcagtaccaccaatctgttatcgacaacgcccgcgaggccgccaagacccaggtcggacgtcctctcgccattgctcttgataccaaaggacccgagatccgtaccggaaacacccccgatgataaggatatccctatcaagcagggccacgagctcaacatcaccaccgacgagcaatatgccaccgcctccgacgacaagaacatgtacctcgactacaagaacatcaccaaggtgatctctcctggcaagctcatctatgttgatgacggtatcctttccttcgaggtcctcgaagtcgtagatgacaagaccatccgcgtccggtgcttgaacaacggcaacatctcttcccgcaagggtgttaacttgcccggcactgacgttgacctccccgccctttccgagaaggacattgccgatctcaagttcggtgttaggaacaaggtcgacatggtcttcgcttctttcatccgccgcggtagcgacattcgccacatccgtgaggttctgggtgaggagggcaaggagatccagatcattgccaagattgagaaccagcagggtgtcaacaacttcgacgagatcctcgaagagactgacggtgtcatggttgcccgtggtgaccttggtatcgagatccccgcccccaaggtcttcatcgcccagaagatgatgatcgccaagtgtaacatcaagggtaagcccgtcatctgtgccactcagatgctcgagtccatgacatacaaccctcgtcctactcgtgccgaggtgtccgatgttgccaacgccgtccttgacggtgccgactgtgtcatgctgtcgggagagaccgccaagggtaactaccccaacgaggccgtcaagatgatgtccgagacctgcctgctcgccgaggttgccatcccccacttcaatgtgttcgatgagctccgcaaccttgctcctcgccccaccgacactgtcgagtccatcgccatggctgccgttagcgccagtctggaactcaacgctggtgccattgtcgtcttgactaccagcggtaaaactgctcgctacctttccaagtaccgccccgtctgccccattgtcatggttacccgtaaccccgctgcctcccggtactctcacctgtaccgtggtgtctggcccttcctcttccccgagaagaagcccgacttcaacgtcaaggtctggcaggaggatgttgaccgccgtctcaagtggggtatcaaccacgctcttaagctcggcatcatcaacaagggtgacaacatcgtctgtgtccagggatggcgcggcggtatgggccacaccaacaccgtccgtgtggtccctgctgaggagaaccttggcctggctgagtaa

SEQ ID NO: 7341 - protein, 526 aa, Aspergillus niger
MAASSSLDHLSNRMKLEWHSKLNTEMVPSKNFRRTSIIGTIGPKTNSVEKINSLRTAGLNVVRMNFSHGSYQYHQSVIDNAREAAKTQVGRPLAIALDTKGPEIRTGNTPDDKDIPIKQGHELNITTDEQYATASDDKNMYLDYKNITKVISPGKLIYVDDGILSFEVLEVVDDKTIRVRCLNNGNISSRKGVNLPGTDVDLPALSEKDIADLKFGVRNKVDMVFASFIRRGSDIRHIREVLGEEGKEIQIIAKIENQQGVNNFDEILEETDGVMVARGDLGIEIPAPKVFIAQKMMIAKCNIKGKPVICATQMLESMTYNPRPTRAEVSDVANAVLDGADCVMLSGETAKGNYPNEAVKMMSETCLLAEVAIPHFNVFDELRNLAPRPTDTVESIAMAAVSASLELNAGAIVVLTTSGKTARYLSKYRPVCPIVMVTRNPAASRYSHLYRGVWPFLFPEKKPDFNVKVWQEDVDRRLKWGINHALKLGIINKGDNIVCVQGWRGGMGHTNTVRVVPAEENLGLAE

SEQ ID NO: 7342 - DNA, 1636 bp, Bacillus stearothermophilus
  CDS (114)..(1598)
gtcgaccatgacatcgcggaggcgctagccaacaaacatacgattgatcagcggatgtacgcattgtcgaaagaattgtccatttaagtcccgaggggaaaggagaagacaagatgaagcggaaaacgaaaatcgtctgcacgatcgggccggcaagcgagagcgtagacaagctcgtgcaactgatggaagcgggaatgaacgtggcgcgcctaaacttttcgcacggcgatcatgaagagcacgggcggcgcatcgccaatattcgcgaagcggcgaagcgaacgggccgaacggtcgccattttgcttgacacgaaagggccggaaatccggacgcacaatatggaaaacggcgccattgagctgaaggaagggtcaaagctcgtcatttcgatgagcgaagtgctcggcacgccggaaaaaatttcggtcacctatcccagcttaatcgatgatgtgtccgtcggcgcgaaaattttgcttgatgacgggctcatcagcctggaagtcaacgcggtcgacaagcaagcgggagaaatcgtcacgaccgtgttaaacggcggcgtgctgaaaaacaaaaaaggagtcaatgtgccgggtgtcaaagtcaacttgccaggcatcaccgagaaagatcgggctgacattttgtttggcattcgccaagggatcgatttcatcgccgcctcgtttgtgcgccgggcgtccgatgtgctggagatccgcgagctgcttgaggcgcatgacgccctccatatccaaattatcgccaaaattgaaaatgaagaaggcgtcgccaacattgacgaaattttagaagccgccgacggcctgatggtggcgcgcggcgatttgggcgtggaaattccggctgaggaagtgccgctcattcaaaaactgctcattaaaaagtgcaacatgctcggcaagccggtcattacggcgacgcaaatgctcgattcgatgcagcgcaatccgcgtccgacgcgggcggaggcgagcgacgtcgccaacgccatttttgacggcaccgacgccgtcatgctttccggggaaacggcggccggccagtatccggtcgaagcggtgaaaacgatgcaccaaatcgcgctccgcaccgaacaggcgcttgagcaccgcgacattttgtcccaacgcacaaaagaaagccaaacgacgatcaccgacgccatcgggcagtcggtcgcccacaccgcgctcaacttggatgtggcggcgatcgtgacgccgaccgtgagcggaaaaacgccgcaaatggtggcgaagtatcgcccgaaggcgccgattattgccgtgacgtcaaatgaagcggtatcgcgccggctggcgcttgtgtggggcgtgtatacgaaagaagcgccgcatgtgaacacgacggacgaaatgctcgatgtcgccgtcgatgcggcggtgcgctccgggttggtgaagcacggtgacttggtcgtcatcacggctggcgtgccggtcggcgaaacgggttcgacgaacttaatgaaggtgcacgttatcagcgatcttctcgccaaagggcaaggcatcggcgcaagtcggcgttcggcaaggccgttgtagcgaaaacagcggaagaagcgcggcaaaaaatggtcgac

SEQ ID NO: 7343 - protein, 494 aa, Bacillus stearothermophilus
MKRKTKIVCTIGPASESVDKLVQLMEAGMNVARLNFSHGDHEEHGRRIANIREAAKRTGRTVAILLDTKGPEIRTHNMENGAIELKEGSKLVISMSEVLGTPEKISVTYPSLIDDVSVGAKILLDDGLISLEVNAVDKQAGEIVTTVLNGGVLKNKKGVNVPGVKVNLPGITEKDRADILFGIRQGIDFIAASFVRRASDVLEIRELLEAHDALHIQIIAKIENEEGVANIDEILEAADGLMVARGDLGVEIPAEEVPLIQKLLIKKCNMLGKPVITATQMLDSMQRNPRPTRAEASDVANAIFDGTDAVMLSGETAAGQYPVEAVKTMHQIALRTEQALEHRDILSQRTKESQTTITDAIGQSVAHTALNLDVAAIVTPTVSGKTPQMVAKYRPKAPIIAVTSNEAVSRRLALVWGVYTKEAPHVNTTDEMLDVAVDAAVRSGLVKHGDLVVITAGVPVGETGSTNLMKVHVISDLLAKGQGIGASRRSARPL

SEQ ID NO: 7344 - DNA, 1581 bp, Emericella nidulans, Aspergillus nidulans
  CDS (1)..(1581)
atggccgcaagctcttccctcgaccacttgtccaaccgtatgaagctggagtggcactccaagctgaatactgagatggtgccggcgaagaacttccgccgtacatccatcatctgtaccatcggtcccaagacaaactccgttgagaaaatcaatgccctccgcagagccggtctcaatgtcgttcgcatgaacttttctcacggttcatacgagtaccaccaatcagttatcgaccacgctcgggaagccgaaaagcaggcagctggccgccccgttgccattgctctggacaccaaaggacccgagatccgtaccggaaacaccgtaggtgacaaggacatcccaatcaaggctggccatgagatgaacatcagcaccgatgagcaatatgccaccgcatccgacgaccagaacatgtatgtcgattacaagaacatcaccaaggtgatttctgccggcaagctcatctatgtcgatgacggtatcctttcatttgaggttcttgaagttgtagatgacaagaccctgcgcgtccgatgccttaacaacggcaacatctcttcccgcaagggtgtcaaccttcccggtaccgacgtagacttgcccgctctttcagagaaggacatcagcgatctgaagtttggtgtcaagaacaaggtcgacatggttttcgcttccttcatccgtcgtggcagcgacatccgccacatccgtgaggtgttgggtgaagagggccgagagattcagatcatcgccaagattgagaaccaacaaggtgtcaacaatttcgacgagattctggaagagaccgacggtgtcatggtcgcccgtggtgaccttggtatcgagatccccgctcccaaggtgttcatcgcccagaagatgatgatcgccaagtgtaacatcaagggcaagcccgtcatttgtgccactcagatgcttgagtccatgacatataaccctcgtcccactcgtgctgaggtgtccgatgtggccaacgctgttctcgacggtgccgactgtgtcatgctttctggagagactgccaagggtaactacccttgcgaggctgtcacgatgatgtctgagacctgcctcctcgccgaggttgccattcctcacttcaacgtcttcgacgagctgcgaaacctggcccctcgtcccaccgacactgttgaatccatcgccatggctgctgtgagtgccagtcttgaactgaacgccggcgccattgtggtcctcaccactagtggaaacactgcccgtatgatctccaagtaccgccccgtttgccccatcatcatggtttctcgcaaccctgctgctacaaggtactcccacctgtaccgtggtgtctggcccttctacttccccgagaagaagcccgacttcaacgtcaagatctggcaggaggatgtcgaccgtcgcctcaagtggggtatcaaccacggtctcaagctcggtatcatcaacaagggcgacaacatcgtctgtgttcagggctggcgcggcggtatgggccacactaacactgtccgtgtggtccctgctgaggagaacctcggactttctgagtaa

SEQ ID NO: 7345 - protein, 526 aa, Emericella nidulans, Aspergillus nidulans
MAASSSLDHLSNRMKLEWHSKLNTEMVPAKNFRRTSIICTIGPKTNSVEKINALRRAGLNVVRMNFSHGSYEYHQSVIDHAREAEKQAAGRPVAIALDTKGPEIRTGNTVGDKDIPIKAGHEMNISTDEQYATASDDQNMYVDYKNITKVISAGKLIYVDDGILSFEVLEVVDDKTLRVRCLNNGNISSRKGVNLPGTDVDLPALSEKDISDLKFGVKNKVDMVFASFIRRGSDIRHIREVLGEEGREIQIIAKIENQQGVNNFDEILEETDGVMVARGDLGIEIPAPKVFIAQKMMIAKCNIKGKPVICATQMLESMTYNPRPTRAEVSDVANAVLDGADCVMLSGETAKGNYPCEAVTMMSETCLLAEVAIPHFNVFDELRNLAPRPTDTVESIAMAAVSASLELNAGAIVVLTTSGNTARMISKYRPVCPIIMVSRNPAATRYSHLYRGVWPFYFPEKKPDFNVKIWQEDVDRRLKWGINHGLKLGIINKGDNIVCVQGWRGGMGHTNTVRVVPAEENLGLSE

SEQ ID NO: 7346 - DNA, 1847 bp, Nicotiana tabacum (common tobacco)
  CDS (45)..(1571)
gttgctgtcgcttttcgtttgaaaaaaaactaaaattctctgctatggcgattgagaataacaacaatggagtgaatttttgtacggtgaagaggccgaagacgaagatagtatgtactttggggccagcatctcgatcggtgccgatgatcgagaagcttctacgggcaggcatgaacgtggcccgattcaacttttctcatggatctcacgactatcatcaggagactattgacaatctccgtcaagctatggagagtaccggtattctctgtgccgttatgcttgacaccaagggtccagaaattcgaacagggtttttaaaagatgctaagcctgttcaacttaaacagggtcaggagatcacaatctcaactgattacagcattaaaggtgatgagagtatgatatgcatgagctacaaaaagttagcagaggacgtaaagccacaaagtgtgatcctctgtgcagatggccaaatcacctttacagttttgtcttgtgacaaagagaacggtttggatcgatgccgctgtgagaacactgctgttcttggtgaaagaaagaatgtcaatctcccgggagtaattgtggatctgccaacattgacagataaagacaaggatgacattttaaactggggagttccgaatcatattgacatgattgcgttatcttttgttcgtaagggttcagatctcgtggaggttcggaagctgctaggtgaacatgcaaagaacattcttctgatgtctaaggttgaaaaccaggaaggtgtagcgaattttgatgacattcttctcaactctgatgcatttatggtggcaagaggtgacctgggaatggaaattccaattgagaagatatttttggctcaaaaggtaatgatttacaagtgcaacatccaagggaagcctgttgtcacagcaacacagatgttggagtccatgatcaaatctccaaggccaactcgtgcagaagcaacagatgttgccaatgctgttcttgatggcacagactgtgtcatgcttagtggtgaaacagctgctggagcttaccctgatcttgcagtgggtaccatggctaagatttgtattgaagcagaaagcacaattgattatccagatgttttcaaaagaattatgtcaaatgccccagttcccatgagcccattggagagccttgcatcttctgctgttcgaaccgctaactctgcaaaagctgctcttatcctagtgttaaccaggggaggaagtactgcaaaattggtggccaagtacagacctggaatgcctatattgtcggtggttgtccccgagatcaaaactgattcttttgattggacttgcagtgacgagtctccagcaaggcatagccttatattcaggggattggttcccgttctccatgcaggatctgctagggcttctcatgaagagtctacagaagaagcactggactttgctcttcaacatgccaaaacaaaagggttatgcaagcaaggagactccgttgtagccctacaccgtgttggaactgcatctgtgatcaagattgttacagtcaagtgatagatgaactttgacgcgtgctttttgggtttctgttgttgcaaaagggtaactgataaatgtttttgcttgtttcactgaatcattttctgccttctagagaaggaacttatgactataccttatattatgtctctatataacgcctggctgttttttgctttggctggagtttcatacccttttatctttttatgcaatttgtctacagacacagatatgatgcgaaataaattccttgtgccttcaatttatctgtctaaaaaaaaaaaaaaa

SEQ ID NO: 7347 - protein, 508 aa, Nicotiana tabacum (common tobacco)
MAIENNNNGVNFCTVKRPKTKIVCTLGPASRSVPMIEKLLRAGMNVARFNFSHGSHDYHQETIDNLRQAMESTGILCAVMLDTKGPEIRTGFLKDAKPVQLKQGQEITISTDYSIKGDESMICMSYKKLAEDVKPQSVILCADGQITFTVLSCDKENGLDRCRCENTAVLGERKNVNLPGVIVDLPTLTDKDKDDILNWGVPNHIDMIALSFVRKGSDLVEVRKLLGEHAKNILLMSKVENQEGVANFDDILLNSDAFMVARGDLGMEIPIEKIFLAQKVMIYKCNIQGKPVVTATQMLESMIKSPRPTRAEATDVANAVLDGTDCVMLSGETAAGAYPDLAVGTMAKICIEAESTIDYPDVFKRIMSNAPVPMSPLESLASSAVRTANSAKAALILVLTRGGSTAKLVAKYRPGMPILSVVVPEIKTDSFDWTCSDESPARHSLIFRGLVPVLHAGSARASHEESTEEALDFALQHAKTKGLCKQGDSVVALHRVGTASVIKIVTVK

SEQ ID NO: 7348 - DNA, 2243 bp, Nicotiana tabacum (common tobacco)
  CDS (318)..(2006)
cgttgctgtcgagcaaacgtgcggtgcgtgggagaagcgcgagtttggttggacagtagggcagatgagaagaaaatagaaaatgtcttagtccccaagagtctcaaaatcctctgagcctctgcagacagccgctcttttcggaactcaacttctctttgttttctccctttcttcctcacattcaccacacacatacacacacacactttctccaagttttttcttctcgttttctccgtagctaccacaactctatatctttctttctctctttcttctattcttcatcttctacttcttctgttacttgttcaatggccacaatgaatctacctacaggactacatgtcgcggctaaaccggcgtcattggatcggctttcctcggccaagaacgtcggtgatttgttcttctccgattctcgtcacaggaaacgagtgaatacttcgaatcaaatcatggccgttcaatcacttgagcatattcatggcgttaataacaatgtttatgccaattatgttaatttcaatgtaccctcttccggttacagtctggggcaagaaagtgtgtatctgaattctccaagaaaaaccaagatagtttgcaccattggtccctccacaagctcacgggagatgatctggaaattggcagaggctggaatgaacgtggcccgtctgaatatgtcacatggggaccacgcatcgcatcagagaacgattgaccttgttaaagaatacaatgctcaatttgaggacaaggttattgcaataatgttggacactaagggacctgaggtaataagtggagatgtgcccaaaccaattctccttaaggagggtcaagaattcaactttagcattaaaagaggagtcagcacagaagacaccgttagtgtaaattatgatgatttcataaatgatgtggaggccggagacatactactcgttgatggtgggatgatgtcattagctgtgaaatcgaaaaccagcgatatagtgaaatgtgaagttattgatggaggagaactgaaatcgagacggcatctaaatgtaagaggaaaaagtgccaccctgccttcaataacagaaaaagactgggatgatattaagtttggtgtgaacaatcaagtcgacttctatgccgtttcttttgtgaaggatgctaaggtggtccatgaattgaaagattacctgaaaagctgtaatgcagatattcatgttattgtaaagattgaaagtgcagactccattccaaatctccactcgatcatttccgcttccgatggggcaatggtggcccgtggtgatcttggagctgaacttccaattgaggaagtgccgttgcttcaggaagacattattagaaggtgtcagagcatgcaaaaacctgtaatagtagcaacgaacatgctcgaaagcatgattgatcacccaaccccaacaagggcagaagtttcagacatttccattgcagtacgtgaaggcgctgatgctgtaatgctttcaggcgaaaccgctcatgggaagtatccactgaaggcagttaaggtgatgcatattgtggcattaaggaccgagtctagcctacaaaaaagcactagttctcctagtcaatctgccgcctataagagccatatgggtgaaatgtttgccttccactcttcctcaatggctaatacccttagcactcccatcattgtcttcacaagaactgggtccatggcaataattttaagtcataatcggccttcatcaacagtttttgccttcacaaacaatgaaagggtgaagcagcgtctggctctgtatcatggtgtcgtgcctatatatatggagttttcaagtgacgcagaggagaccttttctcgagctatcaagcttttgttgagcaaaagcttggtgaaggatgggcaatatgtaactctcgtccaaagtggagcccaaccaatctggcgtagacattctactcaccacatacaagtccgtaaggtccaaagttgatacgtgtagcaaccatttattttggtgtaatcacgtcgattggtaggcattaggatgcaatttttcaaagtttcttatatacagttgctttttttttcttcttctgaagttattccttgtatgatgaaactggagaaatcttcttaaaacttaaaattctaggcacagatgtttctgtaattgtgaactttctggcagatggaagcttaagttttgataaaaaaaaaaaaaaaaaaa

SEQ ID NO: 7349 - protein, 562 aa, Nicotiana tabacum (common tobacco)
MATMNLPTGLHVAAKPASLDRLSSAKNVGDLFFSDSRHRKRVNTSNQIMAVQSLEHIHGVNNNVYANYVNFNVPSSGYSLGQESVYLNSPRKTKIVCTIGPSTSSREMIWKLAEAGMNVARLNMSHGDHASHQRTIDLVKEYNAQFEDKVIAIMLDTKGPEVISGDVPKPILLKEGQEFNFSIKRGVSTEDTVSVNYDDFINDVEAGDILLVDGGMMSLAVKSKTSDIVKCEVIDGGELKSRRHLNVRGKSATLPSITEKDWDDIKFGVNNQVDFYAVSFVKDAKVVHELKDYLKSCNADIHVIVKIESADSIPNLHSIISASDGAMVARGDLGAELPIEEVPLLQEDIIRRCQSMQKPVIVATNMLESMIDHPTPTRAEVSDISIAVREGADAVMLSGETAHGKYPLKAVKVMHIVALRTESSLQKSTSSPSQSAAYKSHMGEMFAFHSSSMANTLSTPIIVFTRTGSMAIILSHNRPSSTVFAFTNNERVKQRLALYHGVVPIYMEFSSDAEETFSRAIKLLLSKSLVKDGQYVTLVQSGAQPIWRRHSTHHIQVRKVQS

SEQ ID NO: 7350 - DNA, 2044 bp, Xenopus sp. (clawed frog)
  CDS (29)..(1612)
ttacgtagattccatacagtaggtcaacatgtctgaggcaggtagtgctttcattcagacccagcagctgcatgctgccatggcagacaccttcttggaacacatgtgccgtctagacatagactctgagccaattgtagcacgtaacacaggcatcatctgcactattggccctgcttcacgttctgtggaaatgctaaaggagatgataaaatctggaatgaatattgctcgtctgaacttttcccatggaacacacgagtatcatgctggcaccattaaaaatgtccgtgaagcaaccgagagcttagcttccaatcccattcactaccggcctgtggcagtggccctggacacaaagggaccagaaatccgcactggtctcattaaaggaagtggcacagcagaagtggagctaaaaaagggagcaactatgcgtatcactcttgatgatgcattccaggaaaactgtgatgagaatgtactgtgggtagattacaaaaaccttacaaaagtggtgaaacctggcagcaagatctatgtggatgatgggcttatttccttgctcgttaaggaaattggtccagacttctgcgtgactgagattgagaatgggggaatgttaggaagtaagaaaggagtgaacctccctggggcagctgtggatttgcctgctgtatcttcaaaagatatccaagacctgcaatttggtgtggagcaagatgtcgacatggtttttgcttcttttatcagaaaggcagcagatgtacatgaagtgagggaagttcttggagagaaaggcaaaaacatcaagattatcagcaaaattgaaaaccacgagggtgttcgcaggtttgatgagattctagaagcaagtgatggtataatggtggcacgtggtgatcttggtattgagatccctgccgaaaaagtcttccttgctcaaaagatgatgattggacgctgcaatcgtgctggcaaacctgtgatctgcgccactcagatgctggaaagcatgatcaaaaagcctcgcccaacacgtgccgaaggtagtgatgtggccaatgctgttctggatggggctgactgtataatgttgtcaggggagactgcaaagggagattacccattggaggctgtacgcatgcagcatgctattgcacgagaggcagaagcggccattttccatcggcagttgtttgaggaactgagacgcgtgtccccactgacccgtgatcccacagaagcgactgctgttggagcagtagaggcatcattcaaatgctccagtggagccatcatcgtgcttactaaatctggcaggtctgcgcatttactgtctcgttaccgcccacgcgcacccatcatctctgttactcgtaatgggcagacagcacgtcaggcacatctctatcgtggcatctttcctgtactctatagagaagctgtgcacgaggcatgggctgaggatgttgatagcagggtcaactttgcaatggacattggcaaggcccgtggctttttcaagagtggggatgttgtgatcgtactcactggctggcggccaggctctggtttcaccaacacaatgcgtgttgttccagtgccttaatctgcaaacccgataaaactataatctgttgtccattttttttctgcactctccacccagcagacgtaaactctgtagaccagattataaaccctttatttgtggcattgggagagacattagtgtgtttgtgcgcagcacggaattccattgttccgttgcttattacgatccctgtgttagtcggttattgcaagtgctgcccacatatacatgagatgtgtagaaatatctgtaattacactcctttctcagcccttcacttgtgcaagaaattgccttggatgtgcaataagtttgctcttcatctctagtctgagcagctacgtagttttttttgcttgtggttaggggaaggctttgtgttgtcctcatcctgtctgagatgcactgagtttagtgttaataaatcgatgcttatgcagcctcaca

SEQ ID NO: 7351 - protein, 527 aa, Xenopus sp. (clawed frog)
MSEAGSAFIQTQQLHAAMADTFLEHMCRLDIDSEPIVARNTGIICTIGPASRSVEMLKEMIKSGMNIARLNFSHGTHEYHAGTIKNVREATESLASNPIHYRPVAVALDTKGPEIRTGLIKGSGTAEVELKKGATMRITLDDAFQENCDENVLWVDYKNLTKVVKPGSKIYVDDGLISLLVKEIGPDFCVTEIENGGMLGSKKGVNLPGAAVDLPAVSSKDIQDLQFGVEQDVDMVFASFIRKAADVHEVREVLGEKGKNIKIISKIENHEGVRRFDEILEASDGIMVARGDLGIEIPAEKVFLAQKMMIGRCNRAGKPVICATQMLESMIKKPRPTRAEGSDVANAVLDGADCIMLSGETAKGDYPLEAVRMQHAIAREAEAAIFHRQLFEELRRVSPLTRDPTEATAVGAVEASFKCSSGAIIVLTKSGRSAHLLSRYRPRAPIISVTRNGQTARQAHLYRGIFPVLYREAVHEAWAEDVDSRVNFAMDIGKARGFFKSGDVVIVLTGWRPGSGFTNTMRVVPVP

SEQ ID NO: 7352 - DNA, 2146 bp, Mus musculus (house mouse)
  CDS (30)..(1625)
ccgaagtacgcccgaggacttcaggaaccatgccgaagccacacagtgaagcagggactgccttcattcagacccagcagctccatgcagccatggctgacaccttcctggaacacatgtgccgcctggacattgactctgcccccatcacggcccgcaacactggcatcatttgtaccattgggcctgcttcccgatctgtggagatgctgaaggagatgattaagtctggaatgaatgtggctcggctgaatttctctcatggaacccatgagtaccatgcagagaccatcaagaatgtccgtgaagccacagaaagctttgcatctgatcccattctctaccgtcctgttgcggtggctctggatacaaagggacctgagatccggactggactcatcaagggcagcggcaccgctgaggtggagctgaagaagggagccactctgaagatcaccctggacaacgcttacatggagaagtgtgacgagaacatcctgcggttggactacaagaacatctgcaaggtggtggaggtgggcagcaagatctacgtggacgatgggctcatctcactgcaggtgaaggagaaaggcgctgacttcctggtgacggaggtggagaatggtggctccttgggcagcaagaagggcgtgaacctgccgggcgctgctgtggatctccccgctgtgtcggaaaaggacatccaggacctgaagtttggcgtggagcaggatgtggacatggtgtttgcatctttcatccgcaaggcagccgacgtgcatgaagtcaggaaggtgctgggagagaagggcaagaacatcaagatcatcagcaaaatcgagaaccatgaaggcgtccgcaggtttgatgagatcttggaggccagcgatgggatcatggtggctcgtggtgacctgggcactgagattcctgcagagaaggtcttcctgtctcagaagatgatgatcgggcgatgcaaccgagctgggaagcctgtcatctgttccacacagatgctggagatcatgatcaagaagccacgccccacccgtgctgaaggcagtgatgtggccaatgcagtcctggatggagcagactgcatcatgctgtctggagaaacagccaagggggactaccctctggaggctgttcgcatgcagcacctgattgcccgagaggcagaggctgccatctaccacttgcagctattcgaggaactccgccgcctggcgcccattaccagcgaccccacagaagctgccgccgtgggtgccgtggaggcctccttcaagtgctgcagtggggccattatcgtgctcaccaagtctggcaggagtgctcaccaagtggccaggtaccgccctcgggctcctatcattgccgtgactcgaaatccccagactgctcgccaggcccatctgtaccgtggcatcttccctgtgctgtgtaaggatgccgtgctgaatgcctgggctgaggatgtcgaccttcgtgtaaacttggccatggatgttggcaaggcccgaggcttcttcaagaagggagatgtggtcattgtgctgaccgggtggcgccctggctctggattcaccaacaccatgcgtgtagtgcctgtaccttgatggccctctggagcccctcttctagcccctgtcccttcccctcccctatcctttccattaggccagcaacgcttgtagtgctcactctgggccatagtgtggcgctggtgggctgggacaccagggaaaattaatgcctctaaaacatgcaatagagaccagctattattcagggccctacctgagccaggggtggaggaggaatgcaggactggaaaccctgactttatcacagaagggcggcagcatctctggactttgcttctgtagaaagttgtcagagaattcgcagccctagcctggagtcaggagacagcaagagtaggggctgaggttgtggggcccagggtcccagtgtagatgacgacttctggccctggccctgacctgctttcccaacagctttggcctccccactccttgtgcactccacttctgtcactgcagacactccactctccaccttgtattctgcagtctccaggcctgttgctatagtgcccacctgaatgtcaataaag

SEQ ID NO: 7353 - protein, 531 aa, Mus musculus (house mouse)
MPKPHSEAGTAFIQTQQLHAAMADTFLEHMCRLDIDSAPITARNTGIICTIGPASRSVEMLKEMIKSGMNVARLNFSHGTHEYHAETIKNVREATESFASDPILYRPVAVALDTKGPEIRTGLIKGSGTAEVELKKGATLKITLDNAYMEKCDENILRLDYKNICKVVEVGSKIYVDDGLISLQVKEKGADFLVTEVENGGSLGSKKGVNLPGAAVDLPAVSEKDIQDLKFGVEQDVDMVFASFIRKAADVHEVRKVLGEKGKNIKIISKIENHEGVRRFDEILEASDGIMVARGDLGTEIPAEKVFLSQKMMIGRCNRAGKPVICSTQMLEIMIKKPRPTRAEGSDVANAVLDGADCIMLSGETAKGDYPLEAVRMQHLIAREAEAAIYHLQLFEELRRLAPITSDPTEAAAVGAVEASFKCCSGAIIVLTKSGRSAHQVARYRPRAPIIAVTRNPQTARQAHLYRGIFPVLCKDAVLNAWAEDVDLRVNLAMDVGKARGFFKKGDVVIVLTGWRPGSGFTNTMRVVPVP

SEQ ID NO: 7354 - DNA, 1596 bp, Homo sapiens (man)
  CDS (1)..(1596)
atgtcgaagccccatagtgaagccgggactgccttcattcagacccagcagctgcacgcagccatggctgacacattcctggagcacatgtgccgcctggacattgattcaccacccatcacagcccggaacactggcatcatctgtaccattggcccagcttcccgatcagtggagacgttgaaggagatgattaagtctggaatgaatgtggctcgtctgaacttctctcatggaactcatgagtaccatgcggagaccatcaagaatgtgcgcacagccacggaaagctttgcttctgaccccatcctctaccggcccgttgctgtggctctagacactaaaggacctgagatccgaactgggctcatcaagggcagcggcactgcagaggtggagctgaagaagggagccactctcaaaatcacgctggataacgcctacatggaaaagtgtgacgagaacatcctgtggctggactacaagaacatctgcaaggtggtggaagtgggcagcaagatctacgtggatgatgggcttatttctctccaggtgaagcagaaaggtgccgacttcctggtgacggaggtggaaaatggtggctccttgggcagcaagaagggtgtgaaccttcctggggctgctgtggacttgcctgctgtgtcggagaaggacatccaggatctgaagtttggggtcgagcaggatgttgatatggtgtttgcgtcattcatccgcaaggcatctgatgtccatgaagttaggaaggtcctgggagagaagggaaagaacatcaagattatcagcaaaatcgagaatcatgagggggttcggaggtttgatgaaatcctggaggccagtgatgggatcatggtggctcgtggtgatctaggcattgagattcctgcagagaaggtcttccttgctcagaagatgatgattggacggtgcaaccgagctgggaagcctgtcatctgtgctactcagatgctggagagcatgatcaagaagcccccgcccactcgggctgaaggcagtgatgtggccaatgcagtcctggatggagccgactgcatcatgctgtctggagaaacagccaaaggggactatcctctggaggctgtgcgcatgcagcacctgattgcccgtgaggcagaggctgccatctaccacttgcaattatttgaggaactccgccgcctggcgcccattaccagcgaccccacagaagccaccgccgtgggtgccgtggaggcctccttcaagtgctgcagtggggccataatcgtcctcaccaagtctggcaggtctgctcaccaggtggccagataccgcccacgtgcccccatcattgctgtgacccggaatccccagacagctcgtcaggcccacctgtaccgtggcatcttccctgtgctgtgcaaggacccagtccaggaggcctgggctgaggacgtggacctccgggtgaactttgccatgaatgttggcaaggcccgaggcttcttcaagaagggagatgtggtcattgtgctgaccggatggcgccctggctccggcttcaccaacaccatgcgtgttgttcctgtgccgtga

SEQ ID NO: 7355 - protein, 531 aa, Homo sapiens (man) [sequence omitted]

SEQ ID NO: 7356 - DNA, 2113 bp, Saccharomyces cerevisiae
  CDS (437)..(1957)
cgcttttatgaacatattccgatatctctcacgatactaatattcgaaaaatctttctccttcgccgcgatggatggaagtaaaaacacatatataaaagtataaaatgaatgctggcgtattcttacatacaagagatttgtaaaaagtcaatgaaaagttctccacacgtgtttttctcttttactttttttttcttccttttggtttccttttttctttctcgtcgcttttatttagcgacgcagcataggaaacaggggtaaagtgtcataactttttagagaaaatgatatatcattaatatgcacacgtttatataaatggagaaagaaaacaaagaacataaaacattttgaagcagagcggtgaaacgcaactatattttactttcatcctctacgtccattgtaagattacaacaaaagcactatcgatgccagagtccagattgcagagactagctaatttgaaaataggaactccgcagcagctcagacgcacctccataataggtaccattgggcccaagacaaatagctgcgaggccattactgctctgagaaaagctggtttgaacatcattcgattgaacttttcccatggctcctacgaattccatcaatcagtaatcgaaaatgctgtgaaatcggaacagcaattccctggcaggccgctcgccattgccctggataccaagggtcccgagatcagaacaggtcgcacgttaaatgaccaagatctttatatccccgtagaccaccaaatgatctttaccactgacgcaagttttgcaaacacctccaatgataaaatcatgtatatagactatgctaacctgacaaaagttatcgttccggggagatttatatacgtggacgacgggattctctcttttaaagtgctccaaatcattgacgaatctaatttaagggtgcaagcggtaaactcgggttatatcgcatctcataaaggtgttaatctgcctaataccgacgttgatttgccccccttgtccgccaaagacatgaaggacttgcaattcggagtccgcaatggcattcacatcgtatttgcctctttcataagaacttcagaagatgtgttgtctatcagaaaagcgttgggttctgaagggcaagatatcaagattatatccaagatagaaaaccagcaagggttggataattttgacgaaatcctggaagtcacggatggtgttatgatagcgagaggcgatttaggaattgaaatcctggcacctgaagtattagccattcaaaaaaagctgattgcaaaatgtaatttggcgggcaaacctgtcatttgcgcgactcagatgctggattcaatgacacacaatccgagaccgacaagggctgaagtatcggatgtgggtaacgctgtgttggatggtgctgattgtgttatgctttctggagaaacggcgaagggtgattatccggtgaatgcagttaatattatggcggcgaccgctctgattgctgaaagtactatcgctcatttggctctttatgacgatctcagagacgccactcccaaacctacttccactacggaaactgtagcagctgcagctaccgcagcaatcttggagcaagatggtaaggccatcgttgtattatctactacagggaacacggcaaggctactgtcgaagtatagaccaagctgccctatcatattagtaacaagacacgcaagaacggcaagaattgcgcatttgtatagaggtgttttcccatttctgtatgaaccgaaacgcctagacgactggggtgaggatgttcataggcgcctaaagtttggtgttgaaatggcgaggtctttcggaatggtggacaacggtgatactgttgtttccattcaaggattcaaaggaggagtcggccattccaataccttacgcatttctactgttggtcaagaattctagtaaaaattaaagtccttattttttttacttaattttatttaattgtccattgtgtcagttattttttttttctttggtaataatcatgcagatattacaggtaatgttcgcaaactgcgtgtttactgtatgctgaaatgtttttttttttttaat

SEQ ID NO: 7357 - protein, 506 aa, Saccharomyces cerevisiae
MPESRLQRLANLKIGTPQQLRRTSIIGTIGPKTNSCEAITALRKAGLNIIRLNFSHGSYEFHQSVIENAVKSEQQFPGRPLAIALDTKGPEIRTGRTLNDQDLYIPVDHQMIFTTDASFANTSNDKIMYIDYANLTKVIVPGRFIYVDDGILSFKVLQIIDESNLRVQAVNSGYIASHKGVNLPNTDVDLPPLSAKDMKDLQFGVRNGIHIVFASFIRTSEDVLSIRKALGSEGQDIKIISKIENQQGLDNFDEILEVTDGVMIARGDLGIEILAPEVLAIQKKLIAKCNLAGKPVICATQMLDSMTHNPRPTRAEVSDVGNAVLDGADCVMLSGETAKGDYPVNAVNIMAATALIAESTIAHLALYDDLRDATPKPTSTTETVAAAATAAILEQDGKAIVVLSTTGNTARLLSKYRPSCPIILVTRHARTARIAHLYRGVFPFLYEPKRLDDWGEDVHRRLKFGVEMARSFGMVDNGDTVVSIQGFKGGVGHSNTLRISTVGQEF

SEQ ID NO: 7358 - DNA, 1527 bp, Mycoplasma pneumoniae
  CDS (1)..(1527): transl_table=4
atgattcaccacctaaaacgcactaagattattgccacctgtggtccggctttaactaaaaagctatgaacgctagcaatgttagatgacccagcttacgctgcgatgaaagcagaagcttacgccaacattgaaaatattattaaaaacggcgtaacggtaatccgcttaaacttctcccatggtaaccatgaagagcaggctgtaaggattaagattgttcgtgatgtggctaaaaagctcaacctcccggtgtcaattatgttagacaccaacggtccggaaatccgcgtctttgaaacggcccctgaagggttaaagatcctcaaggacagtgaggtggttattaacaccaccactaaggaagtggctaaaaataaccagtttagtgtgagtgatgctagtggcacttacaacatggtaaacgatgttaaggtgggacaaaaaatcctcgttgatgatggtaagttaagcttagtcgtaaagcggattgatacgaagaacaaccaggttatttgtgttgcccaaaatgaccacactatctttaccaaaaagcgcttaaacctccccaatgccgactactcaattccctttttaagtgctaaagacctacgcgacattgactttggtttaacccaccaaattgactacattgccgcttcctttgtcaatacaacggaaaacatcaagcaactgcgtgactacctcgcttctaagaatgccaagcatgtcaagcttattgccaaaattgagtccaaccacgctttaaacaacattgatgggattattaaagcgagtgatggcattatggtagcacggggtgatttgggcttggagatcccatattacaaggtgccttactgacaacggtacatgataaaagcgtgtcgtttctttaacaagcgtgttattaccgcaactcaaatgttggactctttggaaaaaaacatccaaccaactcgcgctgaagttactgatgtgtactttgccgtggaccgcggcaatgatgccaccatgttaagtggagaaaccgcaaatggggcgtttccccttaatgctgtgtatgtaatgaagatgattgataaacagtccgaaacgttctttgattaccagtacaacttgaactattacatggccaactccaaggcccgtcacagtgagttttgaaagcaggtggtgttaccgttagcacaaaaaacagcaccaaaacgcaaactgattaacagtgactttaaatacgactttgtggtgcacgccaccaacaaccttaatgaaatctatgccttgtccaacgctcgcttagcggctgcggtaattatcttgaccaatgacccccaagtatacaccgggcacggcgttgattatggcatcttcccttacttaattgaccaaaagccgcaaagcttaagtaaagctgagtttaagagcttagctaatgttgccattaaacactaccagcagcatggggaaattagtcaattaaagcagtgtttgggagtatttcacaataagatcattagcttataa

SEQ ID NO: 7359 - protein, 508 aa, Mycoplasma pneumoniae
MIHHLKRTKIIATCGPALTKKLWTLAMLDDPAYAAMKAEAYANIENIIKNGVTVIRLNFSHGNHEEQAVRIKIVRDVAKKLNLPVSIMLDTNGPEIRVFETAPEGLKILKDSEVVINTTTKEVAKNNQFSVSDASGTYNMVNDVKVGQKILVDDGKLSLVVKRIDTKNNQVICVAQNDHTIFTKKRLNLPNADYSIPFLSAKDLRDIDFGLTHQIDYIAASFVNTTENIKQLRDYLASKNAKHVKLIAKIESNHALNNIDGIIKASDGIMVARGDLGLEIPYYKVPYWQRYMIKACRFFNKRVITATQMLDSLEKNIQPTRAEVTDVYFAVDRGNDATMLSGETANGAFPLNAVYVMKMIDKQSETFFDYQYNLNYYMANSKARHSEFWKQVVLPLAQKTAPKRKLINSDFKYDFVVHATNNLNEIYALSNARLAAAVIILTNDPQVYTGHGVDYGIFPYLIDQKPQSLSKAEFKSLANVAIKHYQQHGEISQLKQCLGVFHNKIISL

SEQ ID NO: 7360 - DNA, 1452 bp, Synechocystis sp
  CDS (1)..(1452)
atgccagccctgattaacccggtgaagtttatgagacccctaagtcatcgcaccaaaattgtggccaccattggccccgccagtagttcggtagaggtgatacgtcagatggtggatgcgggcatgaatgtggcccggctgaatttttcccacggtagttatgaggaccatgccaccatggttcgcctactacggtcagtggagcaggaaatggacacccccattacccttttgcaagatttacaggggcccaaaattcggattggtcagttgccggggggagaaaagcaactgcgggaaggggaaaaagtttctttggtgccggtggaaattggcgatcgccatcctggagcggtgggcattgactatccccatttggcgacggaggcaaaagtaggggaaagaattttattggacgatggtttactggaaatgaaagttgtgtccattcaagatccagaggtaatttgtgaagtggtgaccgggggcatcctcaaaagtcgcaaaggggtcaatctaccgggtttagtcctaaccctaccttccatgacgaccaaagacaagcaagacttagaatttggtttgagccaaggcattgactgggtttcccttagttttgtccgcaaaggggaagatatccacacccttaaacaatttctcgctgaacggggccatcctgatctgccggtcattgccaaaattgaaaaaccccaggcgatcgataatctagaagaaatcgtggcagtttccaacggcattatggtggccaggggggatctgggggtggaagtaaacccagaaaaggttccccgtttgcaaaaggaaattattcggcgctgtaacgtgcgggccattccggtcatcaccgctacccaaatgctagatagcatgattcaaaattcccgacccaccagggcggaagccagtgacgtggccaacgctattttggacggcaccgatgcggtgatgttatcgggggaatcggcagtgggacaatatcccgttaaatcagtgcaaatgttgcgaaaaattgccgaagagacggaagtgggtctacatcttgttaataatcccccaatagaaaatacggaaacccatgccctaagtgaagcgttagtggtaattgacggaattctagatttaaaatacattgtcacgttcaccacctcaggttttacttctctcctcgcttccaaccaaagaccgtcggtgccggtgattgctttcactccctcagaaaaggtttaccatagcctcaacttagtttggggtattattccctttttaattaacgaagaatttgacacctttgaggatttaatccaacaggcggaggtactactgcgggatagaaaaatggtggaaaagggcgatcagttgctaatcatggcgggaattcccactaaaatacccaggggcactaatttcctcaagattcaccgtatttcttaa

SEQ ID NO: 7361 - protein, 483 aa, Synechocystis sp
MPALINPVKFMRPLSHRTKIVATIGPASSSVEVIRQMVDAGMNVARLNFSHGSYEDHATMVRLLRSVEQEMDTPITLLQDLQGPKIRIGQLPGGEKQLREGEKVSLVPVEIGDRHPGAVGIDYPHLATEAKVGERILLDDGLLEMKVVSIQDPEVICEVVTGGILKSRKGVNLPGLVLTLPSMTTKDKQDLEFGLSQGIDWVSLSFVRKGEDIHTLKQFLAERGHPDLPVIAKIEKPQAIDNLEEIVAVSNGIMVARGDLGVEVNPEKVPRLQKEIIRRCNVRAIPVITATQMLDSMIQNSRPTRAEASDVANAILDGTDAVMLSGESAVGQYPVKSVQMLRKIAEETEVGLHLVNNPPIENTETHALSEALVVIDGILDLKYIVTFTTSGFTSLLASNQRPSVPVIAFTPSEKVYHSLNLVWGIIPFLINEEFDTFEDLIQQAEVLLRDRKMVEKGDQLLIMAGIPTKIPRGTNFLKIHRIS

SEQ ID NO: 7362 - DNA, 1776 bp, Synechocystis sp
  CDS (1)..(1776)
atgcaaacgtctccccttccccgtcgtaccaaaatcgtcgctaccattggccccgcgacccaaagcaaggaagtgctgagacaactgatccaagccggtgctaccactttccgcctcaatttttcccacggagaccacgcttaccaccaacaaagtatccgtttgattcgccagattgcctttgaactgaaccaaccagtgggcattctccaggatttacaggggccaaagattcgggtgggcaaatttctcaatgatgccggctctgtgcaactcaaaaacggtgatccctataccctcaccagtcgcccggtggaatgtacggaaaccattagttccattagctacgaatatttagccgacgaagtaccttctggggcaagaattttgctcgacgacggcaaactggaaatgttggtggaggaagtggacactgttgcccgggatctccactgtcgggtgattgtggggggaaccctttccagcaataaaggggttaattttcccggggtctgcctttccgttaaggccatgaccgataaagataaggaagatttgatgttcgggctggaccaaggggtggactgggtggccctgagttttgttcgtaatccccaggatattgatgagattaaggggttaattgcggcggcagggaaatccgtgccggtaatcgccaaaattgagaagcacgaagcgattaaggatatgcaggcggtgctggaaaaatgtgacggtgtcatggtggcccggggggacttgggggtagaactacccgcagaagatgtacctattttgcaaaagaaactcattgccactgctaaccggttgggcattcctgtcattactgctacccaaatgttggacagtatggtcaacagcccccgacctactagggctgaagtgtccgacgtggccaatgccatcctcgatggtaccgatgcggtgatgctctccaacgaaacggcgatcggtaaatttcccgtggaagcagtggctattatggccaaaattgcggagcgcattgaacaggaagatatcaatccttcccaagcggaagccagtcgcacttctattcccaatgctatttccagcgccgttagccagattgcggaaaccctcaacgcggcggctattatgtctttgactaagaccggatccaccgcccgccatgtgtcaaagttccgccccaaaacccccattctggccgttacgccccatgtggatgtgtcccgtcagttgcagttggtgtggggagttaagcccctgttggtattggatttaccttccaccagccaaacgttccaagccgccattaacgtggcccaggaaaaccattttctccgggatggagatttggtggtgatgaccgccgggacattgcagggagttgccggttcgacggatttaatcaaagtggaagtggtcaaggccattcttggtcggggtgtaggtattggccaaggagctgtaagtggccgggccagggttgccagtcgtccccaggcgatcgcccaatttacccagggagaaattttagtagttccctctaccaacgctgattgtgtggacatgatgcgacgggcggcgggcattatcaccgaagaagaaagcctgactagccatgcggccattattggtttgcggctgggggtgccggtcattgtgggttttaaaggcgctacccaaaagattcgagatggagccattgtcaccatcgatgcccaaaaaggactgatttattccggtgcattacccccggtgtccaaaggatag

SEQ ID NO: 7363 - protein, 591 aa, Synechocystis sp
MQTSPLPRRTKIVATIGPATQSKEVLRQLIQAGATTFRLNFSHGDHAYHQQSIRLIRQIAFELNQPVGILQDLQGPKIRVGKFLNDAGSVQLKNGDPYTLTSRPVECTETISSISYEYLADEVPSGARILLDDGKLEMLVEEVDTVARDLHCRVIVGGTLSSNKGVNFPGVCLSVKAMTDKDKEDLMFGLDQGVDWVALSFVRNPQDIDEIKGLIAAAGKSVPVIAKIEKHEAIKDMQAVLEKCDGVMVARGDLGVELPAEDVPILQKKLIATANRLGIPVITATQMLDSMVNSPRPTRAEVSDVANAILDGTDAVMLSNETAIGKFPVEAVAIMAKIAERIEQEDINPSQAEASRTSIPNAISSAVSQIAETLNAAAIMSLTKTGSTARHVSKFRPKTPILAVTPHVDVSRQLQLVWGVKPLLVLDLPSTSQTFQAAINVAQENHFLRDGDLVVMTAGTLQGVAGSTDLIKVEVVKAILGRGVGIGQGAVSGRARVASRPQAIAQFTQGEILVVPSTNADCVDMMRRAAGIITEEESLTSHAAIIGLRLGVPVIVGFKGATQKIRDGAIVTIDAQKGLIYSGALPPVSKG

SEQ ID NO: 7364 - DNA, 1494 bp, Arabidopsis thaliana (mouse-ear cress)
  CDS (1)..(1494)
atggctatggaacagaggcctaagacgaagatcgtgtgcacactcgggccggcgtccagatctgtcccaatggtcgagaagcttcttatggcggggatgagcgtggctcgcttcaacttttctcatggatcttacgaatatcaccaggagactctcgacaatcttcgtcaggccatgcttaacactggcatgctatgtgctgtcatgctcgacaccaagggaccagagattcgaaccgggttcttaaaggatgggaaacctatccagctcaaacaaggccaagaaatcaccatttcaactgactatgacttgaagggtgatgagaaaactatttgcatgagctacaagaagttggcgcaagatgtgaatccaggcatggtcatactctgtgccgatggtaccatctcgttaaaggtcctttcttgtgacaaagaaaagggcactgtccgttgtcgttgtgagaacacttcaatgcttggtgaaagaaagaacgttaatctccctggtgttgtggttgatctcccaactctaactgaaaaagacaagcaagacattcttgaatggggagttcccaatcaaatcgacatgattgctctgtcttttgtcagaaaaggttcggacttggtacaagttaggaagctacttggaaaacatgctaaaaccatacttctcatgtcaaaggttgaaaaccaagaaggtgtagcgaattttgatgatatcttgataaactcggatgcgtttatgatcgcaagaggtgaccttggaatggagattccaattgagaagatattcttagctcagaaagtgatgatctacaagtgcaatttcatggggaagccagtggttacagcgactcagatgcttgagtctatgatcaaatccccacgaccaacaagagcagaagctactgatgttgcaaatgctgtcctcgatggcacagactgtgtcatgcttagtggtgaaaccgcagctggagcatacccagagcttgctgttcgtacaatggccaagatatgtgtggaagcagagagcacacttgactatggagacatcttcaagaggataatgcttcacgctgcggtccctatgagcccgatggagtcacttgcttcatctgcggtcagaaccgctacttcctcaagagccactcttatgatggtcttgaccagaggaggcagcacggcgaggctggtggctaagtatagaccagggatacccattttgtccgtggtggttcctgaaatcacgtctgactcttttgattgggcgtgtagcaacgaggcaccggcaagacacagtctcatctaccgtggtttagtcccggtgctgtatgctggatcggctagagcctcgatcgacgagtcaacagaagaaactctcgagttcgcgtcagagtatggtaaaaagaagcaactctgcaagaccggagactctgttgtggctctcttccgtacaggtaacgctattgttatcaagatcttgaccgtcaagtga

SEQ ID NO: 7365 - protein, 497 aa, Arabidopsis thaliana (mouse-ear cress)
MAMEQRPKTKIVCTLGPASRSVPMVEKLLMAGMSVARFNFSHGSYEYHQETLDNLRQAMLNTGMLCAVMLDTKGPEIRTGFLKDGKPIQLKQGQEITISTDYDLKGDEKTICMSYKKLAQDVNPGMVILCADGTISLKVLSCDKEKGTVRCRCENTSMLGERKNVNLPGVVVDLPTLTEKDKQDILEWGVPNQIDMIALSFVRKGSDLVQVRKLLGKHAKTILLMSKVENQEGVANFDDILINSDAFMIARGDLGMEIPIEKIFLAQKVMIYKCNFMGKPVVTATQMLESMIKSPRPTRAEATDVANAVLDGTDCVMLSGETAAGAYPELAVRTMAKICVEAESTLDYGDIFKRIMLHAAVPMSPMESLASSAVRTATSSRATLMMVLTRGGSTARLVAKYRPGIPILSVVVPEITSDSFDWACSNEAPARHSLIYRGLVPVLYAGSARASIDESTEETLEFASEYGKKKQLCKTGDSVVALFRTGNAIVIKILTVK

SEQ ID NO: 7366 - DNA, 2115 bp, Ricinus communis (castor bean)
  CDS (118)..(1869)
ggcccctcctctctgccactatggttcagccttcttcgctgctctctctttctttcttcctacttgttctcttccatggctctctagctcgccgtgtgtccgccaccggtaacaacaatgtcacagtctctccatttctcaccgaacctcactttcgccaaacaacctttccctaagctccctctcccattcccaacctccaattcccggtatccagtcaataattataaatcactctcaatcaaagcgtccacgtcgccgtcatcatcatcagatcctcaagttttagttgcggataacggaacagggaacagcggcgttttgtataataataacaacaaatcagttacagtttctgatccgagctcaattgaagttgacgccgtgacggagacggagttaaaagagaatggattcaggagtacacgtaggacaaagctagtgtgtacgataggaccagcgacttgtggatttgaagagctggaagcgttagcagtaggaggaatgaatgtagcgagaattaatatgtgtcatggaacacgtgagtggcacaagagtgtaattgaacgtgttaggagattgaatgaagagaaaggttttgctgttgctattatgatggatactgaaggtagtgaaattcatatgggtgatttaggtggtgcttcttctgctaaagctgaggatggtgaaatctggacttttagtgtcagagcctatgattctcctcgcccagagcgcaccatcaatgttaactatgacggttttgctgaggatgtgaaagttggggatgagctacttgtggatggtggaatggttaggtttgaggtgattgagaaaattggcccagatgtcaagtgccgatgtactgatcctggactgttattaccacgagctaatttgactttctggagggatgggagtcttgttagagaacgtaatgcaatgcttccaacaatttcctctaaggattggttagatattgactttggtatcgcagagggtgttgattttattgcaatatcttttgtcaagtctgctgaagtgattaatcatcttaaaagctacattgctgcaaggtctcgtgacagtgatatagctgtcattgctaagatagagagtattgactcattgaagaacttagaagagatcattcgagcatcagatggagctatggtagcaagaggagatctgggtgctcagataccattggaacaggttccatcagcccagcaaaacattgttcaggtctgcaggcagctaaataagccagtcattgttgcttctcagttacttgaatcaatgattgaataccctacacccaccagagcagaagtggctgatgtttctgaagctgttaggcaacgggctgatgctttgatgctctctggtgagtcagccatgggccagtaccccgagaaggcattggctgttctcagaagtgtcagtgtgagaattgagaagtggtggagagaagagaagcaccatgaagcaatggaactcccagcaattggatccacttattccgactctatttcagaggagatttgcaactctgctgccaagatggcgaacaacttgggggtggatgcactttttgtgtatacaaaagatggtcacatggcatctctcttgtctcgttgccggcctgactgcccaatctttgcttttacaactaccacatctgtacggagacgcctgaatttacagtggggcctgatacccttccgcctgagctttgctgatgatatggaaagcaaccttaacaaaaccttctctttgctcaaggctagaggaatgatcaaatcgggtgatcttgttatagctgtttcagacatgttacagtccatccaagttatgaatgttccttagaatttattttagatcgctgacgccatttcaacccttcatctagactgccttatctattatttgctatgtccatcgttactagttctgcaatttggttactgctggaaagatttgctggaaaggaaacggagagtaactgtgagttcatcatgttttcacctggctttatgcttgttatttcaaggagagcctcctatttttcaaaatggttggttgggattattccatttttggcaggtaatcaca

SEQ ID NO: 7367 - protein, 583 aa, Ricinus communis (castor bean)
MSQSLHFSPNLTFAKQPFPKLPLPFPTSNSRYPVNNYKSLSIKASTSPSSSSDPQVLVADNGTGNSGVLYNNNNKSVTVSDPSSIEVDAVTETELKENGFRSTRRTKLVCTIGPATCGFEELEALAVGGMNVARINMCHGTREWHKSVIERVRRLNEEKGFAVAIMMDTEGSEIHMGDLGGASSAKAEDGEIWTFSVRAYDSPRPERTINVNYDGFAEDVKVGDELLVDGGMVRFEVIEKIGPDVKCRCTDPGLLLPRANLTFWRDGSLVRERNAMLPTISSKDWLDIDFGIAEGVDFIAISFVKSAEVINHLKSYIAARSRDSDIAVIAKIESIDSLKNLEEIIRASDGAMVARGDLGAQIPLEQVPSAQQNIVQVCRQLNKPVIVASQLLESMIEYPTPTRAEVADVSEAVRQRADALMLSGESAMGQYPEKALAVLRSVSVRIEKWWREEKHHEAMELPAIGSTYSDSISEEICNSAAKMANNLGVDALFVYTKDGHMASLLSRCRPDCPIFAFTTTTSVRRRLNLQWGLIPFRLSFADDMESNLNKTFSLLKARGMIKSGDLVIAVSDMLQSIQVMNVP

SEQ ID NO: 7368 - DNA, 2022 bp, Ricinus communis (castor bean)
  CDS (46)..(1527)
cgggtgggtatggtaccacaagtggttatggtcccactgcaggatatggcggtggtggtaaaggatttggaagaagcagtgagagtggtagttttggcagtgttaagggatatggaagtggtggtggtgctggtaacggcagtcatgggagtagtaggggatatgaatgtagcgagaattaatatgtgtcatggaacacgtgagtggcacaagagtgtaattgaacgtgttaggagattgaatgaagagaaaggttttgctgttgctattatgatggatactgaaggtagtgaaattcatatgggtgatttaggtggtgcttcttctgctaaagctgaggatggtgaaatctggacttttagtgtcagagcctatgattctcctcgcccagagcgcaccatcaatgttaactatgacggttttgctgaggatgtgaaagttggggatgagctacttgtggatggtggaatggttaggtttgaggtgattgagaaaattggcccagatgtcaagtgccgatgtactgatcctggactgttattaccacgagctaatttgactttctggagggatgggagtcttgttagagaacgtaatgcaatgcttccaacaatttcctctaaggattggttagatattgactttggtatcgcagagggtgttgattttattgcaatatcttttgtcaagtctgctgaagtgattaatcatcttaaaagctacattgctgcaaggtctcgtgacagtgatatagctgtcattgctaagatagagagtattgactcattgaagaacttagaagagatcattcgagcatcagatggagctatggtagcaagaggagatctgggtgctcagataccattggaacaggttccatcagcccagcaaaacattgttcaggtctgcaggcagctaaataagccagtcattgttgcttctcagttacttgaatcaatgattgaataccctacacccaccagagcagaagtggctgatgtttctgaagctgttaggcaacgggctgatgctttgatgctctctggtgagtcagccatgggccagtaccccgagaaggcattggctgttctcagaagtgtcagtgtgagaattgagaagtggtggagagaagagaagcaccatgaagcaatggaactcccagcaattggatccacttattccgactctatttcagaggagatttgcaactctgctgccaagatggcgaacaacttgggggtggatgcactttttgtgtatacaaaagatggtcacatggcatctctcttgtctcgttgccggcctgactgcccaatctttgcttttacaactaccacatctgtacggagacgcctgaatttacagtggggcctgatacccttccgcctgagctttgctgatgatatggaaagcaaccttaacaaaaccttctctttgctcaaggctagaggaatgatcaaatcgggtgatcttgttatagctgtttcagacatgttacagtccatccaagttatgaatgttccttagaatttattttagatcgctgacgccatttcaacccttcatctagactgccttatctattatttgctatgtccatcgttactagttctgcaatttggttactgctggaaagatttgctggaaaggaaacggagagtaactgtgagttcatcatgttttcacctggctttatgcttgttatttcaaggagagcctcctatttttcaaaatggttggttgggattattccatttttggcaggtaatcacaattttacccagtgacttcactttgcttaggttgagagtgatttattggttaatgtaccaaagaagatagagctgtaattacaaacagtatgctgtgactagtatgctatttaccagcttgaattaatggttcaacaaatgcttagactaagcatgatcaacataaaaaaatgtcagcagattctttttaagctgccatgttgctacatggtactttgttcttcattctactaaaacaatgagtatgata

SEQ ID NO: 7369 - protein, 493 aa, Ricinus communis (castor bean)
MAVVVKDLEEAVRVVVLAVLRDMEVVVVLVTAVMGVVGDMNVARINMCHGTREWHKSVIERVRRLNEEKGFAVAIMMDTEGSEIHMGDLGGASSAKAEDGEIWTFSVRAYDSPRPERTINVNYDGFAEDVKVGDELLVDGGMVRFEVIEKIGPDVKCRCTDPGLLLPRANLTFWRDGSLVRERNAMLPTISSKDWLDIDFGIAEGVDFIAISFVKSAEVINHLKSYIAARSRDSDIAVIAKIESIDSLKNLEEIIRASDGAMVARGDLGAQIPLEQVPSAQQNIVQVCRQLNKPVIVASQLLESMIEYPTPTRAEVADVSEAVRQRADALMLSGESAMGQYPEKALAVLRSVSVRIEKWWREEKHHEAMELPAIGSTYSDSISEEICNSAAKMANNLGVDALFVYTKDGHMASLLSRCRPDCPIFAFTTTTSVRRRLNLQWGLIPFRLSFADDMESNLNKTFSLLKARGMIKSGDLVIAVSDMLQSIQVMNVP

SEQ ID NO: 7370 - DNA, 1548 bp, Caenorhabditis elegans
  CDS (1)..(1548)
atgtatcaggacgatcatatcggttcagagcattcatctgctactactaatatttctcatttatgcggacttcggatctcggagagacctcaaaaaacaagaaaaactggtgttatttgcactatcggaccagcgtgtagtgatgtagagacactgagaaaaatgataaacactggaatgaatattgccagattgaatttctcacatggaactcacgaggcacatgctgcaacaatcaagacaatccgtgaagctgctgaaaatgctccattcccggtcgcaattgctcttgacaccaaaggacctgaaattcgtaccggaatgtttgccaataatatgaaagaagttcaattggaaaatgggaaaagtgttcgagtttccacagatccatctatggaatttgctgcaacatcttctcatatttatgctgactacagaaatcttccaaaagttgttcaacctggttcaagaatctatattgatgacggattgatttctttaatcgtcgaaagttgtgaagaaacagcagttatatgtacaattgaaaatggaggagctcttggaacacggaaaggtgttaatcttcctggaactattgttgatcttcctgcagtcacatcaaaagatatcgaagatttattatttggagttgagcaaggtgttgatattatttttgcatcattcatcagaaatgccgacggaattcataaaattcgacaagttcttggagaaaaaggaaagcatatttacataattgcaaaaatcgaatcagaagatggagtcactaattgcgatgaaatcatcgaagcatccgatggagtaatggttgcaagaggagatcttggaattgaaattcctgcggagaaagtattcctcgcccagaaaatgctcattgccaaatgtaatctggcgggaaaacctgtgatatgtgcaacccagatgctcgagagcatgatcaccaaacctcgtccgactagagcagaatgcagtgacgtggcaaacgctgtcttggatggagttgactgtgtgatgttgagtggagaaactgcaaaaggagattatccagttgaagcattggcgattatgcataatatctgcaaagaagcagaatctgcattcttccatatgaaacattttgaagagcttattcttcataccaagaaaccaactggaatgactcatacaactgcaattgcagctgtttctgcaacaatcacatgccgtgctgtcgctattattctcatcacaacaacgggaaaaaccgcccgtctatgttcccgataccgtccaccagttccaattattactgtttctcgtgatgaacgaatctctcgtcaacttcatcttcacagaggaatctttcctgtttactatccaaagggacgtattgatgaatgggatgttgatgttgaggaacgtgtgcaatacggagtaaatcttggtaagacacgtggattcattcatcttggagatccacttattgtgatcactggatggaagcaaggagctggattcacaaacaccatgagaattgtagttgccacctaa

SEQ ID NO: 7371 - protein, 515 aa, Caenorhabditis elegans
MYQDDHIGSEHSSATTNISHLCGLRISERPQKTRKTGVICTIGPACSDVETLRKMINTGMNIARLNFSHGTHEAHAATIKTIREAAENAPFPVAIALDTKGPEIRTGMFANNMKEVQLENGKSVRVSTDPSMEFAATSSHIYADYRNLPKVVQPGSRIYIDDGLISLIVESCEETAVICTIENGGALGTRKGVNLPGTIVDLPAVTSKDIEDLLFGVEQGVDIIFASFIRNADGIHKIRQVLGEKGKHIYIIAKIESEDGVTNCDEIIEASDGVMVARGDLGIEIPAEKVFLAQKMLIAKCNLAGKPVICATQMLESMITKPRPTRAECSDVANAVLDGVDCVMLSGETAKGDYPVEALAIMHNICKEAESAFFHMKHFEELILHTKKPTGMTHTTAIAAVSATITCRAVAIILITTTGKTARLCSRYRPPVPIITVSRDERISRQLHLHRGIFPVYYPKGRIDEWDVDVEERVQYGVNLGKTRGFIHLGDPLIVITGWKQGAGFTNTMRIVVAT

SEQ ID NO: 7372 - DNA, 1437 bp, Streptomyces coelicolor
  CDS (1)..(1437)
atgcgccgagcaaagatcgtctgcactcttgggcccgccaccgactcgtacgaccagatcaaggacctggtcgacgccggaatggacatcgcccgcttcaatttcagccacggcacccacgccgaacacgaagagcgctaccaccgtgtccgcaaggcgtccgacgagaccggccgcagcgtcggtgccctcgccgaccttcagggcccgaagatccgcctcggccacttcggtgaagggcccgtactccttgaacgcggcgacagcttcaccatcaccgtcgaggagggcgtcgagggcgaccgctacatctgcggcaccacctacgcgggcctggccgaggacgtcacccccggtgagcgcgtcctcgtcgacgacggcaaggtctgcctggaggtgaccggggtcgacgggacccgggtgcggacgcgggtgatcgagggcggcatggtctccgaccacaagggcctcaacctgcccggcgtcgcggtgtccgtgcccgccctgtcgaagaaggacgaggacgacctgcgctgggcgctgcgggccggcttcgacgtggtcgccctctccttcgtccgcagcggacgcgacatcctcgacgtgcaccgcatcatggacgaggagggccgccgcctccccgtcatcgccaaggtcgagaagccgcaggccgtggagaacatcgaggacatcgtcgcggccttcgacggcatcatggtcgcccggggcgacctcggcgtcgagatgcccctggaacaggtgccgaccgtccagaagcgcgcggtgaagctggccaagcgcaacgccaagccggtcatcgtcgccacccagatgctcgactcgatgatcgacaacgcccgccccacccgcgcggaggcctccgacgtcgccaacgccgtcatcgacggcaccgacgccgtgatgctctccggcgagaccagcgtcggcaagcaccccaccgacaccgtgcgcacgatggcccggatcgtcgaagcggccgaggaggacatcctcgccaagggactccccccgctgaccgaacggaacaagccccgcacccagggcggtgcggtcgcccgcgccgccgccgagatgggcgacttcctcggcgccaagttcctggtcgccttcacccagtccggcgacacggtccgccgcctctcccgctaccgctcgcccattccgctgctcgccttcaccccggaaccggcgacccgctcccagctgagcctgacctggggtgtggagaccttcctcggtccgcacgccgactccacggacgcgatggtcgaccaggtggacgagcttctcacccgctacggacgctgcgaaaagggcgacgtcgtggtcatcacggccggctcaccgccgggggtgtccggcacgacgaacctggtgcgtgtgcaccacatcggggaggacgacattcccaagtga

SEQ ID NO: 7373 - protein, 478 aa, Streptomyces coelicolor
MRRAKIVCTLGPATDSYDQIKDLVDAGMDIARFNFSHGTHAEHEERYHRVRKASDETGRSVGALADLQGPKIRLGHFGEGPVLLERGDSFTITVEEGVEGDRYICGTTYAGLAEDVTPGERVLVDDGKVCLEVTGVDGTRVRTRVIEGGMVSDHKGLNLPGVAVSVPALSKKDEDDLRWALRAGFDVVALSFVRSGRDILDVHRIMDEEGRRLPVIAKVEKPQAVENIEDIVAAFDGIMVARGDLGVEMPLEQVPTVQKRAVKLAKRNAKPVIVATQMLDSMIDNARPTRAEASDVANAVIDGTDAVMLSGETSVGKHPTDTVRTMARIVEAAEEDILAKGLPPLTERNKPRTQGGAVARAAAEMGDFLGAKFLVAFTQSGDTVRRLSRYRSPIPLLAFTPEPATRSQLSLTWGVETFLGPHADSTDAMVDQVDELLTRYGRCEKGDVVVITAGSPPGVSGTTNLVRVHHIGEDDIPK

SEQ ID NO: 7374 - DNA, 1530 bp, Schizosaccharomyces pombe
  CDS (1)..(1530)
atgtcctcttctgctgtctctcctaagcaatgggtcgccggcctcaacagcgagcttgatatccccgctgtcaaccgtcgtacctccatcatttgcaccattggtcccaagtccaacaacgttgagaccttgtgcaagctccgtgatgctggtatgaacattgttcgtatgaacttctctcacggttcctacgaataccaccaatccgtcattgacaatgcccgtaaggcctctgccaccaaccctctcttccccttggccattgccttggatactaagggacctgagattcgtactggtctcaccgttggcggtactgactaccccatctcctctggtcacgagatgatcttcaccaccgacgatgcttatgccgagaagtgtaacgacaaggtcatgtacattgactacaagaacatcaccaaggtcattcaacctggccgtatcatctacgttgatgatggtatcctttccttcactgtcatcgagaaggttgatgacaagaatttgaaggtccgtgtcaacaacaacggtaagatctcttccaagaagggtgtcaacttgcctaagactgatgtcgatttgcccgctttgtccgagaaggacaaggccgatctccgcttcggtgtcaagaacggtgtcgacatgatctttgcttccttcatccgtcgtgctgaggacgttatccacatccgtgaagttttgggtgaggagggtaagaacatcaagatcatctgcaagatcgagaaccaacaaggtgttaacaactttgactctatccttgacgttaccgacggtatcatggttgcccgtggtgacttgggtattgaaatccctgcctctcaagttttcgtcgcccaaaagatgatgattgccaagtgcaacatcgctggtaagcccgttgcttgtgccactcaaatgcttgagtccatgacctacaaccctcgtcctactcgtgccgaggtttccgatgttggtaacgccgttctcgatggtgctgacttggtcatgctttccggtgagactaccaagggttcttaccccgttgaagccgttacctacatggctgagactgcccgtgttgctgaggcttccatcccttacggcagcctttaccaagagatgttcggcctcgtccgtcgtcctcttgagtgtgctaccgagaccactgctgtcgctgccatcggtgcctccattgagagtgatgccaaggccatcgttgtcttgtccaccagcggtaacactgctcgtctctgctccaagtaccgtccttctatccccattgttatggttactcgttgccctcaaagagctcgtcaatctcacctcaaccgtggtgtctaccccgtcatctacgagaaggagcctctttctgactggcaaaaggatgttgacgctcgtgttgcctacggttgccaacaagcttacaagatgaacatcctcaagaagggtgacaagatcattgtccttcaaggtgccgttggtggtaagggtcacacctccatcttccgtcttaccgttgccgagtaa

SEQ ID NO: 7375 - protein, 509 aa, Schizosaccharomyces pombe
MSSSAVSPKQWVAGLNSELDIPAVNRRTSIICTIGPKSNNVETLCKLRDAGMNIVRMNFSHGSYEYHQSVIDNARKASATNPLFPLAIALDTKGPEIRTGLTVGGTDYPISSGHEMIFTTDDAYAEKCNDKVMYIDYKNITKVIQPGRIIYVDDGILSFTVIEKVDDKNLKVRVNNNGKISSKKGVNLPKTDVDLPALSEKDKADLRFGVKNGVDMIFASFIRRAEDVIHIREVLGEEGKNIKIICKIENQQGVNNFDSILDVTDGIMVARGDLGIEIPASQVFVAQKMMIAKCNIAGKPVACATQMLESMTYNPRPTRAEVSDVGNAVLDGADLVMLSGETTKGSYPVEAVTYMAETARVAEASIPYGSLYQEMFGLVRRPLECATETTAVAAIGASIESDAKAIVVLSTSGNTARLCSKYRPSIPIVMVTRCPQRARQSHLNRGVYPVIYEKEPLSDWQKDVDARVAYGCQQAYKMNILKKGDKIIVLQGAVGGKGHTSIFRLTVAE

SEQ ID NO: 7376 - DNA, 1584 bp, Arabidopsis thaliana (mouse-ear cress)
  CDS (40)..(1584)
atgcattccagtcatcttcttctcgaggagccgatcaggatggcttcaatcctcgagccttccaaatctagtttcttcccggcattgactaagatcgtcggaactctaggtcctaaatcccgatccgtcgaggctctctccggctgtctcaaagccggcatgtctgtggctcgatttgatttctcgtggggagatgctgattatcaccaggagacacttgataatttgaaagttgctgtgaggagcactaagaagctttgtgctgttatgcttgatactgttggacctgagctacaagttattaacaaatctgagaaagctattactttgaaagctgatggccttgtaactttgacaccgaatcaagatcaagaagcttcttctgaagttcttcccattaatttcaatggacttgccaaggcagtgaagaaaggagacaccatcttcgttgggcaatacctattcactggtagtgaaacaacttcagtttggctcgaggttgatgaagttaaaggagatgatgtcatttgcctttcaaggaatgctgctactctggctggttctttgttcactttacactcctctcaagttcacattgatctcccaacgcttacagagaaggataaggaggttataagcacatggggagttcaaaataaaatcgattttctctcattgtcttattgtcgtcatgctgaggatgttcgccagacccgtgaaatgcttaaaaagttgggcgacctctctcaaacacaaatatttgctaagattgagaacgtagagggactaacccacttcgatgagattctacaagaagctgatggcattattctttctcgtgggaatttgggtatagatttacccccggaaaaggtgtttttgtttcaaaaggctgctctttacaagtgcaacatggctggaaagccagctgttcttacccgtgttgttgacagtatgactgacaacttgcgaccaactcgtgctgaggccacggatgttgctaatgctgttttagatggaagtgatgcaattcttcttggtgctgagacccttcgtggattgtaccctgttgagacaatatcaactgttggtaggatctgtgctgaggcagaaaaggttttcaatcaagatttgtactttaagaagactgtcaagtatgttggagaaccaatgactcacttggaatcgattgcttcttcagctgtacgggcagccattaaggttaaggcatccgtaattatatgcttcacctcttctggaagagcagccagattgattgccaaatacaggccaacgatgccggttatttctgttgtcattccccgggttaagacaaatcaactgaaatggagctttagtggagcttttgaggcgaggcagtcacttattgtcagaggcctcttccctatgcttgctgaccctcgtcaccctgcggaatctacaagtgcgacaaacgagtcagtcctgaaggttgctctagaccatgggaagcatgctggagtaatcaagtcgcatgacagagtagtggtgtgtcagaaagttggtgatgcatctgtggttaagatcattgagcttgaggattaa

SEQ ID NO: 7377 - protein, 514 aa, Arabidopsis thaliana (mouse-ear cress)
MASILEPSKSSFFPALTKIVGTLGPKSRSVEALSGCLKAGMSVARFDFSWGDADYHQETLDNLKVAVRSTKKLCAVMLDTVGPELQVINKSEKAITLKADGLVTLTPNQDQEASSEVLPINFNGLAKAVKKGDTIFVGQYLFTGSETTSVWLEVDEVKGDDVICLSRNAATLAGSLFTLHSSQVHIDLPTLTEKDKEVISTWGVQNKIDFLSLSYCRHAEDVRQTREMLKKLGDLSQTQIFAKIENVEGLTHFDEILQEADGIILSRGNLGIDLPPEKVFLFQKAALYKCNMAGKPAVLTRVVDSMTDNLRPTRAEATDVANAVLDGSDAILLGAETLRGLYPVETISTVGRICAEAEKVFNQDLYFKKTVKYVGEPMTHLESIASSAVRAAIKVKASVIICFTSSGRAARLIAKYRPTMPVISVVIPRVKTNQLKWSFSGAFEARQSLIVRGLFPMLADPRHPAESTSATNESVLKVALDHGKHAGVIKSHDRVVVCQKVGDASVVKIIELED

SEQ ID NO: 7378 - DNA, 1533 bp, Arabidopsis thaliana (mouse-ear cress)
  CDS (1)..(1533)
atggagatgttacttggtggacaagcaaccaatggagctcttcgttcaaagacgaagataatttgtactcttggaccggtttcaagatcggtggagatgattgagaagcttctcaaggctggtatgaacgtagcccggttcaatttctctcatggttctcactcttaccatcaagaaactctcgataatctccgaaccgccatggacaacactggtattctctccgccgtcatgctcgacacaaagggtcctgagatacgaaccgggtttctcaaagaaggcaaaccgatacagctaaaccaaggtcaagagatcaccatctcaattgattacatgatagaaggagattcaaacgttatctccatgagctacaagaaacttgcagaagacgtcaaacctggtgatgtgattctctgttcagacggcacaatctctttaactgtcttgtcctgtgacaagtctttcggtcttgttcgttgccgttgcgagaactctgcaattctaggagaaagaaaaaacgttaatcttcctggaattgtagttgatctcccaacacttactgagaaagataaagaagatatcatccaatggggagttccgaacaaaatcgacatcatcgctctttcttttgttcgtaaaggatctgacctaactgaagttaggaggttacttggagaacactcaaagaacatcatgctcatgtcaaaggtggagaatcaagaaggggtcatgaattgtgaaaagattctggagaattctgatgctttcatggtggctagaggagatcttggaatggagattccgatcgaaaagatgttccttgctcagaaaacaatgatcaagatggctaatgctcttgggaaaccagttgtcacagccacacagatgcttgaatccatgacagtatctcctcgtccgactagagctgaagccactgacgttgcaaacgctgttcttgacgggacagactgcgttatgcttagtggagaaaccgctgctggagctcaccctgaggctgccgtgctaacaatgtcaaggatctgtaaagaagcagaggatttcatcgattacgacattctccacaagaaaaccctaggaatggtttcgttaccgttatctccgatcgagagcttagctgcttcagttgtttcgacggcacagagtgtttttgcgtcggcgatcgttgttctcaccaaaggcggttacacggcggagcttgtggctaaatacaggccgagcgttccgattttgtcagtgattgtgccagagattgctcaagggaatgatatggagatgtcgtgctcagactcggtggctcatgcggcgagacgtggtttgatttaccgtaggattattccggtggtggcgacgggatcttcggctagggattcaaacaaagatgcaacggaggagatgattaatttggctatcggattcgcgaagacgaagggaatttgcaagaatggagattcgattgtggcgttgcacaagattgatggttcctctgttgttaagatagtgaccgtggagtaa

SEQ ID NO: 7379 - protein, 510 aa, Arabidopsis thaliana (mouse-ear cress)
MEMLLGGQATNGALRSKTKIICTLGPVSRSVEMIEKLLKAGMNVARFNFSHGSHSYHQETLDNLRTAMDNTGILSAVMLDTKGPEIRTGFLKEGKPIQLNQGQEITISIDYMIEGDSNVISMSYKKLAEDVKPGDVILCSDGTISLTVLSCDKSFGLVRCRCENSAILGERKNVNLPGIVVDLPTLTEKDKEDIIQWGVPNKIDIIALSFVRKGSDLTEVRRLLGEHSKNIMLMSKVENQEGVMNCEKILENSDAFMVARGDLGMEIPIEKMFLAQKTMIKMANALGKPVVTATQMLESMTVSPRPTRAEATDVANAVLDGTDCVMLSGETAAGAHPEAAVLTMSRICKEAEDFIDYDILHKKTLGMVSLPLSPIESLAASVVSTAQSVFASAIVVLTKGGYTAELVAKYRPSVPILSVIVPEIAQGNDMEMSCSDSVAHAARRGLIYRRIIPVVATGSSARDSNKDATEEMINLAIGFAKTKGICKNGDSIVALHKIDGSSVVKIVTVE

SEQ ID NO: 7380 - DNA, 1479 bp, Arabidopsis thaliana (mouse-ear cress)
  CDS (1)..(1479)
atggagatgttacttggtggccgagcaaccaatggagctctccgttcaaagacgaagatagtttgtactcttggaccggtttcaagatcggtggagatgattgagaagcttctcaaggctgaaactctcgataatctccgaactgccatgaacaacactggtatcctctgcgccgtcatgctcgatacaaagggtcctgagatacgaaccggttttctcaaagaaggcaaaccgatacagctaaaccaaggtcaagagatcaccatctcaattgattacaagatagaaggagattcaaacattatctccatgagctacaagaaacttgcagaggacgtcaaacctggtgatgtgattctctgttcagacggcacaatctctttaactgtcttgtcctgtgacaagtctttcggtcttgttcgttgccgttgcgagaactctacaattctaggagaaagaaaaaacgttaatcttcctggaattgtagttgatctcccaacacttactgagaaagataaagaagatatcatccaatggggagttccgaacaaaatcgacatcatcgctctttcttttgttcgtaaaggatctgacctaactgaagttaggaagttacttggagaacactcaaagaacatcatgctcatgtcaaaggtggagaatcaagaaggggtcatgaattgtgaaaagattctggagaattctgatgctttcatggtggctagaggagatcttggaatggagattcagatcgaaaagatgttccttgctcagaaaacaatgatcaagatggctaatgctcttgggaaaccagttgtcacagccacacagatgcttgaatccatgacagtatctcctcgtccgactagagctgaagccactgacgttgcaaacgctgttcttgacgggacagattgcgttatgcttagtggagaaaccgctgcaggagctcaccctgaggctgccgtgctaacaatgtcaaggatctgtaaagaagcagaggatttcatcgattacgacattctccacaagaaaaccctaggaatgctttcgttaccgttatctccgatcgagagcttagctgcttcagttgtttcgacggcacagagtgtttttgcgtcggctatcgtcgttctcaccaaaggcggttacacggcggagcttgtggctaaatacaggccgagcgttccgattttgtcggtgattgtgcctgagattgctcaagggaatgatatagagatgtcgtgctcggactcggtggctcatgtggcgagacgtggtttgatttaccgtgggattattccggtggtggcgacgggatcatcggctagggattcaaacaaagatgcaacggaggagatgattaatttggctatcggattcgcgaagacgaagggaatttgcaagaatggagattcgattgtggcgttgcacaagattgatggttcctctgttgtgaagatagtgagcgttgagtaa

SEQ ID NO: 7381 - protein, 492 aa, Arabidopsis thaliana (mouse-ear cress)
MEMLLGGRATNGALRSKTKIVCTLGPVSRSVEMIEKLLKAETLDNLRTAMNNTGILCAVMLDTKGPEIRTGFLKEGKPIQLNQGQEITISIDYKIEGDSNIISMSYKKLAEDVKPGDVILCSDGTISLTVLSCDKSFGLVRCRCENSTILGERKNVNLPGIVVDLPTLTEKDKEDIIQWGVPNKIDIIALSFVRKGSDLTEVRKLLGEHSKNIMLMSKVENQEGVMNCEKILENSDAFMVARGDLGMEIQIEKMFLAQKTMIKMANALGKPVVTATQMLESMTVSPRPTRAEATDVANAVLDGTDCVMLSGETAAGAHPEAAVLTMSRICKEAEDFIDYDILHKKTLGMLSLPLSPIESLAASVVSTAQSVFASAIVVLTKGGYTAELVAKYRPSVPILSVIVPEIAQGNDIEMSCSDSVAHVARRGLIYRGIIPVVATGSSARDSNKDATEEMINLAIGFAKTKGICKNGDSIVALHKIDGSSVVKIVSVE

SEQ ID NO: 7382 - DNA, 1572 bp, synthetic construct
  CDS (1)..(1572)
atggccgccagctcttccctcgaccacctgagcaaccgcatgaagttggagtggcactccaagctcaacactgagatggtgccctccaagaacttccgccgcacctccatcatcggaaccatcggccccaagaccaactccgtggagaagatcaactctctccgcactgccggtcttaacgttgttcgcatgaccttctcccacggttcttatgaggaccaccaatctgttatcgacaacgcccgcgaggccgccaagacccaggtcggacgtcctctcgccattgctcaaggacccgagatccgtaccggaaacacccccgatgataaggatatccctatcaagcagggccacgagctcaacatcaccaccgacgagcaatatgccaccgcctccgacgacaagaacatgtacctcgactacaagaacatcaccaaggtgatctctcctggcaagctcatctatgttgatgacggtatcctttccttcgaggtcctcgaagtcgtagatgacaagaccatccgcgtccggtgcttgaacaacggcaacatctcttcccgcaagggtgttaacttgcccggcactgacgttgacctccccgccctttccgagaaggacattgccgatctcaagttcggtgttaggaacaaggtcgacatggtcttcgcttctttcatccgccgcggtagcgacattcgccacatccgtgaggttctgggtgaggagggcaaggagatccagatcattgccaagattgagaaccagcagggtgtcaacaacttcgacgagatcctcgaagagactgacggtgtcatggttgcccgtggtgaccttggtatcgagatccccgcccccaaggtcttcatcgcccagaagatgatgatcgccaagtgtaacatcaagggtaagcccgtcatctgtgccactcagatgctcgagtccatgacatacaaccctcgtcctactcgtgccgaggtgtccgatgttgccaacgccgtccttgacggtgccgactgtgtcatgctgtcgggagagaccgccaagggtaactaccccaacgaggccgtcaagatgatgtccgagacctgcctgctcgccgaggttgccatcccccacttcaatgtgttcgatgagctccgcaaccttgctcctcgccccaccgacactgtcgagtccatcgccatggctgccgttagcgccagtctggaactcaacgctggtgccattgtcgtcttgactaccaggggtaaaactgctcgctacctttccaagtaccgccccgtctcgcccattgtcatggttacccgtaaccccgctgcctcccgggactctcacctgtaccgtggtgtctggcccttcctcttccccgagaagaagcccgacttcaacgtcaaggtctggcaggaggatgttgaccgccgtctcaagtggggtatcaaccacgctcttaagctcggcatcatcaacaagggtgacaacatcgtctgtgtccagggatggcgcggcggtatgggccacaccaacaccgtccgtgtggtccctgctgaggagaaccttggcctggctgagtaa

SEQ ID NO: 7383 - protein, 523 aa, synthetic construct
MAASSSLDHLSNRMKLEWHSKLNTEMVPSKNFRRTSIIGTIGPKTNSVEKINSLRTAGLNVVRMTFSHGSYEDHQSVIDNAREAAKTQVGRPLAIAQGPEIRTGNTPDDKDIPIKQGHELNITTDEQYATASDDKNMYLDYKNITKVISPGKLIYVDDGILSFEVLEVVDDKTIRVRCLNNGNISSRKGVNLPGTDVDLPALSEKDIADLKFGVRNKVDMVFASFIRRGSDIRHIREVLGEEGKEIQIIAKIENQQGVNNFDEILEETDGVMVARGDLGIEIPAPKVFIAQKMMIAKCNIKGKPVICATQMLESMTYNPRPTRAEVSDVANAVLDGADCVMLSGETAKGNYPNEAVKMMSETCLLAEVAIPHFNVFDELRNLAPRPTDTVESIAMAAVSASLELNAGAIVVLTTRGKTARYLSKYRPVSPIVMVTRNPAASRDSHLYRGVWPFLFPEKKPDFNVKVWQEDVDRRLKWGINHALKLGIINKGDNIVCVQGWRGGMGHTNTVRVVPAEENLGLAE

SEQ ID NO: 7384 - DNA, 2795 bp, Corynebacterium glutamicum
  CDS (740)..(2173)
gggaattggtcgtctgggcaactgctttaaccaggagctctacggtgcagaaactaccgttccatgggctttggaaatctactatcgggtagatgaaaatggaaaattcgcaccggtgacaggaacatccaccggtgaagtaatggctactgttcatccaacattcctctatgaactgttgtggaacctactgatcttcgctttgttgatgtgggctgacaagcgattcaagctgggacatggccgagtatgcactctacgtagctggttataccttgggccgtttctggattgaacaaatgcgcgttgatgaagccacgcttattggcggcatccgaatcaacaccatcgtctccgcagtagtgtttgccggcgcgatcatcgtgttcttcctgttgaagaagggtagggaaactcccgaagaggtagatccgactttcgcagcgtctgttgcagcagatgctgtagcttcgccggatggaaaacccttgccgaaagcaggggagggcattgatggagaaacgccctcaacgcgataggtttcaaccataggcctgacctggctgagatgtttttggtagaaaaaccgagtgcccgaattgttttgtgggtgcccggttttttctgatttaagcacgtcagaggcgtagaacattgtctgttcacactctgggtcgcaagattcatcgagaattaatggtagtacctgtggcttgagggggaatgacgtactaggcttatgggcgtggatagacgaactaagattgtatgtaccctaggcccagcggtggctagtgcagatggaattctgcgtttggtagaagacggcatggatgttgctcgcctcaacttctcccatggtgaccacccagatcatgagcaaaactacaagtgggtccgcgaggcggcggagaagactggccgtgcagtcggtattctcgcagacctccaaggaccgaagatccgtcttggccgtttcactgacggcgcaaccgtgtgggaaaacggcgagaccattcggatcaccgttgacgatgtagagggaacgcacgatcgtgtgtccaccacctacaagaatctggcaaaagacgcgaagccaggcgaccgcctgctcgttgatgacggcaaggttggcctcgtctgcgtttccgtcgaaggtaacgacgtcatctgtgaggttgttgagggcggaccagtctccaacaacaagggtgtttccctgccaggtatggatatttccgtacctgcactgtccgaaaaggatatccgtgacctgcgcttcgccctgaagctcggcgtggactttattgcactgtccttcgtacgttccccagcagatgctgaactcgttcacaagatcatggacgaagaaggtcgtcgtgttcctgtgatcgccaagctggaaaagccagaggctgtcacctccctcgagccaatcgtgttggcattcgacgccgtcatggttgctcgtggtgacctcggcgttgaggttcctctggaggaggttccactggttcagaagcgcgcaatccagattgcccgtgagaacgcaaagccagttatcgtggcaacccagatgctggattccatgattgagaactcccgcccaacccgtgcggaagcttctgacgtggcaaacgctgtgctcgatggcgcagatgctgtcatgctttctggtgaaacttcagtgggcaaagatccgcacaacgttgtgcgcaccatgtctcgcattgttcgcttcgctgaaaccgacggtcgcgtcccagacctgacccacatccctcgcactaagcgtggcgttatttcctactctgcacgtgatatcgccgagcgcctcaacgctcgtgcattggttgcgttcaccacctctggtgataccgcaaagcgtgtggctcgtctgcacagccacctgccactgctcgtgttcactccaaatgaggcagttcgctctgagctggcgctgacctggggtgcaaccaccttcctgtgtccacctgtcagcgataccgatgacatgatgcgcgaagtcgaccgtgctcttttagcaatgcctgagtacaacaagggtgacatgatggttgttgttgcaggttcccctcctggtgttaccggtaacaccaacatgattcacgtccaccttcttggtgacgacacaaggattgcaaagctctaatcgcttaaatctttcaaaaaatgcgttgacactgtacgtggtgtcagcgcatttttcgtggctagggcaggggaaatccgcctcatttaagaatttacttgacacggaaagtaaattggtgaacaatggtgttcaacagcaaaacagccaccaacacttaaaggatgaaacaccatggcacttcttgagcagagcatcaataggacaccttcatggatgcagttagccttcgcgtcggcgacctagaggtatgactagttactactcttcaatccttagcgttgaaccaatggaagaaaaagttcacggaaaagaagttcaccgtgtactcggtcgcaatggcacccctctcgttcgcctgatttctaccccaggtcttctgcggtagatcctcgtcaagctggcctttatcacaaccgtttcctcttcgatacccaagagagcttggctgccaccgtttaccgcgcagcgcaagaatcacgctcacgttttgtgggttcttcagatcacctagtctctgaagctttttacttcaccgatcctgagggaaacggcattgagctctatgttgaccgccctcgaagtgcatggaagtatgcagacaacggcgatgtccgcatga

SEQ ID NO: 7385 - protein, 477 aa, Corynebacterium glutamicum
MGVDRRTKIVCTLGPAVASADGILRLVEDGMDVARLNFSHGDHPDHEQNYKWVREAAEKTGRAVGILADLQGPKIRLGRFTDGATVWENGETIRITVDDVEGTHDRVSTTYKNLAKDAKPGDRLLVDDGKVGLVCVSVEGNDVICEVVEGGPVSNNKGVSLPGMDISVPALSEKDIRDLRFALKLGVDFIALSFVRSPADAELVHKIMDEEGRRVPVIAKLEKPEAVTSLEPIVLAFDAVMVARGDLGVEVPLEEVPLVQKRAIQIARENAKPVIVATQMLDSMIENSRPTRAEASDVANAVLDGADAVMLSGETSVGKDPHNVVRTMSRIVRFAETDGRVPDLTHIPRTKRGVISYSARDIAERLNARALVAFTTSGDTAKRVARLHSHLPLLVFTPNEAVRSELALTWGATTFLCPPVSDTDDMMREVDRALLAMPEYNKGDMMVVVAGSPPGVTGNTNMIHVHLLGDDTRIAKL

SEQ ID NO: 7386 - DNA, 2264 bp, Bacillus subtilis
  CDS (258)..(2012)
ttgggccatatccagcgcggaggttctccgagtgctgctgaccgtgtgttagcaagccgttctcgcgcatatgcagttgaactgctgcttgaaggaaaaggcggaccgtgtgtaggtatacaaaacaataagcttgtagaccatgatattatagaaatacttgagacaaaacacacagttgagcaaaacatgtatcagctttcaaaagaactgtctatctaatgtgcagctgaagatttcagaaggaagtgaaccaaatgagaaaaactaaaattgtttgtaccatcggtccggcaagtgaaagtattgaaatgcttacgaaattaatggagtcaggaatgaacgtggctcgattaaacttttctcacggagattttcaggagcacggtgcaagaattaaaaatatccgcgaggcagctgaaaaacttggcaagaacgttggaattctgcttgatacaaagggtcctgaaatccgcacacatacaatggaaaacggttccatagagctgaacgcaggaagcaaactcgtaataagcatgacggaggtgataggaacaccagataaaatttcagtgacatatgaaggtttagtccatgacgttaacaaaggttcaacgattctgttagatgacggccttatcggtcttgaggtacttgatgtagatgccgtaaaacgcgaaatcaaaacaaaagtattaaacaacggaacactcaaaaataaaaaaggtgttaacgtacccgggcgtaagtgtcaatcttccgggattactgaaaaggatgcgcgagacatcgttttcggtattgagcaaggagtagacttcatcgcaccatctttcattcgacgttctacggatgtgctcgaaatccgtgagcttcttgaagagcacaacgctcaggatattcaaatcatccctaaaatcgaaaaccaagagggcgttgacaacatcgatgcgattctcgaagtgtctgacggcttaatggttgcacgcggagacttaggtgtggaaattccagctgaagaagtgccgcttgtgcaaaaagaactgatcaaaaaatgcaacgcgctgggcaaacctgttattacagcgacacaaatgcttgacagcatgcagcgcaacccgcgtccgactcgtgcggaagcaagtgacgttgcaaacgcgatcttcgacggaacagatgcgatcatgctatctggtgaaactgctgccggaagctatccggttgaagcagttcaaacaatgcataacatcgcgtcccgttctgaagaagctttaaattataaagaaattctctcaaaacgcagagatcaagtgggcatgacaattacagacgcaattggacaatctgtcgcgcatacggcgattaacctgaatgctgcgatcgtaacgccgacagaaagcggccatacagcacgtatgattgcaaaataccgtccgcaggctccgattgttgcggttactgtaaatgactctatttccagaaagcttgccctcgtatctggcgtattcgcggaaagcggccaaaatgcgagctcaacagatgagatgcttgaggatgctgtccaaaaatcattgaacagcggaattgtaaaacacggcgatcttatcgttattacagcaggcactgtcggtgagtccggcactacgaatttgatgaaggttcatactgtcggtgatatcatcgctaaaggccaaggcattggacgcaaatcagcttacggtccggtcgtcgttgcacaaaatgcaaaagaagctgagcaaaaaatgactgacggtgcggtacttgttaccaaaagcactgaccgtgatatgattacatcccttgaaaaagcgtctgctcttattacagaagaaggcggtttgactagccatgcggcggtagtcggattaagccttggcatcccggttatcgtgggtctggaaaatgcgacatctattttgacagatggccaggatattacagttgacgcttccagaggtgcagtctatcaaggccgtgcgagcgttctttaattacaggtgaaaacggaaggggaatcccttccttttctctttatcatgccttttgttgaacagaacgtgttacacgtgtggggggcttggatatgagatttttgtttttgctttttattgtgtttccggcaatagaaatcgggatattcctatttttaggcaagctgattggcattttaccgacagttctattcatgattctgacgggcattatcggcgcagcagctgcaaaaaaacaaggaaccgaagtgt

SEQ ID NO: 7387 - protein, 584 aa, Bacillus subtilis
MRKTKIVCTIGPASESIEMLTKLMESGMNVARLNFSHGDFQEHGARIKNIREAAEKLGKNVGILLDTKGPEIRTHTMENGSIELNAGSKLVISMTEVIGTPDKISVTYEGLVHDVNKGSTILLDDGLIGLEVLDVDAVKREIKTKVLNNGTLKNKKGVNVPGRKCQSSGITEKDARDIVFGIEQGVDFIAPSFIRRSTDVLEIRELLEEHNAQDIQIIPKIENQEGVDNIDAILEVSDGLMVARGDLGVEIPAEEVPLVQKELIKKCNALGKPVITATQMLDSMQRNPRPTRAEASDVANAIFDGTDAIMLSGETAAGSYPVEAVQTMHNIASRSEEALNYKEILSKRRDQVGMTITDAIGQSVAHTAINLNAAIVTPTESGHTARMIAKYRPQAPIVAVTVNDSISRKLALVSGVFAESGQNASSTDEMLEDAVQKSLNSGIVKHGDLIVITAGTVGESGTTNLMKVHTVGDIIAKGQGIGRKSAYGPVVVAQNAKEAEQKMTDGAVLVTKSTDRDMITSLEKASALITEEGGLTSHAAVVGLSLGIPVIVGLENATSILTDGQDITVDASRGAVYQGRASVL

SEQ ID NO: 7388 - DNA, 2569 bp, Zymomonas mobilis
  CDS (137)..(1564)
gatctctttgcgaagagacgcttcccttttccttccatttgtaacaaattgacaaacgaagttgtgcttgatcatctgatgatagaagcgcaaatggcatatgtaattaaatcagcaaagcggaaggaatagaagcatgactgaaggacttttcccacgcggccgcaaggtacgtgttgtttctacgctgggtcctgccagctcgacggcagaacagattcgtgatcgtttcttggctggtgcggatgtattccgtatcaacatgagccatggtacccatgacgaaaagaaggtcatcgttgacaacattcgtgcgcttgaaaaagaattcaaccgcccgaccacgatccttttcgatcttcagggtccgaagctccgcgttggtgacttcaaagaaggcaaggttcagttgaaagaaggccagaccttcactttcgatcaggacccaactctcggtgacgaaacccgcgtcaacctgccgcatcctgaaatcttcaaggctttagacaaaggtcatcgcctgcttttggatgatggtaagatcgttgttcgttgcgtcgaatcttccccgaccaaaatcgttacccgcgtcgaagttccgggtccgctttccgaccataaaggtttcaacgttcctgacgttgtgattccgctggccgctctgaccccgaaagatcgcaaagatctcgactttgctcttaaggaaaaagctgactgggttgctcttagctttgtgcagcgcgtcgaagacgtcatcgaagccaaagaactcatcaaaggtcgcgcaccgcttctcgttaaactcgaaaagccagctgccattgaaaacctcgaatccatcttggctgcaaccgatgctgtcatggttgctcgtggtgacctcggtgttgaatgcttgccggaatccgttcccccgacgcagaagcgtatcgttgaacgctcccgccagctgggtaagccggttgttgttgcaaccgctatgctcgaatccatgatcaaagctccggctccgacccgcgctgaagtaagtgacgttgcaaacgccatttacgaaggtgctgatggtatcatgctttctgcagaatccgccgccggtgattggccgcatgaagctgtcaacatgatgcatcgtattgcttcttatgttgaaaatgctccgggttacatcgaacgcgttcgcttcaccccgactccggcagaaccgacgacggttgacgctctggctgaaaacgccagcaaaaccgctgaaacggttggcgcaaaagcgatcatcgtcttcaccgaaaccggtaagaccgcacagcgcgtttcccgcgcccgtccggttgctccgatcctgtctctgaccccggatgccgaagttgctcgtcgtcttggtttggtctggggcgcacagccggttcaggtttccacggttaagaccctcgacgaagccaagaagctggctgctgaaaccgctaaaaaatacggtttcgccaaagccggtgacaagctggttgttgttgcaggtgaacctttcggtaaagctggaaccaccaacattgttgatgttatcgaagcctaattcgctttataacaacacagaaaaaaggccggggggacatttctctccggcttttttttaaggctcaagaatagcccgatatctgcttttccccaagatagtcacccttgctagtcacaaagaaagactgtcatctcgttttctcattcgggacagactttctatcgcaaaatcaacgcggctgtcttttccagctatccggctattgatgaccttattcccgctgcgtgcccgctcaatattgtggtcaaagaatgtggataatgaaatgtcttcttcagccccctcgcccctagccaaaatcgaaaatttcacgcttcaagatggcgttccccctgataatatcccttccgcccttcaacttttctggcaagcctttgaaagaaaattgaagataccctttaggcccacccgaaaaaggccaagaatttcttcgtcacagcatggggcgatcgatccatcgtcagcgcgatccgcaaggatggcaaactactcgggtgtcgcgacctataaaagctatcgccccaattcgcttactcaagatttggaaacatcttttgcgacttacgggaaagccagcggcctattccgtggattattattaagtcaactagaccaacaacctgccgcggatgaaatgatggtagaaagcatctgcgttgatgaaaaagcgcgcagccatggcattggccatgcacttcttggctatatcaaggaacaggcgacccgacagggtatgaaaagggttatcctcgatgtcattaccaaaaatgaaagggcgcatcgcctttatagccgcctaggctatcgcgatatcagacatcattctgttggtctcttgtcacccattttcggttttaaagagtctatccgcatgggtctaagcctaactcagtagcgattcctcccgaaaagaaggcttttcaagaggaacgctttgtctttcttctttttaaaaaatccgatacggcgatcactatacctgcaggtcgacactagtggatc

SEQ ID NO: 7389 - protein, 475 aa, Zymomonas mobilis
MTEGLFPRGRKVRVVSTLGPASSTAEQIRDRFLAGADVFRINMSHGTHDEKKVIVDNIRALEKEFNRPTTILFDLQGPKLRVGDFKEGKVQLKEGQTFTFDQDPTLGDETRVNLPHPEIFKALDKGHRLLLDDGKIVVRCVESSPTKIVTRVEVPGPLSDHKGFNVPDVVIPLAALTPKDRKDLDFALKEKADWVALSFVQRVEDVIEAKELIKGRAPLLVKLEKPAAIENLESILAATDAVMVARGDLGVECLPESVPPTQKRIVERSRQLGKPVVVATAMLESMIKAPAPTRAEVSDVANAIYEGADGIMLSAESAAGDWPHEAVNMMHRIASYVENAPGYIERVRFTPTPAEPTTVDALAENASKTAETVGAKAIIVFTETGKTAQRVSRARPVAPILSLTPDAEVARRLGLVWGAQPVQVSTVKTLDEAKKLAAETAKKYGFAKAGDKLVVVAGEPFGKAGTTNIVDVIEA

SEQ ID NO: 7390 - DNA, 1701 bp, Homo sapiens
  CDS (1)..(1701)
atgcctctgacaacccaacagtgtggagcagacccacagagagggagacccagagaggtgtgcagtggcatggaagggccagcggggtatctgcggcgggccagtgtggcccaactgacccaggagctgggcactgccttcttccagcagcagcagctgccagctgctatggcagacaccttcctggaacacctctgcctactggacattgactccgagcccgtggctgctcgcagtaccagcatcattgccaccatcgggccagcatctcgctccgtggagcgcctcaaggagatgatcaaggccgggatgaacattgcgcgactcaacttctcccacggctcccacgagtaccatgctgagtccatcgccaacgtccgggaggcggtggagagctttgcaggttccccactcagctaccggcccgtggccatcgccctggacaccaagggaccggagatccgcactgggatcctgcaggggggtccagagtcggaagtggagctggtgaagggctcccaggtgctggtgactgtggaccccgcgttccggacgcgggggaacgcgaacaccgtgtgggtggactaccccaatattgtccgggtcgtgccggtggggggccgcatctacattgacgacgggctcatctccctagtggtccagaaaatcggcccagagggactggtgacccaagtggagaacggcggcgtcctgggcagccggaagggcgtgaacttgccaggggcccaggtggacttgcccgggctgtccgagcaggacgtccgagacctgcgcttcggggtggagcatggggtggacatcgtctttgcctcctttgtgcggaaagccagcgacgtggctgccgtcagggctgctctgggtccggaaggacacggcatcaagatcatcagcaaaattgagaaccacgaaggcgtgaagaggtttgatgaaatcctggaggtgagcgacggcatcatggtggcacggggggacctaggcatcgagatcccagcagagaaggttttcctggctcagaagatgatgattgggcgctgcaacttggcgggcaagcctgttgtctgtgccacacagatgctggagagcatgattaccaagccccggccaacgagggcagagacaagcgatgtcgccaatgctgtgctggatggggctgactgcatcatgctgtcaggggagactgccaagggcaacttccctgtggaagcggtgaagatgcagcatgcgattgcccgggaggcagaggccgcagtgtaccaccggcagctgtttgaggagctacgtcgggcagcgccactaagccgtgatcccactgaggtcaccgccattggtgctgtggaggctgccttcaagtgctgtgctgctgccatcattgtgctgaccacaactggccgctcagcccagcttctgtctcggtaccgacctcgggcagcagtcattgctgtcacccgctctgcccaggctgcccgccaggtccacttatgccgaggagtcttccccttgctttaccgtgaacctccagaagccatctgggcagatgatgtagatcgccgggtgcaatttggcattgaaagtggaaagctccgtggcttcctccgtgttggagacctggtgattgtggtgacaggctggcgacctggctccggctacaccaacatcatgcgggtgctaagcatatcctga

SEQ ID NO: 7391 - protein, 566 aa, Homo sapiens
MPLTTQQCGADPQRGRPREVCSGMEGPAGYLRRASVAQLTQELGTAFFQQQQLPAAMADTFLEHLCLLDIDSEPVAARSTSIIATIGPASRSVERLKEMIKAGMNIARLNFSHGSHEYHAESIANVREAVESFAGSPLSYRPVAIALDTKGPEIRTGILQGGPESEVELVKGSQVLVTVDPAFRTRGNANTVWVDYPNIVRVVPVGGRIYIDDGLISLVVQKIGPEGLVTQVENGGVLGSRKGVNLPGAQVDLPGLSEQDVRDLRFGVEHGVDIVFASFVRKASDVAAVRAALGPEGHGIKIISKIENHEGVKRFDEILEVSDGIMVARGDLGIEIPAEKVFLAQKMMIGRCNLAGKPVVCATQMLESMITKPRPTRAETSDVANAVLDGADCIMLSGETAKGNFPVEAVKMQHAIAREAEAAVYHRQLFEELRRAAPLSRDPTEVTAIGAVEAAFKCCAAAIIVLTTTGRSAQLLSRYRPRAAVIAVTRSAQAARQVHLCRGVFPLLYREPPEAIWADDVDRRVQFGIESGKLRGFLRVGDLVIVVTGWRPGSGYTNIMRVLSIS

SEQ ID NO: 7392 - DNA, 1515 bp, Debaryomyces hansenii
  CDS (1)..(1515)
atgtctaacgcatcattatcttggttaaccaaattgaataccagtgaaaccccagataaggttttacgtcgttcgtctattatcggtactattggaccaaagaccaacaacgttgacgttttggtcaaattaagaaaggccggtttaaacattgttcgtatgaacttctcgcacggatcttacgaataccatcaatccgttattgacaatgctaagcaatcggaagaaatctacaagggccgtccattggccattgctttggacactaaaggtccagaaatcagaactggtactaccattgacgacaaggactacccaatcttaccaaaccatgaaatgatcttcaccactgacgaagcttacgctaagaagtgtgacgacaaggttatgttcatcgactacaagaatatcaccaaggtcatcgaagccggtaaaatcatatatattgacgatggtgttgtttcattcgaagttttacaaattgtcgacgataagaccttgaaggttagatccgtcaactccggtaagatatgttcccacaagggtgttaacttgccaggtaccgatgttgacttaccagctttatccgaaaaggataaggctgatatcaaattcggtgtcaagaacggtgtccacatgatctttgcttctttcatcagaactggtgacgatatcaaggaaatccgtaaggttttaggtgaagaaggtaaggatatccaaatcattgctaagatcgaaaatcaacaaggtgtcaacaactttgacgaaatcttagtcgaaaccgatggtgttatggttgccagaggtgatttaggtattgaaattcctgctcctcaagtctttgttgttcaaaagcaattgattgctaagtgtaacttggctgctaagccagtcatttgtgccacccaaatgttggaatccatgacttacaacccaagaccaaccagagccgaagtttctgatgtcggtaacgccattttagatggtgctgattgtgttatgttgtctggtgaaactgccaagggtaactacccattcgaagctgtctccatgatgcacaacaccgctatcattgctgaaaaggccatcgcttaccaacctttacacaacgaaatcaggtctttagctaacagaccaacacctaccaccgaaacatgtgccatggcttccgtctcagctgcctacgaacaagatgctaaggctattgttgttttgtccacctctggtttcacctccagattggtttccaaatacaagccaaatgtcccagttatgatggttacaagaaaccatagagctgctagatactgtcacttgtacagaggtgtctacccatttgtctacgaaaagaaaactgttgacaactggcaagaagatgtcgaaaacagattaagatgggctgtttctgaagctattgatttaggtatcatcaagaagggtgactccatcgttactattcaaggttggaccagaggttctggtcactctaacactgttagggttgtccaagcttaa

SEQ ID NO: 7393 - protein, 504 aa, Debaryomyces hansenii
MSNASLSWLTKLNTSETPDKVLRRSSIIGTIGPKTNNVDVLVKLRKAGLNIVRMNFSHGSYEYHQSVIDNAKQSEEIYKGRPLAIALDTKGPEIRTGTTIDDKDYPILPNHEMIFTTDEAYAKKCDDKVMFIDYKNITKVIEAGKIIYIDDGVVSFEVLQIVDDKTLKVRSVNSGKICSHKGVNLPGTDVDLPALSEKDKADIKFGVKNGVHMIFASFIRTGDDIKEIRKVLGEEGKDIQIIAKIENQQGVNNFDEILVETDGVMVARGDLGIEIPAPQVFVVQKQLIAKCNLAAKPVICATQMLESMTYNPRPTRAEVSDVGNAILDGADCVMLSGETAKGNYPFEAVSMMHNTAIIAEKAIAYQPLHNEIRSLANRPTPTTETCAMASVSAAYEQDAKAIVVLSTSGFTSRLVSKYKPNVPVMMVTRNHRAARYCHLYRGVYPFVYEKKTVDNWQEDVENRLRWAVSEAIDLGIIKKGDSIVTIQGWTRGSGHSNTVRVVQA

SEQ ID NO: 7394 - DNA, 1443 bp, Erwinia carotovora subsp
  CDS (1)..(1443)
atgtccagacggctcagaagaaccaagattgttaccaccctggggcccgctaccgaccgcgataataatctcgaaaagattatcaatgcgggcgctaacgttgtacgcatgaatttttctcacggcacagcagaagaccatcaattacgtgccaacaaagttcgtgaaattgcggctaaattaggccgccatgttgccattcttggcgatctacagggtccaaaaattcgtgtttctaccttcaaagaaggtaaaatcttcctgaatatcggcgacaaattcttgctggatgccaacttagcgaaaggcgaaggcgataaagaaaaagtcgggatcgattacaaaggcttgccgagcgacgtggtgcctggcgatatcctgttactggatgacggccgcgtacagctgaaagtcctccaagttgaaggcctgaaagtttacaccgaagtcaccgttggtggcccgctgtctaacaataaaggcatcaacaaactcggtggcggtctgtctgccgaagccctgacggaaaaagataaagccgacattattactgctgcaaaaattggcgtcgactatctggcagtctctttcccacgcaccggtgaagacctcaactacgcacgccgcctcgcacgcgacgcaggctgtaacgccaagatcgtatcaaaagttgaacgtgctgaagcagtctgctcagatgccgcaatggatgacattattctggcttccgacgtggtaatggtcgcaaggggcgatctgggtgttgaaatcggtgaccctgagctggtagggattcagaagaaattgattcgccgtgcccgtcagttgaatcgtgcagtcattacggccacgcagatgatggaatcgatgatcaccaatccgatgccgacacgcgccgaggtaatggacgtcgccaacgccgtgctggatggcaccgatgcggtgatgctctcagcagaaaccgctgcgggtcaatatccggctgaaaccgtcgctgccatggcgaaagtgtgtttaggtgcggaaaaaatcccaagcatcaacgtctccaagcatcgccttgacgtgcagtttgataacacggaagaatccatcgcgatgtcttccatgtatgcagccaaccacctgaaaggggttactgcactgattgccatgacggagtctggccgtaccgctctgatgatgtctcgtatcagttctggcttgccgattttcgccatgtctcgccatgagcacacactgaacctgaccgcgctgtatcgcggcgtcacaccggtacatttcgacagctatacggatggcgttgccgcggccaatgatgcggtgatcctactgcgtgataaagggttcctgatgtctggggatctggtcatcgtcacacaaggtgacatcatgggtaccgtaggcacaaccaacaccattcgcattctgcgcgtggaataa

SEQ ID NO: 7395 - protein, 480 aa, Erwinia carotovora subsp
MSRRLRRTKIVTTLGPATDRDNNLEKIINAGANVVRMNFSHGTAEDHQLRANKVREIAAKLGRHVAILGDLQGPKIRVSTFKEGKIFLNIGDKFLLDANLAKGEGDKEKVGIDYKGLPSDVVPGDILLLDDGRVQLKVLQVEGLKVYTEVTVGGPLSNNKGINKLGGGLSAEALTEKDKADIITAAKIGVDYLAVSFPRTGEDLNYARRLARDAGCNAKIVSKVERAEAVCSDAAMDDIILASDVVMVARGDLGVEIGDPELVGIQKKLIRRARQLNRAVITATQMMESMITNPMPTRAEVMDVANAVLDGTDAVMLSAETAAGQYPAETVAAMAKVCLGAEKIPSINVSKHRLDVQFDNTEESIAMSSMYAANHLKGVTALIAMTESGRTALMMSRISSGLPIFAMSRHEHTLNLTALYRGVTPVHFDSYTDGVAAANDAVILLRDKGFLMSGDLVIVTQGDIMGTVGTTNTIRILRVE

SEQ ID NO: 7396 - DNA, 1179 bp, Mycoplasma arthritidis
  CDS (1)..(1179): transl-table=4
atgaaagatgatgcttgcttacttaaaaaaggtagcatcgtaactatcaaaacagatgaaaattcttataaaaatttagttggcgatgataaagtgatcactgtttcatatcgcatggataaagatatgcatgtaggtgcaaaagttttattagatgatggcaaattagtgacaatcgttaaagaaatcaagcctgaaattattttagtagaagtgcaaaatgaccatgttctaaaaactaataaaagagtgaatattcctggaattgatttttcaatgccttttatgtcgcctaaggatcgtgaagacattatttgaggtgctaaatatggcgttgatttcattgccgcttcttttgtgaatagtgctaaaaatgttcatgaaatccgtgaaattttaaaacaagcaaatgctgaacacattcaaatttgttcaaagattgaatcacaaaccggaattgacaatattgacgaaattattgaagctagtgattcaattatgattgctcgtggtgatttaggtcttgaaattccttactacgaagtgccatattgagagaaaaaaattattgccaaatgtcgcaaagcaaacaaagaagtaattgttgcaacccaaatgcttgattctatggaaaaaacgccgcttcctacaagagcagagattagtgatgtttattgggctactgaattgggtgcttctgctactatgacctctggtgaaactgctagtggacaatatccagttgaagcaattaaaacgatggcaacaataaatcatcgtgctgaacaagaatatttcaatgaaatagcaacttcatgtaactgccaatgccaaccaaaatgtgagcttggacatgttgctaaagaacttaaagaaaaaacaaaaactggcgattttccatatactattgctatttcagaagatggcaaattattgaaaaaaattgccaaatataaaccaaatactactgtaattgcattggttagcgatccgaagattgaaactgctttcggaatcactttcggaatcttttgtgaaaaaaatggtgctaaagcaattgaaaaagtcataaaggatcctaagtacttgaatgaaattttggcttcgcattttgatattaaaaaaggtcaaaaattcttagtaattaaagatggtttaatttctgaaaattcattgtaa

SEQ ID NO: 7397 - protein, 392 aa, Mycoplasma arthritidis
MKDDACLLKKGSIVTIKTDENSYKNLVGDDKVITVSYRMDKDMHVGAKVLLDDGKLVTIVKEIKPEIILVEVQNDHVLKTNKRVNIPGIDFSMPFMSPKDREDIIWGAKYGVDFIAASFVNSAKNVHEIREILKQANAEHIQICSKIESQTGIDNIDEIIEASDSIMIARGDLGLEIPYYEVPYWEKKIIAKCRKANKEVIVATQMLDSMEKTPLPTRAEISDVYWATELGASATMTSGETASGQYPVEAIKTMATINHRAEQEYFNEIATSCNCQCQPKCELGHVAKELKEKTKTGDFPYTIAISEDGKLLKKIAKYKPNTTVIALVSDPKIETAFGITFGIFCEKNGAKAIEKVIKDPKYLNEILASHFDIKKGQKFLVIKDGLISENSL

SEQ ID NO: 7398 - DNA, 1437 bp, Mesoplasma florum L1
  CDS (1)..(1437): transl_table=4
atgaacaagaaagaattacaagcacgtgtaaaacgtactaaaattattactacaactggtccatcaacaaatgaaccagaacaaataagagaattatttgaaaatggaatgacaacaatacgtttaaatttttcacatggtgattatgaagaacaaggttacagaattgctggagctaaaaaagttagagaagaattaggaaaacctgtttctattttattagatacaaaagggcctgaaattcgtgttggtaaatttgtagatggaaaacaagaagttactgcaaatcaatcaattacaatttacacagatgctgaatcattcaaaaacaaagaatgtttatcaggagaaatgactgttgcttatgacatgtcagttgatttaaaaattggtgatacaattttaatcgatgatggtaaattagaaatgactgttgaagaagttaaaccaggtgttgttaaagctatcgctttcaataaccacttagtaaaaactaacaaacgtgttaacttaccaggtgttgatttctcaatgccattcttagctcaaaaagatatcaatgatattaaatatggagttgaacaaggtgttgactacatcgctgcatcatttgttaactcagctgaaaatgtaaaagaaattcgtgatattttagcagaagctaatggatcagatattcaaattatttcaaaaattgaatcacaagttggaattgacaacattgatgcaattattgaagcatcagatggaattatgattgctcgtggtgacttaggattagaaattccttactacgacgtaccatactgagaaaaaataatgatcagaaaatgtcgtgaagctggtaaagttgttattgttgctactcaaatgttagaaacaatgacagaaaacccagcacctacaagagctgaagtaactgacgtttactttgctactgaattaggagcagatgcaacaatgttatctggagaatcagcagctggagattacccattcattactgttaacacaatggcaacaatcaacaaacgtgctgaaatagaattctacaaaaaagcatactaccaaactcaattagaaaacgctaaaaactcaactagtggaccacgtgcagatattgcaatggacttagctgaaagaactcgtgatggacaatatgaatttgctgttgttttatcaagaactggagctttattaaaaactatttctaaatttagaccaaatgtaacaattttaggtgtaagtgaatcagaaagattatgaactgcatttggtgtatgacactcaatcttcatgaacaaaactgctaacttattagaattagaagaaaatgttgctcaaatctcagaaattgcaaaattatgaggtgcaaaatcaggatcaaaaatcttagttgtaagaaacaaagatattcgtgaaattacagtagcttaa

SEQ ID NO: 7399 - protein, 478 aa, Mesoplasma florum L1
MNKKELQARVKRTKIITTTGPSTNEPEQIRELFENGMTTIRLNFSHGDYEEQGYRIAGAKKVREELGKPVSILLDTKGPEIRVGKFVDGKQEVTANQSITIYTDAESFKNKECLSGEMTVAYDMSVDLKIGDTILIDDGKLEMTVEEVKPGVVKAIAFNNHLVKTNKRVNLPGVDFSMPFLAQKDINDIKYGVEQGVDYIAASFVNSAENVKEIRDILAEANGSDIQIISKIESQVGIDNIDAIIEASDGIMIARGDLGLEIPYYDVPYWEKIMIRKCREAGKVVIVATQMLETMTENPAPTRAEVTDVYFATELGADATMLSGESAAGDYPFITVNTMATINKRAEIEFYKKAYYQTQLENAKNSTSGPRADIAMDLAERTRDGQYEFAVVLSRTGALLKTISKFRPNVTILGVSESERLWTAFGVWHSIFMNKTANLLELEENVAQISEIAKLWGAKSGSKILVVRNKDIREITVA

SEQ ID NO: 7400 - DNA, 1506 bp, Candida glabrata
  CDS (1)..(1506)
atggactctagattggctagattgactaccttgcaaacctctgccggtgaggaattgagaagaacctctatcatcggtaccattggtccaaagaccaacaacccagaaaccttggttgctctaagaaaggctggtttgaacattgtccgtatgaacttctcccacggttcttacgaataccacaagtctgtcattgacaatgccagaaagtccgaagagctatacccaggtagaccattggctatcgctttggacaccaagggtccagaaatcagaactggtaccaccactaacgaagtcgactacccaatcccaccaaaccacgaaatgatcttcaccaccgatgacaagtacgctaaggcttgtgacgacaagatcatgtacttggactacaagaacatcaccaaggtcatctccgctggtagaatcatctacgtcgatgacggtgttttgtctttcgaagtcttgcaagtcgttgacgacaagaccttgaaggtcaagtccttgaacgctggtaagatctgctcccacaagggtgttaacttgccaggtaccgatgtcgacttgccagctttgtctgaaaaggacaaggctgacttgagattcggtgttgaaaacggtgtccacatgatcttcgcttctttcatcagaaccgctcaagatgttttgaccatcagagaagttttgggtgaagacggtaaggacatcaagatcgtcgtcaagattgaaaaccaacaaggtgttaacaacttcgacgaaatcttgaaggtcactgacgctgtcatggttgccagaggtgacttgggtatcgaaatcccagccccagaagtcttggctgtccaaaagaagttgatcgctaagtctaacttggccggtaagccagttatctgtgctacccaaatgttggaatctatgacctacaacccaagaccaaccagagctgaagtttccgatgtcggtaacgctgttttggacggtgctgactgtgtcatgttgtccggtgaaaccgctaagggtaactacccaattaacgctgttaccactatggctgaaactgctttgatcgctgaacaagctattgcttacttgccaaactacgatgacatcagaaactgcactccaaagccaacttctaccactgaaactgttgctgcttccgccgtcgctgctgtcttcgaacaaaaggctaaggctatcatcgttttgtctacctctggtaccaccgctagattggtttccaagtacagaccaaactgcccaatcatcttggtcaccagaaacgccagaactgctagattctctcacttgtacagaggtgttttcccattcgtttacgagaaggaatctgtctctgactggactgaagatgttgaagctagattgaacttcggtatcgaacaagctatcgaattcggtatcttgaagaagggtgacacttacgtttccatccaaggtttcaaggctggtgtcggtcactccaacactttgcaagtctccactgcttaa

SEQ ID NO: 7401 - protein, 501 aa, Candida glabrata
MDSRLARLTTLQTSAGEELRRTSIIGTIGPKTNNPETLVALRKAGLNIVRMNFSHGSYEYHKSVIDNARKSEELYPGRPLAIALDTKGPEIRTGTTTNEVDYPIPPNHEMIFTTDDKYAKACDDKIMYLDYKNITKVISAGRIIYVDDGVLSFEVLQVVDDKTLKVKSLNAGKICSHKGVNLPGTDVDLPALSEKDKADLRFGVENGVHMIFASFIRTAQDVLTIREVLGEDGKDIKIVVKIENQQGVNNFDEILKVTDAVMVARGDLGIEIPAPEVLAVQKKLIAKSNLAGKPVICATQMLESMTYNPRPTRAEVSDVGNAVLDGADCVMLSGETAKGNYPINAVTTMAETALIAEQAIAYLPNYDDIRNCTPKPTSTTETVAASAVAAVFEQKAKAIIVLSTSGTTARLVSKYRPNCPIILVTRNARTARFSHLYRGVFPFVYEKESVSDWTEDVEARLNFGIEQAIEFGILKKGDTYVSIQGFKAGVGHSNTLQVSTA

SEQ ID NO: 7402 - DNA, 1527 bp, Candida glabrata
  CDS (1)..(1527)
atggactccaggttgcatagattgattaacttagaagtcactccaggtaaggatgtcagaaagactgccattattggtaccattggtcccaagactaacaatgttgacacattagttgctttgagaaaggctggtttgaatattgtccgtatgaacttctctcatggttcttacgaataccaccaatctgtgattgataacgccagaaagtcagaacaggtttatcctggtagaccattggccattgccttggacaccaagggtccagagattagaacaggtaccaatgttgacgatgttgactacccaattccaccaaatcatgagatgatcttcactactgatgataaatatgccaaggcatgtgatgacaagatcatgtatgttgattataagaacatcaccaaagtgattcaaccaggtaaagtcatctatgttgatgacggtgttttgtcttttgaagtcttagaagtcgtcgacgataagaccttgaaggtcaaatccttaaatgcaggtaaaatttcttctcataaaggtgttaacttgccaggaactgatgtcgacttaccagctttatctgaaaaggacaaagaagatttgagattcggtgtcaaaaatggtgttcatatgatctttgcctcttttatcagaactgcacaagatgtcttgactatcagagaagtactgggcgaggaaggtaaagacataaaagtcattgttaagatagaaaaccagcaaggtgtcaataactttgatgagattttggaagtggcccatggtgttatggttgccagaggtgacttgggtatcgaaattccggcaccacaggtcttggccgttcaaaagaaacttatagctaaatgtaacttggctggtaagccagtcatttgtgctactcaaatgctagagtccatgacattcaacccaagaccaaccagagctgaagtttctgatgttggtaacgctatattggatggtgctgattgtgtcatgttgtctggagaaactgctaaaggtaattaccccatcaatgctgtcacaacaatggcagaaactgccattatcgctgaacgagccattgcttatatgccattgtatgatgatttgagaaattgtactccaaaaccaacatcgacaacagagactgttgctgcctcggcagttgcagctgttcaagagcaaggtgccaaacttattttggtactatctacttctggtaacactgcaagattagtctccaagtatagacctcaatgcccaatcgttttggttacaagaaacccaagaactgctagattttctcatttattcagaggtgtgttcccatttgtttatgaaaaagaaccactagatgactggagtgaggatacccacgctcgtttgagatttggtgtcgatatggccaaagaatatggctttgttaagaatggtgatgcagttatttccattcaaggtttcaagggtggtgttggtcactctaatactatgcgtgtttccattgtaggtggagaaaaggaggatatctga

SEQ ID NO: 7403 - protein, 508 aa, Candida glabrata
MDSRLHRLINLEVTPGKDVRKTAIIGTIGPKTNNVDTLVALRKAGLNIVRMNFSHGSYEYHQSVIDNARKSEQVYPGRPLAIALDTKGPEIRTGTNVDDVDYPIPPNHEMIFTTDDKYAKACDDKIMYVDYKNITKVIQPGKVIYVDDGVLSFEVLEVVDDKTLKVKSLNAGKISSHKGVNLPGTDVDLPALSEKDKEDLRFGVKNGVHMIFASFIRTAQDVLTIREVLGEEGKDIKVIVKIENQQGVNNFDEILEVAHGVMVARGDLGIEIPAPQVLAVQKKLIAKCNLAGKPVICATQMLESMTFNPRPTRAEVSDVGNAILDGADCVMLSGETAKGNYPINAVTTMAETAIIAERAIAYMPLYDDLRNCTPKPTSTTETVAASAVAAVQEQGAKLILVLSTSGNTARLVSKYRPQCPIVLVTRNPRTARFSHLFRGVFPFVYEKEPLDDWSEDTHARLRFGVDMAKEYGFVKNGDAVISIQGFKGGVGHSNTMRVSIVGGEKEDI

SEQ ID NO: 7404 - DNA, 1071 bp, Bacillus thuringiensis serovar konkukian str
  CDS (1)..(1071)
atggtgataaaagtgacaatcgatcgagtttgtacaattggcccagcaagtaataataaagaaacgttagcacagttaataaacaatggtatgaaaattgttcggctaaatttatcacatggcacgcatgaaagtcataaagatattattcgtttagtgaaatcgttagatgattctattaaaattttaggcgatgtacaaggtcctaaaataaggttaggtgaaataaaaggagaacaaattacacttcaggcgggagattcttttctgttgcatacgcaaccagttacagggagtagtacggaagcaagtgttgattatgaaggaatcgcgaatgatgtgaaagttggaagtagaattttaatgaatgatggtgaagttgagttaatcgttgagaaggtaagtacggataaaatagaaacaaaggtcaaaacaggtggtaatatctcatctcataaaggggtgaacttaccaggcgcaatcgttagtttaccagctattacagagaaagataaaaaagatattcagtttctcttagaagagggtgttgattttattgcgtgttctttcgtaaggaaacctagtcatataaaagaaatacgagatttcatacaacagtatagagaaacgtcacctaatttaattgcaaaaatagaaacgatggaagcaatcgagaattttcaagatatatgtaaagaagcagacggaattatgattgcaaggggcgatttaggagtagagttgccgttccaatttattccgctcttgcaaaaaatgatgattcaggaatgtaatcgaacgaatacatatgttattacagcgacacaaatgcttcaatctatggtagatcattcgattccaacaagggctgaggtaactgatgtgtttcaagctgtactggatggaacgaatgctgttatgctttctgctgaaagtgcttcaggagagcatccggttgaaagtgtgagtacactacgtctcgtttctgaatttgctgagcatgtgaaacaagacggtccttttgtgatgaaagatgtactggaattgctgcataaatctttgggtgagtga

SEQ ID NO: 7405 - protein, 356 aa, Bacillus thuringiensis serovar konkukian str
MVIKVTIDRVCTIGPASNNKETLAQLINNGMKIVRLNLSHGTHESHKDIIRLVKSLDDSIKILGDVQGPKIRLGEIKGEQITLQAGDSFLLHTQPVTGSSTEASVDYEGIANDVKVGSRILMNDGEVELIVEKVSTDKIETKVKTGGNISSHKGVNLPGAIVSLPAITEKDKKDIQFLLEEGVDFIACSFVRKPSHIKEIRDFIQQYRETSPNLIAKIETMEAIENFQDICKEADGIMIARGDLGVELPFQFIPLLQKMMIQECNRTNTYVITATQMLQSMVDHSIPTRAEVTDVFQAVLDGTNAVMLSAESASGEHPVESVSTLRLVSEFAEHVKQDGPFVMKDVLELLHKSLGE

SEQ ID NO: 7406 - DNA, 1960 bp, Zea mays
  CDS (144)..(1673)
gcacgagcgcacgagcgacgccgcccccattcattcttggagggcaagaagaacgcgcagtccaaaagcgaaacaaggggaaggggcgaggcagccaaacgaatcccagcacctgcctctcctttgcttgcgcagatctagcgatggcggcgggcggtgagttggcgtggggggaggagcccgtggcgcggcgccggcctaagaccaagatcgtctgcacgctcggcccggcgtcgcgatccgtcgagatgatctcgcgcctgctgcgcgccgggatgtgcgtcgcgcgcttcaacttctcccatggctcccacgagtaccaccaggagacgctcgacaacctgcacgccgccatggagctcaccgggatcctctgcgccgttatgctcgacaccaagggtccagagattagaactggatttttgaaagatgggaagcctattcaattgataaaaggccaagaaatcacaatttctacagactatagcattcagggtgatgagaaaatgatatcaatgagctacaagaagcttgctgttgatctgaagccaggcagtgtcatattgtgtgctgatggtaccatcactcttactgttcttcactgtgataaagaacaaggcttggttcgctgccgctgtgagaacactttcaagcttggcgagaggaagaatgttaatcttccaggagttattgttgatctccccacactcacagacaaggacaaggaggacatccttaaatggggtgttccaaacaagattgacatgattgccttgtcatttgttcggaagggttcggatcttgtggaggttaggaaggtacttggtgagcatgccaagtccataatgctgatgtcaaaggttgagaatcaagagggagtagctaactttgatgatatcctggcaaactctgatgcttttatggtggcaagaggtgatttaggaatggaaattcctatagagaagattttctttgcacagaaggtgatgattttcaagtgcaatattcaaggcaagcctgttgtgactgcaacccagatgttggaatctatgatcaagtctcctcgccctactcgggcagaagcaacggatgttgcaaacgcagttcttgatggcacagactgtgttatgctcagtggtgagactgctgctggggcctatccagagttggcggtgcagactatggctaagatctgcctgcaagcagagtcttgcgtagaccatgctgctatttttaaatcaatcatggcttcagctccaattccaatgagtccattggagagccttggatcatcagctgttcgcacagcaaactctgccagggcagcacttatcttggtcctgaccaggggaggaactactgctaggcttgtagccaagtataggccatccatgccgattctgtccgttgtggttcctgagctgaagacagactcgttcgactgggcctgcagtgacgagggtccggcaaggcacagcctcattgtgaggggtgtcatcccaatgctgagtgccgccactgccaaggcctttgacaacgaagccactgacgaagctattggttttgccattgaaaatgcgaagacgatggggctatgcaacaccggtcaatccgttgtggccctgcaccgcatcgggatttcatccgtcatcaagcttcttactgtgaagtaggggtccaagggtgagggacaccattttgcttggtgaatttttgtgaggctgcttacgcacatcagcgtatccacagcttttctgttgccaaagatacagactttgcgttctggtacaccttggtgttacaaggttgtgggaatttgtcgtttagatattagcgatttaaacagtttatcaactgctatagctaattaatttgcagctgtgctgcaactttatcgcacaaaaaaaaaaaaaaaaaaaaaaaaaaaaaaaaaaaaaaaaaaaaaaaaaaaaaaaaaaaa

SEQ ID NO: 7407 - protein, 509 aa, Zea mays
MAAGGELAWGEEPVARRRPKTKIVCTLGPASRSVEMISRLLRAGMCVARFNFSHGSHEYHQETLDNLHAAMELTGILCAVMLDTKGPEIRTGFLKDGKPIQLIKGQEITISTDYSIQGDEKMISMSYKKLAVDLKPGSVILCADGTITLTVLHCDKEQGLVRCRCENTFKLGERKNVNLPGVIVDLPTLTDKDKEDILKWGVPNKIDMIALSFVRKGSDLVEVRKVLGEHAKSIMLMSKVENQEGVANFDDILANSDAFMVARGDLGMEIPIEKIFFAQKVMIFKCNIQGKPVVTATQMLESMIKSPRPTRAEATDVANAVLDGTDCVMLSGETAAGAYPELAVQTMAKICLQAESCVDHAAIFKSIMASAPIPMSPLESLGSSAVRTANSARAALILVLTRGGTTARLVAKYRPSMPILSVVVPELKTDSFDWACSDEGPARHSLIVRGVIPMLSAATAKAFDNEATDEAIGFAIENAKTMGLCNTGQSVVALHRIGISSVIKLLTVK

SEQ ID NO: 7408 - DNA, 1452 bp, Mycoplasma mobile
  CDS (1)..(1452)
atgaatgtattagaaaaagaaaaaggtgttaatcttactgataaaagatcaaaaatgatcgctacaattggtccatcttcacaaaataaagaaattttaaaacaaatgatgttgaaaggtatgactacagttagagccaattttagccatggagatcatgcagaacaactaaataaatttgttttagcaaaagaagtagcaaaagaactaaatttaccaatgtctcttatgttagacactaaaggtcctgaaattagagttggaaaaatgaaagatggatctcaaaaaattgaagtagggaaaattattaccgttttaacagatgaagtttcatacaaaacttttgaaggaattccaactaaatttacagtttcacatagaatggataaagatgttaaagttggaagctacattttatttgatgatggaaaattaactactattgttacaggtgtaaaatcaggaattgtcgaagtaaaaacaattaattcacatgttttaaaatcaaataaaagaattaatattccaggagctcaattatcattagaatttttaagtaaaaaagataaagaagatattatctttggaattaaaaatgatgtaaattatattgctgcttcatttgttaattcgaaacaagatgttcttgatttaagaaaattattaaaagataataatggagaacatattcaaattatttcaaaaattgaatctgtatttggaattgaaaatattgatgaaattattgaagctagtgatggaatcatgatcgcaagaggagatttaggattagaaattccttattttgaagttcctttttatgaaaaacaaattattagaaaatgtcgtaatgttggtaaaccagttattgttgcaactcaaatgcttgattcaatggaaaaactacctcaaccaactagagcagaagttagtgatgtttactgggcaacagaattaggagcagatgcaactatgctttcaggagaaagtgcaaatggagatttccctgttgaatcagttgaagttatgtcaacaattaatcgtcgtgcagaaaaagaattttacaataaattatactatcctgcacatttagaaactttaattcaaaatccggttggagttcactcgaaattagcttctgaagttgcacttaaagtaatgaatggagattataaattttcagttattctttcagaaacaggaagattattaaaagaaattgcacgttttagacctaatacagttattatcggagttattaacaatgataaattaattcatggatttggaattacacacagtgtgtttatgagtgtagattcaaaagcagtaaaaagtgaaattgaaaaaaatcttactaaagcaagggaagttttaaaaccatttttccctaaaaaaggtgacaaatatttagttgttgaaaataataaaatttcagaatatatttattaa

SEQ ID NO: 7409 - protein, 483 aa, Mycoplasma mobile
MNVLEKEKGVNLTDKRSKMIATIGPSSQNKEILKQMMLKGMTTVRANFSHGDHAEQLNKFVLAKEVAKELNLPMSLMLDTKGPEIRVGKMKDGSQKIEVGKIITVLTDEVSYKTFEGIPTKFTVSHRMDKDVKVGSYILFDDGKLTTIVTGVKSGIVEVKTINSHVLKSNKRINIPGAQLSLEFLSKKDKEDIIFGIKNDVNYIAASFVNSKQDVLDLRKLLKDNNGEHIQIISKIESVFGIENIDEIIEASDGIMIARGDLGLEIPYFEVPFYEKQIIRKCRNVGKPVIVATQMLDSMEKLPQPTRAEVSDVYWATELGADATMLSGESANGDFPVESVEVMSTINRRAEKEFYNKLYYPAHLETLIQNPVGVHSKLASEVALKVMNGDYKFSVILSETGRLLKEIARFRPNTVIIGVINNDKLIHGFGITHSVFMSVDSKAVKSEIEKNLTKAREVLKPFFPKKGDKYLVVENNKISEYIY

SEQ ID NO: 7410 - DNA, 1668 bp, Picrophilus torridus
  CDS (1)..(1668)
atgtcaaggacaaagttaatagcaacaataggccctgcaagtgaatcaatggaaattataaaaaaaatggcaaatcttgggctttcatgcataaggataaatacagcacatattgaaaatggatacataacaaaagtagcaaaaatggttgatgatgttaataaatcagagggcacatatataggattaatggtggatttaaaggggccagagttaagaactggtaaattcaaggacggctcatttaaaatagattataataaaaagtataaaatatcatacaataaaaatgacaaccctgacatattaataaattataatatatcggatttcatagacgataaaacattaatagcaatgagcgatggaaagttaagattttccgttgattctgtaaacggcgatataataaacgttacatcccttgattcaggctctttaagggacaactcaagagtcaatgttccagggaagttgttaaggctcggaagcctgacggaccgagacaggatgttcatagaggagggcataaaaaacaatgtaaacttctatgcattatcatttgttcaatcaagggagaacataaacgagctccaggattatctctttgaaaggaactgcgatgcacagttaatatcaaagatagagacaaagagcggctatgataacatcgatgagatagcaagggcctctgattttataatggttgcccggggcgatcttggcgttgagatgccgttgaaggaggttacaatagcacagaagaaaattatagatgaatcaagaaagtatgcaacaccgacaatagttgcaacgcagatgcttgaatccatggttaacaacgattcaccaacaagggccgaggtctctgatataacaaatgcaataattgacggaactgacgcattgatgctatccgaggaaaccgccataggaaggtatcctgtcgaggccataggctatttaagcagcatatcagactatgtcgattccatggagataaaatacaaggaacctgaaagctttgcctttgacaaggtggcatttgccatatccaagggattaaagatgatatctgactacacaaacgttgattctattgttgcattcacaaggtctggattcaccgcaaggctggtatcatcaatgaggccagggaagatgatatactccgttgtttcaagcgatttccttgcaaggtcattaaaccttttaaaaagcgttgttcctgtaaaaatcgatgaatcaatgaagtcaaaggaaatatacgatatactcgttgatataaacaggagcaataagataagaccgggcaaaaaggtgcttgttgtttcaggctctccatactttgtcttcggcggcacaaacgagataaggcttgtaaccatgggaaaattcataggccgtggatatcctgttggtaacagcttctcaggttactatgagcccgatggctctggggatataataatacttgataaatatataaaaaactttgattacaaaaaatacaaatgcgttataataaaaggcaatgtaagcgatacaataaaaaacctattctatgaaaataagatacttttattgtacaacactgaattcgacgctgaattaaatgagaaaacatttctaaacatagacggtgatacaggaataataacagcataa

SEQ ID NO: 7411 - protein, 555 aa, Picrophilus torridus
MSRTKLIATIGPASESMEIIKKMANLGLSCIRINTAHIENGYITKVAKMVDDVNKSEGTYIGLMVDLKGPELRTGKFKDGSFKIDYNKKYKISYNKNDNPDILINYNISDFIDDKTLIAMSDGKLRFSVDSVNGDIINVTSLDSGSLRDNSRVNVPGKLLRLGSLTDRDRMFIEEGIKNNVNFYALSFVQSRENINELQDYLFERNCDAQLISKIETKSGYDNIDEIARASDFIMVARGDLGVEMPLKEVTIAQKKIIDESRKYATPTIVATQMLESMVNNDSPTRAEVSDITNAIIDGTDALMLSEETAIGRYPVEAIGYLSSISDYVDSMEIKYKEPESFAFDKVAFAISKGLKMISDYTNVDSIVAFTRSGFTARLVSSMRPGKMIYSVVSSDFLARSLNLLKSVVPVKIDESMKSKEIYDILVDINRSNKIRPGKKVLVVSGSPYFVFGGTNEIRLVTMGKFIGRGYPVGNSFSGYYEPDGSGDIIILDKYIKNFDYKKYKCVIIKGNVSDTIKNLFYENKILLLYNTEFDAELNEKTFLNIDGDTGIITA

SEQ ID NO: 7412 - DNA, 1536 bp, Plasmodium falciparum
  CDS (1)..(1536)
atgagttcatttaagtacaaaaactccgccgcaggtgccagtatgcaaagtgctgctaacataaccttgagacaaattttagaacccaataatgtgaatttacgttctaagaaaacacacattgtatgtaccttaggtccagcatgtaaatctgttgaaacacttgttaaattgattgatgcaggtatggatatttgccgttttaacttttctcacggtagccatgaagatcacaaggaaatgtttaacaacgtgttaaaagcccaagaattgaggccaaattgcttattaggaatgttgttagatactaaagggccagaaatcaggacagggtttttaaaaaataaagaagttcacttaaaagaaggtagtaaattaaaattagtaaccgattatgaatttttaggtgatgaaacttgtatagcatgttcatataagaaattaccacaaagtgtgaagccaggaaatattatattaatagctgatggatcagtaagttgtaaagttttagaaacacatgaagatcatgttattacagaagtattaaattcagctgttattggtgaaaggaaaaatatgaatttaccaaacgttaaggttgatttaccaattattagcgaaaaggataaaaatgatatactaaattttgctataccaatgggttgtaattttattgctgcctcatttattcaatcagccgatgatgtccgtttaattagaaacttattaggaccaagaggaagacatattaaaattattcccaaaatcgaaaacattgaaggtattattcatttcgataaaattttagctgaatctgatggtatcatgattgcaagaggagatttaggaatggaaatttctccagaaaaagttttcttggcacaaaaattgatgatatcaaaatgcaatttacaaggtaaaccaattatcactgccactcaaatgttagaatccatgaccaagaacccaagaccaacaagagcagaagttacagatgtagctaatgctgttttagatggtactgattgtgttatgctttcaggagaaactgcaggtggtaaatttccagtggaagctgttaccattatgtccaaaatctgtttagaagcagaagcatgcattgattataaattattatatcaatcattagtaaatgcaattgaaacaccaattagtgttcaagaagctgtggctagatcagctgtagaaacagcagaatctattcaagcttctttaattatagctttaacagaaacaggttatacggctagattaattgccaaatataaaccaagttgtaccatcttagcccttagtgcttctgattcaactgttaaatgtttgaacgtacacagaggtgttacatgcattaaagtaggttcattccaaggaacagatattgttattagaaatgctattgaaatcgcaaaacaaagaaatatggcaaaagttggtgatagcgttattgctattcacggaattaaagaagaagtatctggaggtaccaacttaatgaaagttgtacaaattgaataa

SEQ ID NO: 7413 - protein, 511 aa, Plasmodium falciparum
MSSFKYKNSAAGASMQSAANITLRQILEPNNVNLRSKKTHIVCTLGPACKSVETLVKLIDAGMDICRFNFSHGSHEDHKEMFNNVLKAQELRPNCLLGMLLDTKGPEIRTGFLKNKEVHLKEGSKLKLVTDYEFLGDETCIACSYKKLPQSVKPGNIILIADGSVSCKVLETHEDHVITEVLNSAVIGERKNMNLPNVKVDLPIISEKDKNDILNFAIPMGCNFIAASFIQSADDVRLIRNLLGPRGRHIKIIPKIENIEGIIHFDKILAESDGIMIARGDLGMEISPEKVFLAQKLMISKCNLQGKPIITATQMLESMTKNPRPTRAEVTDVANAVLDGTDCVMLSGETAGGKFPVEAVTIMSKICLEAEACIDYKLLYQSLVNAIETPISVQEAVARSAVETAESIQASLIIALTETGYTARLIAKYKPSCTILALSASDSTVKCLNVHRGVTCIKVGSFQGTDIVIRNAIEIAKQRNMAKVGDSVIAIHGIKEEVSGGTNLMKVVQIE

SEQ ID NO: 7414 - DNA, 1458 bp, Photobacterium profundum
  CDS (1)..(1458)
atggagtttcaaatgtctgaacaactaagacgtaccaaaatcgtaactacacttggtcctgctactgaccgcgataacaaccttgaaaaaattatcgccgctggagctaacgtagttcgaatgaacttctctcacggtagccctgaagatcatattcaacgtacaaaaatggtacgtgaaattgcagcaaagctaggtaagcatattgctattcttggcgaccttcaaggtccgaaaattcgagtttctacttttaaagacggtaaaatacaattggctatcggtgataagttcacgctagatagtgaccttccaaaaggtgaaggccatcaagatgctgtcggtcttgactataaagagctacccaatgatgttgtgactggcgatcttttacttctagatgatggtcgagttcagttaaaagtaacagcagtgagtggtaataaagtacataccgaagtcaccgttggtggtccgttatctaataacaaaggcatcaataaaaaaggcggtgggctttcagctgaagcactaacagagaaagacaaagccgacattattactgcagcccaaatgggtgtggactaccttgcagtgtcattcccacgtaacggcgaagacatgaagtatgctcgaagcttggcattagatgctggtcttgaagctaagttagtcgctaaagttgagcgtgcagaagccgtagcaacaacagaagcaatggatgacatcatcatggcatctgatgtggtaatggttgctcgtggtgaccttggggttgaaattggtgaccctgagctggttggtgttcagaagaaattaattcgtcgtgctcgtagccttaaccgtaccgtcattactgcaactcaaatgatggagtcaatgattactagcccaatgccaacacgtgcagaagtcatggacgttgctaacgccgtattggatggtacagatgctgtaatgctttcagcagaaacagcagctggtgatttcccagttgaaaccgttcaagcaatgtcgagtgtttgtgtgggtgctgaaaaagagcctagcatcaatgtatccaatcaccgcttaactcgcacatttgcttcgcctgaagaaactatcgcaatgtctaccatgtatgctgcaaaccatatggaaggcgtaaaagcgatggtagcaatgaccgaatctggtcgtacagcattaatgatgtctcgtatctcatctggtttacctattttcgctatgtcacgtaacgaaagtacattgaatcgttcttcactataccgcggtgtaacacctgtctatttcgaccgtgatagcgacgcaggtcttgaagcggctaaacacgcactggttgtgcttaaagagcatggttacttagcaacgggtgatcttgtcattatcacccaaggtgacgtaatggatacgattggttctaccaacaatatgcgtattcttactgttgaataa

SEQ ID NO: 7415 - protein, 485 aa, Photobacterium profundum
MEFQMSEQLRRTKIVTTLGPATDRDNNLEKIIAAGANVVRMNFSHGSPEDHIQRTKMVREIAAKLGKHIAILGDLQGPKIRVSTFKDGKIQLAIGDKFTLDSDLPKGEGHQDAVGLDYKELPNDVVTGDLLLLDDGRVQLKVTAVSGNKVHTEVTVGGPLSNNKGINKKGGGLSAEALTEKDKADIITAAQMGVDYLAVSFPRNGEDMKYARSLALDAGLEAKLVAKVERAEAVATTEAMDDIIMASDVVMVARGDLGVEIGDPELVGVQKKLIRRARSLNRTVITATQMMESMITSPMPTRAEVMDVANAVLDGTDAVMLSAETAAGDFPVETVQAMSSVCVGAEKEPSINVSNHRLTRTFASPEETIAMSTMYAANHMEGVKAMVAMTESGRTALMMSRISSGLPIFAMSRNESTLNRSSLYRGVTPVYFDRDSDAGLEAAKHALVVLKEHGYLATGDLVIITQGDVMDTIGSTNNMRILTVE

SEQ ID NO: 7416 - DNA, 1413 bp, Photobacterium profundum
  CDS (1)..(1413)
atgaaaaagaccaagatcgtatgtacgattggaccaaaaactgaatctgtagaaatgctgactaaactagctaacgctggtatgaacgtaatgcgtttaaacttctctcacggtaacttcgaagaacacggtcaacgtatcgtaaacctacgtgaagtaatggctacatctgctcagcctctagctatcttgctagatactaaaggtcctgaaattcgtactatcaaactagaaaatggcgaagatttcgctctagttgctggtcaagaattcacattcacaactgatattacagttgttggcaaccaagaccgcgttgcagtaacttacccaggtttcgctaaagaccttactaaaggtaacatcatccttgttgatgatggtcttatcgaaatggaagtactagaaacaactgaaactgaagttaagtgtaaagtacttaacaacggtgaccttggtgaaaacaaaggtgttaacctacctggtgtttctgtaaagcttcctgctctttctgaaaaagataaagcagacctagtattcggttgtgagcaaggcgttgatttcgttgctgcatctttcattcgtaaagaagatgatgttaaagaaatccgtgctctacttgctgctaacggtggcgagaagattcaaatcatctctaaaatcgaaaaccaggaaggcgttgataactttgactctatcctagaagcttctgacggtatcatggttgctcgtggcgaccttggtgttgaaatcccagtagaagaagttatctttgctcagaagatgatgatcgagaaatgtaatcgcgcacgtaaagttgttatcactgcaactcaaatgcttgattctatgattaagaacccacgtccgactcgcgcagaagcgggtgacgttgcaaacgcaatcatggatggtactgatgcagtcatgctatctggtgaatcagctaagggtaaatacccaattgaagctgtaactatcatggctcaaatctgtaaccgtacagattcagcgttaaaagcagaattaggttctcgcctagacagctctcgtctacgtattactgaagctgtatgtaaaggcgcagtagacacttcagagaagctaaatgctcctctaattgttgttgctactgaagcgggtaaatctgctcgctctatccgtaagtacttcccaacagcgaaaattattgctgtaactacaaaccagaaaacagctgctcagctttgtctaacgaaaggtgttacacctatcgttgttgatgctatcgacaacactgatgcattctacagtcgcggtaaagaaatcgcgctagaaactggtcttggcgctaaaggcgatatcgttgttatggtatctggcgcactagttccttctggtacaactaacacagcttctgtacacgtactttaa

SEQ ID NO: 7417 - protein, 470 aa, Photobacterium profundum
MKKTKIVCTIGPKTESVEMLTKLANAGMNVMRLNFSHGNFEEHGQRIVNLREVMATSAQPLAILLDTKGPEIRTIKLENGEDFALVAGQEFTFTTDITVVGNQDRVAVTYPGFAKDLTKGNIILVDDGLIEMEVLETTETEVKCKVLNNGDLGENKGVNLPGVSVKLPALSEKDKADLVFGCEQGVDFVAASFIRKEDDVKEIRALLAANGGEKIQIISKIENQEGVDNFDSILEASDGIMVARGDLGVEIPVEEVIFAQKMMIEKCNRARKVVITATQMLDSMIKNPRPTRAEAGDVANAIMDGTDAVMLSGESAKGKYPIEAVTIMAQICNRTDSALKAELGSRLDSSRLRITEAVCKGAVDTSEKLNAPLIVVATEAGKSARSIRKYFPTAKIIAVTTNQKTAAQLCLTKGVTPIVVDAIDNTDAFYSRGKEIALETGLGAKGDIVVMVSGALVPSGTTNTASVHVL

SEQ ID NO: 7418 - DNA, 1344 bp, Methanococcus maripaludis
  CDS (1)..(1344)
atggttgaaaaatcgacggaatataggaaaaccaaaattctggttactatggggccatctcttgacggaacttttgaaaaaagtcttgaatttattgatggaattcgctttaacatgtctcacacaaatacaaaacatattgaaaaatatctcgatattttaaataaaaaaaatattgcaaaactcatggatttaaagggaaacaagattaggataaaaaaatcaaatttttcagaactcattgaaaatcaggttgtaaaacttggaaaagatattctaatttcatatattccagaatgtattaaaaagggccaaaatatcctgattaatgatggaaaaataaaattaatcgttgaaagtgttgaaaaagatataactgcacgtgttttagttggaggacacataaaagaaaaaatgggagtaaactttcctgaaggatgctttccaaacgatttaacagatgaagatataaaaaacgtgaaatttgcagttgaaaatgaatttgaatacattgcactatctttcgttagaagtgaaacggatattttgaatttaaaaaatttaattaaagaatattctggaaattgctcagttattgcaaaaatcgagaccaaagaaggattgaaaaacattgatgagattttaaatcattcggatggcgtaatgattgcgagaggcgatcttggagttgaagttgccattgaatatctgccgataattcaaaaaaatattataaaacttgcaaatgagaagggaaaactcataattactgcaacccagatgctcgactcaatggtaaataatccgtatcccacaagagcagaagttacggatgttgcaaatgcaatatttgatggaaccgactgtttaatgctttcaaatgaaaccacaattggaaaatatccaatcgaatcaataaaaactctcgataatattgcaagagtttcagaaaatgatatttcaaaatacaaacaggaaatagaatttgaagaacattcaatctattcaggaattgcctatgcagttgaagctctttcaaaaaaattaaatcctaagatagtaattactccaacaacttcgggaaaaactccgctcagaatttcaaaattccggtttaattcaccaattattgcccttgctcctgaaaatatagtttttagaaaattaagattggtttggggagtaattccaataaaaattgatgaaataggagatgttgatgaagtacttgaaatatctaaaaaaattgcgaaaaatataattgacagcggtatttacgttgtaacgctcgggcacccaaaaggcgagaaaaaaacaaacgttataaaagttgagagcatataa

SEQ ID NO: 7419 - protein, 447 aa, Methanococcus maripaludis
MVEKSTEYRKTKILVTMGPSLDGTFEKSLEFIDGIRFNMSHTNTKHIEKYLDILNKKNIAKLMDLKGNKIRIKKSNFSELIENQVVKLGKDILISYIPECIKKGQNILINDGKIKLIVESVEKDITARVLVGGHIKEKMGVNFPEGCFPNDLTDEDIKNVKFAVENEFEYIALSFVRSETDILNLKNLIKEYSGNCSVIAKIETKEGLKNIDEILNHSDGVMIARGDLGVEVAIEYLPIIQKNIIKLANEKGKLIITATQMLDSMVNNPYPTRAEVTDVANAIFDGTDCLMLSNETTIGKYPIESIKTLDNIARVSENDISKYKQEIEFEEHSIYSGIAYAVEALSKKLNPKIVITPTTSGKTPLRISKFRFNSPIIALAPENIVFRKLRLVWGVIPIKIDEIGDVDEVLEISKKIAKNIIDSGIYVVTLGHPKGEKKTNVIKVESI

SEQ ID NO: 7420 - DNA, 1797 bp, Parachlamydia sp
  CDS (1)..(1797)
atggcattaattagaacaaaaattgtttgtacaataggacctgcttgcaattccttagagaaaattattgagttaataaacgtaggaatgaacgttgcaaggttgaattttagtcatggaactcaagaagaacatttaaggacaattaatcttttaaaagaagcgagatgtcaacttaacttacctttagccatcatgttagatacaaaagggccagaaatacggctaggaaaaattcgagatggacaaatttttttaacggtaggtcaaaaatggcggttagtgaaaaaggaggttttaggagatgaaagtcaggtttctatttttcctctcaatattttagatcaacttcctgttgggacaacaattttatttgatgatgggtatattgcctcacgcgtgattgaaaattcatccgaaggtgtgcttgttgaaattaataacagcgggatgattcgttcaagtaaaggagttaatattcccaatacaagcctaaatttgcctgctgtcaccgaaaaagacattgacgatattcgttttggatgtagccaggatattgacttgattgctgcttcctttgttcgttctgcagaacatgtcttggagattaagcgtttattagctgatgaaaaaaaaactgatattctagttattgcaaaaattgaaaatagtgaaggggtgcaaaattttgatagcattgtccaagcagcagacggaatcatgatagcaagaggagatttaggggttgaagttcctttaagccatgttcctagattgcagaaaatgatgatccgtaaaagttatttggcaggcaagccagttgtgacagcaacgcagatgttagaatcaatgatcaataatcctagaccaactcgtgcagaaacatctgatgtagcaaatgcgatttatgatagtacatctgctatcatgctttcaggagaaacagcaattggtcgttatcctgttgagacggttaatgtgatgcgaagtatcgtagaagaggctgaagctgatttcaactacagtactttttttgatcaacatgcccctttagtttatcatgatgttccctctgctgtgactttagctactgtaaaaacagcttacagttctagcgctaaagctatttttgcttttactaaagcaggaacaacggcacgacttttatcaagacttaggcctaaaatgcctattattgcgatgacagcaaaagaaaaaatttttcatcagttggcatttaattggggagttattccttttttaagtgaaccttgtaactctttagataaaagtttaaaaaaaatcagtgatttcgcccttggaagtcaacacgtcagctatggagatttggttgtgattactgcaggaactccttttggattttcaggaacgaccaatatgatgatcgttgaaaatattggagatgttttggtaagagggcactctggatatggtatacgtgtgcatgggaacgtagtaatagttcttgctcctcagtctaaagctccttatgcggtcaaagatcaggtacttgtgattgccaaatgcgatgagagttatttatctttaatgaaggaagcttctgctattattttacagaaccatatcaatgattttgcgtctgaaaaatacgcgaagaagattgctctgagtttaggtaagcctattcttcttcgagctgatgcggcatgtcaaattttaaaagaaggacagcttgttactctcgatcctgaaaaagcccttgtttacaaaggagttgttttggaccaattgttggcgagtggagaattttcatga

SEQ ID NO: 7421 - protein, 598 aa, Parachlamydia sp
MALIRTKIVCTIGPACNSLEKIIELINVGMNVARLNFSHGTQEEHLRTINLLKEARCQLNLPLAIMLDTKGPEIRLGKIRDGQIFLTVGQKWRLVKKEVLGDESQVSIFPLNILDQLPVGTTILFDDGYIASRVIENSSEGVLVEINNSGMIRSSKGVNIPNTSLNLPAVTEKDIDDIRFGCSQDIDLIAASFVRSAEHVLEIKRLLADEKKTDILVIAKIENSEGVQNFDSIVQAADGIMIARGDLGVEVPLSHVPRLQKMMIRKSYLAGKPVVTATQMLESMINNPRPTRAETSDVANAIYDSTSAIMLSGETAIGRYPVETVNVMRSIVEEAEADFNYSTFFDQHAPLVYHDVPSAVTLATVKTAYSSSAKAIFAFTKAGTTARLLSRLRPKMPIIAMTAKEKIFHQLAFNWGVIPFLSEPCNSLDKSLKKISDFALGSQHVSYGDLVVITAGTPFGFSGTTNMMIVENIGDVLVRGHSGYGIRVHGNVVIVLAPQSKAPYAVKDQVLVIAKCDESYLSLMKEASAIILQNHINDFASEKYAKKIALSLGKPILLRADAACQILKEGQLVTLDPEKALVYKGVVLDQLLASGEFS

SEQ ID NO: 7422 - DNA, 1488 bp, Bdellovibrio bacteriovorus
  CDS (1)..(1488)
atgttagcagatcgtcgagcgaagattgtggccactattgggccagcgacacgtgatgagaaaaatctggaaaaagcaataaaggcgggcatgaacgtggctcgccttaacttttcgcacggaagtcatgaagaccacctgaaggtggttcattccctgcgcaagctctctaaagagcttcaggctccggtggcgattcttcaagatcttcaggggccgaagatccgcgttggtaagtttgaaaatggctccatcgaaattaaacctggcgaaaaactggtggtaacgacggcaaaagttctggggaaaccaggattggttccgtccgacttccaagagctgcctttggcctgcgtgccgggcacgcgcatccttctggatgacggcctgatggaagtgaaggttttgcaggttcgcggtgaggaaatcgacgtggaagttgtctatggcggtattctgaaagaccgcaaaggcatgaatcttccgggtgtaaatctgcctgtggactgcatgactccaaaagatctggaggatttgcagttcggtattgccaataaagttgattatattgctttgagttttgttcgtcatgcccgtgatatccgcaagctgcgtgaattgatcgaggccgggaactccaatgcgaagatcgtagccaaaatcgagatggtggaagcgatcgaaaatctggaagaaatctgccgcctgagtgacgctgtcatggtggcgcgcggggatttggcagtggaagtcggtcaaagccgtctgccgggctatcagaagcgtattatttctgtatgcaatcaactgggtaagccggtgatcacggcgactcagatgctggacagcatggttgaaaaccctcgtccgacccgagctgagatcacggatgtggccaatgccgttttggatggaactgatgctttgatgctgtcggcggaatctgccagcggcaaatatccgttcaagtgtatccgcactatgcacgagatcatcactgaggtggaacgcaacgaagaagagtattataaaatctctcttgaaaacgagtttctgagcacgccggcgtctatcgccgccagtgcttcactgagtgcgctgaagctgaatgcaaccgcgatcatctgtctgacgacttccggtaaaacggcaaatatcatttcggccttccgtccgaaggcgcgcattatttccgtgactcagcatctggatgttttgaatggcatggaattgggctggggtattcagacccacgcgatcaagccatataagacgatggaagatatcctgcgtgaagtggatctgttgttggtgtcccatggcttgggtaaaaccggggaccgtgtgattctgacattgggtcagccgattgcttgtggtgcaaaaaccaattcgatctatgtgcacacagtgggcggggaaaacgtggcgaagcttcctaatgacaagttgcctctgcgttgtcaggaagagccggttgttgaataa

SEQ ID NO: 7423 - protein, 495 aa, Bdellovibrio bacteriovorus
MLADRRAKIVATIGPATRDEKNLEKAIKAGMNVARLNFSHGSHEDHLKVVHSLRKLSKELQAPVAILQDLQGPKIRVGKFENGSIEIKPGEKLVVTTAKVLGKPGLVPSDFQELPLACVPGTRILLDDGLMEVKVLQVRGEEIDVEVVYGGILKDRKGMNLPGVNLPVDCMTPKDLEDLQFGIANKVDYIALSFVRHARDIRKLRELIEAGNSNAKIVAKIEMVEAIENLEEICRLSDAVMVARGDLAVEVGQSRLPGYQKRIISVCNQLGKPVITATQMLDSMVENPRPTRAEITDVANAVLDGTDALMLSAESASGKYPFKCIRTMHEIITEVERNEEEYYKISLENEFLSTPASIAASASLSALKLNATAIICLTTSGKTANIISAFRPKARIISVTQHLDVLNGMELGWGIQTHAIKPYKTMEDILREVDLLLVSHGLGKTGDRVILTLGQPIACGAKTNSIYVHTVGGENVAKLPNDKLPLRCQEEPVVE

SEQ ID NO: 7424 - DNA, 1437 bp, Mycoplasma mycoides
  CDS (1)..(1437): transl_table=4
atgactaaagaaaaattacaaaagagaatgaagcgaaccaaagtaattacaacaattggtccttcaactcactctgcagaagctattaaagaattatttaacaatggaatgacaactattcgtttaaatttttcacatggtagttatgaagaacacggttatagaattaaagctgcaaaaaaaatctctaaagctttaaataagccaatctcaataatgttagacactaaaggtcctgaaataagattaggaaaatttaaagataataaacaagaagtagtaaaaggtcaagcaattactatttatacagataattattcttatttaaacaaagaatgtgttcaaggtgaaatgactgttgcttatgatatgtcagttgatttaaaacctgaagatatgattttaattgatgatggtaaattagaattaacagttgattcagttgaacctcaaattattaaagcaactgcatttaatcatcacattgtaaaaactaataaacgtgttaacttacctggaattgatttttcattaccatttttatctgaaaaagatgaaaaagatattttatttggatgtgaacaagatgttgattatatagctgcatcatttgtaaatacagctgaaaatgtaagacaaattaaagaaatcttaactaaagctaatgcaaatcatattcaaattatttcaaaaatagaatcacaagttggattagataatattgatgaaattattgaagaatctgatggaattatgattgcgcgtggtgatttaggattagaaattccatattatgatgtaccttattgagaaaaaattatcatcagaaaatgtagagaaaaaggaaaaatcgttattgttgctactcaaatgttagaaacaatgacagaaaatccatcaccaactagagctgaagtaactgatgtttattatgcaactgaacttggtgctgatgctacaatgttatctggtgaatcagctgctggagattatccatttttaacagttcatacaatgtcaacaattaataaaagagcagaagttgaattctacaacaaaatttactaccaagtacaattagataatgcaagaaactcaacatcaggacctagagctgaaatcgcagacttattagctacaaaaacaaaagatggtgaatataagtatgcaattgttttatcaaaaacaggtgaattattaaaaaccatttctaaatttagaccaaatgtaacaattttaggagttagtccagataagaaattgtgaacttcatttggtgtatgacattcaatttttatgaataaagttgatactttagataatttagataataatgttgaaaaactatcagaaattgctaagtcttgaggagctaagtttggtgaaaaagttttagttgtaagaagtacagctataaaagaaatagaagttatttaa

SEQ ID NO: 7425 - protein, 478 aa, Mycoplasma mycoides
MTKEKLQKRMKRTKVITTIGPSTHSAEAIKELFNNGMTTIRLNFSHGSYEEHGYRIKAAKKISKALNKPISIMLDTKGPEIRLGKFKDNKQEVVKGQAITIYTDNYSYLNKECVQGEMTVAYDMSVDLKPEDMILIDDGKLELTVDSVEPQIIKATAFNHHIVKTNKRVNLPGIDFSLPFLSEKDEKDILFGCEQDVDYIAASFVNTAENVRQIKEILTKANANHIQIISKIESQVGLDNIDEIIEESDGIMIARGDLGLEIPYYDVPYWEKIIIRKCREKGKIVIVATQMLETMTENPSPTRAEVTDVYYATELGADATMLSGESAAGDYPFLTVHTMSTINKRAEVEFYNKIYYQVQLDNARNSTSGPRAEIADLLATKTKDGEYKYAIVLSKTGELLKTISKFRPNVTILGVSPDKKLWTSFGVWHSIFMNKVDTLDNLDNNVEKLSEIAKSWGAKFGEKVLVVRSTAIKEIEVI

SEQ ID NO: 7426 - DNA, 1434 bp, Rhodopseudomonas palustris
  CDS (1)..(1434)
atgagacgcctgcgcaggatcaagatcctcgccacgctcggccccgcctcctccgacagcgcaatgatccgcaagctgttcgaggccggcgccgacgtgttccggatcaacatgagccacaccccgcacgacaagatgcgggagctggtgaagaccatccgtaacgtcgaaagcagctacggtcgcccgatcggcatcctggtcgatctgcagggaccgaagctgcggctgggctcgttcgccaatggaccgatccagctcaacaacggctcgaacttcgtcctcgactcgatcaaggagccgggcgacgagacgcgggtgtatctgccgcatccggagatcctcgcggcgctcaaggtcggagacgcgctgctgctcgacgacggcaaggtgcgcttgatctgcgaagagacccaaggcgatcgcgcggtgacccgcgtggtgatcggcggcaagatgagcgaccgcaagggcgtcagcctgcccgataccgatctgccgatgtcggcgatgaccaacaaggaccgcgccgacctggaagctgcgtgcgagaccggcatcgactgggtggcgctgagcttcgtgcagcgcgccgaagacgtcgtcgaagccaagcggatgatccgcggccgtgccgccgtgatggccaagatcgagaagccgcaagcgatcgaccggctcgaggacattctcgacgtctccgacgcgttgatggtggcgcgcggcgacctcggcgtcgagatgccgctggagcgggtgccgagcctgcagaagcagatgacccgcatggcgcggcgcgccggcaagccggtggtggtcgcgacccagatgctggaatcgatgatctccagcccggtgccgacccgtgccgaagtctccgacgtcgcaaccgccgtgtacgaaggcgccgacgcgatcatgctgtcggccgaatccgccgccggcaaatatccggtcgaagcggtgtcgacgatgaaccgcatcggcgaggaagttgagcgcgacgtcacctatcgcaccgtggtgacggcgcagcgccccgatccggaagcgaccgccggcgatgccatcgcgggcgcggcaaggcagatcgcagagacgctcgatctgtcggcgatcatctgctggacctcgtcgggctcgaccgcactgcgggtcgcgcgtgaacggccgaaggtgccggtggtggcgatcactccgagccttcacaccggacgcaagctgtcggcggtgtggggcgtccactgcgtggtagcggaagacgccaaggatcaggacgacatggtcgagcgcgccggccgcatcgcattccgcgacggcttcgccaaatccggccagcgcgtcatcatcgtcgccggcgtcccactcggcacccccggcgccaccaacatggtccgcatcgcctatgtcggaccgagcgatgcggacgtgtga

SEQ ID NO: 7427 - protein, 477 aa, Rhodopseudomonas palustris
MRRLRRIKILATLGPASSDSAMIRKLFEAGADVFRINMSHTPHDKMRELVKTIRNVESSYGRPIGILVDLQGPKLRLGSFANGPIQLNNGSNFVLDSIKEPGDETRVYLPHPEILAALKVGDALLLDDGKVRLICEETQGDRAVTRVVIGGKMSDRKGVSLPDTDLPMSAMTNKDRADLEAACETGIDWVALSFVQRAEDVVEAKRMIRGRAAVMAKIEKPQAIDRLEDILDVSDALMVARGDLGVEMPLERVPSLQKQMTRMARRAGKPVVVATQMLESMISSPVPTRAEVSDVATAVYEGADAIMLSAESAAGKYPVEAVSTMNRIGEEVERDVTYRTVVTAQRPDPEATAGDAIAGAARQIAETLDLSAIICWTSSGSTALRVARERPKVPVVAITPSLHTGRKLSAVWGVHCVVAEDAKDQDDMVERAGRIAFRDGFAKSGQRVIIVAGVPLGTPGATNMVRIAYVGPSDADV

SEQ ID NO: 7428 - DNA, 1422 bp, Corynebacterium diphtheriae
  CDS (1)..(1422)
atggaacgtcgaactaagattgtttgtacattagggccggcagtcgcttcccgtgagggaattcttggactggttaaagccggcatgaatgtcgcacgtatgaatatgtcacacggcgaccacgcagatcatgagaagaattaccagtgggtccgcgaagctacggatgaaaccggacgcgctgttggtattcttgccgatctgcaggggccaaagattcgtctcggtcgctttatcgatggcgcaacggtgtgggagaacggtgaaatcgttcgtatcactgttgatgacattgaaggtacacacgaccgtgtgtctaccacctacaagaacctcgctaaagatgcgaagcctggcgatcgtcttttggtcgacgacggcaaggttgcattgcgctgtgttgaagtagatggaaacgatgttgtttgtgaggttgtagaaggcggcccagtctctaacaacaagggtgtttcccttcctggaatggatatttccgttccagctttgtctgaaaaagacattgctgatttgcgcttcgctctcaatctcggtgttgacattattgcgttgtccttcgtccgctccccagcagacgtggaacttgttcatgccatcatggatgaagaaggtcgccgttgcccagtgatcgcaaagcttgagaagccagaagccatggacgctttggagtccatcgtattggctttcgacggcatcatgattgctcgtggtgacttgggtgttgagtgcccgttggagcaggtgccgctgttccagaagcgtgccatccagattgctcgtgaaaacgctaagcctgtgattgtggcaacccagatgctcgattccatgatcgagaacctacgcccaacccgtgctgaggcttctgacgtagctaacgctgttcttgacggtgcagatgccgttatgctgtccggtgagacttcggtcggtatcgatccagctaacgttgtccgtactatgtcacgtatcgtttcctacgctgagattgatggccgggtaccaaacttggctcatattccacgcaccaagcgtggcgtgatttcctactctgcacgcgacattgcagagcgtttgaatgcaaaggcacttgtagcattcacctcttcaggtgataccgcaaagcgtgttgctcgtttgcactcgcagctgccgctattggtctttacccctcaccaagaagtccgctctcagttggctttgacttggggtgtagaaaccttccttaccgacgaggttaaggacacagacgagatgatgcgtacgatcgatgagcagttgcttgctctcgatacctacagcgaagatgacatgatcgtgctcgtagccggaacccctccaggagtccaaggcaataccaacatgatccatgtacaccacctaggtgaggacctcaacggtctataa

SEQ ID NO: 7429 - protein, 473 aa, Corynebacterium diphtheriae
MERRTKIVCTLGPAVASREGILGLVKAGMNVARMNMSHGDHADHEKNYQWVREATDETGRAVGILADLQGPKIRLGRFIDGATVWENGEIVRITVDDIEGTHDRVSTTYKNLAKDAKPGDRLLVDDGKVALRCVEVDGNDVVCEVVEGGPVSNNKGVSLPGMDISVPALSEKDIADLRFALNLGVDIIALSFVRSPADVELVHAIMDEEGRRCPVIAKLEKPEAMDALESIVLAFDGIMIARGDLGVECPLEQVPLFQKRAIQIARENAKPVIVATQMLDSMIENLRPTRAEASDVANAVLDGADAVMLSGETSVGIDPANVVRTMSRIVSYAEIDGRVPNLAHIPRTKRGVISYSARDIAERLNAKALVAFTSSGDTAKRVARLHSQLPLLVFTPHQEVRSQLALTWGVETFLTDEVKDTDEMMRTIDEQLLALDTYSEDDMIVLVAGTPPGVQGNTNMIHVHHLGEDLNGL

SEQ ID NO: 7430 - DNA, 3179 bp, Lactobacillus casei
  CDS (1307)..(3070)
aaaaaattgcaaactgcccatggaccaattccagttatcactgtcgacacgaccagcaaggagagtgttttgttagataagcgatactgggtcactgctgacaccagcttgatggctgatcttgaatcgcggtttggtgcggctaatgtggtgttgcgaaaacgacaagaagaatagagaaaattgtaaaatgttctcattttcagggactttgtttctgaaaagtggtaaactcaatgagtatttgtgatgggacaaatcgcaaaagaatatgcatgaggtgaaataatgaaacgcattggtattttgaccagtggcggggatgcgcctggcatgaacgccgcggtccgcgctgttgctcgcaaggcgatgcacgaaggccttgaagtatatggcatcaattatggatttgctgggttagttgccggcgacattttcaaaatgaatgaatcaactgtcggtgataagattcaacgcggcgggaccatgttatattccgcacgttatccacaatttgcgcaagaagaaggccagttgcgcggggtcgaacaattaaacaagtttggcatcgaggcgttggtcgtcatcggcggagacggctcttatcacggtgcactagctttgacgcgtcacggtttcaacaccattggcctgccaggaacgatcgacaacgatattccttacacggacttcacgattggctttgatactgccgttaatacagttgtggaagctgttgaccgtcttcgcgataccgcggcttcgcatgaacgaacctttgtcattgaagtcatgggtcgtgaagctggggacattgccctttggtcgggcgtcgccggtggtgccgaggatgtcatcattccagaacacgactttgacgttaagaaaattgcgtcgaagttgcaaagttctcgtgaacgtggtcaaaagcatgcggtcattcttttggcagaaggcgtgatgcacgctgatcaatttgccaaggaattagccgcacatggcgatttccaattacgttcgacagttctgggacacattgttcgtggcggtgcaccgtccgcacgtgatcgcgttttggcttcacaaatgggttcatacgcggttgaacttttgttgcaaggcaaaggcgctttggctgtcggcattgaaaacaacaagatcacggcacatgatgttcggaccttgtttgatgccaagcatcacgcagaactttcgctctacaccttagcggaagagttaacattttaatctcgtaaacaaacgacattaacgtctgtttaaataatttcaaggagcgatttcacttatgaaaaaaaccaagatcgtcagcacgcttggacctgcaagtaacaccactgatatcatcgttaagttgattgaagcgggtgccaacgttttccgtttcaatttctcacatggtgatcatgaagagcatttggcacggatgaacatggttcacgaagctgaaaagatcacgggtaagaccgttggtatcatgctggatacgaagggtgccgaaattcggacaactcttgaagataccccgaatggtaagatcgattttcacaccggtgacaaagttcgcatctccatggatgcaagtctgaaaggcaccaaggaaaaagttgctgttacctatcctggcctttatgatgacactcacgttggcggccatgttttgtttgatgatggcttgattgacatgaagatcaccgaaaaggacgaaaagaaccgtgaactcgttaccgttgttcaaaacgacggtgtccttggtggtaagaaaggtgtcaacgctcctggtgttgccatcaacttgcctgggattacggaaaaagactccgatgacattcgtttcggcttggacaacgggatcaacttcattgctgcttcctttgttcgtaagcctcaagacgttttagacattcgtgaactccttgaagaaaagaacgcacttaatgttcagatcttccctaagatcgaatcacaagaaggcatcgacaacattgatgacatcttgaaggtttccgatggcttaatggttgctcgtggcgacatgggtgttgaaattccatttgaacatgttccgatcgttcagaagcgcttgatcaagaagtgcaactctttgggtaagccggttatcacggctacacaaatgttggattccatgcaagaaaacccacgtcctacccgtgccgaagtaaacgacgttgccaatgccgtgtttgatggcaccgatgcaacgatgctttctggcgaatctgctaatggtgactatccggttgaatccgttgctgcaatggctcggattgacgaatacaccgaagcagcgatgatggatcaggatgccttcgcattgaaggaatacagtaacaagaacgtcaccgaagctgttggccaaagtgttgcacacacggctcgcaacttaggggttaagaccattgttgctgcgaccgaatccggctacactgcccgcatgatttccaagtatcgtccgaaggctgacattcttgccattaccttcagcgaaaagacccaacgcggcctgatggtcaactggggtgtttacccaatcattgctgaaaagcctgctaacaccgatgctatgttcgacttggcaaccaagaaggcccaagaccttggctttgctaaggaaggcgatctgatcttgatcactgccggtgttcctgttggtgaatctggcacaaccaacgtaatgaaggttcactcatggctccagctggttcaaggctcaggtgtcggcgacgaatccacgattggtaaggcagtcatcgcaagcaacgctcaagaagctgctgctaagatgcaaaagggtgacattctggttgttaagacgactgacaaagattacttgccagcaatcgaaaaagcagctgccttggttgttgaaaccggtggcttgaccagtcacgcagctgttgttggtattgctatgggtatcccagttgttgttggtgctgaaaatgctaccagcgtcatctccgatggccagatcattactgttgactcccgtcgtgggatcatctacaaaggtgctaccaacgccctttaatcttcaaaatgacctgttaaaggttaggaaaaactctcaaggaaacttgggagtttttttcttcccaaaaaacagtagcgttacctgttttgagcaacttactgataaa

SEQ ID NO: 7431 - protein, 587 aa, Lactobacillus casei
MKKTKIVSTLGPASNTTDIIVKLIEAGANVFRFNFSHGDHEEHLARMNMVHEAEKITGKTVGIMLDTKGAEIRTTLEDTPNGKIDFHTGDKVRISMDASLKGTKEKVAVTYPGLYDDTHVGGHVLFDDGLIDMKITEKDEKNRELVTVVQNDGVLGGKKGVNAPGVAINLPGITEKDSDDIRFGLDNGINFIAASFVRKPQDVLDIRELLEEKNALNVQIFPKIESQEGIDNIDDILKVSDGLMVARGDMGVEIPFEHVPIVQKRLIKKCNSLGKPVITATQMLDSMQENPRPTRAEVNDVANAVFDGTDATMLSGESANGDYPVESVAAMARIDEYTEAAMMDQDAFALKEYSNKNVTEAVGQSVAHTARNLGVKTIVAATESGYTARMISKYRPKADILAITFSEKTQRGLMVNWGVYPIIAEKPANTDAMFDLATKKAQDLGFAKEGDLILITAGVPVGESGTTNVMKVHSWLQLVQGSGVGDESTIGKAVIASNAQEAAAKMQKGDILVVKTTDKDYLPAIEKAAALVVETGGLTSHAAVVGIAMGIPVVVGAENATSVISDGQIITVDSRRGIIYKGATNAL

SEQ ID NO: 7432 - DNA, 1341 bp, Onion yellows phytoplasma
  CDS (1)..(1341)
atgaacaaaactaaaataatttgtaccttaggacctgcttcttatgataaaaacattttacaagccttaattcaaacaggtttgaatgtagcaagatttaatttttctcacgctcaatacgaacaaactaaacttttaatgaaaaccattaaaactattagcgataaattagacaaaaacacaggacttatgttagatactaaaggacctgaaattagaactcacgaatttgatggtgtagtaacaattcaaaaagattctgaagtaaaaatatctatgacagaagttttaggtaatgctaaacttttttcagttagttattctaatttatacaatgaattaaaagttggcgatatggttaatattgatgatggatacttatctttggaagttgtaggcaaagacgaagccaaacaacaattagttactaaagccaaaaatactcactccatcaaatctcgtagaggtgtaaatgttcctaaagttaatttagaaatggattttatttctcctaaagattatcaagatattgtttttgctgcccaacaagattttgattatattgctgcttcatttgttagaagagctcaagatgtcaaagatattagaaaaattttacaagaacaaggaaattccaacatccaaattatttctaaaatagaaaatcaagaaggtgttgataatttagaagaaatcattcaagaatcagacggtattatggttgcaagaggtgatttaggaatagaagttgatggtgaattagtaccactttaccaaacgcgtatgattactaaatgtttagaatacggcaaaccagttgtagtagctactcaaatgttagaatctatgcaaagaaatccgcgcccaaccaaagctgaaacttctgatgtctttaatgcagttagagaaggcaccacctttactatgctatcgggcgaaagtgcttcaggtgaatatcctgtagaagctgtaacttatatgaaaaaaattaattatcaagctgaaaaagtagttaattatcaagctttatcacaagtataccaacctaaaaactccaaagaaaaccttttattaagtgctgtggaattggctttacgcaccgatgttaaagcaattgttgtctatgacttaaaagatgcttataatgtttctaaatttcatccatccgttcctgttttggctttagttaaaactgaacaagaagctcgtcgtttagtactaaattttggggtttgtccttttgtttctgaaaccaaattacaaactaaattggaagaacttacccaaaatcaaagtagtaattgtcttgttgttaaagatgggatgctttattttaaataa

SEQ ID NO: 7433 - protein, 446 aa, Onion yellows phytoplasma
MNKTKIICTLGPASYDKNILQALIQTGLNVARFNFSHAQYEQTKLLMKTIKTISDKLDKNTGLMLDTKGPEIRTHEFDGVVTIQKDSEVKISMTEVLGNAKLFSVSYSNLYNELKVGDMVNIDDGYLSLEVVGKDEAKQQLVTKAKNTHSIKSRRGVNVPKVNLEMDFISPKDYQDIVFAAQQDFDYIAASFVRRAQDVKDIRKILQEQGNSNIQIISKIENQEGVDNLEEIIQESDGIMVARGDLGIEVDGELVPLYQTRMITKCLEYGKPVVVATQMLESMQRNPRPTKAETSDVFNAVREGTTFTMLSGESASGEYPVEAVTYMKKINYQAEKVVNYQALSQVYQPKNSKENLLLSAVELALRTDVKAIVVYDLKDAYNVSKFHPSVPVLALVKTEQEARRLVLNFGVCPFVSETKLQTKLEELTQNQSSNCLVVKDGMLYFK

SEQ ID NO: 7434 - DNA, 2023 bp, Oryza sativa
  CDS (324)..(1688)
gaacgcctcgtctgaacacaaaaccccgtaaaaatctccgcctccgccaccgccaccgccgccgacgccgccatggccgccaccgccgccgcggcccacaccctcctccacctcgcggccccgaggaagccctccgcggggcccccactcccgcccgccacccaaccccaacgggatcctcgtcgcatatcgatgttgacgtggcgacggaggccgacctgagggagaacgggttccggagcacgcggcgcaccaagctcgtctgcaccgtggggcccgcctcctgcggcgccgacgagctggaggcgctcgccgtcggcgggatgaacgtcgcgcgcgtcaacatgtgccacggggaccgggagtggcaccggggcgtcatccgcgcggtgcggaggctcaacgaggagaaggggttcgccgtcgccgtcatgatggacaccgaggggagcgagatccacatgggggacctcggcggcgccgccgccgccaaggcggaggatggagaaatatggacatttagcgtaagatcctttgaggcacctcccccagaacgaactattcatgtgaactacgaaggcttcgctgaagatgtgagagttggtgatgagcttcttgttgatggtggcatggctcggtttgaggtggttgagaaattaggaccagatgtcaagtgccgttgcacagatcctggtttgttgctgccacgtgccaatcttacattttggcgggatggtagtattgtccgtgagaggaacgctatgctacctaccatttcatcaaaggattggcttgacatagactttggaatttctgaaggcgtagattttattgcagtttcgtttgtcaaatctgcagaagtaattaaccatctgaaaagctatatagctgcaaggagccgtggcagcgatatagcagtcattgccaagatcgagagcattgactctttgaagaacttggaggagataatccgtgcttcagatggtgccatggtagcccgaggggatatgggtgcacaaattcccttggagcaagtcccctcagtacaacaaaagatagttaaactgtgcaggcagctcaacaagccagtcattgttgcgtcgcagcttcttgaatcgatgattgagtatcctacgcccaccagggccgaggttgctgatgtttctgaagcagttcgtcagcgtgcagatgcgcttatgctttcaggtgagtcagcaatggggagatatccagagaaagctcttagtgtcctccggagtgttagcctaaggattgagaagtggtggagagaggagaagcgccatgaggaactggaacttaaagatgtttcatcttccttctctgacaaaatatcagaagaaatctgcatttcggccgctaaaatggccaacaaattggaggtagatgccgttttcgtctacacaaacactggccacatggcctcactgctctcgcggtgccgtcctgactgcccgatcttcgccttcacgacctcgacatctgtgaggagacgattgaacctccaatggggcctcatccccttccgcctcagcttctcggacgacatggagagcaacctgaaccgtaccttctcgctgctcaaggccaggggcatgatccagtccggcgaccttgtcatcgcgctctccgacatgctgcagtccatccaggtcatgaacgtaccttgagaatcatcatgctcccctctcgtgtttgtttgttctgcccaaaacggaacacggctttagttgacatcatcttaggggcggttttctggtttgaaatttattcgtttgttctccattgtgttagacgacagaaccagagaatgttacaacaataatgctgcaacttccagcgcgttgtaaactctatgctatttagcctgatgtataaggccatgaactgttttgtcgcttactatgataggctatgtatttaccaataaacccttctatttaagctatgtaagaattttcctcatcagaaattactccttgctagagcccagtaaagattcttt

SEQ ID NO: 7435 - protein, 454 aa, Oryza sativa
MNVARVNMCHGDREWHRGVIRAVRRLNEEKGFAVAVMMDTEGSEIHMGDLGGAAAAKAEDGEIWTFSVRSFEAPPPERTIHVNYEGFAEDVRVGDELLVDGGMARFEVVEKLGPDVKCRCTDPGLLLPRANLTFWRDGSIVRERNAMLPTISSKDWLDIDFGISEGVDFIAVSFVKSAEVINHLKSYIAARSRGSDIAVIAKIESIDSLKNLEEIIRASDGAMVARGDMGAQIPLEQVPSVQQKIVKLCRQLNKPVIVASQLLESMIEYPTPTRAEVADVSEAVRQRADALMLSGESAMGRYPEKALSVLRSVSLRIEKWWREEKRHEELELKDVSSSFSDKISEEICISAAKMANKLEVDAVFVYTNTGHMASLLSRCRPDCPIFAFTTSTSVRRRLNLQWGLIPFRLSFSDDMESNLNRTFSLLKARGMIQSGDLVIALSDMLQSIQVMNVP

SEQ ID NO: 7436 - DNA, 1410 bp, Desulfovibrio vulgaris
  CDS (1)..(1410)
atgcgcacaaagattatcgccaccatcggccccgcctcccgttcgcacgaagtcctttcacgcctcgtcaatgcaggcgtgggcatcttccgcctcaacttctcgcatggcgacgcatccatgttcgtggagctcatcgggcttctgcgcgaactggagcgtgagagcgggcgcccgctcaccatcctgcaagacctttcgggcccgaagatacggataggcgaaatcgccaagggcgcgctctccgtctccaagggtgacaggctcctgctggggcccgcccctgcccccgccgacaaccgccccttcattcccttcgaccatcccgccgtactcgccgagttcgagatcggcgacagggtggtgctctccgacggcgggctgcagttccgtgtcgtggacaaggggccgaacggcaccttcgagctcgaggccaacaacaacggcatgatcacctcgcgcaagggcctcgccctgccgggcaagtcggtcaagctcgccgcgctcacggccaaggaccgcaaagaccttgccgacggcctcgccctcggggtcgacgccgtggcgctctcctacgtgcagacccccgacgacatccgcgacgccaaggagatcatccgcgcagcgggccgcaacatccccgtcatcgccaagcttgaaaggcagaacgccgtggacaggctcgacgagatactcgccgagaccgacatcgtcatggtcgcccgcggcgacctcggcgtggagtgcccgctgcccgaactgcccgccatgcagaagcgcatcatccgagcctgcaaccgtgcggcaaagcccgtcatcgtggcgacgcagatgctcctctccatggtcaacagcccctcgcccacacgcgccgagaccacagacgtggccaacgcagtgctggacggtgccgactgcgtgatgctctccgaagagacggccatgggcagcttcccggtggagaccgtcaatttcatgaaggaaatcgccatgaaggccgaagagctgcacttcgaattgcagcgtcttcgtgagcctgacgtgggacgcggttcggccgacttcctcgcctactccgcctgcctgctggctgagaaggccaacgccgatgccatcgtctcgcacagcctgagcggcagttcggcgcggctcatctcctcgcgcaggccgcagcagccggtctatgccatcacgcctgacccggcagcccagcgctggctcaacttctcgtggggcgtgttccccgaggggggcgacgaaggcataagcggacaccttgagcgtgcagaggcgttcatcgaacgctgcccggacatccccgatggggccgacgtggtcatcaccgccggacagccgaagccgggcgacaccccgcgcggcaccaatctggtcaagatttacaggaaatag

SEQ ID NO: 7437 - protein, 469 aa, Desulfovibrio vulgaris
MRTKIIATIGPASRSHEVLSRLVNAGVGIFRLNFSHGDASMFVELIGLLRELERESGRPLTILQDLSGPKIRIGEIAKGALSVSKGDRLLLGPAPAPADNRPFIPFDHPAVLAEFEIGDRVVLSDGGLQFRVVDKGPNGTFELEANNNGMITSRKGLALPGKSVKLAALTAKDRKDLADGLALGVDAVALSYVQTPDDIRDAKEIIRAAGRNIPVIAKLERQNAVDRLDEILAETDIVMVARGDLGVECPLPELPAMQKRIIRACNRAAKPVIVATQMLLSMVNSPSPTRAETTDVANAVLDGADCVMLSEETAMGSFPVETVNFMKEIAMKAEELHFELQRLREPDVGRGSADFLAYSACLLAEKANADAIVSHSLSGSSARLISSRRPQQPVYAITPDPAAQRWLNFSWGVFPEGGDEGISGHLERAEAFIERCPDIPDGADVVITAGQPKPGDTPRGTNLVKIYRK

SEQ ID NO: 7438 - DNA, 1425 bp, Thermus thermophilus
  CDS (1)..(1425)
atgccgccttttaagcgcaccaagatcgtggccaccctggggccggccacggacgacaaggaggtgatccgcgccctggcggaggccggggccgacgtcttccgcctgaacttcagccacggcgcccccgaggaccacaggcgccgggtgggctgggtgcgggaggtggcggaggagctcggccgaaccctggccgtcctccaggacctccagggcccgaagatccgtgtgggccgtttccgggagggccaggtcctcctccgcccggggcagaggttcgtcctcaccgccgagcccgtggagggggacgagcaccgcgtttccgtgagctacaaggggcttcccgaggacgtttccccggggcagatcctccttctggacgacggccgcatccggctcaaggtcctggaggtccggagcccggagatcctcacggaggtggaggtgggcggggtcctctccaacaacaaggggatcaacatccccggggcggacctctccatccccgccctctcggagaaggatatccaggacctggccctgggggcggagctcggggtggactgggtggcggtctccttcgtccgcacgcgggacgacctcctcctcgcccggcactacctctcccgctacggctccaaggccaggctcatggccaagatcgagaagccctcggccgtggcccggtttgaggagatcctggaggaggcggacgggatcatggtggcccggggggacctcggggtggagatgcccctggaggaggtgcccatcgtccagaagcgcctcatcctccggtgcatcgccgccgggaagccggtgatcaccgccacccagatgctggagtccatggtgcagaacccgagccccacccgggccgaggcctcggacgtggccaacgccatctttgacgggaccgacgcggtgatgctctccgcggagacggcggccggggcctacccggtggaggcggtggccatgatgagcaggatcgccaaggcggtggaatcctccccggagttcttgcagaagctcaacgtcctccgccccgcccccacccccaccacccaggacgccatcgcccaggcggcggacgacgtggtggaggcggtgggggcacgggccatcgtggtcttcacggccacgggcggctcggcgcggaggatcgcccgcacccggccccaggtgcccatcctggccctcaccccgaaccccgaggtgcggaaccagctggccttggtctggggggtctacccccatctcgcccccgacccccaggacaccgacgacatggtccgcatcgccctcagggaggtgaaagccctggggctcgcccaggtgggggaccgggtggtcatcgccgccggggttcccttcggggtccgggggacaacgaacctcatccgcgtggagcgggtggggtag

SEQ ID NO: 7439 - protein, 474 aa, Thermus thermophilus
MPPFKRTKIVATLGPATDDKEVIRALAEAGADVFRLNFSHGAPEDHRRRVGWVREVAEELGRTLAVLQDLQGPKIRVGRFREGQVLLRPGQRFVLTAEPVEGDEHRVSVSYKGLPEDVSPGQILLLDDGRIRLKVLEVRSPEILTEVEVGGVLSNNKGINIPGADLSIPALSEKDIQDLALGAELGVDWVAVSFVRTRDDLLLARHYLSRYGSKARLMAKIEKPSAVARFEEILEEADGIMVARGDLGVEMPLEEVPIVQKRLILRCIAAGKPVITATQMLESMVQNPSPTRAEASDVANAIFDGTDAVMLSAETAAGAYPVEAVAMMSRIAKAVESSPEFLQKLNVLRPAPTPTTQDAIAQAADDVVEAVGARAIVVFTATGGSARRIARTRPQVPILALTPNPEVRNQLALVWGVYPHLAPDPQDTDDMVRIALREVKALGLAQVGDRVVIAAGVPFGVRGTTNLIRVERVG

SEQ ID NO: 7440 - DNA, 1317 bp, Leptospira interrogans
  CDS (1)..(1317)
atgaatttttcacacggcacacatgattctcataaaagagtctacgacacgttacgcaagtgcgaacaaattttcggatttcctttagggatcatggcagacctacaaggccctaaaattcgaaccggaaaattaaaactcaactccattctacttcataaaaatcaggagattgaaatcgtcccagattctgatattttgggagatgaacacaaaatcggttgtacatatccaaatctaattagagatatacaagaagaagacaagattctaattgatgacggtaagttaattttaaaagttatttctaaaaaatcgaactccgccattttaaaagtaatcgtaggtggaatcttatggagcaacaaaggaatcaatcttccaggaactcctatctctgctcctgcactttccgaaaaagacatagaagatcttaagttcgcactctctctaggtgtagattacgcggctcttagttttgttcgtactggggcagacttagaattagcaaggtcttatttagaaggtacatatacagggctgatcgcaaagatagaaagaccggaagcaattggaaacatagaagaaatcatagaacgagcagatggcatcatgattgcaagaggagatttaggagtagaaattgatacggaaaaggttcccattctacaaaaagaacttatctataaactcaatcaagcgggtaaaccggtcattactgcaacccaaatgctggaatctatgattgaaaacccaagaccaacacgtgcagaagcgagcgacgtagcaaatgcggttatggacggaacggatgcagttatgctttctgcagaatcggctaacggccattatccggtcgaatccgttgaaatcatgtctaaaatcattcaagaaactgaaaccattgatcatatctatgagattcactggaacattaaaaaaactttcttagaatcagaaagaactgcactgggaaatgccgcaagggagattgcccacggaatccacgcaaaggcaatcgtcaattttacgagaagcggttattccgcattgattacctccgaaatgagacccaaggttccgatctactcttttactccgtttgcaaccaccgccagaaagatgaaactctatcgaggtgtggtgccatttgtaatgcctttctttacaagattggaagatatgattgcttatatgaatcaaaaactcaaagaagatgaatttctttttccaggagataaggtggtaattctttccggagccccaggaaccacagtcagaagtgtagactttttacaggtttataaaatacattga

SEQ ID NO: 7441 - protein, 438 aa, Leptospira interrogans
MNFSHGTHDSHKRVYDTLRKCEQIFGFPLGIMADLQGPKIRTGKLKLNSILLHKNQEIEIVPDSDILGDEHKIGCTYPNLIRDIQEEDKILIDDGKLILKVISKKSNSAILKVIVGGILWSNKGINLPGTPISAPALSEKDIEDLKFALSLGVDYAALSFVRTGADLELARSYLEGTYTGLIAKIERPEAIGNIEEIIERADGIMIARGDLGVEIDTEKVPILQKELIYKLNQAGKPVITATQMLESMIENPRPTRAEASDVANAVMDGTDAVMLSAESANGHYPVESVEIMSKIIQETETIDHIYEIHWNIKKTFLESERTALGNAAREIAHGIHAKAIVNFTRSGYSALITSEMRPKVPIYSFTPFATTARKMKLYRGVVPFVMPFFTRLEDMIAYMNQKLKEDEFLFPGDKVVILSGAPGTTVRSVDFLQVYKIH

SEQ ID NO: 7442 - DNA, 1758 bp, Bacillus cereus
  CDS (1)..(1758)
atgcgtaaaactaaaattgtatgtactataggtcctgctagtgaaagtattgaaaaattagagcaattaatcgaagcaggtatgaacgttgctcgtttaaacttctctcatggtagccatgaagaacacggcgctcgtattaaaaacattcgtgaagcttcaaagaaaactggtaaaacagttggtatcttacttgatacaaaaggtccagaaatccgtactcacgacttcgtagacggacaagctgagcttgtaacaggtgcagaagttgttatttctactgagcaagtattaggtactgcagagaagttctctgtatcttatgctggtctttatgacgatgtaaacccaggttctcgcattctaatcgatgatggtcttatcgagctagaagtaatcgaaaaagctgacggaaacatccgtacaaaagttcttaacagcggaactgtaaaaaataaaaaaggtgttaacgtaccaaacgtaagcattaagcttcctggtatcactgaaaaagacgtaaaagatatcatcttcggtatcgagcaaaaagttgatttcatcgcagcttcattcgtacgtaaagcagctgacgtattagaaatccgtgaattactagaagagcataacgctcaatacatccaaatcgtaccaaaaatcgaaaaccaagagggtatcgacaatatcgattcaatcttagaagtttctgacggtttaatggtagctcgtggtgacatgggtgtagaaattccaccagaagaagtaccattagtacaaaaacgtctaatcaaaaaatgtaacgtgttaggtaaaccagttattactgcaacacaaatgttagattctatgcaacgtaacccacgtccaactcgtgcggaagcaagtgacgtagctaacgcaatcttcgatggtacagacgcaatcatgctttcaggtgaaacagctgctggacaatacccagtagaagcagtaacaatgatggctaacattgcagtacgtgttgaaaaatcattacaatatgaagatatgttcaaaaaacgtattaaagagttcactccaacaattacagatgcaattagccaatctgttgcgcatacagcacttgctcttgatgtagctgcaatcgtagctccaacagaaagtggatatactgcgaaaatgatctctaaataccgtccaaaatctccaatcgtagctgtaacatctgacgagcaagtaggacgtcgtcttgcgcttgtttggggtgtacaagcatttatggctgagaagcgcgcagcttctactgacgaaatgttagatacagcgattcaaacaggtatggatgcaggtctaatcggacttggagacactgtagtaatcactgctggtgttccagttgctgaaactggtacaacaaacttaatgaaaatccacgttgttggtgaagaagttgctaaaggacaaggaatcggtcgtaaagctgcaaaaggtaaagtagttgtagcgaaaacagctgctgaagctgtagcgaacgtaaacgaaggtgatatccttgttacaacaagcactgataaagatatgatccctgcaatcgaaaaagctgctgctctagttgtagaagaaggcggtctaacaagccatgcggctgttgtaggtgtatcaatcggtattcctgttatcgttggtgtaaacggcgtaacagcaactttaaaaaatggccaagaagtaacagttgatgcagcacgcggaattgtttataatggacatgcggaagtgctataa

SEQ ID NO: 7443 - protein, 585 aa, Bacillus cereus
MRKTKIVCTIGPASESIEKLEQLIEAGMNVARLNFSHGSHEEHGARIKNIREASKKTGKTVGILLDTKGPEIRTHDFVDGQAELVTGAEVVISTEQVLGTAEKFSVSYAGLYDDVNPGSRILIDDGLIELEVIEKADGNIRTKVLNSGTVKNKKGVNVPNVSIKLPGITEKDVKDIIFGIEQKVDFIAASFVRKAADVLEIRELLEEHNAQYIQIVPKIENQEGIDNIDSILEVSDGLMVARGDMGVEIPPEEVPLVQKRLIKKCNVLGKPVITATQMLDSMQRNPRPTRAEASDVANAIFDGTDAIMLSGETAAGQYPVEAVTMMANIAVRVEKSLQYEDMFKKRIKEFTPTITDAISQSVAHTALALDVAAIVAPTESGYTAKMISKYRPKSPIVAVTSDEQVGRRLALVWGVQAFMAEKRAASTDEMLDTAIQTGMDAGLIGLGDTVVITAGVPVAETGTTNLMKIHVVGEEVAKGQGIGRKAAKGKVVVAKTAAEAVANVNEGDILVTTSTDKDMIPAIEKAAALVVEEGGLTSHAAVVGVSIGIPVIVGVNGVTATLKNGQEVTVDAARGIVYNGHAEVL

SEQ ID NO: 7444 - DNA, 1059 bp, Bacillus cereus
  CDS (1)..(1059): Xaa of translated CDS can stand for any naturally occuring amino acid which can be translated from respective CDS-codon
atgacaatcgatcgaatttgtacaattgggccagcaagtaataataaagaaacgttagcgcagttaataagcaatggtatgaaaattgttcggctaaatttatcacatggcacacatgaaagtcataaagatattattcgtttagtgaaatcgttagacgattctattaaaattttaggcgatgtacaaggtcctaaaataaggttaggtgaagtaaaaggagaacaaattacacttcaggcgggagattcttttattttacatacacaaccagttacagggagtagtacggaagcaagtgttgattatgaagggatcgcgaatgatgtgaaagtcggaagtagaattttaatgaatgatggtgaagttgagttaatcgtagggaaggtaggtaaggataaaatagaaacaaaggtcaaagcaggtggtaatatctcatctcataaaggggtgaacttaccaggcgcaatcgttcgtttaccggctattacagagaaagataaacaagatattcagtttcttttagaagagggtgttgattttatcgcatgttctttcgtaagaaaacctagccatataaaagaaatacgagattttatacaacagtataaagaaacctcacctaatttaattgcaaaaatagaaacgatggaagcgatcaagaattttcwagatatatgtaaagaagcagatggaattatgattgcaaggggcgatttaggagttgagttgccgttccaatttgttccgctcttgcagaaaatgatgattcaggaatgtaatcgaacgaatacatatgttattacagcgacacaaatgcttcaatctatggtagagcattctattccaacgagggctgaggtaactgatgtgtttcaagctgtactggacggaacgaacgctgttatgctttctgccgaaagtgcatcaggcgagcatccgattgaaagtgtaaaaacattacgtctagtttcagaattcgctgagcatgtgaaaaaagacggtccttttgtgatgaaagatgtactggaattgctgcataagtctttgaatgcgtga

SEQ ID NO: 7445 - protein, 352 aa, Bacillus cereus
  misc_feature (224)..(224): Xaa can be any naturally occuring amino acid
MTIDRICTIGPASNNKETLAQLISNGMKIVRLNLSHGTHESHKDIIRLVKSLDDSIKILGDVQGPKIRLGEVKGEQITLQAGDSFILHTQPVTGSSTEASVDYEGIANDVKVGSRILMNDGEVELIVGKVGKDKIETKVKAGGNISSHKGVNLPGAIVRLPAITEKDKQDIQFLLEEGVDFIACSFVRKPSHIKEIRDFIQQYKETSPNLIAKIETMEAIKNFXDICKEADGIMIARGDLGVELPFQFVPLLQKMMIQECNRTNTYVITATQMLQSMVEHSIPTRAEVTDVFQAVLDGTNAVMLSAESASGEHPIESVKTLRLVSEFAEHVKKDGPFVMKDVLELLHKSLNA

SEQ ID NO: 7446 - DNA, 1416 bp, Treponema denticola
  CDS (1)..(1416)
atgaaaaaaacaaaaatagtatgcacaatagggcccgcttccgactcggaaagggtcttggcagaaatgtttaaagccggtttaaatgtctgccgccttaatttttcgcatggaagccatgaagaacacaaggttaaaatagatcgaataaaaaaaataagagaagagttaaaaatgcctattgcacttttactggatactaagggacccgaaatccgtttgggcctttttgaaaagcctgtagaaattgtacaaggtcaggaatttataattacaaccagagatgtaatcggaacaaatcaaatatgcagcatctcatataagaatattgccgccgaaattaaacctaaaagcagaatccttataaatgacggattattggagttacaggttatcgatattttaaacgatacggacatagaatgtgtcgcagtaaattccggaaccctaagcagccgaaaaggtgtaaacattccgggcttgagggtaaaccttccttacatgagtgaaaaggatatctccgatatcgaattcggaattgaaaatgatgtggattttattgccgcctcctttacacaaagagccgacgatattatccaaataagaaaacttttggaaaaacacaaaagtacaatcgccgttatagcaaaaatagaaaatcaagaaggcttggacaacatagatgaaattttagcggaagccgacggaataatggtagcccggggagatatgggtgtagaaatagagcccgaaaaaatccctcatcttcaaaagcagctgataaaaaaagcaaaccttgcaggaaagccggttatcaccgcaactcagatgctcgaatctatgacccacaacctgcgtcccaccagagccgaagttaccgacgttgcaaacgctattctcgacggaacatcagctgtaatgctttctggagaaaccgcagcaggcgaataccctgtcgaaaccgtggccatgatgacctcaattgcgaactctatagaagaaacattagattatgaaaaactatttgctgaaaatgcttctcttcatgagaccacaatcacaaatgcaattgcaagagccacctgctccactgccctagccctcgatgcaaatgcaatcataacggcatccgcttcgggaataacgcccagagctctttcaaaatttaaaccaagggtaccgattattgcaataacggaatcgcctcaggttatgagaaagatggccctcgactgggacgtatatccggttttagccgatcctataaaatcgaccgataacatgttcgatgtgtgttcgcaaattgcaaaggatacaggccatgtaaaaaaaggagacatagcaatccttacggccgggattcctataggcaaagcaggatctacaaaccttctaaaggtagaaataatagaataa

SEQ ID NO: 7447 - protein, 471 aa, Treponema denticola
MKKTKIVCTIGPASDSERVLAEMFKAGLNVCRLNFSHGSHEEHKVKIDRIKKIREELKMPIALLLDTKGPEIRLGLFEKPVEIVQGQEFIITTRDVIGTNQICSISYKNIAAEIKPKSRILINDGLLELQVIDILNDTDIECVAVNSGTLSSRKGVNIPGLRVNLPYMSEKDISDIEFGIENDVDFIAASFTQRADDIIQIRKLLEKHKSTIAVIAKIENQEGLDNIDEILAEADGIMVARGDMGVEIEPEKIPHLQKQLIKKANLAGKPVITATQMLESMTHNLRPTRAEVTDVANAILDGTSAVMLSGETAAGEYPVETVAMMTSIANSIEETLDYEKLFAENASLHETTITNAIARATCSTALALDANAIITASASGITPRALSKFKPRVPIIAITESPQVMRKMALDWDVYPVLADPIKSTDNMFDVCSQIAKDTGHVKKGDIAILTAGIPIGKAGSTNLLKVEIIE

SEQ ID NO: 7448 - DNA, 1419 bp, Mycobacterium paratuberculosis
  CDS (1)..(1419)
atgagtagacgcgggaagatcgtctgcacccttggcccggcgaccaattcggacgagttgattttggcgctggtcgaggccggaatggacgtcgcccgactgaacttcagccacggcgactacgccgaccacaaagccgcctacgaacgggtgcgggtggcctccgacgccaccggccgcgccgtcggcgtgctcgccgatctgcagggccccaagatccgcctggggcgctttgccaccgggcccacctactgggccgacggcgaaacggtccgcatcaccgtcgccgactgcgaaggcagccacgaccgggtgtcgaccacctacaaacaactggcccaggacgccgcggtcggggaccgggtcctggtcgacgacggcaaggtcggcctggtggtcgacggcatcgagggcgacgacgtcatctgcaccgtggtcgagggcggcccggtcagcaacaacaagggcatctcgctgccgggcatgaacgtctccgcaccggccttgtccgacaaggacatcgaggacctcaccttcgcgctcgagctgggcgtcgacctggtcgcgctgtccttcgtgcgttcgccctccgacgtcgagctggtgcacgaggtgatggaccgcgtcggccggcgggtgcccgtgatcgccaaactggaaaagccggaggccgtcgacaacctggaagccatcgtgctggccttcgacgccatcatggtggcccgcggcgacctcggtgtcgaacttcccctggaagaggttccgctggtgcagaagcgggccatccagatggcccgggagaacgccaaacccgtcatcgtggcaacccagatgctcgattcgatgatcgagaactcacggccgacccgggccgaggcctccgacgtcgccaacgccgtgctggacggcgccgacgccgtgatgctgtccggggagacctcggtgggcaagtacccgctggcggccgtgcggaccatggcgcgcatcatctgcgcggtcgaggacaactccacggccgccccgccgctcacccacgtgccccgcaccaaacgcggggtgatctcgtatgcggcccgcgacatcggcgaacgcctggacgccaaggcgctggtcgcgttcacccagtccggcgacaccgtcaagcggctggcgcggttgcacaccccgctgccgctgctggccttcacggcatggccggaggtgcgcagccagctggccatgacctggggcaccgagacgttcatcgtgccgatgatgacctccaccgacggcatgatccgccaggtggacaagtcgctgctggaactcggtcggtaccggcgtggtgacctggtggtgatcgtcgccggcgcgccacctggcacagtagggtcaaccaacctgatccacgtgcaccggatcggggaggacgacgtctag

SEQ ID NO: 7449 - protein, 472 aa, Mycobacterium paratuberculosis
MSRRGKIVCTLGPATNSDELILALVEAGMDVARLNFSHGDYADHKAAYERVRVASDATGRAVGVLADLQGPKIRLGRFATGPTYWADGETVRITVADCEGSHDRVSTTYKQLAQDAAVGDRVLVDDGKVGLVVDGIEGDDVICTVVEGGPVSNNKGISLPGMNVSAPALSDKDIEDLTFALELGVDLVALSFVRSPSDVELVHEVMDRVGRRVPVIAKLEKPEAVDNLEAIVLAFDAIMVARGDLGVELPLEEVPLVQKRAIQMARENAKPVIVATQMLDSMIENSRPTRAEASDVANAVLDGADAVMLSGETSVGKYPLAAVRTMARIICAVEDNSTAAPPLTHVPRTKRGVISYAARDIGERLDAKALVAFTQSGDTVKRLARLHTPLPLLAFTAWPEVRSQLAMTWGTETFIVPMMTSTDGMIRQVDKSLLELGRYRRGDLVVIVAGAPPGTVGSTNLIHVHRIGEDDV

SEQ ID NO: 7450 - DNA, 1443 bp, Geobacter sulfurreducens
  CDS (1)..(1443)
atggatacactgtcacgcaaaaccaagatcatcgccactctggggcccgtcagctcctcgcccgacatgatccggcagctgatggacgcaggagtcgatgtcttccggctcaacttttcccacggctccaacgaccagcggcgggaggtaatcgccgccatccggcgtctttccgccgaacggggcaaggagataggcattctggccgatctccaggggcccaagatcaggaccggcaggatggagaacggtgccattccgctggtgcggggcgactcgctcgacattaccaccgatgaggtcctggggcgccccggtctcatttccaccatctaccagtctctcccccacgacgtgaagcccggctcacgcatcctgctggacgacggccttatcgagttgcgggtccagtccgtgtccggcgccacggtccgttgcaccgtggtccaggggggcatgctcaaggatctgaaagggatcaacctccccggcgtcaaggtttctgcgccgtcgctgtcggagaaggacctccgcgatctggatttctgcctggaggtgggggtcgactacattgccctgtcctttgtccgcactgccgccgacgtggaggggctgaagcggatcctcttcgaacgggacgtccaggtgccggtggtggccaagatcgagaagcccgaggccctgcgcaacttcaaaagcatcctcaaggttgccgatgcggtcatggtggcccggggcgatctgggggtggaaatcagcccggaaaaggtccccctgttccagaaaaagatcatccgggcctgcaacgaggccggcaaaccggtgatcaccgccacccagatgcttgaatccatgattagccatccgcgccccacccgggccgagacctcggacgtggccaacgccatcctcgacggaaccgatgcggtcatgctctcgggtgagaccgcctcggggcagtttcccctggaagcggtgcgtaccatggacaaggtggccctcgacgttgagcgcttcgctcaggtggaggacggctcggggccacgccgccacagcgtcagcatcgccgaggcggtggccgaggccgcctgccacgctgccgtcattctgaaggcgaaggccgtggcctgcatgacccagtcggggagcacggctgcccgcatctcacgctaccggcctccgctgccgatcctcgccttcaccggttcggtggacaccatgcgacggctgtcgctctactggggagtcaaggcataccccatcggcaccatggccggcaccgacgagcagatagtggccgtggagtcgacgctcctgtccggtggctaccgcaagggcgacgtggtggtcatcaccatgggtgtgccggtggaggcccgggggtccaccaacctcatgaaggtccacaagctgggaaccggccagttcttcgagatattttga

SEQ ID NO: 7451 - protein, 480 aa, Geobacter sulfurreducens
MDTLSRKTKIIATLGPVSSSPDMIRQLMDAGVDVFRLNFSHGSNDQRREVIAAIRRLSAERGKEIGILADLQGPKIRTGRMENGAIPLVRGDSLDITTDEVLGRPGLISTIYQSLPHDVKPGSRILLDDGLIELRVQSVSGATVRCTVVQGGMLKDLKGINLPGVKVSAPSLSEKDLRDLDFCLEVGVDYIALSFVRTAADVEGLKRILFERDVQVPVVAKIEKPEALRNFKSILKVADAVMVARGDLGVEISPEKVPLFQKKIIRACNEAGKPVITATQMLESMISHPRPTRAETSDVANAILDGTDAVMLSGETASGQFPLEAVRTMDKVALDVERFAQVEDGSGPRRHSVSIAEAVAEAACHAAVILKAKAVACMTQSGSTAARISRYRPPLPILAFTGSVDTMRRLSLYWGVKAYPIGTMAGTDEQIVAVESTLLSGGYRKGDVVVITMGVPVEARGSTNLMKVHKLGTGQFFEIF

SEQ ID NO: 7452 - DNA, 1770 bp, Lactobacillus johnsonii
  CDS (1)..(1770)
atgaagaaaactaaaattgttagtactttagggccagcctcaaacgatgttgagactattactaaattagctgaagcaggtgcaaacgtattccgtttcaacttctcacacggtgaccacgaagaacaccgtgcacgtatgaacatggttcgtgaggttgaaaagaagactggtaaacttcttggcattgctcttgatactaagggtgccgaaattagaactactgaacaagaaggcggcaagttcactattaacactggtgacactatccgtatttctatggacgacactaagaagggtaacaaggacatgatccacgttacctacgatggtctttacgacgatactcacgttggtggtcacgtattaatcgatgatggtttagttgaccttttgattaaggacaaagatgacgctaagagagaattagtttgtgaagctcaaaacactggtgtaatcggttctaagaagggtgttaacgctcctggcgttgaaatccgcctcccaggtattactgaaaaagatactaacgatattaagttcggtttgaaggaaggtatcaacttcatctttgcttcattcgttcgtaaagcacaagatgttcttgacattcgtcaattgcttgaagaagcacattgtgaatacgtaaagatcttccctaagattgaatcacaagaaggtattgacaacatcgacgaaatcttaaaggtttctgatggtttaatggttgctcgtggtgacatgggtgttgaaattccatttatcaatgttccatttgtacaaaaagaattgatcaagagatgtaacgctttaggtaagccagttattactgctactcaaatgcttgactcaatgcaagaaaacccacgtcctactcgtgccgaagttactgacgttgccaacgctgttcttgatggtactgacgcaactatgctttcaggtgaatctgcaaacggtctttacccagttaaagctgttaaggctatggctgaaatcgacatgcgtactgaaaagcaacttgctaagcgtaacaagttagctcttcaaagattcgaagaatacaagggttcaaacgttactgaagctatcggtgaatcagttgttagaactgctgaagaattgggcgttaagactattattgctgcaactgaatctggttacactgcacgtatgatttctaagtaccgtccaaacgcagacattattgctatgactttcaacgacaagattcaacactcattaggtgttgtttggggtgtaaagccaatgttgactgaaaagcctaagtctactgaagaaatgtttgaaaaggcagctgaacttgctaaagaaactggtcttgcaaaagacggtgacttagtaattatcgttgctggtgttcctttgggcgaaactggtactactaacttgatgaagttacaattaatcggtacccaacttgttaaaggtttaggtgttggtgaacaatcagttattggtaaagctgtagttgcaacttctgctgaagaagctaacagcaaagttcaagatggtgacatcttagttgctaagactactgataaggattacttaccagcaatcaagaaggcttcaggtatggtagttgaagcttctggtttaactagccatgcagctgttgttggtctttcacttggtatcccagttatcgttggtgctactgatgcagtagaaaagatcaaggatggttctaagattactgttgatgctcgtcgcggtgctgtttaccaaggcgaagcaactaacctttaa

SEQ ID NO: 7453 - protein, 589 aa, Lactobacillus johnsonii
MKKTKIVSTLGPASNDVETITKLAEAGANVFRFNFSHGDHEEHRARMNMVREVEKKTGKLLGIALDTKGAEIRTTEQEGGKFTINTGDTIRISMDDTKKGNKDMIHVTYDGLYDDTHVGGHVLIDDGLVDLLIKDKDDAKRELVCEAQNTGVIGSKKGVNAPGVEIRLPGITEKDTNDIKFGLKEGINFIFASFVRKAQDVLDIRQLLEEAHCEYVKIFPKIESQEGIDNIDEILKVSDGLMVARGDMGVEIPFINVPFVQKELIKRCNALGKPVITATQMLDSMQENPRPTRAEVTDVANAVLDGTDATMLSGESANGLYPVKAVKAMAEIDMRTEKQLAKRNKLALQRFEEYKGSNVTEAIGESVVRTAEELGVKTIIAATESGYTARMISKYRPNADIIAMTFNDKIQHSLGVVWGVKPMLTEKPKSTEEMFEKAAELAKETGLAKDGDLVIIVAGVPLGETGTTNLMKLQLIGTQLVKGLGVGEQSVIGKAVVATSAEEANSKVQDGDILVAKTTDKDYLPAIKKASGMVVEASGLTSHAAVVGLSLGIPVIVGATDAVEKIKDGSKITVDARRGAVYQGEATNL

SEQ ID NO: 7454 - DNA, 1506 bp, Ashbya gossypii
  CDS (1)..(1506)
atggaatctagattgggatggctaactcgtttgaactacgacactggttctgcattgagaagaacgtcgatcatcgggacgattggtcctaagaccaacaacccagagacgttggtggagcttagaaaggcgggcttgaacatcgtgagaatgaacttctcgcacggctcgtacgagtaccaccagtcggtgatcgacaacgccagaaagtcggaggagttgtaccctggtagaccattggccattgcgttggacaccaagggtcctgagatcagaactggtaccactgtcgacaacgtcgactacccaatcccacctaaccacgagatgatcttcaccaccgacgaccagtacgccaagtcctgcgacgacaaagtcatgtttgtcgactacaagaacatcacgaaggtgattgagaagggcagagtgatttacgttgacgacggtgttctatcgttcgaggtgttggaggtcgtggacgacaagaccttgaaggtcaagtctttgaacgcagggaagatctgctcccacaagggtgtgaacttgccgggtaccgatgtcgacttgccagctctgtctgagaaggacaagtctgacttgcgcttcggtgtcaagaacggtgtgcacatggtcttcgcttccttcatcagaactgctggagacatcctaactatcagagagatcttgggcgaggatggcaaggacatcaagatcatcgccaagattgagaaccagcagggtgtgaacaacttcgacgagattttgaaggtcaccgacggtgttatggtcgccagaggtgacttgggtatcgagatcccagcgcctcaggtatttgctgtgcaaaagatgttgatcgccaagtgtaacttggctggtaagccagttatctgtgccacccagatgttggagtctatgacctataacccaagaccaaccagagctgaggtttctgacgttggtaacgctgtcctggacggtgctgactgtgttatgttgtctggtgagaccgccaagggtatctacccaatcaacgctgttaagaccatggctgagactgctttgattgctgagcaggccattccatacgttccaacttacgatgacctcagaaacttgactccaaagccaactccaacctccgagaccatcgctgctgctgctgtcgcggctactttcgagcagaaggccaaggccattgtcgtgctatccacctccggtgacaccaccagattggtctccaagtacaagccaaacgttccaatcgttatggtgaccagaaacccaagagcggccagatactgccacttgcacagaggtgtcttcccattcgtctacgaacaggaggcagctgatgagtggaccgatgacgtcgaggccagattgaacttcggtgtggagaagtccaaggagcttggtatcctgagcgagggtgacactattgtcactattcagggtttcgcgtctggtgttggccactctaacaccttgagggtgttgaccgtctaa

SEQ ID NO: 7455 - protein, 501 aa, Ashbya gossypii
MESRLGWLTRLNYDTGSALRRTSIIGTIGPKTNNPETLVELRKAGLNIVRMNFSHGSYEYHQSVIDNARKSEELYPGRPLAIALDTKGPEIRTGTTVDNVDYPIPPNHEMIFTTDDQYAKSCDDKVMFVDYKNITKVIEKGRVIYVDDGVLSFEVLEVVDDKTLKVKSLNAGKICSHKGVNLPGTDVDLPALSEKDKSDLRFGVKNGVHMVFASFIRTAGDILTIREILGEDGKDIKIIAKIENQQGVNNFDEILKVTDGVMVARGDLGIEIPAPQVFAVQKMLIAKCNLAGKPVICATQMLESMTYNPRPTRAEVSDVGNAVLDGADCVMLSGETAKGIYPINAVKTMAETALIAEQAIPYVPTYDDLRNLTPKPTPTSETIAAAAVAATFEQKAKAIVVLSTSGDTTRLVSKYKPNVPIVMVTRNPRAARYCHLHRGVFPFVYEQEAADEWTDDVEARLNFGVEKSKELGILSEGDTIVTIQGFASGVGHSNTLRVLTV

SEQ ID NO: 7456 - DNA, 1461 bp, Leptospira interrogans
  CDS (1)..(1461)
atgaagagcgaatcctccgtttttagaaaaaccaaaatcatctgtacgattggtcctgcgacctcagataaaaaaatgattcaggctcttgccgaagccggaatgaacgtggcacgattaaacatgtctcacggaaaccacgattttcatagaagtatcattcgtaatattaagtccctcaataaggacgtgttgaaaaatccgattgcgattttactcgatacacaaggaccggaaattcgaactggagatcttcaagtagatcatctggatttaaaagtaggtgagacctttacctttcatatcattccgggggaagaatctgaagaacaatccgtatttgtaaactataaggatatagttaaagatttaaaagtaggcgatccggtaaccgtagataacggtttaatcaatcttgtagtagaggaaatcaatgattctgctcttaagtgtaaggtgttagacggtggaagactaggttctagaaaacacattaatcttccaggaattcgggttaatcttccctcgatcactccaaaggatcataaggatattctattcggattagaagaagatgtagattttatcgcactttcttttgttcgttctgtggaagacattaatcaattaaaacaaattatagaagagaacgatggacacgcgcagatcatcgctaagatagaagatcaagaagcggtgcgtaatatgaaagaaatcgtggaagccgcagacggtgtgatggttgcgagaggggatttgggggttgaagttccaattgaagaattgccgatcttgcaaagagctatcattaaagaatgtgctctcaaaggaaaaagggtgatcgtagcaacccatcttttagaatctatgattcataatccttcgcctacgagggcggaggtgaccgacgtcgctaacgcgatttatgaagaagcggacgcgattatgctttctggagaaaccgcggccggtaaatttccgattcgttgtgtggaaatgatggataagatcgcacaacgtgtagaaaagactggcggtgtagattacgttaaggataaaattccacaggataaaaaagagcagatggcaagggcggctgcaaaacttgcagattctttaaagtgtccggcgattatagtaattacaagaagagggaccaccgcgttgaacgtggcgggttttcatcctcattatcctttgatttatgcgtttacgaatatgacaactgttaggcgaaagctctggttgactcgaggagtgattccgcatagaatcgatttttccaaagatccggaaaagacgattcgactcgcgatcgaaactttgaagaaaacgggaaggatcgaggatggggatcaagttgtgattctgtcagacatcatcgcgggcgaagatcgtgtggaaacgattcagattcgagaagtaaaaacgtattttaatgtggaagtggaaaaactttga

SEQ ID NO: 7457 - protein, 486 aa, Leptospira interrogans
MKSESSVFRKTKIICTIGPATSDKKMIQALAEAGMNVARLNMSHGNHDFHRSIIRNIKSLNKDVLKNPIAILLDTQGPEIRTGDLQVDHLDLKVGETFTFHIIPGEESEEQSVFVNYKDIVKDLKVGDPVTVDNGLINLVVEEINDSALKCKVLDGGRLGSRKHINLPGIRVNLPSITPKDHKDILFGLEEDVDFIALSFVRSVEDINQLKQIIEENDGHAQIIAKIEDQEAVRNMKEIVEAADGVMVARGDLGVEVPIEELPILQRAIIKECALKGKRVIVATHLLESMIHNPSPTRAEVTDVANAIYEEADAIMLSGETAAGKFPIRCVEMMDKIAQRVEKTGGVDYVKDKIPQDKKEQMARAAAKLADSLKCPAIIVITRRGTTALNVAGFHPHYPLIYAFTNMTTVRRKLWLTRGVIPHRIDFSKDPEKTIRLAIETLKKTGRIEDGDQVVILSDIIAGEDRVETIQIREVKTYFNVEVEKL

SEQ ID NO: 7458 - DNA, 1519 bp, Bombyx mori
  CDS (130)..(1341)
ggacggttcgcgctctcccgacgtggaattcaatttttcactcggaagggcagttcaagatcacgtaaaccgcccgtcagtcgtaaccgagagctcacagacaaatatcttcactataatccattaaaaatggtttaccctactattcacgatggcgaaatcgaggcgggtgcagttgaaaagcccacagtcgccaacgtcggctcccagctccagcatatgtgcggtctcgacattgactccaagtcttcgtacatccgtctctccggaataatctgtactattggaccggcatcccgtaatgtagctgtgctagagaagatgatggagacgggaatgaacgtggcaaggatgaacttctcgcacggttcccatgagtaccacgcagagaccattcgcaattgtcgcgaggccgagaagagttacagcgctaaactaggttcacccttctctttggccatcgcattggacactaaaggacctgagatcagaactggactcttggaaggcggcggctcagctgaagtcgaactgaagaagggagagaccataaagttgacgacaaatccggattatcaagagaaaggcaatgctgatacaatttacgtggactacaagaacataacgaatgtcgtgaagccaggaaaccgaatctttatcgacgatggcctcatctctatcatctgtcagtcggtcagcgctgacactcttacgtgtaccattgaaaacggaggtatgctcggatcccggaaaggcgtcaacctgcccggcatacccgtggacctacccgcagtctccgagaaggacaagtcggacctgctcttcggcgtcgaacaaggcgttgatatgattttcgcgtcattcatccgcaacggcgccgcgctgcacgagattcgcggcatcttcggcgaaaaggggaagaacatcaagatcatctccaagattgaaaatcaccagggaatggtcaatttagacgagattatagctgaatccgatggtatcatggttgctcgtggagatctgggtatcgagatccctccagaaaaggtattcctcgcccagaagaccatgatcgccagatgcaatcgggttggaaaaccagtgatctgcgcgactcaaatgctggaatccatggttaagaagcctcgtcccactagagccgagatctctgacgtggccaacgccatcctcgacggagctgactgcgtgatgctctccggggatactgccaagggcgactaccctgtcgagtgcgtccacaccatggccaacatttgcaaggaggctgaagctgtaatctggcacaggcaactcttcaacgaccttgtgtccgaggtttgaagttattttctcttcttataggtagttataagttaccgggatagactaatggtaccctggtgtcgttttttgtattatgctattcaaaagtgattcaagatcatgacacataactataagacaatagcaggaagaataaaccaaagaggaaaattaaaaaaaaaaaaaaaaaaaaaaa

SEQ ID NO: 7459 - protein, 403 aa, Bombyx mori
MVYPTIHDGEIEAGAVEKPTVANVGSQLQHMCGLDIDSKSSYIRLSGIICTIGPASRNVAVLEKMMETGMNVARMNFSHGSHEYHAETIRNCREAEKSYSAKLGSPFSLAIALDTKGPEIRTGLLEGGGSAEVELKKGETIKLTTNPDYQEKGNADTIYVDYKNITNVVKPGNRIFIDDGLISIICQSVSADTLTCTIENGGMLGSRKGVNLPGIPVDLPAVSEKDKSDLLFGVEQGVDMIFASFIRNGAALHEIRGIFGEKGKNIKIISKIENHQGMVNLDEIIAESDGIMVARGDLGIEIPPEKVFLAQKTMIARCNRVGKPVICATQMLESMVKKPRPTRAEISDVANAILDGADCVMLSGDTAKGDYPVECVHTMANICKEAEAVIWHRQLFNDLVSEV

SEQ ID NO: 7460 - DNA, 1437 bp, Pyrococcus kodakaraensis
  CDS (1)..(1437)
atgcggctcccaggacagaaaaccaagataatagccaccctaggtcctgcgtctctcaacgaaaagaccataacggcaatggttcgagcggggatgagtgttgcaaggataaacttcgcccacggtgatctgaaacagcacgagaagtcgataaaactcgtgagaaaggtctctgagaggctcaacaggcccgttgcaattctcggagacctgcccggagtgaagatccgcgttggtgagattgagggcggctcagtgacgctgagacgctggcagacggtaacccttaccacgagggacgtaatcggcaacgaggccgttatacccgttgagttcaaggactttccaaggctcgtctcgaagggggacgtcatctatctcagcgacggtttcatagcgctaagggttgaagacgtcagggaccaggatgtcatctgtaaggtgctcgtcggaggaactctcttctcccgcaaaggaatcaacattcccaaggctcgcctggctatcgaagcaataaccgagaaggatttagaattcctggagttctctctggagcacggagttgacgccgtcggcataagcttcgtcggttccgcctacgacgttctaaaggcaaggcgattcgtcgaggaaaggaacggcaagctgttcctgatagccaaaatagaaaggcccgacgcggtgagaaacttcgacgagattctcagggcggcggacggggtcatggtagccaggggagacctcggagtggagatgcccatagaaaagctcccgattctccagaaaaagcttatccaaaaggcaaactgtgcgggaaagcccgtgataacagcgactcagatgctagagagcatgacccacgagaagctcccaacgagggctgaggtcaccgatgttgcgaacgcaatccttgatggaaccgacgccgtgatgctctccgaggagacggcggtcggaaagtacccggttgagaccgtcaaaatgatggccaggatagcgaagactaccgaggcatacagggactccaaatgggctgaaagaaccgtcgaatggaagatgagtgagttgaggggtacacggccgacaaagggtaccataaaggacgcaataacgaggagtataatagaggccctgaactccatagacattaaatacatactaacaccgaccaggatgggacaaactgcgaggctaatagcccgttttaagccaaagcagtgggtactggcatttgtaactgatgaatgggtcaaaaacactctgatgttctcctacggcgtttatccgttcctcgttgaggacaccagcgaagaggagatactgcgcgtgataaccgggctcggactggtagatgagggcgatacggtacttctgacgaagggaacgcccataggaaagaccgcggggacgaacaccatccgcatcttcaacgtttga

SEQ ID NO: 7461 - protein, 478 aa, Pyrococcus kodakaraensis
MRLPGQKTKIIATLGPASLNEKTITAMVRAGMSVARINFAHGDLKQHEKSIKLVRKVSERLNRPVAILGDLPGVKIRVGEIEGGSVTLRRWQTVTLTTRDVIGNEAVIPVEFKDFPRLVSKGDVIYLSDGFIALRVEDVRDQDVICKVLVGGTLFSRKGINIPKARLAIEAITEKDLEFLEFSLEHGVDAVGISFVGSAYDVLKARRFVEERNGKLFLIAKIERPDAVRNFDEILRAADGVMVARGDLGVEMPIEKLPILQKKLIQKANCAGKPVITATQMLESMTHEKLPTRAEVTDVANAILDGTDAVMLSEETAVGKYPVETVKMMARIAKTTEAYRDSKWAERTVEWKMSELRGTRPTKGTIKDAITRSIIEALNSIDIKYILTPTRMGQTARLIARFKPKQWVLAFVTDEWVKNTLMFSYGVYPFLVEDTSEEEILRVITGLGLVDEGDTVLLTKGTPIGKTAGTNTIRIFNV

SEQ ID NO: 7462 - DNA, 1503 bp, Streptococcus pyogenes
  CDS (1)..(1503)
atgaataaacgcgtaaaaatcgttgcaacacttggtcctgcggttgaaatccgtggtggtaaaaaatacggagaagatggctactgggctggtcaacttgatgttgaagaatcagcaaaaaaaatcgctgaattaattgaagctggtgcgaatgttttccgtttcaatttctcacatggtgaccacaaagaacaaggtgaccgtatggcaactgttcgccttgcagaagaaattgctcgtcaaaaagttggtttccttttggatactaaaggtcctgaaatgcgtacggaattgtttgcagatgatgctaaagaattcagctatgtcactggagaaaaaatccgtgtagcgactacacaaggtattcaatcaactcgcgatgttattgctttgaacgttgctggtagccttgacatctacgatgaagtagaagtaggtcatactattcttatcgatgatggtaaactcggtttgaaagtgatcgacaaagatatcgcaacacgtcaatttatcgttgaagtagaaaacgatggtattattgctaaacaaaaaggtgttaatatccctaacactaaaattcctttcccagcacttgcggaacgcgacaatgctgatatccgttttggtcttgaacaaggacttaactttattgcaatctcatttgttcgtacagccaaagacgttgaggaagttcgtgaaatctgtcgcgaaactggtaacgatcatgtgcaattatttgctaagattgaaaaccaacaaggtatcgataatcttgatgaaatcatcgaagctgctgatggtatcatgattgcacgtggcgacatgggtatcgaagtaccatttgaaatggttccagttttccaaaaaatgattatcactaaagtgaatgcagctggtaaagcagttatcacagcaacaaacatgcttgaaacaatgactgaaaaaccacgtgcgacacgttctgaagtatctgacgtcttcaatgctgttatcgatggtactgatgcaacaatgctttcaggagagtcagctaacggtaaatacccggttgaatctgttcgtacaatggcgactattgatcgtaatgcacaaactcttcttaacgaatatggtcgtttagattcatctgccttcccacgtaccaataaaacagatgttattgcttcagctgttaaagatgccactcattcaatggacatcaaacttgttgtgactattactgagacaggtaatacagctcgtgcgatttctaaattccgtccagatgcggatatcttagctgtaacatttgatgaaaaagtacaacgtgctttgatgattaactgggctgttattcctgttcttgctgaaaaacctgcatctactgatgacatgtttgaagtagcagagcgtgttgctgtggaggcaggcttagttcaatctggggataatattgttattgttgctggtgttccagttggtactggtggaacgaatactatgcgtgttcgtacagtaaaataa

SEQ ID NO: 7463 - protein, 500 aa, Streptococcus pyogenes
MNKRVKIVATLGPAVEIRGGKKYGEDGYWAGQLDVEESAKKIAELIEAGANVFRFNFSHGDHKEQGDRMATVRLAEEIARQKVGFLLDTKGPEMRTELFADDAKEFSYVTGEKIRVATTQGIQSTRDVIALNVAGSLDIYDEVEVGHTILIDDGKLGLKVIDKDIATRQFIVEVENDGIIAKQKGVNIPNTKIPFPALAERDNADIRFGLEQGLNFIAISFVRTAKDVEEVREICRETGNDHVQLFAKIENQQGIDNLDEIIEAADGIMIARGDMGIEVPFEMVPVFQKMIITKVNAAGKAVITATNMLETMTEKPRATRSEVSDVFNAVIDGTDATMLSGESANGKYPVESVRTMATIDRNAQTLLNEYGRLDSSAFPRTNKTDVIASAVKDATHSMDIKLVVTITETGNTARAISKFRPDADILAVTFDEKVQRALMINWAVIPVLAEKPASTDDMFEVAERVAVEAGLVQSGDNIVIVAGVPVGTGGTNTMRVRTVK

SEQ ID NO: 7464 - DNA, 1476 bp, Vibrio vulnificus
  CDS (1)..(1476)
atgaagatgtgtaaaaccaaaatcgtcgctacgcttggcccagccagtcagacacgcgaaaaactcactcaactcatccaagcgggcgtgaatgtagtgcgcttaaacttttcgcacggcagcgctgaagagcacatcgcccgtgctgaaatggtacgtgaaatcgcgcaagatcttaacgtcagcgttggcgtactcgttgacctacaaggtccaaaaattcgtatcgcttgctttgagcaaggctcaattcagctcaaagcgggtgatcctttcattctcgacggcacgctcgaccgcgaagcgggcacgcaagaacgcgtcggtttggattatccagagctgatcgatgacctgcaagtcggcaatattctgctgcttgacgatggtcgtatccagctcgaagtaacggccgttgatacacaaactcgcctggtcaacaccattgcattgaacggtggcaaactctcaaaccgcaaaggaattaacttactgggtggtggtctttccgcccccgcgttaaccgacaaagacaagcaagacattcttaccgcggccgaactaaaagcagattttcttgccgtgtcgtttcctcgtaacgctgacgatatcgaatacgcgcgctcccttgctctacaagcaggctgtcacgcacacatcgtcgcgaaagtagaacgtgctgaagtggttgccagcgaagaagcgatggatggtgtgattcgtgcctccgacgtcattatggtggcacgtggcgatttgggcgtggaaattggtgacgcgcgcctgcctggcgtacaaaaagcgctgatcgctcgtgcgaagtacttaggcaaaccagttatcacggcaacccaaatgatggaatcgatgatcgagaacccattgccaacacgcgcggaagtgttggacgttgccaacgcggtactcgatggtaccgacgcggtcatgctctctgctgaatcagcggcggggttgtatccggttgaagcggtagaagccatggttcgaattgcacaaggggtcgaacacgaaaccagttgtgcacaaggctgttgggataagctgcaccacctgtgtaatgacgcgggcaagagctttgctctctcctcgatgatctcggcaacaaaagtacacaaagatcttggagtcgctatcgtgactcaacatggtgaaacaccactgttgatgtcgcgttgccaaagccaagcaaccatttgggcggtctcggacaaacctgagttgctgcgtaagctggcgattctgcgcggcgtaaccccggtttatctacccactttggacaaacgcggtgacattgcacatcagctcgtcagcctactgggtgccgatgctaaacagaaacaaatctcatccatcatgatgacccaattagaatccgttgaaggcgtgggcgatatgaatgtctgccgcttactaaacctgaacgaaacacccataacaaccgccattgcggcataa

SEQ ID NO: 7465 - protein, 491 aa, Vibrio vulnificus
MKMCKTKIVATLGPASQTREKLTQLIQAGVNVVRLNFSHGSAEEHIARAEMVREIAQDLNVSVGVLVDLQGPKIRIACFEQGSIQLKAGDPFILDGTLDREAGTQERVGLDYPELIDDLQVGNILLLDDGRIQLEVTAVDTQTRLVNTIALNGGKLSNRKGINLLGGGLSAPALTDKDKQDILTAAELKADFLAVSFPRNADDIEYARSLALQAGCHAHIVAKVERAEVVASEEAMDGVIRASDVIMVARGDLGVEIGDARLPGVQKALIARAKYLGKPVITATQMMESMIENPLPTRAEVLDVANAVLDGTDAVMLSAESAAGLYPVEAVEAMVRIAQGVEHETSCAQGCWDKLHHLCNDAGKSFALSSMISATKVHKDLGVAIVTQHGETPLLMSRCQSQATIWAVSDKPELLRKLAILRGVTPVYLPTLDKRGDIAHQLVSLLGADAKQKQISSIMMTQLESVEGVGDMNVCRLLNLNETPITTAIAA

SEQ ID NO: 7466 - DNA, 1449 bp, Vibrio vulnificus
  CDS (1)..(1449)
atgactcagccattaagaagaacaaaaatcgtgaccactttaggtccttcaactgacaaagataatgtactagaagaaattattcgagccggcgcgaatgtggtcaggatgaatttttctcacggcagcgcagaggatcataaaactcgcgcagaaaaagtgcgtaatattgccgccagacttggcagacaagtggctattttaggtgatttacaaggcccgaagatccgagtatcaacctttaaagaagggaaaattttcctttcagtgggtgacctcttcactttagacagtgacttgcccaaaggcgaaggcgatcaaaaatcagtgggattagactataaagcactgcctcaggatgtgggaccagaagatattctgctgcttgatgatggacgtgtacaactgcaagtgctgacggtcgatggcaacaaggtgaacactcgtgtgatagtgggcggaccgctgtcaaacaataaaggtatcaataaaaaagggggcggactctctgctgacgctctaacggaaaaagacaaacaagacatcttgctcgccgccgagatcaaagtcgattatctcgcgatctcctttccacgtaatggtgccgacatggactatgctcgtcgcttggccagagatgccggcttggaagccaaacttgttgccaaagttgaacgagcagaaaccgttcgaaacgatgaaaacatcgacgatattatcatggcttccgatgtcattatggttgctcgtggcgatctaggggtagaaatcggcgatccggaattgatcggtgtacagaaaaaactcatcaaacgagccaaagaactcaatcgtgtcgtcatcacggcaacacaaatgatggaatcgatgattgaaaatccaatgcccactcgagcagaagtcatggacgtagccaacgcggtgctggatggcaccgatgccgtgatgctttcaggggaaaccgccgctggtaaatacccagtcgaaacggtgcgctctatggcagaagtctgcattggggcagaaaaaacgtgggaaccgggcagccagaattatcgcatcgataaatcctttgtcaccgccgaagaaaccattgcaatgtcgacaatctacgccgcaaatcatatggaaggcgtcaaagcgatggtgacgttgactgaatcgggaagaaccgcattaatgacgtcaagattgaactcaacactgcccatttttgcgctttcgcctaatgagcgaacccttaatcgctgctctctctatcgtggcgtcactcccgtattttttgataccaaagtagaaactggatttgatgtcgcaatggccgcattgagcacgcttagaaagaaaaaactgctcgattttggggatttagtgatcatcacacagggggacatcatggatgttgaaggctcgactaactgcatgagaatcctgcctgtttttgactaa

SEQ ID NO: 7467 - protein, 482 aa, Vibrio vulnificus
MTQPLRRTKIVTTLGPSTDKDNVLEEIIRAGANVVRMNFSHGSAEDHKTRAEKVRNIAARLGRQVAILGDLQGPKIRVSTFKEGKIFLSVGDLFTLDSDLPKGEGDQKSVGLDYKALPQDVGPEDILLLDDGRVQLQVLTVDGNKVNTRVIVGGPLSNNKGINKKGGGLSADALTEKDKQDILLAAEIKVDYLAISFPRNGADMDYARRLARDAGLEAKLVAKVERAETVRNDENIDDIIMASDVIMVARGDLGVEIGDPELIGVQKKLIKRAKELNRVVITATQMMESMIENPMPTRAEVMDVANAVLDGTDAVMLSGETAAGKYPVETVRSMAEVCIGAEKTWEPGSQNYRIDKSFVTAEETIAMSTIYAANHMEGVKAMVTLTESGRTALMTSRLNSTLPIFALSPNERTLNRCSLYRGVTPVFFDTKVETGFDVAMAALSTLRKKKLLDFGDLVIITQGDIMDVEGSTNCMRILPVFD

SEQ ID NO: 7468 - DNA, 1410 bp, Photorhabdus luminescens
  CDS (1)..(1410)
atgaaaaaaaccaaaattgtttgtactatcggaccaaaaacagaatccgaagaaaaactggccgaactgttgaatgccggcatgaatgttatgcgcctcaacttttcacacggagactatgaagagcacggccagcgtattcaaaatatccattcagttatgactaagacaggtaaacaagccgctattttgctggatactaaaggccctgaaattcgaactatgaagctggaaggcggtaacgatgtctctctaaccgcaggtcagaccttcacttttaccactgacacttccgttatcggtaataaagaccgtgttgctgtcacttaccgcggtttccccgcggatctggctcccggtaataccgtgctagttgatgacggcttgatcggcatgacagttaaagaagtcactaagtcagaggttatttgccaagttttgaataacggtgatttgggggaaaataaaggtgttaatctgccgggtatttccatcagcctgcctgccctggctgaaaaagataagcaagatttgatctttggttgccaacaaggtgttgatttcgtcgccgcttcttttatccgcaagcgctccgatgttctggaaatccgtgaacatctgaaagcgcacggcggtgaaaacattcaaatcatctctaagattgaaaatcaggaaggtctgaacaattttgatgaaattctggaagcttctgacgggatcatggttgctcgtggtgatcttggcgttgaaattccggttgaagaagtgatcttcgcccagaagatgatgattcaaaaatgtaatatcgctcgcaaagttgttatcactgcaactcaaatgctcgattctatgattaaaaacccgcgccctacccgtgcggaagccggtgacgtcgctaacgctattttggatggtactgatgcagttatgctttctggcgaaagtgcaaaaggcaaatatccaatagaagcagtgactatcatggcaacgatttgtgaacgtacagaccgcgttatgccaagccgtatcgaagccgtccattgccgtaacctgcgcgtgaccgaagcggtgtgtcgtggtgccgttgaaacagcagaaaaactggaagcccctctgattgtggtcgcaacctatggcggtaaatctgccaaatccattcgtaagtatttccctgacgcgcccattctggcattaacgactaatgaagtgactgcccgccaattactgcttgttaagggtgtttttacccaaattgttaaagaaatcgcctctaccgacgatttctaccgcattggtaaagaagcggcgctagcaagtggcctagcgaagaaaggtgaaatcgtggttatggtatctggtgccctggttccaagcggcacaaccaacacgtcgtctgttcacgtcctttaa

SEQ ID NO: 7469 - protein, 469 aa, Photorhabdus luminescens
MKKTKIVCTIGPKTESEEKLAELLNAGMNVMRLNFSHGDYEEHGQRIQNIHSVMTKTGKQAAILLDTKGPEIRTMKLEGGNDVSLTAGQTFTFTTDTSVIGNKDRVAVTYRGFPADLAPGNTVLVDDGLIGMTVKEVTKSEVICQVLNNGDLGENKGVNLPGISISLPALAEKDKQDLIFGCQQGVDFVAASFIRKRSDVLEIREHLKAHGGENIQIISKIENQEGLNNFDEILEASDGIMVARGDLGVEIPVEEVIFAQKMMIQKCNIARKVVITATQMLDSMIKNPRPTRAEAGDVANAILDGTDAVMLSGESAKGKYPIEAVTIMATICERTDRVMPSRIEAVHCRNLRVTEAVCRGAVETAEKLEAPLIVVATYGGKSAKSIRKYFPDAPILALTTNEVTARQLLLVKGVFTQIVKEIASTDDFYRIGKEAALASGLAKKGEIVVMVSGALVPSGTTNTSSVHVL

SEQ ID NO: 7470 - DNA, 1443 bp, Photorhabdus luminescens
  CDS (1)..(1443)
atgtccagacggctcagaagaactaagattgttactacacttggtccggctaccgaccgcgataataatcttgaaaagattattgctgcgggtgcaaacgtagtccgccttaacttttcccacggtaccgccgaagatcatctccagcgagccagcaaagtccgcgagattgcagcccgcctggggtgccatgtcgctattcttggcgatcttcaaggacctaaaatccgcgtatcaacgtttaaagagggcaaaattttcctgaatatcggagataaatttctccttgatgccaatcttggtaaaggcgaaggcgataaggagaaagtcggtatcgattacaaaggactacccacggatgttgtaccgggcgatattttgttgctggatgacggacgtgttcaactcaaagtattagacgttcagggaatgaaagtcttcacggaagtcactgtaggcggcccgctatctaacaataaaggcattaacaaactgggtggtggattatccgcagaagccctaactgaaaaagataaagaagatattattacggcggccagaatcggcgttgattaccttgccgtctctttccctcgcaccggtgaagatcttaactatgcccgccgtctggcacgagacgcaggctgtgaaacgcagatcgtggcaaaagttgaacgcgcagaagccgttagcagtgataaaaccatcgatgaaatcattctggcttctgatgtggtcatggttgcccgtggtgaccttggcgtagaaatcggcgatccagagttagttggcgttcagaaaaaattaattcgccgtgcccgccagctaaatcgtgtagttattaccgcgacccagatgatggaatctatgatcaccaatccaatgcccacccgtgcagaagtgatggatgtggcaaatgccgttctcgacggtactgacgccgtaatgctctccgctgaaaccgcagcgggccaataccctgccgaaaccgttgccgcaatggcacgagtctgtctcggagcagaaaaaatgcctggcctcaacgtatcaaaacatcggctagacacaatttttgacagtattgaagaagccattgcgatgtctaccatgtacgcggcaaaccacttaaatggagttaaagccattattgccatgaccgaatcaggccgcaccactcgcatcatgtctcgcattagttctggtctcccgatattctctatgtcccgtcatgagaaaaccttaaaccaaacggcactttaccgtggcgttacaccggtttattgcagtagtcatactgacggcattacggcggccaatgaagcagttaatcgcctgcgtgataaaggttatctagtttccggtgatcttgttctggttactcagggtgatcagatggggacgattggcagtactaacacctgccgtattcttgaagtggaataa

SEQ ID NO: 7471 - protein, 480 aa, Photorhabdus luminescens
MSRRLRRTKIVTTLGPATDRDNNLEKIIAAGANVVRLNFSHGTAEDHLQRASKVREIAARLGCHVAILGDLQGPKIRVSTFKEGKIFLNIGDKFLLDANLGKGEGDKEKVGIDYKGLPTDVVPGDILLLDDGRVQLKVLDVQGMKVFTEVTVGGPLSNNKGINKLGGGLSAEALTEKDKEDIITAARIGVDYLAVSFPRTGEDLNYARRLARDAGCETQIVAKVERAEAVSSDKTIDEIILASDVVMVARGDLGVEIGDPELVGVQKKLIRRARQLNRVVITATQMMESMITNPMPTRAEVMDVANAVLDGTDAVMLSAETAAGQYPAETVAAMARVCLGAEKMPGLNVSKHRLDTIFDSIEEAIAMSTMYAANHLNGVKAIIAMTESGRTTRIMSRISSGLPIFSMSRHEKTLNQTALYRGVTPVYCSSHTDGITAANEAVNRLRDKGYLVSGDLVLVTQGDQMGTIGSTNTCRILEVE

SEQ ID NO: 7472 - DNA, 1527 bp, Mycoplasma gallisepticum
  CDS (1)..(1527)
atgaataagaaacataaagatttcgatttaaactttttaaaaaagacaaagatagtagccacttgtggtccttcaattacatataaactatttagtttagctgatcttgaagatccatcaaaacaagagatcgtgcaaaaagctaaggaaaatttaagacaactgttcttaaatggtgtgagcacagtccgtttaaacttttctcacggaaatcaagaagagcaagctgtaagaatgatcttagctagaagtgtggctaatgaattaaacttaccaatctcaattatgcttgacactaacggtcctgagatcagattaaatcagatctcagaaacagacaataccgttaaaaaagatcagatcgttaagatctatactaatcgcgagatcgttggtaatgccactgagttttctgtctcagattcatctaagaaatacaatatggctaaagatgtttctttaggttcgatcgttttagttgatgatgggaaattaaccttacaagtaattgaggtggctgaagacttttcatacattagagcaatcgctaaaaatgaacataagatcatcaccaaaaagcgtatcaacttaccaaatgctaaatattcgatcccattcttatcacaaaaagattacaacgatattacctttggtctaaagaataaagttgattatattgcagcatcatttgttaatagtgctgatgatatctatgagattaaagcgatcttaaaacaatatggaatggaacacgttcaagtgatcgctaaggttgaaacacgtcacgcaatcaaaaatcttgatgagattattgatgttagtgatggtgtgatggtggctagaggtgatcttggtttagagatcccttattatgaagtaccttactgggaaaaatacattattaaagcttgccgttttaagaataaacgtgtgatcgtagccacccaaatgttagattcactagaaaaaaacgttcaaccaactcgtgctgaagtaactgatgtcttctttgctgttgaacgtggttgtgatgcaacgatgttatcaggtgaaacagcgaatgggatgtatccgattattgctgttgaaacaatgaaaaagatcaacaagcaatcagaactattgtttgactacaaacgtgcaattactcactatttcccaatgacagatgtatgtaagaccgcttttggtgaaagagtcttagatatagctaaaaagatctgtccaaatcgtgagattgaaaacgaagatttctcaacccacttcttagtgcattttaccaacaaccgtgaagagatctttgctttatctaatgctaagttggctgctagtgtaattattgttactgatgatcaaaacgtatatacaggtcatggtgttgattatggggtgttcacttataaggtggatgatcttacaaaagcattaagtaattaccaactagttgctaagaaagcaatcttacactattcagaactatttgaaattaaaccagataataagactaactttgtattactaaaataa

SEQ ID NO: 7473 - protein, 508 aa, Mycoplasma gallisepticum
MNKKHKDFDLNFLKKTKIVATCGPSITYKLFSLADLEDPSKQEIVQKAKENLRQLFLNGVSTVRLNFSHGNQEEQAVRMILARSVANELNLPISIMLDTNGPEIRLNQISETDNTVKKDQIVKIYTNREIVGNATEFSVSDSSKKYNMAKDVSLGSIVLVDDGKLTLQVIEVAEDFSYIRAIAKNEHKIITKKRINLPNAKYSIPFLSQKDYNDITFGLKNKVDYIAASFVNSADDIYEIKAILKQYGMEHVQVIAKVETRHAIKNLDEIIDVSDGVMVARGDLGLEIPYYEVPYWEKYIIKACRFKNKRVIVATQMLDSLEKNVQPTRAEVTDVFFAVERGCDATMLSGETANGMYPIIAVETMKKINKQSELLFDYKRAITHYFPMTDVCKTAFGERVLDIAKKICPNREIENEDFSTHFLVHFTNNREEIFALSNAKLAASVIIVTDDQNVYTGHGVDYGVFTYKVDDLTKALSNYQLVAKKAILHYSELFEIKPDNKTNFVLLK

SEQ ID NO: 7474 - DNA, 1818 bp, Gloeobacter violaceus
  CDS (1)..(1818)
atgcgcgtgggtgccgatgtgttcgttctagatgccaatgcccaacagacaactgccgcgccgagcgagcgggcgcgttttcgccgcaccaagattgtcgccaccatcggtcccgccgtcgacgacccgcaggccctgcgcaagctcatccaggccggggcgacgaccctcagactcaatttttcccacggcaaccacgaggagcaccgccgccgcatcggcctcatccgccagatttcctttgaactcaatcagccggtggccatcctgcaggatctgcaaggtcccaagatccggttgggcaagttcgccgacggaccaatcgtcctcaagcacggcgacccgtttattctgaccagccacgacgtgcccgccaaccagcacatcagtccgatcacctactcgcgacttatccaggaagtgcccaccggcgccacgatcttgctggatgacgggcgggtggaactggtagtcgaacgggtggacctcgaagcccaatacctgcactgccggacggtgggggggggcaagctctccaacagcaaaggcgtcaactttccgggtgtcaccctctcggtgccggcgatgaccgaaaaggaccgcgaggatttgctcttcggtctcaatcagggcgtcgattgggtggccctcagtttcgtgcgcaccccgagcgatttgctcgaactgaaggaactgattgcccaatcgggcaagcgggtgccggtgatcgccaagatcgaaaaattcgaggccttcgagaacctcgatgcggtgattgccgcctgcgacgggctgatggtggcccgtggcgatctgggcgtcgagatgcccgccgaggaagtgcccttgctccaaaagcggctgatcgcttcggccaatcgggccggcaagcctgtgatcaccgccacccagatgctcgattcgatggtgagcaacagccgcccgacccgcgccgaagtttccgatgtggccaacgccatcctggacggcaccgacgcggtgatgctctccaacgagaccgccgtgggcgagcacccgatcttggcggtcgagacgatggcgcgcatcgccgatcgcatcgagcgctcgatgccccagcgcacctgggtagacacgggccgctcgatcccgaacgccatctcccaggcagtgggaagcgtcgcccagcaattgggtgcccaggcgattctcaccctcaccaagtccggcgccaccgcccgcaacgtcagcaagtaccggccgagggtgccgattatcgcgattaccccgagcgtgtcggtggcgcgcgaactgcagatggtctggggggtctacccgctgatggtcctggatctgccttcgacccgccagacctttcaagcggcgatcagcgccgcccaggacgaaaacctcgtcctggaaggcgacctggtggtgatgaccgccggcaccatccaggggctctccggttcgacggacctgatcaaagtcgaggtggtgacggcgattctcggccggggattgggcctgggtcagaacgccgtgagtggacgcgcccgcatcgtccgccacagcgacgaagcggcggccttgagtcccggggacatcctgattgccccgcgcaccgacgccaattttatcgaagcgatcaagctcgcgggcggcatcgtcaccgaggagagcggcctcacctcccacgcagcgattatcgggctgcgcctcggactgccggtactgctcggggtgaaagactgcaccacccgcatcccggacggggtggtgctcaccctcgatccgcaaaaaggggtcatcttctccggggcggcctccgccgtctag

SEQ ID NO: 7475 - protein, 605 aa, Gloeobacter violaceus
MRVGADVFVLDANAQQTTAAPSERARFRRTKIVATIGPAVDDPQALRKLIQAGATTLRLNFSHGNHEEHRRRIGLIRQISFELNQPVAILQDLQGPKIRLGKFADGPIVLKHGDPFILTSHDVPANQHISPITYSRLIQEVPTGATILLDDGRVELVVERVDLEAQYLHCRTVGGGKLSNSKGVNFPGVTLSVPAMTEKDREDLLFGLNQGVDWVALSFVRTPSDLLELKELIAQSGKRVPVIAKIEKFEAFENLDAVIAACDGLMVARGDLGVEMPAEEVPLLQKRLIASANRAGKPVITATQMLDSMVSNSRPTRAEVSDVANAILDGTDAVMLSNETAVGEHPILAVETMARIADRIERSMPQRTWVDTGRSIPNAISQAVGSVAQQLGAQAILTLTKSGATARNVSKYRPRVPIIAITPSVSVARELQMVWGVYPLMVLDLPSTRQTFQAAISAAQDENLVLEGDLVVMTAGTIQGLSGSTDLIKVEVVTAILGRGLGLGQNAVSGRARIVRHSDEAAALSPGDILIAPRTDANFIEAIKLAGGIVTEESGLTSHAAIIGLRLGLPVLLGVKDCTTRIPDGVVLTLDPQKGVIFSGAASAV

SEQ ID NO: 7476 - DNA, 1422 bp, Gloeobacter violaceus
  CDS (1)..(1422)
atgcagcctttagaccgtcgaacgaaagtcgtcgcgacgatcggtcctgcgagcagttcgccggaagtgcttcggcagctggtgaaggcaggaatcaacgtcgcgcgcttgaatttttcccacggcagctacgaagaccacgcgcgcatggtcaagctgctgcgggaggtctccgaggaactcgacaccccgattacgctattgcaggatttgcaggggccgaagatccgcgtgggccagatgcccgagggcgggctggctttaggggagggcgacgagctgacgctgttgccggtggcggaatttgcgggcgaacccggcacggtatccatcgactacccgtatcttgtggaggaggcgacgccgggtacccaggtgctcctggacgacggcttgctcgaatttgccgtggttgaggtgaagggcaacgccgtgcgctgccgggtggtgcgcgggggggtgctcaaaagccgcaagggggtcaacctgcccagtctggatttgcgcctgccctcgatgaccgaaaaggacaagcaagatctcgaatttggactggagcagggggtcgattgggtgtctttgagcttcgtgcgccggggcgaggacattcgcgtgctcaaaggactgctcgctgaacacggggccgccgatgtgccggtgatcgccaagattgagaaaccccaggcgatcgccaatctggaggagattctcgatgaagtgcagggaatcatggtggccaggggcgatctgggcgttgagatgagcccggagaaggtgccgctgctgcaaaagcggatcattcggctttgtaaccggcggggcattccggtgatcaccgccacccagatgctcgacagcatgatccgcaatccccggccgacccgcgctgaggcgagtgatgtcgccaacgccatcctggacggcagcgacgcggtgatgctctcgggcgaatcggcggtgggcgattttccggtgcagtcggtggagatgctcgtgcgcatcgccaaagaagtcgagcgggagtttaccttcgacaacaatccgcccgccaaatccgatgaaatccacgccctgtgcgaatcgctgggcaccatcgacaagatcttggccctgcactgtattgccacttttactaccaccggcttcagcgcttcgatcgcggccgcggagcggccgaaggcgccggtggtcgccttcacccccgacttgaaggtgtatcaccggttgaatctggtctggggcgtgaagcccttgctgttggagcacccggcggcggaactcgaaaaactgatcgagcagatggaaagctgccttgtcgaacgcaacctcgccgcccccggcgaccggatgctggtgctgggaggtagccccgtccagagggcgggcggcacgaattttctgaagatccatacgctgcactaa
